United States Patent Application Publication US 2006/0150283 A1 - sequence listing, part 7

SEQ ID NO: 23512 - DNA, 1154 bp, Arabidopsis thaliana
  misc_feature (1)..(1154): Ceres Seq. ID no. 12321570
  misc_feature (1)..(1154): Ortholog of  Ceres SEQ ID NO 15174669 as cited in SEQ ID NO 59656
aaaaaaggaagtcaaaacttcagagagaaagtggatgggggacacgaaggtggagacaatctcgaggttagctcaatggaggattgaaaattttggaccttgttctttcaaaaagtccgatcctttcaaagtcggaatttggaattggcatctgtcaatagagaggaatcgttatctatcagtgaggctattcccagaactttctcgagtatctaaagagcaacctcctgttgccaaatttgttcttcgtgtctccaacgttggccccaatcgtagattctacatctctcctgtttatgagaagctgctgcgtacaactgatgattgtgtgtggcatgttgactccagtttccacggtcgattcaccattgatgttgagtttcttgatctcaaaatctgccctgtgaatggtggtgaagcttctcctgtttggccaaccgatgcaacaatgcaatcaatctctactcaaaccactctcaaatgcttatcccggatgctagaggaaagcatactaaccgatgtaatcatccacacagccgatggaacactctctgctcacaaagctatcctctcagctagctcaactgttttcaaaagcatgttccaccacgacctcatggaaaaggaatcatccacaatccacatagacgacatgtcgagagaatcttgcatggctctactaagttacctctacggaaacataacccaagaagagttctggaaacacaggctcgccctcctcggcgctgcaaacaagtacgacataacggatttgaaagcagcctgcgaggagagcctaatggaagatataaactcgagtaatgtgctcgagaggctacaagaagcttggctttatcagctggagaaactgaagaaaggatgtttgatgtatttgtttgatttcggaaagatttatgatgtcagagaagaaatcagcagtttcttcaggcaagctgatcgagaactgatgctggagatgtttcaagaggttttgtctgtgtggaaaccggtctaatatacacttacacacatactttgaacatttcagcttgatggtgttttgtttatagtcttcttgttctcttctgtgtgtgtaactaacaacaactctggattttgttgtatcactctgtctaatgtatagtattgagtgg

SEQ ID NO: 23513 - protein, 337 aa, Arabidopsis thaliana
  peptide (1)..(337): Ceres Seq. ID no. 12321571
KKEVKTSERKWMGDTKVETISRLAQWRIENFGPCSFKKSDPFKVGIWNWHLSIERNRYLSVRLFPELSRVSKEQPPVAKFVLRVSNVGPNRRFYISPVYEKLLRTTDDCVWHVDSSFHGRFTIDVEFLDLKICPVNGGEASPVWPTDATMQSISTQTTLKCLSRMLEESILTDVIIHTADGTLSAHKAILSASSTVFKSMFHHDLMEKESSTIHIDDMSRESCMALLSYLYGNITQEEFWKHRLALLGAANKYDITDLKAACEESLMEDINSSNVLERLQEAWLYQLEKLKKGCLMYLFDFGKIYDVREEISSFFRQADRELMLEMFQEVLSVWKPV

SEQ ID NO: 23514 - protein, 326 aa, Arabidopsis thaliana
  peptide (1)..(326): Ceres Seq. ID no. 12321572
MGDTKVETISRLAQWRIENFGPCSFKKSDPFKVGIWNWHLSIERNRYLSVRLFPELSRVSKEQPPVAKFVLRVSNVGPNRRFYISPVYEKLLRTTDDCVWHVDSSFHGRFTIDVEFLDLKICPVNGGEASPVWPTDATMQSISTQTTLKCLSRMLEESILTDVIIHTADGTLSAHKAILSASSTVFKSMFHHDLMEKESSTIHIDDMSRESCMALLSYLYGNITQEEFWKHRLALLGAANKYDITDLKAACEESLMEDINSSNVLERLQEAWLYQLEKLKKGCLMYLFDFGKIYDVREEISSFFRQADRELMLEMFQEVLSVWKPV

SEQ ID NO: 23515 - protein, 188 aa, Arabidopsis thaliana
  peptide (1)..(188): Ceres Seq. ID no. 12321573
MQSISTQTTLKCLSRMLEESILTDVIIHTADGTLSAHKAILSASSTVFKSMFHHDLMEKESSTIHIDDMSRESCMALLSYLYGNITQEEFWKHRLALLGAANKYDITDLKAACEESLMEDINSSNVLERLQEAWLYQLEKLKKGCLMYLFDFGKIYDVREEISSFFRQADRELMLEMFQEVLSVWKPV

SEQ ID NO: 23516 - DNA, 1272 bp, Arabidopsis thaliana
  misc_feature (1)..(1272): Ceres Seq. ID no. 13487849
  misc_feature (1)..(1272): Ortholog of  Ceres SEQ ID NO 15171556 as cited in SEQ ID NO 59687
  misc_feature (1)..(1272): Ortholog of  Ceres SEQ ID NO 15177935 as cited in SEQ ID NO 60258
  misc_feature (1)..(1272): Ortholog of  Ceres SEQ ID NO 13659033 as cited in SEQ ID NO 66372
  misc_feature (1)..(1272): Ortholog of  Ceres SEQ ID NO 12625899 as cited in SEQ ID NO 69079
  misc_feature (1)..(1272): Ortholog of  Ceres SEQ ID NO 15180051 as cited in SEQ ID NO 0
cttggcgaccttaaatacaaaatggtactctgtttccaactcaacttagcctctctgtctctcatactcttctcttcattccctggacttttagcacaatctcaacaacatttcttgggacaaaacaacacaagcttgttgagtggagggagatgcaatttggctagaggcaaatgggtctatgattcttcatatcctctctatagtgcttttagttgtcccttcatcgattccgaattcaactgccagaaagcgggtcgtccggacactaactatcaacacttccgttggcagcctttctcctgtcctctccctagattcgatggggcgaattttatgaggagaatgagagggaagaagataatgatggtaggtgactcactgagtcttaacatgttcgaatcgttggcctgcttgcttcatgcttctctccctaatgctaagtactctcttcgtcgaagccaacctctcacttccctcactttccaggattatggagtgacgataaatttgtatagaacacagtttctagtagatgtggttcaagaaaaggcaggacgagtgcttgtgcttgactccatcaaacaagccgatgcttggcttggcatggatgttcttatcttcaactcgtggcactggtggactcacacctccggacttcagccctgggattatatgagggaaggaaaccaattgtacaaagacatgaacaggcttgtggcttattacaaaggacttaacacatgggctcgttggattaacaataacattgtcccttcacgtactcaagtcttctttcaaggtgtttctcctgtccactatgacggaagagagtggaacgaaccattgaagtcgtgcaatggtcaaactcagccgttcatgggacaaagatatccaggaggattgcccttaggttgggttgtggttaacaaagtgttgagccgaattagaaaaccggtccatcttctcgatctcactactctctcggagtatcgcaaagacgcacatccaagtctctacaatggtatctcaaaggatctagactgtagccattggtgcctccctggactccctgatacttggaacttacttctctactcatctcttacttcctagtccttgttttacatatttgtttgtttctaccattttataaatagtttgtgatgatcctgtgtgattgtgattgatatttttccttcgttaatttaatcttaaatgtaattaacattgttactagtttacttgcagcatcgatcagcttaaattctc

SEQ ID NO: 23517 - protein, 371 aa, Arabidopsis thaliana
  peptide (1)..(371): Ceres Seq. ID no. 13487850
LGDLKYKMVLCFQLNLASLSLILFSSFPGLLAQSQQHFLGQNNTSLLSGGRCNLARGKWVYDSSYPLYSAFSCPFIDSEFNCQKAGRPDTNYQHFRWQPFSCPLPRFDGANFMRRMRGKKIMMVGDSLSLNMFESLACLLHASLPNAKYSLRRSQPLTSLTFQDYGVTINLYRTQFLVDVVQEKAGRVLVLDSIKQADAWLGMDVLIFNSWHWWTHTSGLQPWDYMREGNQLYKDMNRLVAYYKGLNTWARWINNNIVPSRTQVFFQGVSPVHYDGREWNEPLKSCNGQTQPFMGQRYPGGLPLGWVVVNKVLSRIRKPVHLLDLTTLSEYRKDAHPSLYNGISKDLDCSHWCLPGLPDTWNLLLYSSLTS

SEQ ID NO: 23518 - protein, 364 aa, Arabidopsis thaliana
  peptide (1)..(364): Ceres Seq. ID no. 13487851
MVLCFQLNLASLSLILFSSFPGLLAQSQQHFLGQNNTSLLSGGRCNLARGKWVYDSSYPLYSAFSCPFIDSEFNCQKAGRPDTNYQHFRWQPFSCPLPRFDGANFMRRMRGKKIMMVGDSLSLNMFESLACLLHASLPNAKYSLRRSQPLTSLTFQDYGVTINLYRTQFLVDVVQEKAGRVLVLDSIKQADAWLGMDVLIFNSWHWWTHTSGLQPWDYMREGNQLYKDMNRLVAYYKGLNTWARWINNNIVPSRTQVFFQGVSPVHYDGREWNEPLKSCNGQTQPFMGQRYPGGLPLGWVVVNKVLSRIRKPVHLLDLTTLSEYRKDAHPSLYNGISKDLDCSHWCLPGLPDTWNLLLYSSLTS

SEQ ID NO: 23519 - protein, 259 aa, Arabidopsis thaliana
  peptide (1)..(259): Ceres Seq. ID no. 13487852
MRRMRGKKIMMVGDSLSLNMFESLACLLHASLPNAKYSLRRSQPLTSLTFQDYGVTINLYRTQFLVDVVQEKAGRVLVLDSIKQADAWLGMDVLIFNSWHWWTHTSGLQPWDYMREGNQLYKDMNRLVAYYKGLNTWARWINNNIVPSRTQVFFQGVSPVHYDGREWNEPLKSCNGQTQPFMGQRYPGGLPLGWVVVNKVLSRIRKPVHLLDLTTLSEYRKDAHPSLYNGISKDLDCSHWCLPGLPDTWNLLLYSSLTS

SEQ ID NO: 23520 - DNA, 1050 bp, Arabidopsis thaliana
  misc_feature (1)..(1050): Ceres Seq. ID no. 12323038
  misc_feature (1)..(1050): Ortholog of  Ceres SEQ ID NO 13638658 as cited in SEQ ID NO 51921
  misc_feature (1)..(1050): Ortholog of  Ceres SEQ ID NO 14306522 as cited in SEQ ID NO 53365
  misc_feature (1)..(1050): Ortholog of  Ceres SEQ ID NO 15175175 as cited in SEQ ID NO 0
aggatacaaataataaatctatctgcctcttaaaagttccaaatttcaccacgtcactgctttgataatgcaggtcctcgtcgtctctcctccgctcatcgccgccgcatctctctctaaacctctcaattctctctctaaagccgcactctctttctccagagccaaacccatttgtcctttccctcaaacctctcgacgaccaatctccgtatacaaatccccaatgaacaaccttttcaacagactcggattcgggtctcgtcctcaagcccaagctgacccatcttccgccgcaatcgcccaaggacccgacgatgatgttccgtcttcaggtcagcaattcgcgcaatttggcgccggttgtttctggggagtggagctagcttaccagagagttcctggtgtgaccaagaccgaggttgggtatagccatggcatcgtgcacaatccgagttacgaggatgtctgtactggcactacgggacataacgaggttgttagagttcagtatgatcccaaagagtgtagctttgagagcttgcttgatgttttctggaatcgtcatgatccaaccaccttgaatcgtcagggtggggatgtgggaacgcagtatcgatcaggtatatactactacacagacgagcaagaccgcatagctcgtgaagctgttgagaaacagcagaagatattgaacaagaggattgtcacagagatacttcccgctacgaaattctacaaagcagaaaattaccaccagcaatacctggcaaaagggggtcgcatgggtttaagacaatcagctgagaaaggttgcaaggatccaatccgatgctatggctaagaaactaagtcagtcttccctcaagcacataaaaagaagtgagttgtctcatgaaaaatacaataatctgtagatcacatttgtttcttgtctttgttatgcaaccaatggttatgatgcatcctatgcttatatgaatcaaggctttgtccaaatcaatttcaatttgatactacagtactggtaatacaatttgggaagttctc

SEQ ID NO: 23521 - protein, 258 aa, Arabidopsis thaliana
  peptide (1)..(258): Ceres Seq. ID no. 12323039
MQVLVVSPPLIAAASLSKPLNSLSKAALSFSRAKPICPFPQTSRRPISVYKSPMNNLFNRLGFGSRPQAQADPSSAAIAQGPDDDVPSSGQQFAQFGAGCFWGVELAYQRVPGVTKTEVGYSHGIVHNPSYEDVCTGTTGHNEVVRVQYDPKECSFESLLDVFWNRHDPTTLNRQGGDVGTQYRSGIYYYTDEQDRIAREAVEKQQKILNKRIVTEILPATKFYKAENYHQQYLAKGGRMGLRQSAEKGCKDPIRCYG

SEQ ID NO: 23522 - protein, 205 aa, Arabidopsis thaliana
  peptide (1)..(205): Ceres Seq. ID no. 12323040
MNNLFNRLGFGSRPQAQADPSSAAIAQGPDDDVPSSGQQFAQFGAGCFWGVELAYQRVPGVTKTEVGYSHGIVHNPSYEDVCTGTTGHNEVVRVQYDPKECSFESLLDVFWNRHDPTTLNRQGGDVGTQYRSGIYYYTDEQDRIAREAVEKQQKILNKRIVTEILPATKFYKAENYHQQYLAKGGRMGLRQSAEKGCKDPIRCYG

SEQ ID NO: 23523 - DNA, 1489 bp, Arabidopsis thaliana
  misc_feature (1)..(1489): Ceres Seq. ID no. 12345016
  misc_feature (1)..(1489): Ortholog of  Ceres SEQ ID NO 14311136 as cited in SEQ ID NO 56694
gaaaacgaaaaccctcgggattcctctgcttctgtctcgtccgtcgtcgtcaatttctctgcatcagagattccggtgtccttcttcctttcactcgcgtataacctcttttccttgacgttgtctccgtgagctttctgtgctttgactgcaaccatgtcgactattatgcagaagatcaaagaaattgaagatgagatggctaaaacacagaagaataaagctacttctcatcatctgggtttgttaaaggccaagcttgctaagcttcggagggaccttcttgcaccgcctaccaaaggtggcggtggtggtgctggagaaggttttgatgtgactaaaagtggagattctagagttggactggtcggatttccttcggttggaaaatctacgctattaaacaagctgactgggacattttccgaggttgcttcttatgagttcacgactttgacatgcattcctggtgttatcacatatcgtggagctaaaatccagttattagatcttcctggtattattgagggtgctaaagatggaaaaggtagaggaagacaggttataagtacggctaggacatgcaactgcatcttaatagttcttgatgccataaaaccaattactcacaagcgtctcattgaaaaagagctcgaaggattcggaataaggttgaacaaggagccaccaaatttaacatttaggaaaaaagacaaaggtggtatcaatctaacttctacagtcgctgtcacacaccttgaccttgacaccgtcaaggcgatttgcggtgagtacaggatgcacaatgctgacatcaccctgcgctacgatgcaacctctgatgacctcattgatgtcatcgagggcagtcggatttatatgccctgtatctatgctgtcaacaagatcgattcaatcacacttgaggaacttgaaattttggacaaacttcctcattactgtcctgtcagtgcgcatctggagtggaatcttgatggacttctggacaagatatgggaatacttggatctaactcgaatctacacaaaaccaaaggcaatgaatccggattatgatgatcccgtaatcttatcatccaagaagagaacagtagaggacttctgcatccggattcacaaagacatgcttaaacaattcaagtacgctctggtttggggttcaagtgccaaacacaagccacaaagagttggaaaggaacacgagcttgaggacgaggatgttgttcagatcgttaaaaagatatgatttttgcagataatggagagcagtcaagagaccaaccaaagtagccataatgagatctcctataggaaggtcaggatttcttttggtttctcagctttatctttcttttgtaattgtattattatatccagacgaaatctgtgtctacacccttttttatgtcttattagatacttttgtcttcttccaataatactattaagcatgtgattgatgttgtcgg

SEQ ID NO: 23524 - protein, 369 aa, Arabidopsis thaliana
  peptide (1)..(369): Ceres Seq. ID no. 12345017
MSTIMQKIKEIEDEMAKTQKNKATSHHLGLLKAKLAKLRRDLLAPPTKGGGGGAGEGFDVTKSGDSRVGLVGFPSVGKSTLLNKLTGTFSEVASYEFTTLTCIPGVITYRGAKIQLLDLPGIIEGAKDGKGRGRQVISTARTCNCILIVLDAIKPITHKRLIEKELEGFGIRLNKEPPNLTFRKKDKGGINLTSTVAVTHLDLDTVKAICGEYRMHNADITLRYDATSDDLIDVIEGSRIYMPCIYAVNKIDSITLEELEILDKLPHYCPVSAHLEWNLDGLLDKIWEYLDLTRIYTKPKAMNPDYDDPVILSSKKRTVEDFCIRIHKDMLKQFKYALVWGSSAKHKPQRVGKEHELEDEDVVQIVKKI

SEQ ID NO: 23525 - protein, 365 aa, Arabidopsis thaliana
  peptide (1)..(365): Ceres Seq. ID no. 12345018
MQKIKEIEDEMAKTQKNKATSHHLGLLKAKLAKLRRDLLAPPTKGGGGGAGEGFDVTKSGDSRVGLVGFPSVGKSTLLNKLTGTFSEVASYEFTTLTCIPGVITYRGAKIQLLDLPGIIEGAKDGKGRGRQVISTARTCNCILIVLDAIKPITHKRLIEKELEGFGIRLNKEPPNLTFRKKDKGGINLTSTVAVTHLDLDTVKAICGEYRMHNADITLRYDATSDDLIDVIEGSRIYMPCIYAVNKIDSITLEELEILDKLPHYCPVSAHLEWNLDGLLDKIWEYLDLTRIYTKPKAMNPDYDDPVILSSKKRTVEDFCIRIHKDMLKQFKYALVWGSSAKHKPQRVGKEHELEDEDVVQIVKKI

SEQ ID NO: 23526 - protein, 355 aa, Arabidopsis thaliana
  peptide (1)..(355): Ceres Seq. ID no. 12345019
MAKTQKNKATSHHLGLLKAKLAKLRRDLLAPPTKGGGGGAGEGFDVTKSGDSRVGLVGFPSVGKSTLLNKLTGTFSEVASYEFTTLTCIPGVITYRGAKIQLLDLPGIIEGAKDGKGRGRQVISTARTCNCILIVLDAIKPITHKRLIEKELEGFGIRLNKEPPNLTFRKKDKGGINLTSTVAVTHLDLDTVKAICGEYRMHNADITLRYDATSDDLIDVIEGSRIYMPCIYAVNKIDSITLEELEILDKLPHYCPVSAHLEWNLDGLLDKIWEYLDLTRIYTKPKAMNPDYDDPVILSSKKRTVEDFCIRIHKDMLKQFKYALVWGSSAKHKPQRVGKEHELEDEDVVQIVKKI

SEQ ID NO: 23527 - DNA, 1304 bp, Arabidopsis thaliana
  misc_feature (1)..(1304): Ceres Seq. ID no. 13580633
  misc_feature (1)..(1304): Ortholog of  Ceres SEQ ID NO 13645078 as cited in SEQ ID NO 51158
aaacctaaatttctctactcaataatgtctcacagaaagtttgagcatccaagacatggttctttgggtttccttccaaggaaaagagctagccgacaccgtgggaaagtgaaggccttccctaaggatgatccaactaagccttgcagactcacctccttcttgggatacaaagctgggatgactcacattgtgagagatgttgaaaaacctggatcaaaactacacaagaaggaaacatgtgaagctgtgacgatcattgagacacctccaatggtggttgtaggtgtggttggttatgtaaagacacctcgtggtctgcggtctctatgcactgtgtgggctcagcatctgagcgaagaattgagaaggaggttctacaagaactgggccaagtcaaagaagaaggctttcactagatattctaagaaacatgaaactgaagaagggaaaaaagatattcaaagtcaattggagaagatgaagaagtactgctctgtcatcagagttcttgctcacactcagataaggaaaatgaaagggctgaagcagaagaaggcacatctgaatgagattcagatcaatggtggagatatagcaaagaaagttgactatgcctgcagtttatttgaaaaacaagtcccagttgatgccatcttccagaaagatgaaatgattgatatcattggtgtcaccaaaggaaaaggttatgaaggtgtggttacaagatggggagtgacccgacttccaagaaagactcatcgtggtcttcgcaaggttgcttgtatcggtgcttggcatccagctagagtctcctacacggtggctagagctggacaaaacggttaccatcaccgtactgaaatgaacaagaaggtataccgggttgggaaagttggccaggagactcactcagccatgaccgagtatgacagaaccgagaaggatatcacaccaatgggaggatttccccactatgggatagtgaaggaagattatttgatgatcaagggatgttgcgtggggcctaagaaacgtgtggtgactttaagacagactttgcttaagcagacgtctaggcttgctatggaggagatcaagcttaagttcattgacgctgcttccaatgggggacacggtcgtttccagacttctcaagagaaggccaagttctatggtagaaccatcaaagcttagatttctaagtattttgttgttttttgagttttttctttggtgtttgtcggatttctcttgacagttgatatcaattatctttttttttttttaatctggatattatc

SEQ ID NO: 23528 - protein, 398 aa, Arabidopsis thaliana
  peptide (1)..(398): Ceres Seq. ID no. 13580634
KPKFLYSIMSHRKFEHPRHGSLGFLPRKRASRHRGKVKAFPKDDPTKPCRLTSFLGYKAGMTHIVRDVEKPGSKLHKKETCEAVTIIETPPMVVVGVVGYVKTPRGLRSLCTVWAQHLSEELRRRFYKNWAKSKKKAFTRYSKKHETEEGKKDIQSQLEKMKKYCSVIRVLAHTQIRKMKGLKQKKAHLNEIQINGGDIAKKVDYACSLFEKQVPVDAIFQKDEMIDIIGVTKGKGYEGVVTRWGVTRLPRKTHRGLRKVACIGAWHPARVSYTVARAGQNGYHHRTEMNKKVYRVGKVGQETHSAMTEYDRTEKDITPMGGFPHYGIVKEDYLMIKGCCVGPKKRVVTLRQTLLKQTSRLAMEEIKLKFIDAASNGGHGRFQTSQEKAKFYGRTIKA

SEQ ID NO: 23529 - protein, 390 aa, Arabidopsis thaliana
  peptide (1)..(390): Ceres Seq. ID no. 13580635
MSHRKFEHPRHGSLGFLPRKRASRHRGKVKAFPKDDPTKPCRLTSFLGYKAGMTHIVRDVEKPGSKLHKKETCEAVTIIETPPMVVVGVVGYVKTPRGLRSLCTVWAQHLSEELRRRFYKNWAKSKKKAFTRYSKKHETEEGKKDIQSQLEKMKKYCSVIRVLAHTQIRKMKGLKQKKAHLNEIQINGGDIAKKVDYACSLFEKQVPVDAIFQKDEMIDIIGVTKGKGYEGVVTRWGVTRLPRKTHRGLRKVACIGAWHPARVSYTVARAGQNGYHHRTEMNKKVYRVGKVGQETHSAMTEYDRTEKDITPMGGFPHYGIVKEDYLMIKGCCVGPKKRVVTLRQTLLKQTSRLAMEEIKLKFIDAASNGGHGRFQTSQEKAKFYGRTIKA

SEQ ID NO: 23530 - protein, 338 aa, Arabidopsis thaliana
  peptide (1)..(338): Ceres Seq. ID no. 13580636
MTHIVRDVEKPGSKLHKKETCEAVTIIETPPMVVVGVVGYVKTPRGLRSLCTVWAQHLSEELRRRFYKNWAKSKKKAFTRYSKKHETEEGKKDIQSQLEKMKKYCSVIRVLAHTQIRKMKGLKQKKAHLNEIQINGGDIAKKVDYACSLFEKQVPVDAIFQKDEMIDIIGVTKGKGYEGVVTRWGVTRLPRKTHRGLRKVACIGAWHPARVSYTVARAGQNGYHHRTEMNKKVYRVGKVGQETHSAMTEYDRTEKDITPMGGFPHYGIVKEDYLMIKGCCVGPKKRVVTLRQTLLKQTSRLAMEEIKLKFIDAASNGGHGRFQTSQEKAKFYGRTIKA

SEQ ID NO: 23531 - DNA, 1291 bp, Arabidopsis thaliana
  misc_feature (1)..(1291): Ceres Seq. ID no. 12322990
  misc_feature (1)..(1291): Ortholog of  Ceres SEQ ID NO 13594037 as cited in SEQ ID NO 55666
  misc_feature (1)..(1291): Ortholog of  Ceres SEQ ID NO 13657707 as cited in SEQ ID NO 66407
aaaaagaaaagtagaaaccccaagaaaaaataaaaaaaataatgggtcatcagcaatgcaaaagacgaaattcgacgccccacttttgactgaaaaaaatcgcgacaaatagatcgataattgtagatatcgaaggcaaaggagactacacttcggttcagaaagccatcgatgctgtccctgttggtaactctaattggattattgtccatgtccgtaaaggaatctacaaggagagagtgcacattccggagaacaagccgttcatattcatgaggggtaatggaaaaggaaaaacggtgatcgaatcttcgcaaagttcggtcgacaatgttgcttcagctactttcaaagtcgaggctaatcactttgtcgcttttggtatcagcatccgaaatgatgcacctgtcggaatggcattcacatctgagaaccaatcggtggcagcgtttgtggctgctgacaaagtagcgttttaccattgtgcgttctacagcttacacaacactttgtttgataacaaaggtagacattactaccatgagtgttacatccaaggctccatagacttcatcttcggtcgcgcaacttccattttcaacaattgtgagatatttgtgatatcagacaagagggtgaaaccgtatgggtcaatcacagcacaccatagggaaagcgcagaggaaaaaacgggttacgtgttcataagaggcaaagtgtacggaattgatgaggtttacttgggccgagccaaaggaccttattctcgagtcatctttgccaagacttacttgtccaagaccgttgtgcctgatggttggacaaactggagttaccatggctcgacccagaatctataccatggggagtataaatgtcatggaccaggagctgagaggcaaaagagatctgactgggccaaagatcttaccaaacaagaagttgagtctttcttgtccattgattttattgatggcacttcttggctccctgtttggcttcaggaaaagttttagagttccttatgctgtcgcgtttggcttttgacatttcgcgttttggtgtggcttggaaaaaaaacatatgaagaaagaagagtacttcatcctttcttcgacggtatactatacgaaatagttttctctcttttttttttgtgtacttctactctaaaatgttcttagagtgattggaaactcttatgttgtttgcaaacattatataagattgtttccatcttaataatatatgtaacctaaatttaaatcctataaatttaaaatattttccc

SEQ ID NO: 23532 - protein, 247 aa, Arabidopsis thaliana
  peptide (1)..(247): Ceres Seq. ID no. 12322991
MRGNGKGKTVIESSQSSVDNVASATFKVEANHFVAFGISIRNDAPVGMAFTSENQSVAAFVAADKVAFYHCAFYSLHNTLFDNKGRHYYHECYIQGSIDFIFGRATSIFNNCEIFVISDKRVKPYGSITAHHRESAEEKTGYVFIRGKVYGIDEVYLGRAKGPYSRVIFAKTYLSKTVVPDGWTNWSYHGSTQNLYHGEYKCHGPGAERQKRSDWAKDLTKQEVESFLSIDFIDGTSWLPVWLQEKF

SEQ ID NO: 23533 - protein, 200 aa, Arabidopsis thaliana
  peptide (1)..(200): Ceres Seq. ID no. 12322992
MAFTSENQSVAAFVAADKVAFYHCAFYSLHNTLFDNKGRHYYHECYIQGSIDFIFGRATSIFNNCEIFVISDKRVKPYGSITAHHRESAEEKTGYVFIRGKVYGIDEVYLGRAKGPYSRVIFAKTYLSKTVVPDGWTNWSYHGSTQNLYHGEYKCHGPGAERQKRSDWAKDLTKQEVESFLSIDFIDGTSWLPVWLQEKF

SEQ ID NO: 23534 - DNA, 725 bp, Arabidopsis thaliana
  misc_feature (1)..(725): Ceres Seq. ID no. 12396380
  misc_feature (1)..(725): Ortholog of  Ceres SEQ ID NO 13660334 as cited in SEQ ID NO 67468
ccacgcaattacctcttctcactctcagacattttgtcaaacagatggtgctcgtttctgaaacagcttaagaactaacaaggagacagacactaagcttggttttttttctccgattagacggaggaaaaagtgaaaacgaggggcttagacgagtgatgtgatagagatggaaggagttgagctagaattagaaagaagaagcaagttcttgaacagtttgatacagaagaagaaggctaaagaacagcaagatcagaaagatgagttcaatgttcgtgttagggcttcagatatgcctttgcctcaacagaacagagcctttagtttgtcgcgtgagattttgaatgctactccagggaaggctgataacaaaagactcgctcatgccctaaaaaaggacttcgattcagcctacggcccggcatggcactgcattgttggaacaagctttggttcatacgtgactcattccacaggaggattcctatattttcagatcgacaaagtttacgttcttctcttcaagactgccgtggagccgttagatcaaaaatgagataaaacgttgatgatcagagcatcttcaatttaatctctgtcttgtatcccacaatgtaattctgcctaagacaaaatctttgtggctcctattgtgtaattagaagtcatcttctctactgtgaatcgtttcaacttcacaatgcaaaatattgttcttctcc

SEQ ID NO: 23535 - protein, 129 aa, Arabidopsis thaliana
  peptide (1)..(129): Ceres Seq. ID no. 12396381
MEGVELELERRSKFLNSLIQKKKAKEQQDQKDEFNVRVRASDMPLPQQNRAFSLSREILNATPGKADNKRLAHALKKDFDSAYGPAWHCIVGTSFGSYVTHSTGGFLYFQIDKVYVLLFKTAVEPLDQK

SEQ ID NO: 23536 - protein, 87 aa, Arabidopsis thaliana
  peptide (1)..(87): Ceres Seq. ID no. 12396382
MPLPQQNRAFSLSREILNATPGKADNKRLAHALKKDFDSAYGPAWHCIVGTSFGSYVTHSTGGFLYFQIDKVYVLLFKTAVEPLDQK

SEQ ID NO: 23537 - DNA, 1446 bp, Arabidopsis thaliana
  misc_feature (1)..(1446): Ceres Seq. ID no. 13497483
  misc_feature (1)..(1446): Ortholog of  Ceres SEQ ID NO 13595351 as cited in SEQ ID NO 55934
  misc_feature (1)..(1446): Ortholog of  Ceres SEQ ID NO 13639645 as cited in SEQ ID NO 57488
atatgaaaatttgcacagaacctataggactcgacaaatagaagaagcagattcgttgctaacgaagtaaaggatcttacttttttggtctttgctttagaaataacttataactacaagtcagagaggggccgagtaaatcggaaagatgacggcgccgatgatcctgaccggaagtggatcggcggcggagagagacgctcggatggcgcacactgctatggcgtttgttcagctctttaatggtggataccatgtgattactaaagtagctcttaatgttggagtcaaccagcttgtcttctgtgtatgccgtgatcttcttgctctctctattctcgctcctcttgcttacttccgcgaaagaaagatcagaactccaatgaataaaagccttctcttgtcattcttctttctgggcttagcaggggtatttgggaaccagttgttatttcttatcggtcttacatacacaaatcccacttatgctgctgccattcaaccatccatcccggtcttcacctttctcttggctgtcatgatgggtacagaaagagtgaatttgttgagaatcgaaggtcaaactaaggttggaggcacacttgtgtgtgttatgggtgctgtcttcatggttgtatttcgaggtccggccttgttaggagataaagatgcagactttgcgatgaacaatgaaatcagtgctaaaggtcaacctgagcctactggttggttagtctctggttttctcgatcttggatttgagcaatggcacattggagttttatgcttgattggaaactgcatgtgtatggctacttttcttgccattcaggcgccacttttgaagaagtatccggcaaatctttctgttgctgcattatcatacttctttggcacagtactaatgtgcacaacagctttctttatggtaaaggagccattggattggaagctaacacaatctgaggttcttgcagttatatatgcaggagttatcgcatcagcactaaactatggactcttgacttggtccaataagattattggtcctgccttggttgctctctacaatcctcttcaacccgctgcatcagctttcctatcgagaatctttctcggtagccccatttatctcggaagcgttgtgggtggattcttcatcattctaggactctatatggtcacttgggcatcgtttagagagcgaaaaacagcggtttccgggattgggattgcgccccatggtctaaaaacctcagagcctctgatatttaatgggacagttaacagactaggacagttgttttctggattacccagttcctctgtgaaatctgcagactaaaaagataccaaaaagttaagattcagacgagatcccattttacaacagctataactttttgttaactttcatctcttattaatatcttcttcgattactac

SEQ ID NO: 23538 - protein, 398 aa, Arabidopsis thaliana
  peptide (1)..(398): Ceres Seq. ID no. 13497484
MTAPMILTGSGSAAERDARMAHTAMAFVQLFNGGYHVITKVALNVGVNQLVFCVCRDLLALSILAPLAYFRERKIRTPMNKSLLLSFFFLGLAGVFGNQLLFLIGLTYTNPTYAAAIQPSIPVFTFLLAVMMGTERVNLLRIEGQTKVGGTLVCVMGAVFMVVFRGPALLGDKDADFAMNNEISAKGQPEPTGWLVSGFLDLGFEQWHIGVLCLIGNCMCMATFLAIQAPLLKKYPANLSVAALSYFFGTVLMCTTAFFMVKEPLDWKLTQSEVLAVIYAGVIASALNYGLLTWSNKIIGPALVALYNPLQPAASAFLSRIFLGSPIYLGSVVGGFFIILGLYMVTWASFRERKTAVSGIGIAPHGLKTSEPLIFNGTVNRLGQLFSGLPSSSVKSAD

SEQ ID NO: 23539 - protein, 394 aa, Arabidopsis thaliana
  peptide (1)..(394): Ceres Seq. ID no. 13497485
MILTGSGSAAERDARMAHTAMAFVQLFNGGYHVITKVALNVGVNQLVFCVCRDLLALSILAPLAYFRERKIRTPMNKSLLLSFFFLGLAGVFGNQLLFLIGLTYTNPTYAAAIQPSIPVFTFLLAVMMGTERVNLLRIEGQTKVGGTLVCVMGAVFMVVFRGPALLGDKDADFAMNNEISAKGQPEPTGWLVSGFLDLGFEQWHIGVLCLIGNCMCMATFLAIQAPLLKKYPANLSVAALSYFFGTVLMCTTAFFMVKEPLDWKLTQSEVLAVIYAGVIASALNYGLLTWSNKIIGPALVALYNPLQPAASAFLSRIFLGSPIYLGSVVGGFFIILGLYMVTWASFRERKTAVSGIGIAPHGLKTSEPLIFNGTVNRLGQLFSGLPSSSVKSAD

SEQ ID NO: 23540 - protein, 379 aa, Arabidopsis thaliana
  peptide (1)..(379): Ceres Seq. ID no. 13497486
MAHTAMAFVQLFNGGYHVITKVALNVGVNQLVFCVCRDLLALSILAPLAYFRERKIRTPMNKSLLLSFFFLGLAGVFGNQLLFLIGLTYTNPTYAAAIQPSIPVFTFLLAVMMGTERVNLLRIEGQTKVGGTLVCVMGAVFMVVFRGPALLGDKDADFAMNNEISAKGQPEPTGWLVSGFLDLGFEQWHIGVLCLIGNCMCMATFLAIQAPLLKKYPANLSVAALSYFFGTVLMCTTAFFMVKEPLDWKLTQSEVLAVIYAGVIASALNYGLLTWSNKIIGPALVALYNPLQPAASAFLSRIFLGSPIYLGSVVGGFFIILGLYMVTWASFRERKTAVSGIGIAPHGLKTSEPLIFNGTVNRLGQLFSGLPSSSVKSAD

SEQ ID NO: 23541 - DNA, 1241 bp, Arabidopsis thaliana
  misc_feature (1)..(1241): Ceres Seq. ID no. 12379509
  misc_feature (1)..(1241): Ortholog of  Ceres SEQ ID NO 14314164 as cited in SEQ ID NO 54346
  misc_feature (1)..(1241): Ortholog of  Ceres SEQ ID NO 13595066 as cited in SEQ ID NO 55849
  misc_feature (1)..(1241): Ortholog of  Ceres SEQ ID NO 13597721 as cited in SEQ ID NO 65430
  misc_feature (1)..(1241): Ortholog of  Ceres SEQ ID NO 14309100 as cited in SEQ ID NO 0
attttaaccagcaaatacaaaaaacttccgatcccccttagcgtttccttctccggcgatattcttcttcttcggctcacattgcatcgtctctcactcgatccttcgttctttcagggacaatcatttcggaaacatgccaggtcagaagattgaaacgggtcatgaggacattgtccatgatgtgcagatggattactatggaaagcgaattgcaactgcatcatctgactgcaccatcaagataaccggtgtcagcaacaacggtggatcgcagcaactagccacattaaccggccaccgtggtcctgtctgggaagtcgcgtgggcacacccaaagtatggatcaatccttgcttcatgctcctatgatggtcaagtcatactctggaaagaaggcaaccagaaccaatggacccaagatcatgttttcacagaccacaaatcttcagtcaactccattgcatgggctcctcatgatatcggactatccttggcctgcgggtcatctgatggcaacatttcggttttcacagcccgtgctgacggtggctgggacacatcaaggattgaccaagcacatccggttggagtcacttcagtctcatgggccccagccacagcgcctggtgctcttgtgagctctggtcttctcgatccggtttacaagctagcttctggtggatgtgataataccgtgaaagtgtggaagctcgctaacgggtcatggaagatggattgctttccagctcttcaaaagcacactgattgggtccgtgatgtggcttgggcaccaaacttgggtctccccaagtccaccatagccagtggttcccaagatgggaaagttatcatatggacagtgggaaaagaaggtgagcaatgggaaggtaaggttctcaaggactttatgactcctgtgtggcgggtctcgtggtcgttgaccggtaacttattggccgtatccgatgggaacaacaacgtgactgtgtggaaagaggctgttgatggagagtgggaacaagttactgctgttgagccttaggtttttgatgctttgctatctctctgctcttcctttaaggaactgaatcaaacattttttctttactcttttcttagtccggtttggtggtctttttcagggaatgttgaattggttttcttaaagacttttggattattttttttcttattcttttcatagacaccattttaaaattctaaaaaccaagatcaag

SEQ ID NO: 23542 - protein, 302 aa, Arabidopsis thaliana
  peptide (1)..(302): Ceres Seq. ID no. 12379510
MPGQKIETGHEDIVHDVQMDYYGKRIATASSDCTIKITGVSNNGGSQQLATLTGHRGPVWEVAWAHPKYGSILASCSYDGQVILWKEGNQNQWTQDHVFTDHKSSVNSIAWAPHDIGLSLACGSSDGNISVFTARADGGWDTSRIDQAHPVGVTSVSWAPATAPGALVSSGLLDPVYKLASGGCDNTVKVWKLANGSWKMDCFPALQKHTDWVRDVAWAPNLGLPKSTIASGSQDGKVIIWTVGKEGEQWEGKVLKDFMTPVWRVSWSLTGNLLAVSDGNNNVTVWKEAVDGEWEQVTAVEP

SEQ ID NO: 23543 - protein, 284 aa, Arabidopsis thaliana
  peptide (1)..(284): Ceres Seq. ID no. 12379511
MDYYGKRIATASSDCTIKITGVSNNGGSQQLATLTGHRGPVWEVAWAHPKYGSILASCSYDGQVILWKEGNQNQWTQDHVFTDHKSSVNSIAWAPHDIGLSLACGSSDGNISVFTARADGGWDTSRIDQAHPVGVTSVSWAPATAPGALVSSGLLDPVYKLASGGCDNTVKVWKLANGSWKMDCFPALQKHTDWVRDVAWAPNLGLPKSTIASGSQDGKVIIWTVGKEGEQWEGKVLKDFMTPVWRVSWSLTGNLLAVSDGNNNVTVWKEAVDGEWEQVTAVEP

SEQ ID NO: 23544 - DNA, 1440 bp, Arabidopsis thaliana
  misc_feature (1)..(1440): Ceres Seq. ID no. 12322178
  misc_feature (1)..(1440): Ortholog of  Ceres SEQ ID NO 13597407 as cited in SEQ ID NO 64106
aagaatcaaagaaagaagatggaatctgaaagactcgaatcacatcttctgaataagcaagaagaagaagcttcttccttcacttctggtcttcttctcagcacatccgtcgttgtcgctggatccttctgttatggctgcgcctccaaaatcatggaagaactgggactttccgttgcagattattcgtttttcacttcggtaatgacattaggaggaatgattacagccgcgtttagcggtaaaatctctgctctcgttggtcgtcgacagacaatgtggatctcagatgtttgctgtatttttggttggctcgctgtagcgtttgcacatgatattatactgcttaatattggacgactcttcttggggtttggggttggtctcattagttatgtggttcctgtgtatatagcagaaattacacctaaaacatttcgtggaggattttcttattccaatcagcttctacaatgtcttgggatttcactcatgttcttcaccggaaactttttccattggcgaacattagctcttttaagtgcaatcccaagtgctttccaagtgatatgtttattttttattcctgaatctcctagatggctggcgatgtatggtcaagatcaagagcttgaagtttcgttgaaaaatttaaggggagaaaatagtgatattctaaaggaagctgctgaaatcagagaaacagtggaaatatccagaaaagagtctcaaagtggaataagagacttgttccatataggaaacgcacattccttaatcattggattgggattaatgctcttgcaacaattttgtgggagcgcggcgataagtgcttatgctgctcgtatattcgacaaagcaggttttccaagcgacataggaacaaccatcctcgcagtgattctgataccgcaatctatagttgtcatgttaaccgttgaccgatggggacgccgaccacttcttatgatttcttctatcggaatgtgcatatgctcattttttattggcctttcatactaccttcagaagaatggtgaatttcagaagttatgttccgttatgttaatcgtcggtttagtgggttatgtctcatcctttggcattgggctaggtggactaccatgggttataatgtctgaggtatttccggtgaatgtgaaaatcaccgccggtagccttgtaacgatgtcaaattggttttttaattggattatcatctatagttttaatttcatgatacagtggagcgcttccggaacatatttcatattttctggagtttctctggtgacgatcgtattcatatggacattggtgcctgagacgaaaggccgaacactcgaagagattcaaacatcattagtccgactttcgtaaaatctatgtatggattatacatataagtctcttgaatagtctttttaaccgtacatt

SEQ ID NO: 23545 - protein, 460 aa, Arabidopsis thaliana
  peptide (1)..(460): Ceres Seq. ID no. 12322179
KNQRKKMESERLESHLLNKQEEEASSFTSGLLLSTSVVVAGSFCYGCASKIMEELGLSVADYSFFTSVMTLGGMITAAFSGKISALVGRRQTMWISDVCCIFGWLAVAFAHDIILLNIGRLFLGFGVGLISYVVPVYIAEITPKTFRGGFSYSNQLLQCLGISLMFFTGNFFHWRTLALLSAIPSAFQVICLFFIPESPRWLAMYGQDQELEVSLKNLRGENSDILKEAAEIRETVEISRKESQSGIRDLFHIGNAHSLIIGLGLMLLQQFCGSAAISAYAARIFDKAGFPSDIGTTILAVILIPQSIVVMLTVDRWGRRPLLMISSIGMCICSFFIGLSYYLQKNGEFQKLCSVMLIVGLVGYVSSFGIGLGGLPWVIMSEVFPVNVKITAGSLVTMSNWFFNWIIIYSFNFMIQWSASGTYFIFSGVSLVTIVFIWTLVPETKGRTLEEIQTSLVRLS

SEQ ID NO: 23546 - protein, 454 aa, Arabidopsis thaliana
  peptide (1)..(454): Ceres Seq. ID no. 12322180
MESERLESHLLNKQEEEASSFTSGLLLSTSVVVAGSFCYGCASKIMEELGLSVADYSFFTSVMTLGGMITAAFSGKISALVGRRQTMWISDVCCIFGWLAVAFAHDIILLNIGRLFLGFGVGLISYVVPVYIAEITPKTFRGGFSYSNQLLQCLGISLMFFTGNFFHWRTLALLSAIPSAFQVICLFFIPESPRWLAMYGQDQELEVSLKNLRGENSDILKEAAEIRETVEISRKESQSGIRDLFHIGNAHSLIIGLGLMLLQQFCGSAAISAYAARIFDKAGFPSDIGTTILAVILIPQSIVVMLTVDRWGRRPLLMISSIGMCICSFFIGLSYYLQKNGEFQKLCSVMLIVGLVGYVSSFGIGLGGLPWVIMSEVFPVNVKITAGSLVTMSNWFFNWIIIYSFNFMIQWSASGTYFIFSGVSLVTIVFIWTLVPETKGRTLEEIQTSLVRLS

SEQ ID NO: 23547 - protein, 409 aa, Arabidopsis thaliana
  peptide (1)..(409): Ceres Seq. ID no. 12322181
MEELGLSVADYSFFTSVMTLGGMITAAFSGKISALVGRRQTMWISDVCCIFGWLAVAFAHDIILLNIGRLFLGFGVGLISYVVPVYIAEITPKTFRGGFSYSNQLLQCLGISLMFFTGNFFHWRTLALLSAIPSAFQVICLFFIPESPRWLAMYGQDQELEVSLKNLRGENSDILKEAAEIRETVEISRKESQSGIRDLFHIGNAHSLIIGLGLMLLQQFCGSAAISAYAARIFDKAGFPSDIGTTILAVILIPQSIVVMLTVDRWGRRPLLMISSIGMCICSFFIGLSYYLQKNGEFQKLCSVMLIVGLVGYVSSFGIGLGGLPWVIMSEVFPVNVKITAGSLVTMSNWFFNWIIIYSFNFMIQWSASGTYFIFSGVSLVTIVFIWTLVPETKGRTLEEIQTSLVRLS

SEQ ID NO: 23548 - DNA, 1345 bp, Arabidopsis thaliana
  misc_feature (1)..(1345): Ceres Seq. ID no. 12325217
  misc_feature (1)..(1345): Ortholog of  Ceres SEQ ID NO 15170595 as cited in SEQ ID NO 57510
  misc_feature (1)..(1345): Ortholog of  Ceres SEQ ID NO 13655218 as cited in SEQ ID NO 68872
aaaccatatgaatctcacgatcaaagataatatctcatcatctatatagtatttgtctcgatattagagacgtacacactttgtttatactcaaatcaatatgggatctttcgtgaaagaagaaacgtcgtcgttgatgacagattttttggagaagtgcggtggttatgaggtggtggatggagggtttgcgacggagctacagcgccacggagctgatatcaatgatccaatttggagtgctaagtgccttattacttctcctcaccttgttacaaaggtgcacttggattaccttgaatctggagcaaatatcatcataacagcatcttaccaggcgacgatacaaggttttgtggcaaaaggtctatcggtgggagaagcagaaaatttacttagaaggagcgttgaaatcacgtacgaggcacgtgagattttctacaacagatggaccaagggttcatgggatttcgcctatgctggaaaagcttcccggagaccgattcttgtcgcagcttccgttggtagctatggagcttatctcgctgacggctccgaatacagtgggatatatggagattctgtgagtaaggagacattaaaggatttccatagaagaagagttcaaatcttagcaaaatctggagccgacctaatagcattcgagactattccaaataagctcgaagcagaggcttatgcggatcttcttgaggaggaagatatcgatattccggcatggttctcgttcacttccaaggacggagtcagtgtgccacgaggagattcagttgtagaatgtgcgaaagtggcagattcatgcaagaacgtggtggccattggaatcaattgtactgcaccaagatacattcatgctttaattatctccttgcgccagatgacacgcaaacccatcgttgtatacccaaacagcggggaagtctacgacggtctgaacaagaaatggattaagtcagagggagagtcagaggaggattttgtgtcgtacgtgagtaaatggagagatgcaggagcttctctgtttggaggatgttgtcggactactccaaacaccatcagagccattgctaaagttctctccgacgaaccttctgcagcatcaaaacccaaattcgggcaatagacttgtcaacggtgaatttctatgcttgtgatgtcaggaaggagtttaaaatgtacaataacgcaagcgtagttctgtaatctactaatatgttgaaactataaataatggtaaactatgttagagacaactgtgtaattagcgtatgataataatggagtttaaacgataatttgatgttatagtaagcatatttttact

SEQ ID NO: 23549 - protein, 347 aa, Arabidopsis thaliana
  peptide (1)..(347): Ceres Seq. ID no. 12325218
MGSFVKEETSSLMTDFLEKCGGYEVVDGGFATELQRHGADINDPIWSAKCLITSPHLVTKVHLDYLESGANIIITASYQATIQGFVAKGLSVGEAENLLRRSVEITYEAREIFYNRWTKGSWDFAYAGKASRRPILVAASVGSYGAYLADGSEYSGIYGDSVSKETLKDFHRRRVQILAKSGADLIAFETIPNKLEAEAYADLLEEEDIDIPAWFSFTSKDGVSVPRGDSVVECAKVADSCKNVVAIGINCTAPRYIHALIISLRQMTRKPIVVYPNSGEVYDGLNKKWIKSEGESEEDFVSYVSKWRDAGASLFGGCCRTTPNTIRAIAKVLSDEPSAASKPKFGQ

SEQ ID NO: 23550 - protein, 335 aa, Arabidopsis thaliana
  peptide (1)..(335): Ceres Seq. ID no. 12325219
MTDFLEKCGGYEVVDGGFATELQRHGADINDPIWSAKCLITSPHLVTKVHLDYLESGANIIITASYQATIQGFVAKGLSVGEAENLLRRSVEITYEAREIFYNRWTKGSWDFAYAGKASRRPILVAASVGSYGAYLADGSEYSGIYGDSVSKETLKDFHRRRVQILAKSGADLIAFETIPNKLEAEAYADLLEEEDIDIPAWFSFTSKDGVSVPRGDSVVECAKVADSCKNVVAIGINCTAPRYIHALIISLRQMTRKPIVVYPNSGEVYDGLNKKWIKSEGESEEDFVSYVSKWRDAGASLFGGCCRTTPNTIRAIAKVLSDEPSAASKPKFGQ

SEQ ID NO: 23551 - DNA, 1162 bp, Arabidopsis thaliana
  misc_feature (1)..(1162): Ceres Seq. ID no. 12394737
  misc_feature (1)..(1162): Ortholog of  Ceres SEQ ID NO 14309202 as cited in SEQ ID NO 0
gtgttttctagtgttgcagaaaatggcaactactagtactactacaaagctctccgttctctgctgctctttcatttcatctcctctcgttgactctcctccttctctcgccttcttctctccgattccacgattcctcactgtccgaatcgcgactagctttagatcgagctctaggtttccggccaccaaaatccgcaagtcttcactcgccgccgtgatgtttccggaaaattcggttttatcagatgtctgcgcgtttggagtcactagcatcgttgcgttctcgtgcctcggtttctggggagagattggcaaacgtggcatcttcgaccagaaactcatccggaagcttgtgcatataaatattgggctagtttttatgctttgctggccgctgttcagttctggaatccaaggagcacttttcgcatctcttgtacctggactcaatatagtaaggatgctattgctggggcttggagtgtaccacgacgaaggaacaatcaagtcaatgagcagacatggagatcgcagggaactacttaaggggccgctttactatgtactgtcaatcacatcagcctgcatctactattggaaatcatccccgatcgcgattgcggtgatatgcaacctttgcgcaggagatggtatggctgacattgtgggtcggcggtttggaacagagaagcttccttacaacaaaaacaaatcatttgctggtagcattggaatggccaccgccgggtttctagcatctgttgggtatatgtactactttgcttcatttggttacatcgaggatagcgggggaatgattcttcgtttcctcgtcatctctatagcatcagctcttgtggaatcactcccaataagcaccgacattgacgacaatctcaccatttccttaacctctgccttggccggattcttactcttctaataataccctctcgttgttatgtatcatcaaataaagggtcgagcttgattgctgatatggaggtaaaactgcattcattgttcccatcttcttctgtatgtacgtattagtgaaacatctcatattgttgttgtccacaaatcttatttttcagctgcaattgcagttgggtacaatgttgtaatgttctatccattagtgagacatatgatgacg

SEQ ID NO: 23552 - protein, 314 aa, Arabidopsis thaliana
  peptide (1)..(314): Ceres Seq. ID no. 12394738
CFLVLQKMATTSTTTKLSVLCCSFISSPLVDSPPSLAFFSPIPRFLTVRIATSFRSSSRFPATKIRKSSLAAVMFPENSVLSDVCAFGVTSIVAFSCLGFWGEIGKRGIFDQKLIRKLVHINIGLVFMLCWPLFSSGIQGALFASLVPGLNIVRMLLLGLGVYHDEGTIKSMSRHGDRRELLKGPLYYVLSITSACIYYWKSSPIAIAVICNLCAGDGMADIVGRRFGTEKLPYNKNKSFAGSIGMATAGFLASVGYMYYFASFGYIEDSGGMILRFLVISIASALVESLPISTDIDDNLTISLTSALAGFLLF

SEQ ID NO: 23553 - protein, 307 aa, Arabidopsis thaliana
  peptide (1)..(307): Ceres Seq. ID no. 12394739
MATTSTTTKLSVLCCSFISSPLVDSPPSLAFFSPIPRFLTVRIATSFRSSSRFPATKIRKSSLAAVMFPENSVLSDVCAFGVTSIVAFSCLGFWGEIGKRGIFDQKLIRKLVHINIGLVFMLCWPLFSSGIQGALFASLVPGLNIVRMLLLGLGVYHDEGTIKSMSRHGDRRELLKGPLYYVLSITSACIYYWKSSPIAIAVICNLCAGDGMADIVGRRFGTEKLPYNKNKSFAGSIGMATAGFLASVGYMYYFASFGYIEDSGGMILRFLVISIASALVESLPISTDIDDNLTISLTSALAGFLLF

SEQ ID NO: 23554 - protein, 241 aa, Arabidopsis thaliana
  peptide (1)..(241): Ceres Seq. ID no. 12394740
MFPENSVLSDVCAFGVTSIVAFSCLGFWGEIGKRGIFDQKLIRKLVHINIGLVFMLCWPLFSSGIQGALFASLVPGLNIVRMLLLGLGVYHDEGTIKSMSRHGDRRELLKGPLYYVLSITSACIYYWKSSPIAIAVICNLCAGDGMADIVGRRFGTEKLPYNKNKSFAGSIGMATAGFLASVGYMYYFASFGYIEDSGGMILRFLVISIASALVESLPISTDIDDNLTISLTSALAGFLLF

SEQ ID NO: 23555 - DNA, 915 bp, Arabidopsis thaliana
  misc_feature (1)..(915): Ceres Seq. ID no. 12340210
  misc_feature (1)..(915): Ortholog of  Ceres SEQ ID NO 14301475 as cited in SEQ ID NO 62936
  misc_feature (1)..(915): Ortholog of  Ceres SEQ ID NO 12619999 as cited in SEQ ID NO 66123
  misc_feature (1)..(915): Ortholog of  Ceres SEQ ID NO 13656436 as cited in SEQ ID NO 69154
gttctcgtcatcgtcttaaagaaggaattcgatttttcgcctgaacctgcggatttttcgattcttcaaattcaatgtcttatgcttatcttttcaagtatatcatcatcggcgatactggagtggggaaatcatgtcttctgcttcagttcaccgacaagaggttcggtgcatgaccttaccattggtgttgaatttggggctaggatgatcaccatcgataacaaacctatcaagcttcagatctgggatacggctggtcaagaatcctttaggtctattacaaggtcatactatagaggagctgcaggggcattgcttgtctatgatatcacaaagagggagacatttaaccatctagctagctggctagaagatgcaaggcagcatgcaaatgcaaatatgacgataatgctcattgggaataagtgtgatcttgctcacagaagggcagtgagtacagaggaaggagagcagtttgcaaaggagcacggtcttatattcatggaggcctctgccaagactgctcagaatgttgaggaggcattcattaagacagctgcaacaatatacaagaagattcaagatggtgtgtttgatgtgtcaaatgagtcatatggaatcaaagttggatatggaggaattccaggaccatcaggtggaagagatggatcaacctcgcaaggaggagggtgctgcggctgagatgggaaaaatatgtctatatcattatgtaaaaatgatcattatgtaaaaatgatcacatatgatatagcaaaaatgtctctgcttctttctatagttgtaaatcgttttggaattcgatttggtgactgttgtggttggttttggaacggtttgacaatacacgtgtatgcctattcatatatctaaaagttaagatgtgttttgcgc

SEQ ID NO: 23556 - protein, 234 aa, Arabidopsis thaliana
  peptide (1)..(234): Ceres Seq. ID no. 12340211
VLVIVLKKEFDFSPEPADFSILQIQCLMLIFSSISSSAILEWGNHVFCFSSPTRGSVHDLTIGVEFGARMITIDNKPIKLQIWDTAGQESFRSITRSYYRGAAGALLVYDITKRETFNHLASWLEDARQHANANMTIMLIGNKCDLAHRRAVSTEEGEQFAKEHGLIFMEASAKTAQNVEEAFIKTAATIYKKIQDGVFDVSNESYGIKVGYGGIPGPSGGRDGSTSQGGGCCG

SEQ ID NO: 23557 - protein, 207 aa, Arabidopsis thaliana
  peptide (1)..(207): Ceres Seq. ID no. 12340212
MLIFSSISSSAILEWGNHVFCFSSPTRGSVHDLTIGVEFGARMITIDNKPIKLQIWDTAGQESFRSITRSYYRGAAGALLVYDITKRETFNHLASWLEDARQHANANMTIMLIGNKCDLAHRRAVSTEEGEQFAKEHGLIFMEASAKTAQNVEEAFIKTAATIYKKIQDGVFDVSNESYGIKVGYGGIPGPSGGRDGSTSQGGGCCG

SEQ ID NO: 23558 - protein, 165 aa, Arabidopsis thaliana
  peptide (1)..(165): Ceres Seq. ID no. 12340213
MITIDNKPIKLQIWDTAGQESFRSITRSYYRGAAGALLVYDITKRETFNHLASWLEDARQHANANMTIMLIGNKCDLAHRRAVSTEEGEQFAKEHGLIFMEASAKTAQNVEEAFIKTAATIYKKIQDGVFDVSNESYGIKVGYGGIPGPSGGRDGSTSQGGGCCG

SEQ ID NO: 23559 - DNA, 1464 bp, Arabidopsis thaliana
  misc_feature (1)..(1464): Ceres Seq. ID no. 13486723
  misc_feature (1)..(1464): Ortholog of  Ceres SEQ ID NO 13598417 as cited in SEQ ID NO 62576
aagatttatattcaaattataaatatatactaaaacgctaaaaaattaagtacatgctataatcttttccattatttttctaacaaaagaaagttatatatgggctaaacttagaaggaaagcccaagaggccaagactatataaagattcatgacccgagtttaagatccgatttcagaatttgggactaaaggaggacaacgacaagcgccgggaaaaaatcgagagcgacaacaatggcgccttcttcgtcgagcggtctcacgttcaagctacatcctctggtgatgcttaacatatccgatcacttcactagggttaaaactcagcttaatcctcccgccgcttcttgcgccaccgggaatggctccaacaacgccgacgcgatgttactgcaaaaccctagggtttatggctgcgtcatcggtctccagagaggtcgtacggttgagatcttcaacagtttcgagctgatattcgatcctgctcttgatactctcgacagatccttcctcgagaagaagcaagaactctataagaaggtgttccctgacttctacgtattgggatggtattctacgggaagtgacgctaccgaatctgatatgcatatccacaaagctctgatggacattaatgaatctcctgtgtatgttcttttaaatcctgctatcaatcatgcacagaaggatcttcctgtgactatctacgaaagcgaatttcatgtcattgatggaattcctcagtcgattttcgtgcataccagctacacaattgagacagttgaagctgaaagaatatctgttgatcatgttgcacatcttaagccatctgatggaggctcagctgcgactcagttggctgctcatcttactggaatacatagtgccatcaagatgcttaatagcagaatcagagtgctataccagcatattgtcgctatgcagaaaggtgataaaccttgtgagaactcagttctgagacaagtatctagtctgctcagaagtttgcctgccgcagaatcagagaagttcaatgaaaatttcttgatggagtacaacgacaaattgctgatgtcttacctagcaatgatcacgaattgtaccagcaacatgaacgaggtggttgacaaattcaacactgcatacgacaaacacagccgaagaggtggtaggactgcgttcatgtaaagattagtttcaatgtaaaaaaaccttttctttcttttggtggtctggtccctaagtgaaaatttagaactcttttaaggcatttcacttttcggaaccaaacaaacagctaggaagcttttcttctgtttaagctttgtctagacagaagctaagtttaggcctaactaaattttgcgacaagactgtaaaaacaaaacagcttttaccttctctcaatttttcatttattcaaaaatttgagcaatcagtgaacaaagagatttgtttcat

SEQ ID NO: 23560 - protein, 317 aa, Arabidopsis thaliana
  peptide (1)..(317): Ceres Seq. ID no. 13486724
MAPSSSSGLTFKLHPLVMLNISDHFTRVKTQLNPPAASCATGNGSNNADAMLLQNPRVYGCVIGLQRGRTVEIFNSFELIFDPALDTLDRSFLEKKQELYKKVFPDFYVLGWYSTGSDATESDMHIHKALMDINESPVYVLLNPAINHAQKDLPVTIYESEFHVIDGIPQSIFVHTSYTIETVEAERISVDHVAHLKPSDGGSAATQLAAHLTGIHSAIKMLNSRIRVLYQHIVAMQKGDKPCENSVLRQVSSLLRSLPAAESEKFNENFLMEYNDKLLMSYLAMITNCTSNMNEVVDKFNTAYDKHSRRGGRTAFM

SEQ ID NO: 23561 - protein, 300 aa, Arabidopsis thaliana
  peptide (1)..(300): Ceres Seq. ID no. 13486725
MLNISDHFTRVKTQLNPPAASCATGNGSNNADAMLLQNPRVYGCVIGLQRGRTVEIFNSFELIFDPALDTLDRSFLEKKQELYKKVFPDFYVLGWYSTGSDATESDMHIHKALMDINESPVYVLLNPAINHAQKDLPVTIYESEFHVIDGIPQSIFVHTSYTIETVEAERISVDHVAHLKPSDGGSAATQLAAHLTGIHSAIKMLNSRIRVLYQHIVAMQKGDKPCENSVLRQVSSLLRSLPAAESEKFNENFLMEYNDKLLMSYLAMITNCTSNMNEVVDKFNTAYDKHSRRGGRTAFM

SEQ ID NO: 23562 - protein, 267 aa, Arabidopsis thaliana
  peptide (1)..(267): Ceres Seq. ID no. 13486726
MLLQNPRVYGCVIGLQRGRTVEIFNSFELIFDPALDTLDRSFLEKKQELYKKVFPDFYVLGWYSTGSDATESDMHIHKALMDINESPVYVLLNPAINHAQKDLPVTIYESEFHVIDGIPQSIFVHTSYTIETVEAERISVDHVAHLKPSDGGSAATQLAAHLTGIHSAIKMLNSRIRVLYQHIVAMQKGDKPCENSVLRQVSSLLRSLPAAESEKFNENFLMEYNDKLLMSYLAMITNCTSNMNEVVDKFNTAYDKHSRRGGRTAFM

SEQ ID NO: 23563 - DNA, 1259 bp, Arabidopsis thaliana
  misc_feature (1)..(1259): Ceres Seq. ID no. 12393078
  misc_feature (1)..(1259): Ortholog of  Ceres SEQ ID NO 15177079 as cited in SEQ ID NO 51989
  misc_feature (1)..(1259): Ortholog of  Ceres SEQ ID NO 14315354 as cited in SEQ ID NO 58232
  misc_feature (1)..(1259): Ortholog of  Ceres SEQ ID NO 13596392 as cited in SEQ ID NO 62136
  misc_feature (1)..(1259): Ortholog of  Ceres SEQ ID NO 14313244 as cited in SEQ ID NO 66802
  misc_feature (1)..(1259): Ortholog of  Ceres SEQ ID NO 13654360 as cited in SEQ ID NO 67980
  misc_feature (1)..(1259): Ortholog of  Ceres SEQ ID NO 13596394 as cited in SEQ ID NO 68561
aaacaaaaccaaagacgagccagagccacctctaacaccatcggcgacttctcctcctactcctccgtcgccgacgtgttcgatttacaacgattcggtggctattggttgtaagatttagaattaaaggttaaaggagacgacgacgagagatgccgttaaacggagatctcgaccgtcagatcgaacagctaatggagtgtaagccgttaggtgaagcagacgtgaagatcctttgcgatcaagctaaagcgattcttgttgaggaatataatgttcaaccggttaagtgtccggttacggtatgcggcgatatccatggccagttttatgacctaattgagctatttcgtattggtggtaatgctcctgatactaattacctcttcatgggagattatgtagatcgtggctactattctgtagaaacagtctctctattggtggcattaaaggtgcgttacagggacagacttacgatcctgcgagggaatcatgagagccgtcagattacacaagtctatggtttttatgacgaatgcttgaggaaatacggaaatgcaaatgtgtggaagtattttacggaccttttcgattatctccctcttacagcactcatagagagtcaggttttctgtttgcatggaggcctttcaccttctctggatactcttgacaatatccgaagcttggatcgaatacaagaggttccacacgaaggaccaatgtgcgatctactctggtctgatcccgacgatcgttgtggatggggaatatctcctcgtggtgctggttacacgtttggacaggacattgctactcagtttaatcataacaatggactgagtctgatctcaagagcgcatcaacttgtaatggaaggctataattggtgtcaggaaaagaacgtagtgacagtgtttagtgcaccgaactactgttacagatgtggaaacatggccgcaattcttgagattggagaaaagatggaacagaacttccttcaattcgatccagcacctagacaagtcgaacccgataccacgcgcaagacccctgattattttttgtgatttcattttttttcttccaaagtttgtttgttgctgtatcattgtagatgtgtctgttttattttgttttttcgagtctctagatggaatgtgataccaaagacgaaaaacccatcatttttttgttgatgttgatactgaaacaggtttgtagaagcctcttcttattatagaaaatgtcttttg

SEQ ID NO: 23564 - protein, 306 aa, Arabidopsis thaliana
  peptide (1)..(306): Ceres Seq. ID no. 12393079
MPLNGDLDRQIEQLMECKPLGEADVKILCDQAKAILVEEYNVQPVKCPVTVCGDIHGQFYDLIELFRIGGNAPDTNYLFMGDYVDRGYYSVETVSLLVALKVRYRDRLTILRGNHESRQITQVYGFYDECLRKYGNANVWKYFTDLFDYLPLTALIESQVFCLHGGLSPSLDTLDNIRSLDRIQEVPHEGPMCDLLWSDPDDRCGWGISPRGAGYTFGQDIATQFNHNNGLSLISRAHQLVMEGYNWCQEKNVVTVFSAPNYCYRCGNMAAILEIGEKMEQNFLQFDPAPRQVEPDTTRKTPDYFL

SEQ ID NO: 23565 - protein, 292 aa, Arabidopsis thaliana
  peptide (1)..(292): Ceres Seq. ID no. 12393080
MECKPLGEADVKILCDQAKAILVEEYNVQPVKCPVTVCGDIHGQFYDLIELFRIGGNAPDTNYLFMGDYVDRGYYSVETVSLLVALKVRYRDRLTILRGNHESRQITQVYGFYDECLRKYGNANVWKYFTDLFDYLPLTALIESQVFCLHGGLSPSLDTLDNIRSLDRIQEVPHEGPMCDLLWSDPDDRCGWGISPRGAGYTFGQDIATQFNHNNGLSLISRAHQLVMEGYNWCQEKNVVTVFSAPNYCYRCGNMAAILEIGEKMEQNFLQFDPAPRQVEPDTTRKTPDYFL

SEQ ID NO: 23566 - protein, 227 aa, Arabidopsis thaliana
  peptide (1)..(227): Ceres Seq. ID no. 12393081
MGDYVDRGYYSVETVSLLVALKVRYRDRLTILRGNHESRQITQVYGFYDECLRKYGNANVWKYFTDLFDYLPLTALIESQVFCLHGGLSPSLDTLDNIRSLDRIQEVPHEGPMCDLLWSDPDDRCGWGISPRGAGYTFGQDIATQFNHNNGLSLISRAHQLVMEGYNWCQEKNVVTVFSAPNYCYRCGNMAAILEIGEKMEQNFLQFDPAPRQVEPDTTRKTPDYFL

SEQ ID NO: 23567 - DNA, 2120 bp, Arabidopsis thaliana
  misc_feature (1)..(2120): Ceres Seq. ID no. 13491655
  misc_feature (1)..(2120): Ortholog of  Ceres SEQ ID NO 12613725 as cited in SEQ ID NO 68196
  misc_feature (1)..(2120): Ortholog of  Ceres SEQ ID NO 14301486 as cited in SEQ ID NO 69222
gtcgcagaaaacagagattcctcgctgtctgaactgaaaaataagatcgcattaactcaaaactctcacaaagacaaagatcttctcctccttctcttctctttttcacttttctctcttcccctctctcgaagcttgaaaggtaacaacaatggagaaccctccggatcaaacagagtcaaaggagactcttcaacaacccattacaagaagaagaacaaagggtggtcttctcactatgcccttcatcattgcaaacgaggggttcgagaaagtggcgagctatggattattacagaacatgattctttatctgatgagtgattacagattgggacttgttaaaggacaaactgtcttgttcatgtgggttgctgctactaatttcatgcctctcgttggagcttttctctcagattcatatttgggtcgctttctcaccattgtcattgcttctctctccagtctcctggggatggtggttctatggctaacggcgatgttgccgcaagtaaaaccatcaccgtgtgtagcaacagccggaaccaactgcagttccgcgacatcttctcaattggctctcttgtataccgcattcgcattaatatcgattggatcaggaggaatcaggccatgttctttagcctttggtgctgatcaattggacaacaaagagaatcctaagaacgagagagttcttgagagtttctttggttggtactacgcttcttcatcagttgctgtcttgatcgctttcaccgtcattgtttacattcaagatcatctaggatggaaaatcgggtttggaatacccgcgattctcatgctgctcgcgggtttcttgtttgttttcgcgtctcctctctacgttaagcgcgatgtgagcaagagtctgttcactggtttagctcaagtggttgctgcagcttacgtgaagagaaacttaactttgccggatcatcatgactccagagattgttattaccgtttgaaagattctgaactcaaagctccaagtgacaaattgaggtttttaaacaaagcttgtgccataagtaaccgcgatgaagaccttggttctgatggtttggccttaaaccagtggaggctatgcacaacggaccaagttgagaaactcaaggcgttggtcaaggtgataccggtatggtccacggggataatgatgtcgataaacgttagccagaactcttttcagttgcttcaagctaaatcaatggacagacgtttaagcagcaattcgaccttccaaatcccagctggatcgtttggtatgttcacaatcatagccttaatctcatgggttgttctgtacgaccgcgcaattctccctttagcttcaaagatccgaggcagaccagttagagtcaatgtcaagattcgaatgggattagggctattcatatcattcttagcaatggcggtttccgcaactgttgaacattacagaaggaaaaccgcgataagccaaggactcgcaaacgatgccaactcaacagtgagcatctcagcaatgtggcttgtaccacagtatgtactacacggtttagcagaggccttgaccgggataggacagaccgagtttttctataccgagtttcctaaaagcatgtcgagtatcgcagcttcgttgttcggtctaggaatggcagtggctaatatcttggctagtgtgatcctaaatgcggtaaagaatagctcaaagcagggcaatgtgagctggattgaagataacatcaacaagggtcactatgactattactattgggttttagcgatcttgagcttcgttaatgtcatctactacgttgtgtgtagctggtcctatggtcctacggtggatcaggtgaggaatgataaggttaatggtatgagaaaagaagaagaggaagttattaaattaaactaagaccaattggttgatcataattaaatggtgtacgtgtgttataaaatctatatatttgtatgtaattagattatcatatattatggatttgggttttcttaggatgtagcgaatgatgttaattattgggtgtgtttatttcttactacaaaaaagccattgtgtgtatttgattgaagagaatcaaattttc

SEQ ID NO: 23568 - protein, 591 aa, Arabidopsis thaliana
  peptide (1)..(591): Ceres Seq. ID no. 13491656
MENPPDQTESKETLQQPITRRRTKGGLLTMPFIIANEGFEKVASYGLLQNMILYLMSDYRLGLVKGQTVLFMWVAATNFMPLVGAFLSDSYLGRFLTIVIASLSSLLGMVVLWLTAMLPQVKPSPCVATAGTNCSSATSSQLALLYTAFALISIGSGGIRPCSLAFGADQLDNKENPKNERVLESFFGWYYASSSVAVLIAFTVIVYIQDHLGWKIGFGIPAILMLLAGFLFVFASPLYVKRDVSKSLFTGLAQVVAAAYVKRNLTLPDHHDSRDCYYRLKDSELKAPSDKLRFLNKACAISNRDEDLGSDGLALNQWRLCTTDQVEKLKALVKVIPVWSTGIMMSINVSQNSFQLLQAKSMDRRLSSNSTFQIPAGSFGMFTIIALISWVVLYDRAILPLASKIRGRPVRVNVKIRMGLGLFISFLAMAVSATVEHYRRKTAISQGLANDANSTVSISAMWLVPQYVLHGLAEALTGIGQTEFFYTEFPKSMSSIAASLFGLGMAVANILASVILNAVKNSSKQGNVSWIEDNINKGHYDYYYWVLAILSFVNVIYYVVCSWSYGPTVDQVRNDKVNGMRKEEEEVIKLN

SEQ ID NO: 23569 - protein, 562 aa, Arabidopsis thaliana
  peptide (1)..(562): Ceres Seq. ID no. 13491657
MPFIIANEGFEKVASYGLLQNMILYLMSDYRLGLVKGQTVLFMWVAATNFMPLVGAFLSDSYLGRFLTIVIASLSSLLGMVVLWLTAMLPQVKPSPCVATAGTNCSSATSSQLALLYTAFALISIGSGGIRPCSLAFGADQLDNKENPKNERVLESFFGWYYASSSVAVLIAFTVIVYIQDHLGWKIGFGIPAILMLLAGFLFVFASPLYVKRDVSKSLFTGLAQVVAAAYVKRNLTLPDHHDSRDCYYRLKDSELKAPSDKLRFLNKACAISNRDEDLGSDGLALNQWRLCTTDQVEKLKALVKVIPVWSTGIMMSINVSQNSFQLLQAKSMDRRLSSNSTFQIPAGSFGMFTIIALISWVVLYDRAILPLASKIRGRPVRVNVKIRMGLGLFISFLAMAVSATVEHYRRKTAISQGLANDANSTVSISAMWLVPQYVLHGLAEALTGIGQTEFFYTEFPKSMSSIAASLFGLGMAVANILASVILNAVKNSSKQGNVSWIEDNINKGHYDYYYWVLAILSFVNVIYYVVCSWSYGPTVDQVRNDKVNGMRKEEEEVIKLN

SEQ ID NO: 23570 - protein, 541 aa, Arabidopsis thaliana
  peptide (1)..(541): Ceres Seq. ID no. 13491658
MILYLMSDYRLGLVKGQTVLFMWVAATNFMPLVGAFLSDSYLGRFLTIVIASLSSLLGMVVLWLTAMLPQVKPSPCVATAGTNCSSATSSQLALLYTAFALISIGSGGIRPCSLAFGADQLDNKENPKNERVLESFFGWYYASSSVAVLIAFTVIVYIQDHLGWKIGFGIPAILMLLAGFLFVFASPLYVKRDVSKSLFTGLAQVVAAAYVKRNLTLPDHHDSRDCYYRLKDSELKAPSDKLRFLNKACAISNRDEDLGSDGLALNQWRLCTTDQVEKLKALVKVIPVWSTGIMMSINVSQNSFQLLQAKSMDRRLSSNSTFQIPAGSFGMFTIIALISWVVLYDRAILPLASKIRGRPVRVNVKIRMGLGLFISFLAMAVSATVEHYRRKTAISQGLANDANSTVSISAMWLVPQYVLHGLAEALTGIGQTEFFYTEFPKSMSSIAASLFGLGMAVANILASVILNAVKNSSKQGNVSWIEDNINKGHYDYYYWVLAILSFVNVIYYVVCSWSYGPTVDQVRNDKVNGMRKEEEEVIKLN

SEQ ID NO: 23571 - DNA, 1345 bp, Arabidopsis thaliana
  misc_feature (1)..(1345): Ceres Seq. ID no. 12377399
  misc_feature (1)..(1345): Ortholog of  Ceres SEQ ID NO 12364737 as cited in SEQ ID NO 51089
  misc_feature (1)..(1345): Ortholog of  Ceres SEQ ID NO 13582301 as cited in SEQ ID NO 56509
  misc_feature (1)..(1345): Ortholog of  Ceres SEQ ID NO 14315035 as cited in SEQ ID NO 56880
  misc_feature (1)..(1345): Ortholog of  Ceres SEQ ID NO 13594276 as cited in SEQ ID NO 57728
  misc_feature (1)..(1345): Ortholog of  Ceres SEQ ID NO 13594147 as cited in SEQ ID NO 58975
  misc_feature (1)..(1345): Ortholog of  Ceres SEQ ID NO 13655302 as cited in SEQ ID NO 63307
  misc_feature (1)..(1345): Ortholog of  Ceres SEQ ID NO 13597380 as cited in SEQ ID NO 64054
  misc_feature (1)..(1345): Ortholog of  Ceres SEQ ID NO 12625474 as cited in SEQ ID NO 64169
  misc_feature (1)..(1345): Ortholog of  Ceres SEQ ID NO 13597502 as cited in SEQ ID NO 64681
attcttcaaaactatattatataaacacatttttcgtttcttcacattcacaaaacatctctctctttcttctcccattcactcactatcttgctcctagaaaaagatggcgagaatgagtttgatgatcatgatgattatggttgctgtgaccatgattaacattgctaagagtgatcccattgcaccatgttacttcatatttggtgactctttggttgataatggcaacaataatcagcttcagtcattagctagagctaattactttccttacggtattgactttgctgccggtccaaccggtcggtttagcaacggcttaaccactgtcgatgttatcgctcagcttttgggtttcgaggactacattacaccttacgcttctgcaagaggacaagacattctccgaggagttaactatgcttccgctgctgccggaatccgagacgaaaccggcagacaattgagaggtcgaatagcatttgcagggcaagtagcaaatcacgtgaacactgtgtcacaagtagtgaacatacttggtgatcaaaacgaagcctcgaattacctcagcaaatgcatttactctatcggattaggcagtaacgattatcttaacaactacttcatgcctactttttactctaccggtaaccagttctcccccgaatcctatgccgacgatctcgttgcccgttacaccgaacaactcagggtactgtataccaatggagcgaggaagtttgcgttgataggagtcggggcaatcggttgcagcccgaacgagctagctcaaaacagcagagacggaagaacgtgtgacgaaagaatcaactcagcgaacagaatctttaacagcaaactcatatctatagtcgacgcttttaaccagaacacaccagatgcaaaattcacttacatcaacgcttatggcatcttccaagacattattacaaaccctgctcgctacgggtttagagtgacaaatgcaggatgttgtggagttgggaggaacaatggacagataacttgtcttccaggtcaagcaccatgtctaaataggaatgagtatgtgttttgggatgcgtttcatcccggtgaagctgcgaatattgttattggaagacgatcttttaagcgagaagctgcttctgatgctcatccttatgatattcagcagctagcatctctctaaagagagaaagatcttttggttgtctaagtattttgatagttcttcaatggcagctgagttttggactcaagaagaagtgatttggtttgtgttgtgtgatgtcataactgtttatgtaatgatttggagttactgtttatctctttttct

SEQ ID NO: 23572 - protein, 362 aa, Arabidopsis thaliana
  peptide (1)..(362): Ceres Seq. ID no. 12377400
MARMSLMIMMIMVAVTMINIAKSDPIAPCYFIFGDSLVDNGNNNQLQSLARANYFPYGIDFAAGPTGRFSNGLTTVDVIAQLLGFEDYITPYASARGQDILRGVNYASAAAGIRDETGRQLRGRIAFAGQVANHVNTVSQVVNILGDQNEASNYLSKCIYSIGLGSNDYLNNYFMPTFYSTGNQFSPESYADDLVARYTEQLRVLYTNGARKFALIGVGAIGCSPNELAQNSRDGRTCDERINSANRIFNSKLISIVDAFNQNTPDAKFTYINAYGIFQDIITNPARYGFRVTNAGCCGVGRNNGQITCLPGQAPCLNRNEYVFWDAFHPGEAANIVIGRRSFKREAASDAHPYDIQQLASL

SEQ ID NO: 23573 - protein, 359 aa, Arabidopsis thaliana
  peptide (1)..(359): Ceres Seq. ID no. 12377401
MSLMIMMIMVAVTMINIAKSDPIAPCYFIFGDSLVDNGNNNQLQSLARANYFPYGIDFAAGPTGRFSNGLTTVDVIAQLLGFEDYITPYASARGQDILRGVNYASAAAGIRDETGRQLRGRIAFAGQVANHVNTVSQVVNILGDQNEASNYLSKCIYSIGLGSNDYLNNYFMPTFYSTGNQFSPESYADDLVARYTEQLRVLYTNGARKFALIGVGAIGCSPNELAQNSRDGRTCDERINSANRIFNSKLISIVDAFNQNTPDAKFTYINAYGIFQDIITNPARYGFRVTNAGCCGVGRNNGQITCLPGQAPCLNRNEYVFWDAFHPGEAANIVIGRRSFKREAASDAHPYDIQQLASL

SEQ ID NO: 23574 - protein, 356 aa, Arabidopsis thaliana
  peptide (1)..(356): Ceres Seq. ID no. 12377402
MIMMIMVAVTMINIAKSDPIAPCYFIFGDSLVDNGNNNQLQSLARANYFPYGIDFAAGPTGRFSNGLTTVDVIAQLLGFEDYITPYASARGQDILRGVNYASAAAGIRDETGRQLRGRIAFAGQVANHVNTVSQVVNILGDQNEASNYLSKCIYSIGLGSNDYLNNYFMPTFYSTGNQFSPESYADDLVARYTEQLRVLYTNGARKFALIGVGAIGCSPNELAQNSRDGRTCDERINSANRIFNSKLISIVDAFNQNTPDAKFTYINAYGIFQDIITNPARYGFRVTNAGCCGVGRNNGQITCLPGQAPCLNRNEYVFWDAFHPGEAANIVIGRRSFKREAASDAHPYDIQQLASL

SEQ ID NO: 23575 - DNA, 1044 bp, Arabidopsis thaliana
  misc_feature (1)..(1044): Ceres Seq. ID no. 12488528
  misc_feature (1)..(1044): Ortholog of  Ceres SEQ ID NO 15174082 as cited in SEQ ID NO 61896
  misc_feature (1)..(1044): Ortholog of  Ceres SEQ ID NO 13655598 as cited in SEQ ID NO 64077
  misc_feature (1)..(1044): Ortholog of  Ceres SEQ ID NO 15179351 as cited in SEQ ID NO 0
  misc_feature (1)..(1044): Ortholog of  Ceres SEQ ID NO 15180408 as cited in SEQ ID NO 0
aaaatcatcaaatccatctcccactcttctagcatcttgaagcttaaatctcagccgtccgatcatgccgatcagaaacatcgccattggccgtccagatgaagccacccgtcccgatgccttaaaggcggcgttggctgagttcatttcaactttgatctttgtcgtcgccggttcaggctctggcatggctttcaacaagctcactgaaaacggagccaccactccttctggtctcgtagctgctgcagtggctcatgcctttggactcttcgtcgctgtctcagttggtgccaacatctctggtggacacgttaaccctgccgtcactttcggtgctttcattggtggtaacatcactctcctccgtggtatcctctactggattgctcagcttctcggctccgtcgtcgcttgcctcatccttaaattcgccaccggtggcttggctgtgccggcttttggtctctctgctggagtaggagtgttgaacgctttcgttttcgagatcgtgatgacattcgggcttgtttacaccgtctacgctacagccattgaccccaaaaacgggagtcttggaacaattgctcccatcgcaatcggtttcattgttggagccaacatcttagctggaggagctttctctggagcctccatgaatcccgccgtggctttcggaccagcggtggtgagctggacatggaccaaccactgggtctactgggccggacctctcgtcggcggtggaatcgctggactcatctacgaagttttcttcatcaacaccacacacacgagcagctcccaaccacagactactgaattaatctctctttttctctcttgtgtaattttattcgactttgaatttgaattttaatgtctttttaatttccgtttgtgtaatttcgaatcatcaaggggtttatgatcgttcgatcttttagatgaatccttgtccgttggtttcaagagtggccattgcaatttcgactatataatgtgaattatgtatcaatctcatcttaagttttcaagtgttgc

SEQ ID NO: 23576 - protein, 271 aa, Arabidopsis thaliana
  peptide (1)..(271): Ceres Seq. ID no. 12488529
MPIRNIAIGRPDEATRPDALKAALAEFISTLIFVVAGSGSGMAFNKLTENGATTPSGLVAAAVAHAFGLFVAVSVGANISGGHVNPAVTFGAFIGGNITLLRGILYWIAQLLGSVVACLILKFATGGLAVPAFGLSAGVGVLNAFVFEIVMTFGLVYTVYATAIDPKNGSLGTIAPIAIGFIVGANILAGGAFSGASMNPAVAFGPAVVSWTWTNHWVYWAGPLVGGGIAGLIYEVFFINTTHTSSSQPQTTELISLFLSCVILFDFEFEF

SEQ ID NO: 23577 - protein, 230 aa, Arabidopsis thaliana
  peptide (1)..(230): Ceres Seq. ID no. 12488530
MAFNKLTENGATTPSGLVAAAVAHAFGLFVAVSVGANISGGHVNPAVTFGAFIGGNITLLRGILYWIAQLLGSVVACLILKFATGGLAVPAFGLSAGVGVLNAFVFEIVMTFGLVYTVYATAIDPKNGSLGTIAPIAIGFIVGANILAGGAFSGASMNPAVAFGPAVVSWTWTNHWVYWAGPLVGGGIAGLIYEVFFINTTHTSSSQPQTTELISLFLSCVILFDFEFEF

SEQ ID NO: 23578 - DNA, 1328 bp, Arabidopsis thaliana
  misc_feature (1)..(1328): Ceres Seq. ID no. 13487110
  misc_feature (1)..(1328): Ortholog of  Ceres SEQ ID NO 13582350 as cited in SEQ ID NO 56734
  misc_feature (1)..(1328): Ortholog of  Ceres SEQ ID NO 12476493 as cited in SEQ ID NO 58163
  misc_feature (1)..(1328): Ortholog of  Ceres SEQ ID NO 12578315 as cited in SEQ ID NO 62451
  misc_feature (1)..(1328): Ortholog of  Ceres SEQ ID NO 12615466 as cited in SEQ ID NO 62761
  misc_feature (1)..(1328): Ortholog of  Ceres SEQ ID NO 12617090 as cited in SEQ ID NO 64005
  misc_feature (1)..(1328): Ortholog of  Ceres SEQ ID NO 13597439 as cited in SEQ ID NO 64081
  misc_feature (1)..(1328): Ortholog of  Ceres SEQ ID NO 13597233 as cited in SEQ ID NO 64370
agatctctcttaatttagtcttttgtcttcgtaattacaatggctccaggaactttgactgagctagccggagagtctaagctcaactctaaatttgtcagggacgaagatgaacggcccaaagtcgcttacaatgtgtttagcgacgaaatcccggtgatctctctcgccggtatcgatgacgtcgatggaaaaagaggagagatctgccgtcagatcgttgaggcttgtgagaattggggcatcttccaagtggtcgatcacggcgtcgatactaacttagtggcggatatgactcgtctcgctcgtgacttctttgctttacctccggaagacaagctccgtttcgacatgtccggtggtaaaaaaggaggattcatcgtctctagtcacctccagggagaggctgtgcaagattggagagagattgtaacgtatttctcgtacccggtgagaaacagagactactcacggtggccagataagccggaaggttgggtgaaagtgacggaggagtatagtgagaggcttatgagtttggcttgtaagcttcttgaggttttgtctgaagctatgggtcttgagaaagagtctcttaccaatgcatgcgtcgatatggaccaaaagattgttgttaattattacccaaaatgccctcagcctgatctcaccctcggactcaagcgtcacactgaccctggaaccattaccttgctgctacaagaccaagtcggtggattacaagccacacgtgacaatggcaagacatggattacggttcagcctgttgaaggagcgtttgtcgtcaatctcggcgaccacggccattttttgagcaatgggaggttcaagaatgctgatcatcaggccgtggtgaactctaactcgagcagattatccatagccacgttccagaaccccgcgccggatgccacagtgtatccactgaaagtaagagaaggagagaaggcaatattggaggagccaatcacgtttgccgagatgtataagagaaagatgggaagagatttggagcttgctcgcctcaagaagctggctaaagaggagcgtgaccacaaagaagttgacaagcctgtcgaccaaatcttcgcttagaatctttgtgttcttgcttacttgttgttgcgttggttctgttttgtacgttggtactgaaaattatgctaggctcggtgtgttttgtgtttatttatgttctttcgaatcataaagaaataatgataattgatgcacttgtctatgacaaaaacatcatactccacctgtatttgacgcgttgggtttatgtcaaaaagcattaatacttc

SEQ ID NO: 23579 - protein, 358 aa, Arabidopsis thaliana
  peptide (1)..(358): Ceres Seq. ID no. 13487111
MAPGTLTELAGESKLNSKFVRDEDERPKVAYNVFSDEIPVISLAGIDDVDGKRGEICRQIVEACENWGIFQVVDHGVDTNLVADMTRLARDFFALPPEDKLRFDMSGGKKGGFIVSSHLQGEAVQDWREIVTYFSYPVRNRDYSRWPDKPEGWVKVTEEYSERLMSLACKLLEVLSEAMGLEKESLTNACVDMDQKIVVNYYPKCPQPDLTLGLKRHTDPGTITLLLQDQVGGLQATRDNGKTWITVQPVEGAFVVNLGDHGHFLSNGRFKNADHQAVVNSNSSRLSIATFQNPAPDATVYPLKVREGEKAILEEPITFAEMYKRKMGRDLELARLKKLAKEERDHKEVDKPVDQIFA

SEQ ID NO: 23580 - protein, 274 aa, Arabidopsis thaliana
  peptide (1)..(274): Ceres Seq. ID no. 13487112
MTRLARDFFALPPEDKLRFDMSGGKKGGFIVSSHLQGEAVQDWREIVTYFSYPVRNRDYSRWPDKPEGWVKVTEEYSERLMSLACKLLEVLSEAMGLEKESLTNACVDMDQKIVVNYYPKCPQPDLTLGLKRHTDPGTITLLLQDQVGGLQATRDNGKTWITVQPVEGAFVVNLGDHGHFLSNGRFKNADHQAVVNSNSSRLSIATFQNPAPDATVYPLKVREGEKAILEEPITFAEMYKRKMGRDLELARLKKLAKEERDHKEVDKPVDQIFA

SEQ ID NO: 23581 - protein, 254 aa, Arabidopsis thaliana
  peptide (1)..(254): Ceres Seq. ID no. 13487113
MSGGKKGGFIVSSHLQGEAVQDWREIVTYFSYPVRNRDYSRWPDKPEGWVKVTEEYSERLMSLACKLLEVLSEAMGLEKESLTNACVDMDQKIVVNYYPKCPQPDLTLGLKRHTDPGTITLLLQDQVGGLQATRDNGKTWITVQPVEGAFVVNLGDHGHFLSNGRFKNADHQAVVNSNSSRLSIATFQNPAPDATVYPLKVREGEKAILEEPITFAEMYKRKMGRDLELARLKKLAKEERDHKEVDKPVDQIFA

SEQ ID NO: 23582 - DNA, 1523 bp, Arabidopsis thaliana
  misc_feature (1)..(1523): Ceres Seq. ID no. 13576517
  misc_feature (1)..(1523): Ortholog of  Ceres SEQ ID NO 13594193 as cited in SEQ ID NO 58558
atgtaaatttaagtcctagctccattttcgttttcttcttctcaaaaaaaaaaaacaaaaaaaaaagtttttgatcgattgatgagttttctcatttattgatctctctagttttaacttgtgtttggtgaaaccggtactggcgaagtttaaaacacaagtgtaaacacaaatttataaaaatttcaaatcatgtaaatttcgtctctatcaatttatttcccctcaccaaaaaaaaaacaaaaaaaaattagaatttagtacttttattttaaacaaaaaccaaaaaaaaaaaccaaaaaaaaaaacgttggaaatggctccaccggaggctgaggtgggtgcggtaatggtgatggctcctccaacgccggggacaccgggaacaccgggaggaccgttgatcacggggatgagagtggattcaatgtcgtttgatcatcggaaaccaacgcctcgatgcaaatgcttgccggtgatgggatcaacttggggtcaacatgacacatgcttcaccgattttccctctcctgatgtctccctcactcgcaagcttggagccgagttcgtgggaacattcatcttgatattcaccgcgacagccggtccaatcgtgaaccagaaatacgatggagcagaaaccctaatcggtaacgctgcatgcgcaggactcgcagtgatgatcataatactctcaacaggtcatatctcaggggctcacctaaacccatcactgaccatagcattcgctgctctaaggcacttcccttgggcacacgtccctgcttacatagcggctcaagtctcagcttccatttgcgcttcattcgcacttaaaggagtgttccatccttttatgtccggtggtgtcactattccatctgttagccttggacaagcctttgctcttgagttcatcatcactttcattctcctctttgttgtaactgccgtcgctaccgacactcgtgccgttggagaattggcaggtatagccgttggagccacggtcatgctcaatattctagtcgcagggccatcgactggtggatctatgaatcctgtgagaactctaggaccagccgttgcatcaggaaactataggtcactatgggtgtatctggtggctcctacacttggtgccatatctggtgcagcggtctacacaggtgttaagcttaacgatagcgtgactgacccgcctcgtccggttaggagctttcgtcgttaagtgagtgagagacttgtttacaagtcttttgctttgtataattttactgtatgattatgtaatgatatgaaaaagctttggaagcttgtgtgaagaataaaaggcgatgtgactataagtccacgcatggcatcggtctatataaacctgatgcgaacttgtctcgtcattgtcaaattgtgtctgtgtaataatacacttttatgtgtggtttgggtttctttgttggtttgctgttgtatgttacctcggagacgaggctgtttttattaataaaatctatggcatgtgg

SEQ ID NO: 23583 - protein, 304 aa, Arabidopsis thaliana
  peptide (1)..(304): Ceres Seq. ID no. 13576518
MAPPEAEVGAVMVMAPPTPGTPGTPGGPLITGMRVDSMSFDHRKPTPRCKCLPVMGSTWGQHDTCFTDFPSPDVSLTRKLGAEFVGTFILIFTATAGPIVNQKYDGAETLIGNAACAGLAVMIIILSTGHISGAHLNPSLTIAFAALRHFPWAHVPAYIAAQVSASICASFALKGVFHPFMSGGVTIPSVSLGQAFALEFIITFILLFVVTAVATDTRAVGELAGIAVGATVMLNILVAGPSTGGSMNPVRTLGPAVASGNYRSLWVYLVAPTLGAISGAAVYTGVKLNDSVTDPPRPVRSFRR

SEQ ID NO: 23584 - protein, 293 aa, Arabidopsis thaliana
  peptide (1)..(293): Ceres Seq. ID no. 13576519
MVMAPPTPGTPGTPGGPLITGMRVDSMSFDHRKPTPRCKCLPVMGSTWGQHDTCFTDFPSPDVSLTRKLGAEFVGTFILIFTATAGPIVNQKYDGAETLIGNAACAGLAVMIIILSTGHISGAHLNPSLTIAFAALRHFPWAHVPAYIAAQVSASICASFALKGVFHPFMSGGVTIPSVSLGQAFALEFIITFILLFVVTAVATDTRAVGELAGIAVGATVMLNILVAGPSTGGSMNPVRTLGPAVASGNYRSLWVYLVAPTLGAISGAAVYTGVKLNDSVTDPPRPVRSFRR

SEQ ID NO: 23585 - protein, 291 aa, Arabidopsis thaliana
  peptide (1)..(291): Ceres Seq. ID no. 13576520
MAPPTPGTPGTPGGPLITGMRVDSMSFDHRKPTPRCKCLPVMGSTWGQHDTCFTDFPSPDVSLTRKLGAEFVGTFILIFTATAGPIVNQKYDGAETLIGNAACAGLAVMIIILSTGHISGAHLNPSLTIAFAALRHFPWAHVPAYIAAQVSASICASFALKGVFHPFMSGGVTIPSVSLGQAFALEFIITFILLFVVTAVATDTRAVGELAGIAVGATVMLNILVAGPSTGGSMNPVRTLGPAVASGNYRSLWVYLVAPTLGAISGAAVYTGVKLNDSVTDPPRPVRSFRR

SEQ ID NO: 23586 - DNA, 1550 bp, Arabidopsis thaliana
  misc_feature (1)..(1550): Ceres Seq. ID no. 12483456
  misc_feature (1)..(1550): Ortholog of  Ceres SEQ ID NO 15171275 as cited in SEQ ID NO 51428
  misc_feature (1)..(1550): Ortholog of  Ceres SEQ ID NO 14307678 as cited in SEQ ID NO 59456
  misc_feature (1)..(1550): Ortholog of  Ceres SEQ ID NO 13586716 as cited in SEQ ID NO 0
ctcaggaaaactaaaccaaagtctgtttaccagtaatatcaatcgatcgccattctcgacatttctctctctcaagctagtctaaagtttcttcttatctccttcctccgaccaaaacttcgacttctctcttattttcaccctcagagagtaaccatggatgccttgacctcgagtttggttcgatctcccatcgtaccatcgagaacttccgacaacggttctggatctatgttccttaccgccagtggccctggattcacgcgttctggttcttcaagacttcaacttcgtttaagggtatgtcccaaatctcttcaaaacgcgtctgctagatcctcaagatcattacagagcttaacaacgactgctaaaactcggagaagttttgtggttagagcttcttcagcgtctaatgatgcttcatctggttcttcccccaaaccgatcgctccgctccagctgcaatcgcctgctggtcagtttctgtctcagattttggtgagccatcctcatcttgtgcctgcagctgttgaacagcagcttgagcagcttcaaactgatcgggactctcagggacagaacaaagattcagcgtctgtacctggaaccgacatcgtcctctacaggagaattgcggagttgaaggaaaacgagagaagaagaacattggaagagattttgtatgcattggtggttcaaaagttcatggaagctaacgtatcacttgtaccttcagtaagcccatcttcagatccgtctggtcgggttgatacttggccgaccaaagtggagaaactcgagcggcttcactcgcccgagatgtacgagatgattcacaaccatcttgccttgattcttgaaagcagaatgggtgatctgaactctgttgcacagataagcaagctcagagttggccaagtttacgctgcttctgtgatgtatggatatttcttgaagagggtggaccaaaggtttcagcttgagaagacgatgaagattcttccgggtgggtcggatgaaagtcaaacaagcgttgagcaagccgaggggacggcaacatatcaggcggctgtatcgtctcacccagaggttggtgcatttgcgggcggagttagtgctaagggcttcggcagcgagattaaaccatcccgattaaggtcatatgtgatgtcatttgatgcggagacgctgcagagatacgccactataagatcaagagaagcagttggaatcatcgagaagcacacagaggcattgtttggtaagcctgagattgtaataacaccggagggcacagtcgattcatcgaaggacgaacagataaagatcagcttcggtggaatgaagaggctcgtcttggaggcagttactttcgggtcgttcctttgggatgttgagagccatgtagatgcgaggtaccactttgtattgaactaaaaacatggtctgtaatgcagttgactaacttatgtagcattaagaagatacccattaagggtatcattacacttgtatcaaaaatttgaggaaaagatcgtacattttat

SEQ ID NO: 23587 - protein, 427 aa, Arabidopsis thaliana
  peptide (1)..(427): Ceres Seq. ID no. 12483457
MDALTSSLVRSPIVPSRTSDNGSGSMFLTASGPGFTRSGSSRLQLRLRVCPKSLQNASARSSRSLQSLTTTAKTRRSFVVRASSASNDASSGSSPKPIAPLQLQSPAGQFLSQILVSHPHLVPAAVEQQLEQLQTDRDSQGQNKDSASVPGTDIVLYRRIAELKENERRRTLEEILYALVVQKFMEANVSLVPSVSPSSDPSGRVDTWPTKVEKLERLHSPEMYEMIHNHLALILESRMGDLNSVAQISKLRVGQVYAASVMYGYFLKRVDQRFQLEKTMKILPGGSDESQTSVEQAEGTATYQAAVSSHPEVGAFAGGVSAKGFGSEIKPSRLRSYVMSFDAETLQRYATIRSREAVGIIEKHTEALFGKPEIVITPEGTVDSSKDEQIKISFGGMKRLVLEAVTFGSFLWDVESHVDARYHFVLN

SEQ ID NO: 23588 - protein, 402 aa, Arabidopsis thaliana
  peptide (1)..(402): Ceres Seq. ID no. 12483458
MFLTASGPGFTRSGSSRLQLRLRVCPKSLQNASARSSRSLQSLTTTAKTRRSFVVRASSASNDASSGSSPKPIAPLQLQSPAGQFLSQILVSHPHLVPAAVEQQLEQLQTDRDSQGQNKDSASVPGTDIVLYRRIAELKENERRRTLEEILYALVVQKFMEANVSLVPSVSPSSDPSGRVDTWPTKVEKLERLHSPEMYEMIHNHLALILESRMGDLNSVAQISKLRVGQVYAASVMYGYFLKRVDQRFQLEKTMKILPGGSDESQTSVEQAEGTATYQAAVSSHPEVGAFAGGVSAKGFGSEIKPSRLRSYVMSFDAETLQRYATIRSREAVGIIEKHTEALFGKPEIVITPEGTVDSSKDEQIKISFGGMKRLVLEAVTFGSFLWDVESHVDARYHFVLN

SEQ ID NO: 23589 - protein, 243 aa, Arabidopsis thaliana
  peptide (1)..(243): Ceres Seq. ID no. 12483459
MEANVSLVPSVSPSSDPSGRVDTWPTKVEKLERLHSPEMYEMIHNHLALILESRMGDLNSVAQISKLRVGQVYAASVMYGYFLKRVDQRFQLEKTMKILPGGSDESQTSVEQAEGTATYQAAVSSHPEVGAFAGGVSAKGFGSEIKPSRLRSYVMSFDAETLQRYATIRSREAVGIIEKHTEALFGKPEIVITPEGTVDSSKDEQIKISFGGMKRLVLEAVTFGSFLWDVESHVDARYHFVLN

SEQ ID NO: 23590 - DNA, 1274 bp, Arabidopsis thaliana
  misc_feature (1)..(1274): Ceres Seq. ID no. 12325105
  misc_feature (1)..(1274): Ortholog of  Ceres SEQ ID NO 13595497 as cited in SEQ ID NO 51127
  misc_feature (1)..(1274): Ortholog of  Ceres SEQ ID NO 14306765 as cited in SEQ ID NO 53275
ataatcttccaaacttcaccagaagaaattcttaacaaacaattttcttcataatattaattctcaagatcttaaagattatattaatacgaagagaaaattcaaatgggtcttgatgattcatgcaacacaggtcttgttcttggtttaggcctctcaccaacgcctaataattacaatcatgccatcaagaaatcttcctccactgtggaccatcgtttcatcaggctcgatccgtcgttgactctaagcctatccggtgagagctacaagatcaagactggtgccggcgccggcgaccaaatttgccggcagacctcgtcccacagcggcatctcatctttctcgagcggaagggtaaagagagaaagagaaatctccggcggcgatggagaagaagaggcggaggagacgacggagagagtggtgtgttcgagagtgagtgatgatcatgacgatgaagaaggtgttagtgctcgtaaaaagcttagactcactaaacaacaatctgctcttctcgaagataacttcaaacttcatagcacccttaatcccaagcaaaaacaagctcttgcgagacagctgaatctaaggcctagacaagttgaagtgtggttccaaaacaggagagctagaacaaaactaaagcaaacagaagtggattgtgagtttttgaagaaatgttgcgagactttaacggatgagaatagaaggcttcaaaaagagcttcaagaccttaaggctttaaaattgtctcaaccgttttacatgcacatgccggcggcgactttgactatgtgcccttcttgtgagagactcggcggtggtggtgtcggaggagatacgacggcggttgatgaagaaacggcgaaaggagctttctccatcgtcacaaagcctcgtttctataaccctttcactaatccttctgcagcatgttagttacttattagttatttaatttctttttgttggttttttttttgtttcttaaatcaaattaggaattagttagaagataaatcccagggaaaaaatattacgttgaaattggggggaaatggggtatagtctttatagataagactcttcaacgattccactttatttttcggtgggattgttggttgatgaagaaaaaaaaatagtttgtaattacaggtttaaatatgtagagaaaaaatgacgaatatgtattatcttgtttttttttccttcgaatatgtattacggtaatataaatttgcttgtaaaaataataaatatattatttg

SEQ ID NO: 23591 - protein, 278 aa, Arabidopsis thaliana
  peptide (1)..(278): Ceres Seq. ID no. 12325106
MGLDDSCNTGLVLGLGLSPTPNNYNHAIKKSSSTVDHRFIRLDPSLTLSLSGESYKIKTGAGAGDQICRQTSSHSGISSFSSGRVKREREISGGDGEEEAEETTERVVCSRVSDDHDDEEGVSARKKLRLTKQQSALLEDNFKLHSTLNPKQKQALARQLNLRPRQVEVWFQNRRARTKLKQTEVDCEFLKKCCETLTDENRRLQKELQDLKALKLSQPFYMHMPAATLTMCPSCERLGGGGVGGDTTAVDEETAKGAFSIVTKPRFYNPFTNPSAAC

SEQ ID NO: 23592 - DNA, 1426 bp, Arabidopsis thaliana
  misc_feature (1)..(1426): Ceres Seq. ID no. 12395981
  misc_feature (1)..(1426): Ortholog of  Ceres SEQ ID NO 14316239 as cited in SEQ ID NO 54472
  misc_feature (1)..(1426): Ortholog of  Ceres SEQ ID NO 13654809 as cited in SEQ ID NO 62798
ctctctctatactttgcttctctctctaaacttctctctttctttttttctcaaagcttttttccttctccctaaacgatgaagattttcgtgaagactctcagtggttcgaacttcgagatcgaagtaaaacctgcagataaggtttctgatgttaaaacggctatagaaactgttaaaggtgcagaataccctgctgctaagcagatgctgatccaccaaggaaaggttctaaaggatgagaccacattggaagagaacaatgttgttgagaacagtttcattgttatcatgttgtccaagaccaaggcttctccaagtggggcatcaaccgcatctgcaccagcacctagtgctacacagccacagacagtagctacacctcaggtttctgctcctactgcctcagttccagttcctacaagtggaactgcaaccgctgcagctccagctactgctgcttcggttcagacagatgtgtatggtcaagcagcatcaaaccttgttgctggaactactttagagtccactgttcagcaaattcttgatatgggtggaggtagttgggaccgtgacactgttgttcgtgctctgagagctgcgttcaacaatcctgaaagagctgttgaatacctgtactcgggtatccctgctcaagctgaaatcccaccagttgctcaagccccagctactggggaacaggcagccaatcctctagcacagccccaacaagcagcagctccagcagctgcaactggtggtccaaacgcaaatccattaaacctgttcccccagggcatgcccgctgcagatgctggtgctggagctggtaatcttgatttcctgcgtaacagtcaacagttccaagccttgcgagctatggtacaagcaaacccacaaattctacagcctatgcttcaggagctcggtaaacaaaacccccagcttgtgcgactaattcaagagcaccaggctgacttcctacgcttgataaacgaacctgtcgagggagaagagaatgttatggaacagttggaagcagcaatgccacaagctgttaccgttacacctgaagagcgtgaagccattgaacggcttgaagggatggggtttgatcgtgcgatggtcttggaagtgttctttgcgtgtaacaagaatgaagaacttgcagctaattaccttctagatcacatgcatgagtttgaagatcaataaacagagcaaatccattcctccctctaaactcagaccatctttctgtttctttttcttcttctttttaatatgataatctcttctccaatgccatttgacagtttcatgtttatgttcatgggagttgatgtgtttatgttactattaaaactatcatagtttatctggtttgaagatgctcctcttttatcatattattagcctttgaatc

SEQ ID NO: 23593 - protein, 378 aa, Arabidopsis thaliana
  peptide (1)..(378): Ceres Seq. ID no. 12395982
MKIFVKTLSGSNFEIEVKPADKVSDVKTAIETVKGAEYPAAKQMLIHQGKVLKDETTLEENNVVENSFIVIMLSKTKASPSGASTASAPAPSATQPQTVATPQVSAPTASVPVPTSGTATAAAPATAASVQTDVYGQAASNLVAGTTLESTVQQILDMGGGSWDRDTVVRALRAAFNNPERAVEYLYSGIPAQAEIPPVAQAPATGEQAANPLAQPQQAAAPAAATGGPNANPLNLFPQGMPAADAGAGAGNLDFLRNSQQFQALRAMVQANPQILQPMLQELGKQNPQLVRLIQEHQADFLRLINEPVEGEENVMEQLEAAMPQAVTVTPEEREAIERLEGMGFDRAMVLEVFFACNKNEELAANYLLDHMHEFEDQ

SEQ ID NO: 23594 - protein, 335 aa, Arabidopsis thaliana
  peptide (1)..(335): Ceres Seq. ID no. 12395983
MLIHQGKVLKDETTLEENNVVENSFIVIMLSKTKASPSGASTASAPAPSATQPQTVATPQVSAPTASVPVPTSGTATAAAPATAASVQTDVYGQAASNLVAGTTLESTVQQILDMGGGSWDRDTVVRALRAAFNNPERAVEYLYSGIPAQAEIPPVAQAPATGEQAANPLAQPQQAAAPAAATGGPNANPLNLFPQGMPAADAGAGAGNLDFLRNSQQFQALRAMVQANPQILQPMLQELGKQNPQLVRLIQEHQADFLRLINEPVEGEENVMEQLEAAMPQAVTVTPEEREAIERLEGMGFDRAMVLEVFFACNKNEELAANYLLDHMHEFEDQ

SEQ ID NO: 23595 - protein, 307 aa, Arabidopsis thaliana
  peptide (1)..(307): Ceres Seq. ID no. 12395984
MLSKTKASPSGASTASAPAPSATQPQTVATPQVSAPTASVPVPTSGTATAAAPATAASVQTDVYGQAASNLVAGTTLESTVQQILDMGGGSWDRDTVVRALRAAFNNPERAVEYLYSGIPAQAEIPPVAQAPATGEQAANPLAQPQQAAAPAAATGGPNANPLNLFPQGMPAADAGAGAGNLDFLRNSQQFQALRAMVQANPQILQPMLQELGKQNPQLVRLIQEHQADFLRLINEPVEGEENVMEQLEAAMPQAVTVTPEEREAIERLEGMGFDRAMVLEVFFACNKNEELAANYLLDHMHEFEDQ

SEQ ID NO: 23596 - DNA, 679 bp, Arabidopsis thaliana
  misc_feature (1)..(679): Ceres Seq. ID no. 12385416
  misc_feature (1)..(679): Ortholog of  Ceres SEQ ID NO 13594766 as cited in SEQ ID NO 51913
  misc_feature (1)..(679): Ortholog of  Ceres SEQ ID NO 12609226 as cited in SEQ ID NO 59300
  misc_feature (1)..(679): Ortholog of  Ceres SEQ ID NO 13654942 as cited in SEQ ID NO 62533
  misc_feature (1)..(679): Ortholog of  Ceres SEQ ID NO 13599195 as cited in SEQ ID NO 0
acataagaacatcgtaatcccatccgtttatatatatattccaagttaaacttcatatcatacacacaaacctaaaacaccgaaacaaaaacaaagagatttaaacaagaagagttattatggcgagcttgctagataaagccaaggacttcgtggcggataaactcaccgcgatccctaaaccggagggttcagttacggacgttgacctcaaagacgtgaaccgtgactcagttgagtacttggccaaagtctctgtcaccaatccttacagtcattcgattccgatctgtgagatcagtttcactttccacagcgccggcagggagattggaaaggggaagataccggacccgggttctctgaaagctaaggacatgacggctcttgatattcccgtggtggtgccgtatagtatactgtttaacctggctcgagacgttggtgtggactgggacattgactacgagctccaaatcggtctaaccatcgaccttcctgttgtaggggaatttactatccctatctctagtaagggagaaatcaaacttcctacttttaaagatttcttctgatcgacaaaacctatatataagaccacacatcgttatgatggtgaatggtgatgatcgtaatgtaataagttgggtttgctataactaataaaatgttattttgc

SEQ ID NO: 23597 - protein, 151 aa, Arabidopsis thaliana
  peptide (1)..(151): Ceres Seq. ID no. 12385417
MASLLDKAKDFVADKLTAIPKPEGSVTDVDLKDVNRDSVEYLAKVSVTNPYSHSIPICEISFTFHSAGREIGKGKIPDPGSLKAKDMTALDIPVVVPYSILFNLARDVGVDWDIDYELQIGLTIDLPVVGEFTIPISSKGEIKLPTFKDFF

SEQ ID NO: 23598 - DNA, 455 bp, Arabidopsis thaliana
  misc_feature (1)..(455): Ceres Seq. ID no. 12337562
  misc_feature (1)..(455): Ortholog of  Ceres SEQ ID NO 13596039 as cited in SEQ ID NO 62117
cggattacaacatccagaaggagtcgacccttcacttggtgttgcgtctgcgtggaggtatgcagatcttcgtcaagactttgaccggaaagaccatcacccttgaagtggaaagctccgacaccattgacaacgtcaaggccaagatccaggacaaggaaggtattcctccggagcagcagcgtctcatcttcgctggaaagcagcttgaggatggacgtactttggccgactacaacatccagaaggagtctactcttcacttggtcctgcgtcttcgtggtggtttctaaatctcgtctctgttatgcttaagaagttcaatgtttcgtttcatgtaaaactttggtggtttgtgttttggggccttgtataatccctgatgaataagtgttctactatgtttccgttcctgttatctctttctttctaatgacaagtcgaacttcttcttc

SEQ ID NO: 23599 - protein, 96 aa, Arabidopsis thaliana
  peptide (1)..(96): Ceres Seq. ID no. 12337563
DYNIQKESTLHLVLRLRGGMQIFVKTLTGKTITLEVESSDTIDNVKAKIQDKEGIPPEQQRLIFAGKQLEDGRTLADYNIQKESTLHLVLRLRGGF

SEQ ID NO: 23600 - protein, 77 aa, Arabidopsis thaliana
  peptide (1)..(77): Ceres Seq. ID no. 12337564
MQIFVKTLTGKTITLEVESSDTIDNVKAKIQDKEGIPPEQQRLIFAGKQLEDGRTLADYNIQKESTLHLVLRLRGGF

SEQ ID NO: 23601 - DNA, 1439 bp, Arabidopsis thaliana
  misc_feature (1)..(1439): Ceres Seq. ID no. 12421268
  misc_feature (1)..(1439): Ortholog of  Ceres SEQ ID NO 13597250 as cited in SEQ ID NO 63495
  misc_feature (1)..(1439): Ortholog of  Ceres SEQ ID NO 15179832 as cited in SEQ ID NO 66444
ctctgaagaagaaaagcaaaatccacgagagaaacagatagaaagttgcaaaagtgcgttcgatttttgcttcttcttctgtttcggattcggatttggatttggaatctgctcctttagcagaaccagaggaaatggtgacgtacgtgagcgcgttgttctacggattcggagggatagtcgtcgccggagtggcgctgctcgtggctttccaggagaagcttgtgtacgtcccagtgcttccgggtttaagcaagtcttatccgatcactcccgctaggctcaatctcatctacgaagatatttggcttcaatcatccgatggtgtacgtctccacgcttggttcatcaagatgttccctgaatgtcgaggtccaaccattttatttttccaggagaacgctggaaacatcgctcatcgtctggagatggttcgcatcatgatacaaaaattgaagtgcaatgtattcatgctttcatatcgcggctatggggcaagtgaaggctatccttcacaacaaggtatcataaaagatgctcaggctgcattggatcacctttctggaaggactgacattgatacatctagaatagttgtatttggaaggtcccttgggggagctgttggagctgtgcttaccaaaaacaatccagataaggtatctgcattgattctggaaaatactttcacatccattcttgatatggctggcgttttgctgccgttcttgaagtggtttattggaggaagtggtacgaaaagcctgaagcttcttaattttgttgtacgttctccctggaaaacaattgatgctattgctgagatcaaacaaccagtgcttttcctctctggactgcaagatgagatggtccctccatttcacatgaaaatgctgtatgcgaaagcggctgcccgtaaccctcagtgcacatttgtggagtttccaagtgggatgcatatggatacatggctgtctggtggtgaagtttactggaaaacaaacttgcaatttctcgaaaagtatgcgcctgagaaaaggaaagaagatacaggaaggtaacgatcaacgatgctgtgtttagaggaagattcgactcacttatttcctattgcaacctgaaacgacggtattgtttgttataagcatgtgtatacgtatgttgcatttgggagtgacagatacaacttgttcagagagtgagatattggacaggaacttttgtaagcagaaccagctagtggagatggcaagtgtaagctaatcagatgcatttgcttcgtctcagttttccttcttttttttgggttattttttttccaattgttgttggtgtttctcatctgatcgtaactatttcctctggatgatcatggctttgtagatgattgagaaaagtgaaaaaagacatggttatatgattatatcttgaatgtgttg

SEQ ID NO: 23602 - protein, 308 aa, Arabidopsis thaliana
  peptide (1)..(308): Ceres Seq. ID no. 12421269
MVTYVSALFYGFGGIVVAGVALLVAFQEKLVYVPVLPGLSKSYPITPARLNLIYEDIWLQSSDGVRLHAWFIKMFPECRGPTILFFQENAGNIAHRLEMVRIMIQKLKCNVFMLSYRGYGASEGYPSQQGIIKDAQAALDHLSGRTDIDTSRIVVFGRSLGGAVGAVLTKNNPDKVSALILENTFTSILDMAGVLLPFLKWFIGGSGTKSLKLLNFVVRSPWKTIDAIAEIKQPVLFLSGLQDEMVPPFHMKMLYAKAAARNPQCTFVEFPSGMHMDTWLSGGEVYWKTNLQFLEKYAPEKRKEDTGR

SEQ ID NO: 23603 - protein, 235 aa, Arabidopsis thaliana
  peptide (1)..(235): Ceres Seq. ID no. 12421270
MFPECRGPTILFFQENAGNIAHRLEMVRIMIQKLKCNVFMLSYRGYGASEGYPSQQGIIKDAQAALDHLSGRTDIDTSRIVVFGRSLGGAVGAVLTKNNPDKVSALILENTFTSILDMAGVLLPFLKWFIGGSGTKSLKLLNFVVRSPWKTIDAIAEIKQPVLFLSGLQDEMVPPFHMKMLYAKAAARNPQCTFVEFPSGMHMDTWLSGGEVYWKTNLQFLEKYAPEKRKEDTGR

SEQ ID NO: 23604 - protein, 210 aa, Arabidopsis thaliana
  peptide (1)..(210): Ceres Seq. ID no. 12421271
MVRIMIQKLKCNVFMLSYRGYGASEGYPSQQGIIKDAQAALDHLSGRTDIDTSRIVVFGRSLGGAVGAVLTKNNPDKVSALILENTFTSILDMAGVLLPFLKWFIGGSGTKSLKLLNFVVRSPWKTIDAIAEIKQPVLFLSGLQDEMVPPFHMKMLYAKAAARNPQCTFVEFPSGMHMDTWLSGGEVYWKTNLQFLEKYAPEKRKEDTGR

SEQ ID NO: 23605 - DNA, 1067 bp, Arabidopsis thaliana
  misc_feature (1)..(1067): Ceres Seq. ID no. 12421908
  misc_feature (1)..(1067): Ortholog of  Ceres SEQ ID NO 14316161 as cited in SEQ ID NO 52384
  misc_feature (1)..(1067): Ortholog of  Ceres SEQ ID NO 14315249 as cited in SEQ ID NO 52512
  misc_feature (1)..(1067): Ortholog of  Ceres SEQ ID NO 15174595 as cited in SEQ ID NO 53460
  misc_feature (1)..(1067): Ortholog of  Ceres SEQ ID NO 13503553 as cited in SEQ ID NO 64822
  misc_feature (1)..(1067): Ortholog of  Ceres SEQ ID NO 13660155 as cited in SEQ ID NO 67635
cccccacaccttctctttctcttagcatactctgctcttcctctctctgttgttctctgttccaaaggctttgagaaaaaatgaagttcgagaaccggtacggacttgcaacgtcgcagaagtacgactgtctcttgttcgatttggacgatactctttatcctcttagctccggaatcgcaagagaatgtgggaacaacatcaaagattacatgaccgagaaactcggtataccgaaggacaaaatcgtcgaattgtctgatcttctatacaagaactatggaacaacaatggctggtcttagggcgatcggatatgaatttgactacgatgagtaccacagcttcgtccacggtcgtttaccctatgacaacataaaacccgaccttgttcttcgcagcctcttgcttagcctccctctccgcaaagtcatctttaccaacgcggacagagttcacgcggccaaggcgttgaagaagttgggattagaggattgtttcgaaggaatcatatgtttcgaaacgctaaacctcatgcacacaaacgctgcgtctaacaattccgagatttttgatatcgttggacattttaaccggtctgaaccggtcggttcacttcccaaaacgcctgttgtgtgtaaaccatctgaatctgctatcgagaaagctcttgaaatcgccaatattgatcctaaccgaacgctgttctttgaggacagtgtccgaaacgtacaagctggaaaacgcgttggtctttacacggttctggttggtaaatcgaccaaagtcaaaggagcggattacgcgttggaaaacattcacaacatgaaagaggcgataccggagttatgggaatccgacaggaaatcgtcggatgttggatattccggcaaggtcgccgttgagacttctgttagagcttaggaggagtactgtttcgccgttgtacctaattttccaccactgtcattttcattttcttttttcaaatgacgtaatgtcatttttgtttttttttcgacttgtgtttataaaagattaataaaaaatgagaaaataatttccatc

SEQ ID NO: 23606 - protein, 280 aa, Arabidopsis thaliana
  peptide (1)..(280): Ceres Seq. ID no. 12421909
MKFENRYGLATSQKYDCLLFDLDDTLYPLSSGIARECGNNIKDYMTEKLGIPKDKIVELSDLLYKNYGTTMAGLRAIGYEFDYDEYHSFVHGRLPYDNIKPDLVLRSLLLSLPLRKVIFTNADRVHAAKALKKLGLEDCFEGIICFETLNLMHTNAASNNSEIFDIVGHFNRSEPVGSLPKTPVVCKPSESAIEKALEIANIDPNRTLFFEDSVRNVQAGKRVGLYTVLVGKSTKVKGADYALENIHNMKEAIPELWESDRKSSDVGYSGKVAVETSVRA

SEQ ID NO: 23607 - protein, 236 aa, Arabidopsis thaliana
  peptide (1)..(236): Ceres Seq. ID no. 12421910
MTEKLGIPKDKIVELSDLLYKNYGTTMAGLRAIGYEFDYDEYHSFVHGRLPYDNIKPDLVLRSLLLSLPLRKVIFTNADRVHAAKALKKLGLEDCFEGIICFETLNLMHTNAASNNSEIFDIVGHFNRSEPVGSLPKTPVVCKPSESAIEKALEIANIDPNRTLFFEDSVRNVQAGKRVGLYTVLVGKSTKVKGADYALENIHNMKEAIPELWESDRKSSDVGYSGKVAVETSVRA

SEQ ID NO: 23608 - protein, 210 aa, Arabidopsis thaliana
  peptide (1)..(210): Ceres Seq. ID no. 12421911
MAGLRAIGYEFDYDEYHSFVHGRLPYDNIKPDLVLRSLLLSLPLRKVIFTNADRVHAAKALKKLGLEDCFEGIICFETLNLMHTNAASNNSEIFDIVGHFNRSEPVGSLPKTPVVCKPSESAIEKALEIANIDPNRTLFFEDSVRNVQAGKRVGLYTVLVGKSTKVKGADYALENIHNMKEAIPELWESDRKSSDVGYSGKVAVETSVRA

SEQ ID NO: 23609 - DNA, 1451 bp, Arabidopsis thaliana
  misc_feature (1)..(1451): Ceres Seq. ID no. 12338323
  misc_feature (1)..(1451): Ortholog of  Ceres SEQ ID NO 15170698 as cited in SEQ ID NO 58326
  misc_feature (1)..(1451): Ortholog of  Ceres SEQ ID NO 14302279 as cited in SEQ ID NO 68864
aaaaaaaaactaaaccctagaatgcgtatcgctttctttgacctgaatgtgcaatcaaactcctcttagatctatggctctcgattcttccggaaaacaacctgagcagcagcaacaacaacaaccacgagcctcctctggaaacggcaaggcaagattgaagcttcggagaacccctaatgaagaacatgagcctgagaactatgaagatctacctttggactatagtccttctctgttcacctctcttgagcgttacttacctgagcagcttctcaattccacacgaatcgataaagctagtttcatgagagaccttcttctccgatattcccctgatactgagcgagttcgggttctgaggcataaagaatacagagacaaaatcatgtcttcttaccaacgtctgcatggagagatctatactcttgaccctagtagtttctttgcgccatcgtttcttggagcttttagtcggaagtcagagccgaatttcagaagtagtatggttgaatcttatcctgggattttcacttttgaaatgtttaaaccacagttttgtgaaatgttattagcagaggttgaacatatggagaaatgggtttatgattcaagatccacaataatgagacctaatacgatgaacaatttcggtgttgtccttgatgattttggctttgatagcatgcttcagaagttggttgatgactttattagtcctatagctcaagttctgttcccggaagtctgtggaacctctttagattctcaccatggctatattgttgaatatggaaaagatagggatgttgatcttgggtttcatgtggatgactcagaagttagtttaaatgtctgcttgggtaaacaattctctggcggggagctgtattttcgaggggtgagatgtgataagcatgtgaattccgatagcactgaaaaggaagtttatgattactctcatgtacctggtcacgccattcttcatcgtggacgtcatcgccatggtgctagagctacaacttctggacaccgagccaacttgattttgtggtgtagaagctcaacttttcgagagatgaagaattatcagagagatttctcaggttggtgtggaggatgcaaacttgataaacagagaaggcagcgtgattcgattaatgcaactaaagagatactagcaaggaaagctgcagagaagacacttgttgagctggcttcaaaatcatgtgccgagtaaacaaaaacaagaatatgtcaaatacctcatcttctttgtaccattccagaggctatgtgtatatagagaggcaagttaaatcgtttgtttgtaagcaagcattagatacctttgtcaaaggtaaattttgttccatttttcagattgctgcctgtaacaataaatttcttagaggagtgaaggcaaatgaaatacacaaatgttatctctt

SEQ ID NO: 23610 - protein, 397 aa, Arabidopsis thaliana
  peptide (1)..(397): Ceres Seq. ID no. 12338324
MCNQTPLRSMALDSSGKQPEQQQQQQPRASSGNGKARLKLRRTPNEEHEPENYEDLPLDYSPSLFTSLERYLPEQLLNSTRIDKASFMRDLLLRYSPDTERVRVLRHKEYRDKIMSSYQRLHGEIYTLDPSSFFAPSFLGAFSRKSEPNFRSSMVESYPGIFTFEMFKPQFCEMLLAEVEHMEKWVYDSRSTIMRPNTMNNFGVVLDDFGFDSMLQKLVDDFISPIAQVLFPEVCGTSLDSHHGYIVEYGKDRDVDLGFHVDDSEVSLNVCLGKQFSGGELYFRGVRCDKHVNSDSTEKEVYDYSHVPGHAILHRGRHRHGARATTSGHRANLILWCRSSTFREMKNYQRDFSGWCGGCKLDKQRRQRDSINATKEILARKAAEKTLVELASKSCAE

SEQ ID NO: 23611 - protein, 388 aa, Arabidopsis thaliana
  peptide (1)..(388): Ceres Seq. ID no. 12338325
MALDSSGKQPEQQQQQQPRASSGNGKARLKLRRTPNEEHEPENYEDLPLDYSPSLFTSLERYLPEQLLNSTRIDKASFMRDLLLRYSPDTERVRVLRHKEYRDKIMSSYQRLHGEIYTLDPSSFFAPSFLGAFSRKSEPNFRSSMVESYPGIFTFEMFKPQFCEMLLAEVEHMEKWVYDSRSTIMRPNTMNNFGVVLDDFGFDSMLQKLVDDFISPIAQVLFPEVCGTSLDSHHGYIVEYGKDRDVDLGFHVDDSEVSLNVCLGKQFSGGELYFRGVRCDKHVNSDSTEKEVYDYSHVPGHAILHRGRHRHGARATTSGHRANLILWCRSSTFREMKNYQRDFSGWCGGCKLDKQRRQRDSINATKEILARKAAEKTLVELASKSCAE

SEQ ID NO: 23612 - protein, 310 aa, Arabidopsis thaliana
  peptide (1)..(310): Ceres Seq. ID no. 12338326
MRDLLLRYSPDTERVRVLRHKEYRDKIMSSYQRLHGEIYTLDPSSFFAPSFLGAFSRKSEPNFRSSMVESYPGIFTFEMFKPQFCEMLLAEVEHMEKWVYDSRSTIMRPNTMNNFGVVLDDFGFDSMLQKLVDDFISPIAQVLFPEVCGTSLDSHHGYIVEYGKDRDVDLGFHVDDSEVSLNVCLGKQFSGGELYFRGVRCDKHVNSDSTEKEVYDYSHVPGHAILHRGRHRHGARATTSGHRANLILWCRSSTFREMKNYQRDFSGWCGGCKLDKQRRQRDSINATKEILARKAAEKTLVELASKSCAE

SEQ ID NO: 23613 - DNA, 1509 bp, Arabidopsis thaliana
  misc_feature (1)..(1509): Ceres Seq. ID no. 12339528
  misc_feature (1)..(1509): Ortholog of  Ceres SEQ ID NO 14306667 as cited in SEQ ID NO 52925
  misc_feature (1)..(1509): Ortholog of  Ceres SEQ ID NO 15177522 as cited in SEQ ID NO 0
atccactacgatagttttcttcagcaatcacactctctctttgttcgagtaccaacaatggcccttcaagctgcttctttggtctcctctgctttctctgttcgcaaagatgcgaagttgaatgcttcttcatcatctttcaaggactcgagtctttttggtgcctccattaccgaccaaatcaaatccgaacatggatcttcctcgttaagattcaagagagaacagagcttaaggaatctagcaattcgagcccaaaccgctgcgacttcaagccctacagttacaaaatccgtggacggcaagaaaacgttgaggaaaggaaatgtggtggtcactggagcctcgtctgggttaggtctagccacggctaaagctctagctgagacagggaaatggaacgtgataatggcgtgcagagacttccttaaagccgagagagctgctaaatccgtagggatgcctaaagacagctacacagtgatgcatttagacttagcctcgttggacagcgtgagacagtttgttgataatttcaggagaacagagacgcctctcgatgttttggtctgcaatgctgcggtttatttcccgacagctaaagagcctacttacagtgctgaagggtttgagcttagtgttgcgacgaaccatttgggacattttcttctcgcaaggttgttgcttgatgacttgaagaaatctgattacccttcaaagcgtctcatcatcgtcggatccattaccgggaacacgaatacattggcgggtaatgtaccaccgaaggcgaatctcggtgatttgaggggtttagccggcggattaaacggtttaaacagctcagctatgattgatggaggagatttcgacggtgcaaaggcttacaaagacagtaaagtctgcaatatgttgacaatgcaagagtttcacaggcgtttccatgaagaaactggagtcactttcgcttcgctttaccccggttgcatcgcctccacaggtttattccgagagcacattcctctcttccgtgccctcttccctccctttcagaagtacatcactaaaggatatgtctccgaaacagagtcaggcaaaagacttgctcaggtggtgagtgatccaagcttgacgaaatcaggggtttattggagctggaacaatgcttcggcttcttttgagaaccagttatcagaagaagcaagtgacgttgagaaggctcgtaaagtgtgggagatcagtgagaagctcgtgggcttggcctaataaacttgaagtctgttaaatttgatgacacctctcggtaccaatcgaagaaatctagtgaatttccgggatttttagatatctgattctgttgcgaagtttttttatccttattagtgtctgttgagtgtagattgcttggcgagtagcccacaataaagaaataaaaatggcgaatctttagctttatttactctgtttttcatcgaaacagattcagtaatatatactctgttttttcatctg

SEQ ID NO: 23614 - protein, 420 aa, Arabidopsis thaliana
  peptide (1)..(420): Ceres Seq. ID no. 12339530
IHYDSFLQQSHSLFVRVPTMALQAASLVSSAFSVRKDAKLNASSSSFKDSSLFGASITDQIKSEHGSSSLRFKREQSLRNLAIRAQTAATSSPTVTKSVDGKKTLRKGNVVVTGASSGLGLATAKALAETGKWNVIMACRDFLKAERAAKSVGMPKDSYTVMHLDLASLDSVRQFVDNFRRTETPLDVLVCNAAVYFPTAKEPTYSAEGFELSVATNHLGHFLLARLLLDDLKKSDYPSKRLIIVGSITGNTNTLAGNVPPKANLGDLRGLAGGLNGLNSSAMIDGGDFDGAKAYKDSKVCNMLTMQEFHRRFHEETGVTFASLYPGCIASTGLFREHIPLFRALFPPFQKYITKGYVSETESGKRLAQVVSDPSLTKSGVYWSWNNASASFENQLSEEASDVEKARKVWEISEKLVGLA

SEQ ID NO: 23615 - protein, 401 aa, Arabidopsis thaliana
  peptide (1)..(401): Ceres Seq. ID no. 12339531
MALQAASLVSSAFSVRKDAKLNASSSSFKDSSLFGASITDQIKSEHGSSSLRFKREQSLRNLAIRAQTAATSSPTVTKSVDGKKTLRKGNVVVTGASSGLGLATAKALAETGKWNVIMACRDFLKAERAAKSVGMPKDSYTVMHLDLASLDSVRQFVDNFRRTETPLDVLVCNAAVYFPTAKEPTYSAEGFELSVATNHLGHFLLARLLLDDLKKSDYPSKRLIIVGSITGNTNTLAGNVPPKANLGDLRGLAGGLNGLNSSAMIDGGDFDGAKAYKDSKVCNMLTMQEFHRRFHEETGVTFASLYPGCIASTGLFREHIPLFRALFPPFQKYITKGYVSETESGKRLAQVVSDPSLTKSGVYWSWNNASASFENQLSEEASDVEKARKVWEISEKLVGLA

SEQ ID NO: 23616 - protein, 284 aa, Arabidopsis thaliana
  peptide (1)..(284): Ceres Seq. ID no. 12339533
MACRDFLKAERAAKSVGMPKDSYTVMHLDLASLDSVRQFVDNFRRTETPLDVLVCNAAVYFPTAKEPTYSAEGFELSVATNHLGHFLLARLLLDDLKKSDYPSKRLIIVGSITGNTNTLAGNVPPKANLGDLRGLAGGLNGLNSSAMIDGGDFDGAKAYKDSKVCNMLTMQEFHRRFHEETGVTFASLYPGCIASTGLFREHIPLFRALFPPFQKYITKGYVSETESGKRLAQVVSDPSLTKSGVYWSWNNASASFENQLSEEASDVEKARKVWEISEKLVGLA

SEQ ID NO: 23617 - DNA, 778 bp, Arabidopsis thaliana
  misc_feature (1)..(778): Ceres Seq. ID no. 13486892
  misc_feature (1)..(778): Ortholog of  Ceres SEQ ID NO 13655287 as cited in SEQ ID NO 63004
  misc_feature (1)..(778): Ortholog of  Ceres SEQ ID NO 15173178 as cited in SEQ ID NO 64574
atcttgtatttagttctcttgttaaactttgcctcttcgtcttttgctccagagtttttgtgcggctgccattttcgatttccaaaggttttgagctttgaaaaatggtgagaatcagtgtgcttaacgatgctcttaagagtatgtacaatgctgagaagagagggaagaggcaagtcatgatcaggccttcctctaaagtgatcatcaagtttcttatcgtcatgcagaaacacggttacattggtgagtttgagtacgttgatgaccacaggtctggaaagatcgtggtcgagcttaatggaagacttaacaaatgtggagtcatcagtcctcgtttcgatgttggagttaaggagattgaaggctggaccgctcgtcttcttccttccagacagtttgggtacattgttcttacgacctcggctggtattatggaccacgaagaagccaggagaaagaatgttggtggcaaggttcttggcttcttttactgaatcaagtcttgaagaagagaatcattatggttggtgatactttgcttctccttttggtgagaagaggattccgattgagctaaatgtttaagggtagtagagtttttgatgtcttcttctgtttgttatctttagatgatatgccattttgttcgttttggtttttgcgcaaaagttgttaaagacttgcaaagtagacagtaatttcaatttctgttttctacaacaaaaaacacttgcttttcttgagccaatcttatctatcgagacgtttcaatttc

SEQ ID NO: 23618 - protein, 130 aa, Arabidopsis thaliana
  peptide (1)..(130): Ceres Seq. ID no. 13486893
MVRISVLNDALKSMYNAEKRGKRQVMIRPSSKVIIKFLIVMQKHGYIGEFEYVDDHRSGKIVVELNGRLNKCGVISPRFDVGVKEIEGWTARLLPSRQFGYIVLTTSAGIMDHEEARRKNVGGKVLGFFY

SEQ ID NO: 23619 - protein, 117 aa, Arabidopsis thaliana
  peptide (1)..(117): Ceres Seq. ID no. 13486894
MYNAEKRGKRQVMIRPSSKVIIKFLIVMQKHGYIGEFEYVDDHRSGKIVVELNGRLNKCGVISPRFDVGVKEIEGWTARLLPSRQFGYIVLTTSAGIMDHEEARRKNVGGKVLGFFY

SEQ ID NO: 23620 - protein, 105 aa, Arabidopsis thaliana
  peptide (1)..(105): Ceres Seq. ID no. 13486895
MIRPSSKVIIKFLIVMQKHGYIGEFEYVDDHRSGKIVVELNGRLNKCGVISPRFDVGVKEIEGWTARLLPSRQFGYIVLTTSAGIMDHEEARRKNVGGKVLGFFY

SEQ ID NO: 23621 - DNA, 1385 bp, Arabidopsis thaliana
  misc_feature (1)..(1385): Ceres Seq. ID no. 12371612
  misc_feature (1)..(1385): Ortholog of  Ceres SEQ ID NO 15178909 as cited in SEQ ID NO 0
agaaaacaaaaaatagaataacaaatagtaatattagtagtaatttttttatttttttggggaaaaaatgggtggatattttggagtttctacaatttttattatctgtttgttgggaatttcagccaatgctgaggtattcaccattggttcttcatcaggttctgatattactcaggcacttctgaaagcattcacatcggcatgccaatcttcgtcaccaagcaaagtggtgatcccaaaaggagagttcaagcttggtgagatcgagatgaggggtccatgcaaagctcccattgaggtcacccttcaaggtactgtcaaagctgacggtaacgctatccaagggaaggaaaaatgggtcgtcttcggcaacattgatggctttaagttgaacggaggaggagccttcgacggtgaaggcaatgcagcttggagagtcaataactgtcacaagactttcgagtgcaagaaacttcccatcagtataaggtttgacttcatattgaactctgagatcagagacatatcctcgatcgatgccaagaacttccacatcaacgtgttgggagccaagaacatgaccatgaataacatcaagatcgtcgccccagaagacagtcccaacactgatggaatccatttgggaagaagtgacggagtcaagatccttaactctttcatctccaccggagacgattgtatctccgtcggagatgggatgaagaaccttcacgtggagaaggtcacatgcggtccgggacacggaatcagtgtcgggagtcttggaaggtacggacacgagcaagatgtcagcggcattaaggtcatcaactgcactcttcaagagactgacaacgggttgaggatcaagacatggccctctgcagcttgctccaccaccgcatccgatattcatttcgaggatattatcctcaaggacgttagcaacccaatcctcatcgaccaagagtactgcccttggaaccagtgcaacaagcaaaaagcatcaacaattaagttggtgaacattagcttcaagaacatcagaggaacatcagggaacaaggacgcggtgaagctactttgcagcaaggggtatccgtgccagaacgtggagattggagacattgatatcaagtacaatggagcagatggtccagccactttccattgctcaaacgtcagtcccaaaatcttgggatctcagagccctaaagcatgcagcgctccagcagcctaaatgtagaagctctaaaacaattaattaatcaaacactcattcaattcaattttatatatgaatttcttctacacagtaactatatacgatgtatgctctcatttaattcaacaatgaatgcatcatccattatttcttggtg

SEQ ID NO: 23622 - protein, 391 aa, Arabidopsis thaliana
  peptide (1)..(391): Ceres Seq. ID no. 12371613
MGGYFGVSTIFIICLLGISANAEVFTIGSSSGSDITQALLKAFTSACQSSSPSKVVIPKGEFKLGEIEMRGPCKAPIEVTLQGTVKADGNAIQGKEKWVVFGNIDGFKLNGGGAFDGEGNAAWRVNNCHKTFECKKLPISIRFDFILNSEIRDISSIDAKNFHINVLGAKNMTMNNIKIVAPEDSPNTDGIHLGRSDGVKILNSFISTGDDCISVGDGMKNLHVEKVTCGPGHGISVGSLGRYGHEQDVSGIKVINCTLQETDNGLRIKTWPSAACSTTASDIHFEDIILKDVSNPILIDQEYCPWNQCNKQKASTIKLVNISFKNIRGTSGNKDAVKLLCSKGYPCQNVEIGDIDIKYNGADGPATFHCSNVSPKILGSQSPKACSAPAA

SEQ ID NO: 23623 - protein, 323 aa, Arabidopsis thaliana
  peptide (1)..(323): Ceres Seq. ID no. 12371614
MRGPCKAPIEVTLQGTVKADGNAIQGKEKWVVFGNIDGFKLNGGGAFDGEGNAAWRVNNCHKTFECKKLPISIRFDFILNSEIRDISSIDAKNFHINVLGAKNMTMNNIKIVAPEDSPNTDGIHLGRSDGVKILNSFISTGDDCISVGDGMKNLHVEKVTCGPGHGISVGSLGRYGHEQDVSGIKVINCTLQETDNGLRIKTWPSAACSTTASDIHFEDIILKDVSNPILIDQEYCPWNQCNKQKASTIKLVNISFKNIRGTSGNKDAVKLLCSKGYPCQNVEIGDIDIKYNGADGPATFHCSNVSPKILGSQSPKACSAPAA

SEQ ID NO: 23624 - protein, 220 aa, Arabidopsis thaliana
  peptide (1)..(220): Ceres Seq. ID no. 12371615
MTMNNIKIVAPEDSPNTDGIHLGRSDGVKILNSFISTGDDCISVGDGMKNLHVEKVTCGPGHGISVGSLGRYGHEQDVSGIKVINCTLQETDNGLRIKTWPSAACSTTASDIHFEDIILKDVSNPILIDQEYCPWNQCNKQKASTIKLVNISFKNIRGTSGNKDAVKLLCSKGYPCQNVEIGDIDIKYNGADGPATFHCSNVSPKILGSQSPKACSAPAA

SEQ ID NO: 23625 - DNA, 1724 bp, Arabidopsis thaliana
  misc_feature (1)..(1724): Ceres Seq. ID no. 12338453
  misc_feature (1)..(1724): Ortholog of  Ceres SEQ ID NO 14302588 as cited in SEQ ID NO 0
acaagaagaatattcacagagaagagagagcgataataatggcgtttaagggtttcgcgtgttttttcgattcttttgttgttgtctctattcgtttcctctatacgaagcgaggagacgaaggaatttgtcttgactctcgatcactctaacttcaccgaaaccatctccaagcacgatttcatcgtcgtcgagttctacgccccttggtgtggtcactgccagaagcttgctcctgagtacgagaaggctgcatcagagttgagtagtcataaccctcctcttgctctcgccaagatcgatgctagtgaagaagcaaacaaagaatttgctaatgagtacaagattcagggtttccccactcttaagattttgagaaatggagggaagtcggttcaagattacaacggacctcgtgaagctgagggtattgtcacttatttgaagaagcaaagtggtcctgcttctgttgaaattaagtcagctgattctgccactgaggttgttggtgaaaagaatgttgttgctgttggagtgttccctaaattatccggggatgagtttgattctttcatggcccttgctgagaaattgcgtgctgactatgatttcgcacacactttggatgctaagtttcttcctcgtggagagtctgtggaaggacctgcagtgaggctgttcaagccttttgatgaattgtttgttgactccaaggacttcaatggggaagctctagagaaatttgtcaaagaatcaagtatcccacttgtcaccgtctttgacattgatccaaacaaccacccttatgttgccaaattctttgaaagccctgccactaaggcgatgatgttcgttaacttcactggagcaacagctgaagctctaaaatcaaagtaccgtgaagtagctacatccaacaaagatcaaagtcttgccttccttgttggtgatgcagagagcagccaaggcgctttccagtactttggactcgaagagagccaagttcccctcatcatcatccagaccccagataacaagaagtatttgaaagtcaacgttgaggttgaccagattgaatcatggttcaaggacttccaggacggaaaagttgctgtccacaaaaaatcccaacctattccagctgagaacaacgaacctgtgaaggttgttgttgccgagagccttgacgacatagttttcaagtctggaaagaatgtcttgattgagttctatgcaccatggtgtggacattgtcaaaaacttgctccaatcttggacgaagtggctttgtcattccagaacgacccaagtgtgatcatagcaaaattggacgcaaccgcaaatgatatcccaagtgataccttcgatgtgaaaggattcccgaccatttacttcaggtcagcgagcggaaatgttgtagtgtacgaaggagacaggacaaaggaagacttcataaacttcgttgagaagaacagtgagaagaagccaacttctcatggagaagagtctaccaagagtgaggaacctaagaagaccgaggaaacggccgcaaaggacgagctgtagaaatctcatgagttttgtttcggaatttgagtaggagcgtttctcttcttcaccatatccaacagaatcttcttttttctttagcagttttacagttttatcttttttgctctcttgttcgaacccaaaattatccccattaataaaaagttaaacct

SEQ ID NO: 23626 - protein, 330 aa, Arabidopsis thaliana
  peptide (1)..(330): Ceres Seq. ID no. 12338454
MALAEKLRADYDFAHTLDAKFLPRGESVEGPAVRLFKPFDELFVDSKDFNGEALEKFVKESSIPLVTVFDIDPNNHPYVAKFFESPATKAMMFVNFTGATAEALKSKYREVATSNKDQSLAFLVGDAESSQGAFQYFGLEESQVPLIIIQTPDNKKYLKVNVEVDQIESWFKDFQDGKVAVHKKSQPIPAENNEPVKVVVAESLDDIVFKSGKNVLIEFYAPWCGHCQKLAPILDEVALSFQNDPSVIIAKLDATANDIPSDTFDVKGFPTIYFRSASGNVVVYEGDRTKEDFINFVEKNSEKKPTSHGEESTKSEEPKKTEETAAKDEL

SEQ ID NO: 23627 - protein, 240 aa, Arabidopsis thaliana
  peptide (1)..(240): Ceres Seq. ID no. 12338455
MMFVNFTGATAEALKSKYREVATSNKDQSLAFLVGDAESSQGAFQYFGLEESQVPLIIIQTPDNKKYLKVNVEVDQIESWFKDFQDGKVAVHKKSQPIPAENNEPVKVVVAESLDDIVFKSGKNVLIEFYAPWCGHCQKLAPILDEVALSFQNDPSVIIAKLDATANDIPSDTFDVKGFPTIYFRSASGNVVVYEGDRTKEDFINFVEKNSEKKPTSHGEESTKSEEPKKTEETAAKDEL

SEQ ID NO: 23628 - protein, 239 aa, Arabidopsis thaliana
  peptide (1)..(239): Ceres Seq. ID no. 12338456
MFVNFTGATAEALKSKYREVATSNKDQSLAFLVGDAESSQGAFQYFGLEESQVPLIIIQTPDNKKYLKVNVEVDQIESWFKDFQDGKVAVHKKSQPIPAENNEPVKVVVAESLDDIVFKSGKNVLIEFYAPWCGHCQKLAPILDEVALSFQNDPSVIIAKLDATANDIPSDTFDVKGFPTIYFRSASGNVVVYEGDRTKEDFINFVEKNSEKKPTSHGEESTKSEEPKKTEETAAKDEL

SEQ ID NO: 23629 - DNA, 1133 bp, Arabidopsis thaliana
  misc_feature (1)..(1133): Ceres Seq. ID no. 12394768
  misc_feature (1)..(1133): Ortholog of  Ceres SEQ ID NO 12612333 as cited in SEQ ID NO 56421
aatgcaacaagagtttcattgaaaatttcaagaaccctagttaataacgataatgggttcgagagttttggcttccttctttgttttcttaatcttcacggtcatcacattgcctcccacgatccaagcttgcactccttgtactcgtcctcatcctccggttccgaaacctccacaacacggcggtggtggaggtggtggtagcaagccgcctccacatcacggtggaaaaggtggtggtaaacccccaccccacggtggaaaaggtggaggaccgccgcatcatggtggaggaggaggaggaggagggaaatcaccgccggttgttagacctcctcccgtagtggtgaggccaccgccaatcataagacctcctccggtcgtctatccaccaccaattgtgaggccaccgccaatcacaagacctcccatcataatccctccaattcaaccaccgccggttacaactcctccgggactcctccctccgatcacaactcctccgggactcctccctccagtcacaactcctccgggacttctccctccagtcacaactcctccaggacttctccctccaatcattaacccacctccggtcacagtcccaccaccatcgtccggctatccaccatatggtccaccttccggtggaggaggaggaggcggcggcaaacaaccaacgtgtccgatcaatgcattgaagcttggagcctgtgttgatgttttgggaggattgatccatataggacttggaaatccggtggagaatgtgtgttgtccagtgttacaagggttacttgagctagaagcagccgtttgtctttgcacaaccataagacttaagcttctcaacttaaacatcttcattcctcttgcacttcaagctcttatcacttgtgggatcaatcctccttctggttttgtctgccctcctctcacttgatctaaaaacatccccttgatttaacaaatgtacgtatgatcaagggtggttttcgaggcttttgtaataattcaaatatatatgtggtacttttgattatcaggtttgttgattatctagggttttaattaacaagtgttgttttctgttattgtcgttgttgttataattaagctagggtttttgc

SEQ ID NO: 23630 - protein, 297 aa, Arabidopsis thaliana
  peptide (1)..(297): Ceres Seq. ID no. 12394769
MGSRVLASFFVFLIFTVITLPPTIQACTPCTRPHPPVPKPPQHGGGGGGGSKPPPHHGGKGGGKPPPHGGKGGGPPHHGGGGGGGGKSPPVVRPPPVVVRPPPIIRPPPVVYPPPIVRPPPITRPPIIIPPIQPPPVTTPPGLLPPITTPPGLLPPVTTPPGLLPPVTTPPGLLPPIINPPPVTVPPPSSGYPPYGPPSGGGGGGGGKQPTCPINALKLGACVDVLGGLIHIGLGNPVENVCCPVLQGLLELEAAVCLCTTIRLKLLNLNIFIPLALQALITCGINPPSGFVCPPLT

SEQ ID NO: 23631 - DNA, 1180 bp, Arabidopsis thaliana
  misc_feature (1)..(1180): Ceres Seq. ID no. 12330478
  misc_feature (1)..(1180): Ortholog of  Ceres SEQ ID NO 14306066 as cited in SEQ ID NO 57378
accactatgagaggatcctagggttactactaatctcgaaatcaatcaaatcaaagcatccatttttgattcagacttcagagagacagagaaggaagaagaagaagaagaagaagaaaaaactatggagaatgagagggaaaagcaggtttacttggctaagctctccgagcaaaccgaaagatacgatgaaatggtggaggcgatgaagaaagttgctcagcttgatgtggagctaactgtggaagagaggaatcttgtatctgtagggtacaagaatgtgattggtgcaaggagagcatcatggagaatactatcttccattgagcagaaggaagagtccaagggaaatgatgaaaatgtcaagaggcttaagaattatcgtaagagagttgaagatgagcttgctaaagtttgtaatgacatcttgtctgtcattgataagcatctcattccatcgtctaacgctgtggagtcaactgtctttttctacaaaatgaaaggagattactatcgctatcttgcggagttcagttctggtgctgaacgcaaggaagctgcagatcagtctcttgaagcatataaggctgctgttgctgctgcagagaatggtttggcacccacacatccagttagacttggcttggcgttgaacttttcagttttctactatgagatcttgaactctcccgaaagcgcatgccaattggctaagcaagcattcgatgatgcaattgctgaacttgacagcctcaacgaggaatcatacaaagacagcactcttattatgcagctacttagagacaatctcaccttgtggacttcagaccttaatgaggaaggagatgagagaaccaaaggtgctgatgagcctcaagatgagaactaaatcctctgtgagaagagaaacgactcttgctgcatcctgaatcttgaagtgaagacagtaagtgtcgttgtttgttactcgaatgtgtaatttttaatctatgtctttcttgatggtgttttccagattcttgaacttttcacaacacaacactgcgttgcgtatcttcaaccctcttatgatgtggttgaattctgttttacgcttagtttgcttcttttgttgttgaattgagccagcaggcatgatttgggtttttgtttatcagaatattaggcgtatcatggtctc

SEQ ID NO: 23632 - protein, 254 aa, Arabidopsis thaliana
  peptide (1)..(254): Ceres Seq. ID no. 12330479
MENEREKQVYLAKLSEQTERYDEMVEAMKKVAQLDVELTVEERNLVSVGYKNVIGARRASWRILSSIEQKEESKGNDENVKRLKNYRKRVEDELAKVCNDILSVIDKHLIPSSNAVESTVFFYKMKGDYYRYLAEFSSGAERKEAADQSLEAYKAAVAAAENGLAPTHPVRLGLALNFSVFYYEILNSPESACQLAKQAFDDAIAELDSLNEESYKDSTLIMQLLRDNLTLWTSDLNEEGDERTKGADEPQDEN

SEQ ID NO: 23633 - protein, 231 aa, Arabidopsis thaliana
  peptide (1)..(231): Ceres Seq. ID no. 12330480
MVEAMKKVAQLDVELTVEERNLVSVGYKNVIGARRASWRILSSIEQKEESKGNDENVKRLKNYRKRVEDELAKVCNDILSVIDKHLIPSSNAVESTVFFYKMKGDYYRYLAEFSSGAERKEAADQSLEAYKAAVAAAENGLAPTHPVRLGLALNFSVFYYEILNSPESACQLAKQAFDDAIAELDSLNEESYKDSTLIMQLLRDNLTLWTSDLNEEGDERTKGADEPQDEN

SEQ ID NO: 23634 - protein, 227 aa, Arabidopsis thaliana
  peptide (1)..(227): Ceres Seq. ID no. 12330481
MKKVAQLDVELTVEERNLVSVGYKNVIGARRASWRILSSIEQKEESKGNDENVKRLKNYRKRVEDELAKVCNDILSVIDKHLIPSSNAVESTVFFYKMKGDYYRYLAEFSSGAERKEAADQSLEAYKAAVAAAENGLAPTHPVRLGLALNFSVFYYEILNSPESACQLAKQAFDDAIAELDSLNEESYKDSTLIMQLLRDNLTLWTSDLNEEGDERTKGADEPQDEN

SEQ ID NO: 23635 - DNA, 1670 bp, Arabidopsis thaliana
  misc_feature (1)..(1670): Ceres Seq. ID no. 13576264
  misc_feature (1)..(1670): Ortholog of  Ceres SEQ ID NO 15176457 as cited in SEQ ID NO 55547
  misc_feature (1)..(1670): Ortholog of  Ceres SEQ ID NO 13594349 as cited in SEQ ID NO 58161
  misc_feature (1)..(1670): Ortholog of  Ceres SEQ ID NO 13663419 as cited in SEQ ID NO 66561
cttgtgattcttttccaatttcgtaattttagaaaagctgtagaagatggcgagtgtgtcgtggcgggctgtggctgtagctatggtggtggtgttgctgtcaatgcagtggtttgcagaagggtacccggaagaagatttggtggtgaggctgccaggtcaaccaactgttgggttcaaacaatacgcaggttatgttgatgtcgatgtgaaagctggtcggagtctgttctattactatgtggaggctgtgaaacaacctgactcaaaaccattgaccctttggcttaatggaggtcctggttgttcttcaattgggggaggagctttcactgagttgggtccattttaccccacaggagatggccgtggcctccgagttaactccatgtcttggaacaaagcctcgaacctgctatttgtggagtcaccggctggagtaggatggtcttactctaaccgaagctctgattacaacaccggggacaaatctactgcaaacgatatgcttgtgttcttgttgagatggttcgagaagttcccaaagttgaagtctcgggatctctttcttactggcgaaagctatgcaggacattacatacctcaactggctgatgcgattctcagctacaattcacactcaagtggattcaaattcaacatcaaaggcgttgctattgggaatccacttctgaagcttgacagagacagtccagctacctacgagttcttctggtcgcatggcatgatctctgatgaactaaaactaacaatcacaagccaatgtgactttgatgattacacatttgctagcccccataatgtaagcacggcctgcaatgaagctattagtgaaactgaaaacattatcactgagtatgtcaacaactatgatgttctcctcgatgtatgttatccgtctatcgtccagcaagagctgaggctcaagaaaatggctactaaaatgagcatgggagtggatgtgtgtatgacctatgaaagacggttctactttaatcttccagaggtacaaaaggcgcttcatgcgaaccgtactcatctgccttattcatggtcaatgtgcagcggcgtgttaaactactctgacatcgatgggaacatcgatatgctaccgattctgaagagaattatacagaacaaaactcctgtttggatcttcagtggagatcaagattctgtagttccattcggaggttcaagaactctcgtaagagaacttgctcaagatctcaacttcaagacaacagttccctatggagcctggttccacaaaagccaggttggaggctgggccatagagtatggaaaactactgacgtttgcaacagtgagaggagcggctcatatggtaccgtatgcacagccctcacgagctctacatttgttcagtagctttgtaagtggccggagattacccaacaacacacattcttctactgatgaatgaaagagcagaggtatatcttttgtaagaaaaatgtagtttttgtatttaatttatctgtctcaggccttagattagtagagatagaaacatgtaaaagtttgtgttgtggtttggttggatcttcaagtgtagtttgttttagttatctcaaacgttgacaacaattctctttagtcatgtttatattgaatcgaatttatct

SEQ ID NO: 23636 - protein, 473 aa, Arabidopsis thaliana
  peptide (1)..(473): Ceres Seq. ID no. 13576265
MASVSWRAVAVAMVVVLLSMQWFAEGYPEEDLVVRLPGQPTVGFKQYAGYVDVDVKAGRSLFYYYVEAVKQPDSKPLTLWLNGGPGCSSIGGGAFTELGPFYPTGDGRGLRVNSMSWNKASNLLFVESPAGVGWSYSNRSSDYNTGDKSTANDMLVFLLRWFEKFPKLKSRDLFLTGESYAGHYIPQLADAILSYNSHSSGFKFNIKGVAIGNPLLKLDRDSPATYEFFWSHGMISDELKLTITSQCDFDDYTFASPHNVSTACNEAISETENIITEYVNNYDVLLDVCYPSIVQQELRLKKMATKMSMGVDVCMTYERRFYFNLPEVQKALHANRTHLPYSWSMCSGVLNYSDIDGNIDMLPILKRIIQNKTPVWIFSGDQDSVVPFGGSRTLVRELAQDLNFKTTVPYGAWFHKSQVGGWAIEYGKLLTFATVRGAAHMVPYAQPSRALHLFSSFVSGRRLPNNTHSSTDE

SEQ ID NO: 23637 - protein, 461 aa, Arabidopsis thaliana
  peptide (1)..(461): Ceres Seq. ID no. 13576266
MVVVLLSMQWFAEGYPEEDLVVRLPGQPTVGFKQYAGYVDVDVKAGRSLFYYYVEAVKQPDSKPLTLWLNGGPGCSSIGGGAFTELGPFYPTGDGRGLRVNSMSWNKASNLLFVESPAGVGWSYSNRSSDYNTGDKSTANDMLVFLLRWFEKFPKLKSRDLFLTGESYAGHYIPQLADAILSYNSHSSGFKFNIKGVAIGNPLLKLDRDSPATYEFFWSHGMISDELKLTITSQCDFDDYTFASPHNVSTACNEAISETENIITEYVNNYDVLLDVCYPSIVQQELRLKKMATKMSMGVDVCMTYERRFYFNLPEVQKALHANRTHLPYSWSMCSGVLNYSDIDGNIDMLPILKRIIQNKTPVWIFSGDQDSVVPFGGSRTLVRELAQDLNFKTTVPYGAWFHKSQVGGWAIEYGKLLTFATVRGAAHMVPYAQPSRALHLFSSFVSGRRLPNNTHSSTDE

SEQ ID NO: 23638 - protein, 454 aa, Arabidopsis thaliana
  peptide (1)..(454): Ceres Seq. ID no. 13576267
MQWFAEGYPEEDLVVRLPGQPTVGFKQYAGYVDVDVKAGRSLFYYYVEAVKQPDSKPLTLWLNGGPGCSSIGGGAFTELGPFYPTGDGRGLRVNSMSWNKASNLLFVESPAGVGWSYSNRSSDYNTGDKSTANDMLVFLLRWFEKFPKLKSRDLFLTGESYAGHYIPQLADAILSYNSHSSGFKFNIKGVAIGNPLLKLDRDSPATYEFFWSHGMISDELKLTITSQCDFDDYTFASPHNVSTACNEAISETENIITEYVNNYDVLLDVCYPSIVQQELRLKKMATKMSMGVDVCMTYERRFYFNLPEVQKALHANRTHLPYSWSMCSGVLNYSDIDGNIDMLPILKRIIQNKTPVWIFSGDQDSVVPFGGSRTLVRELAQDLNFKTTVPYGAWFHKSQVGGWAIEYGKLLTFATVRGAAHMVPYAQPSRALHLFSSFVSGRRLPNNTHSSTDE

SEQ ID NO: 23639 - DNA, 783 bp, Arabidopsis thaliana
  misc_feature (1)..(783): Ceres Seq. ID no. 12338191
  misc_feature (1)..(783): Ortholog of  Ceres SEQ ID NO 12563476 as cited in SEQ ID NO 53763
aaaagagtaattgaacaaaagaaagaaaaactgataatgaagggtcttcatctccacctcgtcctagtcaccatgacgatcgttgcctccatcgccgccgctgcaccggctgctcccggaggagctctggctgatgaatgcaaccaggattttcaaaaggtgactttgtgtttggactttgcgaccgggaaggcaacaactccgtctaagaagtgttgtgacgctgttgaagatatcaaagaaagagatccaaagtgtttgtgtttcgttatacaacaagcgaagacaggaggacaagccttgaatgatcttggtgttcaagaagacaaactcattcaactcccaacttcttgtcagctccacaacgctagcattaccaactgtccaaagcttctagggatttcacctagctcgccagacgcagccgtattcacaaacaatgccacaacaacaccggtggcaccagcaggaaagtctccggcaactccagctacgtccacggataagggaggatcagcttcagcaaaggatggtcacgcagtcgttgctctagccgtcgctttgatggccgtctcctttgtcttgaccttgcctagacatgtcacattagggatgtaatcttttcttatgaagttggttggtgcttttgtttttgtcccttttgtttcaaaacttatctttcaagtgtgtttctttgttcggacatttgttgtaatgagtcaacttcccactcaaatctgatatctctccgcaaatgagtaaatttatgctatttcattttcg

SEQ ID NO: 23640 - protein, 205 aa, Arabidopsis thaliana
  peptide (1)..(205): Ceres Seq. ID no. 12338192
KRVIEQKKEKLIMKGLHLHLVLVTMTIVASIAAAAPAAPGGALADECNQDFQKVTLCLDFATGKATTPSKKCCDAVEDIKERDPKCLCFVIQQAKTGGQALNDLGVQEDKLIQLPTSCQLHNASITNCPKLLGISPSSPDAAVFTNNATTTPVAPAGKSPATPATSTDKGGSASAKDGHAVVALAVALMAVSFVLTLPRHVTLGM

SEQ ID NO: 23641 - protein, 193 aa, Arabidopsis thaliana
  peptide (1)..(193): Ceres Seq. ID no. 12338193
MKGLHLHLVLVTMTIVASIAAAAPAAPGGALADECNQDFQKVTLCLDFATGKATTPSKKCCDAVEDIKERDPKCLCFVIQQAKTGGQALNDLGVQEDKLIQLPTSCQLHNASITNCPKLLGISPSSPDAAVFTNNATTTPVAPAGKSPATPATSTDKGGSASAKDGHAVVALAVALMAVSFVLTLPRHVTLGM

SEQ ID NO: 23642 - protein, 181 aa, Arabidopsis thaliana
  peptide (1)..(181): Ceres Seq. ID no. 12338194
MTIVASIAAAAPAAPGGALADECNQDFQKVTLCLDFATGKATTPSKKCCDAVEDIKERDPKCLCFVIQQAKTGGQALNDLGVQEDKLIQLPTSCQLHNASITNCPKLLGISPSSPDAAVFTNNATTTPVAPAGKSPATPATSTDKGGSASAKDGHAVVALAVALMAVSFVLTLPRHVTLGM

SEQ ID NO: 23643 - DNA, 1113 bp, Arabidopsis thaliana
  misc_feature (1)..(1113): Ceres Seq. ID no. 12343579
  misc_feature (1)..(1113): Ortholog of  Ceres SEQ ID NO 13599585 as cited in SEQ ID NO 988
  misc_feature (1)..(1113): Ortholog of  Ceres SEQ ID NO 13594624 as cited in SEQ ID NO 55765
  misc_feature (1)..(1113): Ortholog of  Ceres SEQ ID NO 15177682 as cited in SEQ ID NO 0
aaaaaagaaaaaaaaactcagagcagaggagatcgagagagacaaagagagacaaagagagagagagagagagagagagagagagagagagagagatcttcaacaagcaatgtctatatccatggcgttattctctccgccgatctcttcctcacttcaaaaccctaatctcatccccaagatctcaacctctcttctctccaccaaacgtttctctctaatctccgtccctagagcttcctccgacaatggtacgacttcccccgtcgtgaaaattccgaagcctgcgtctgtagctgtagaggaagttccggttaaatctccggcggaaagctcctccgcttctgaaaacggcgccgttggaggtgaagcgactgattcgagtactgagacggtaatcaaatatcaaaatgcgaagtgggttaatggaacttgggatctgaaacagttcgagaaagatggcaaaactgattgggattctgttatcgtttctgaggcaaagaggagaaaatggcttgaagataacccggaaacaacgagtaacgacgagcttgttgtcttcgatacttcgattattccatggtgggcatggatgaagagataccatctacctgaagctgaacttctcaatggtcgtgctgcgatgatagggttcttcatggcttactttgttgatagtcttaccggagtaggacttgttgatcaaatggggaatttcttctgcaaaacactcttgtttgtggctgtagctggagttctcttcatccgtaagaatgaagatttagacaaacttaaggatctgttcgatgagactacgttatatgacaaacaatggcaagctgcatggaaagagccagattcatcaacagtttcttcaaagaagtgaacaagttcttacaatctttcattttcctttttttgttatgcaataatctgtgaatcagtgaaagtttatctctactgaactactgatcttcagattttgtaatctttctgctttaaaaatctctatgaagtagtctcaaagataatgtatcgaaggtctttgacttgtaaagcagacctatttcgttttgacgcttgataatttaatcaataagagatttttttttt

SEQ ID NO: 23644 - protein, 294 aa, Arabidopsis thaliana
  peptide (1)..(294): Ceres Seq. ID no. 12343580
KKKKKLRAEEIERDKERQRERERERERERERDLQQAMSISMALFSPPISSSLQNPNLIPKISTSLLSTKRFSLISVPRASSDNGTTSPVVKIPKPASVAVEEVPVKSPAESSSASENGAVGGEATDSSTETVIKYQNAKWVNGTWDLKQFEKDGKTDWDSVIVSEAKRRKWLEDNPETTSNDELVVFDTSIIPWWAWMKRYHLPEAELLNGRAAMIGFFMAYFVDSLTGVGLVDQMGNFFCKTLLFVAVAGVLFIRKNEDLDKLKDLFDETTLYDKQWQAAWKEPDSSTVSSKK

SEQ ID NO: 23645 - protein, 258 aa, Arabidopsis thaliana
  peptide (1)..(258): Ceres Seq. ID no. 12343581
MSISMALFSPPISSSLQNPNLIPKISTSLLSTKRFSLISVPRASSDNGTTSPVVKIPKPASVAVEEVPVKSPAESSSASENGAVGGEATDSSTETVIKYQNAKWVNGTWDLKQFEKDGKTDWDSVIVSEAKRRKWLEDNPETTSNDELVVFDTSIIPWWAWMKRYHLPEAELLNGRAAMIGFFMAYFVDSLTGVGLVDQMGNFFCKTLLFVAVAGVLFIRKNEDLDKLKDLFDETTLYDKQWQAAWKEPDSSTVSSKK

SEQ ID NO: 23646 - protein, 254 aa, Arabidopsis thaliana
  peptide (1)..(254): Ceres Seq. ID no. 12343582
MALFSPPISSSLQNPNLIPKISTSLLSTKRFSLISVPRASSDNGTTSPVVKIPKPASVAVEEVPVKSPAESSSASENGAVGGEATDSSTETVIKYQNAKWVNGTWDLKQFEKDGKTDWDSVIVSEAKRRKWLEDNPETTSNDELVVFDTSIIPWWAWMKRYHLPEAELLNGRAAMIGFFMAYFVDSLTGVGLVDQMGNFFCKTLLFVAVAGVLFIRKNEDLDKLKDLFDETTLYDKQWQAAWKEPDSSTVSSKK

SEQ ID NO: 23647 - DNA, 1221 bp, Arabidopsis thaliana
  misc_feature (1)..(1221): Ceres Seq. ID no. 12371645
  misc_feature (1)..(1221): Ortholog of  Ceres SEQ ID NO 13583408 as cited in SEQ ID NO 62616
  misc_feature (1)..(1221): Ortholog of  Ceres SEQ ID NO 15179752 as cited in SEQ ID NO 63074
aagttttctattgattcattataatttgtttgttctgatgtttgtgagatcgataaacccagttgtcccagttctatcgtagagaaattcactttgattttagatttgcaatcgttgcattgagttttccgatcttctctaattgctccttttcattttgctgtttggttttaaacattgtcgttgatgttcctgccttgcttctctgtgattaacaatctgttcaatttctcaaaggtgtcctttttatttgattagtatagcttatttttggtttgtttgtggaatggtatgtatgtaggagaaatggctgaatccaaggtagtggttccagagtctgtgctaaagaagatcaagaggcaagaggaatgggcattggccaagaaagatgaagctgtagctgctaagaagaagagtgttgaggcccgcaagcttatcttcaagagagctgagcagtatgccaaagaatacgctgagaaggataacgagttgatccgattgaagcgggaggctaagttgaaaggaggtttctacgttgaccctgaggctaagttgctctttatcattcgtatccgtggtatcaatgccattgacccaaaaaccaagaagattctgcagctcctgcgtttgagacagatcttcaatggtgtgtttcttaaggtgaacaaggcaacagtaaacatgctgcgccgagttgaaccatacgtgacttacggatacccaaacttgaagagcgttaaggaactgatctacaaaagaggttatggaaagctgaaccaccagaggatagcacttactgacaactccattgtggatcaggctctcggaaagcatgggatcatctgcgttgaggatctcatccacgagatcatgactgttggacctcacttcaaggaagccaacaacttcctgtggccattccaattgaaggcaccactcggtggccttaagaagaagagaaaccactacgtcgaaggtggtgatgctggaaacagggagaatttcatcaacgagcttgtcaggagaatgaattgatgaaagcttccttctttatctttgcaaatttcaaagattttgggaccgagtttttttttttttgttcaagttatcagagacttgtgatcttttatccgagataggctttttatgactaatcatgttattttccaatggcgggcttttaaattgatcttgaatttttattggctgttagattgttcg

SEQ ID NO: 23648 - protein, 247 aa, Arabidopsis thaliana
  peptide (1)..(247): Ceres Seq. ID no. 12371646
MYVGEMAESKVVVPESVLKKIKRQEEWALAKKDEAVAAKKKSVEARKLIFKRAEQYAKEYAEKDNELIRLKREAKLKGGFYVDPEAKLLFIIRIRGINAIDPKTKKILQLLRLRQIFNGVFLKVNKATVNMLRRVEPYVTYGYPNLKSVKELIYKRGYGKLNHQRIALTDNSIVDQALGKHGIICVEDLIHEIMTVGPHFKEANNFLWPFQLKAPLGGLKKKRNHYVEGGDAGNRENFINELVRRMN

SEQ ID NO: 23649 - protein, 242 aa, Arabidopsis thaliana
  peptide (1)..(242): Ceres Seq. ID no. 12371647
MAESKVVVPESVLKKIKRQEEWALAKKDEAVAAKKKSVEARKLIFKRAEQYAKEYAEKDNELIRLKREAKLKGGFYVDPEAKLLFIIRIRGINAIDPKTKKILQLLRLRQIFNGVFLKVNKATVNMLRRVEPYVTYGYPNLKSVKELIYKRGYGKLNHQRIALTDNSIVDQALGKHGIICVEDLIHEIMTVGPHFKEANNFLWPFQLKAPLGGLKKKRNHYVEGGDAGNRENFINELVRRMN

SEQ ID NO: 23650 - DNA, 1581 bp, Arabidopsis thaliana
  misc_feature (1)..(1581): Ceres Seq. ID no. 12339645
  misc_feature (1)..(1581): Ortholog of  Ceres SEQ ID NO 14314280 as cited in SEQ ID NO 57429
  misc_feature (1)..(1581): Ortholog of  Ceres SEQ ID NO 13595870 as cited in SEQ ID NO 62101
  misc_feature (1)..(1581): Ortholog of  Ceres SEQ ID NO 13590241 as cited in SEQ ID NO 63878
  misc_feature (1)..(1581): Ortholog of  Ceres SEQ ID NO 13657939 as cited in SEQ ID NO 66349
aagaaacctcagagagacgaagcacaatgggtcaaggaccttccggcggattgaatcggcaaggagatcggaaaccagatggtggagagaagaaggagaagaagttcgaaccagccgcaccacctgctcgtgtagggaggaagcaacggaagcagaaaggacctgaagcggcggcgagattgccgacggtgactccttctactaaatgtaagcttcgattgctgaaattggagcgaatcaaggactatttgcttatggaggaagagttcgtagcgaatcaggagagattgaaacctcaggaagagaaagctgaggaagatagatctaaagttgatgatcttcgtggtacacctatgagtgttggcaatcttgaagagcttattgatgagaatcacgccattgtttcttcttcggttggtcctgagtactacgttggcattttgtctttcgttgataaggatcagcttgaacctggctgctctattttgatgcataacaaggtactctctgttgttgggattcttcaagatgaagtggatccaatggtgtctgtgatgaaagtggagaaggctcctttggagtcatatgctgacattggaggtttagaagctcagattcaggagattaaggaagctgttgagttacctttaacacatcccgagctgtatgaagatattggaattaagccaccaaaaggtgtgatcttgtatggtgagccaggcactgggaagacattgcttgctaaggcagtggcaaattctacttcagctactttcttgcgtgttgtcggtagtgaactgattcagaagtatttaggagatggtcccaagcttgtgagggaacttttcagggttgctgatgacctttctccttctattgttttcatagacgagattgatgctgttggcaccaagcggtatgacgcaaactcaggtggggaacgtgaaatccaaagaaccatgttggaactactgaaccagcttgatgggtttgattcaagaggagatgttaaggttattctcgcgacaaacaggatcgagagtcttgacccggcacttcttagaccaggccggatcgacaggaaaatcgaattccctcttccagatatcaaaacaagaagacgtatcttccagatacacacatcaaagatgactttggctgaagatgtgaacttagaagagtttgtaatgacaaaagacgagttctcaggagctgatataaaggcaatatgcacagaagctggtctgcttgctcttagagagcgtcggatgaaagtgacgcatgtggacttcaagaaggcgaaggagaaggttatgttcaagaagaaagaaggagttcctgaaggtctttacatgtgaatgatgcacaacgactggtttcaatctcttttttcgagtttgctctctttttctccgtttttctgttttcactctctgcttagatttttttttctgatcatataaaatcgtttgcccattattaatctgcttccaaattagcaatttattagtttgctttcttcagaacaacctcatagatttattcatttgaaatttccatcatttttactttgcggttacg

SEQ ID NO: 23651 - protein, 451 aa, Arabidopsis thaliana
  peptide (1)..(451): Ceres Seq. ID no. 12339646
ETSERRSTMGQGPSGGLNRQGDRKPDGGEKKEKKFEPAAPPARVGRKQRKQKGPEAAARLPTVTPSTKCKLRLLKLERIKDYLLMEEEFVANQERLKPQEEKAEEDRSKVDDLRGTPMSVGNLEELIDENHAIVSSSVGPEYYVGILSFVDKDQLEPGCSILMHNKVLSVVGILQDEVDPMVSVMKVEKAPLESYADIGGLEAQIQEIKEAVELPLTHPELYEDIGIKPPKGVILYGEPGTGKTLLAKAVANSTSATFLRVVGSELIQKYLGDGPKLVRELFRVADDLSPSIVFIDEIDAVGTKRYDANSGGEREIQRTMLELLNQLDGFDSRGDVKVILATNRIESLDPALLRPGRIDRKIEFPLPDIKTRRRIFQIHTSKMTLAEDVNLEEFVMTKDEFSGADIKAICTEAGLLALRERRMKVTHVDFKKAKEKVMFKKKEGVPEGLYM

SEQ ID NO: 23652 - protein, 443 aa, Arabidopsis thaliana
  peptide (1)..(443): Ceres Seq. ID no. 12339647
MGQGPSGGLNRQGDRKPDGGEKKEKKFEPAAPPARVGRKQRKQKGPEAAARLPTVTPSTKCKLRLLKLERIKDYLLMEEEFVANQERLKPQEEKAEEDRSKVDDLRGTPMSVGNLEELIDENHAIVSSSVGPEYYVGILSFVDKDQLEPGCSILMHNKVLSVVGILQDEVDPMVSVMKVEKAPLESYADIGGLEAQIQEIKEAVELPLTHPELYEDIGIKPPKGVILYGEPGTGKTLLAKAVANSTSATFLRVVGSELIQKYLGDGPKLVRELFRVADDLSPSIVFIDEIDAVGTKRYDANSGGEREIQRTMLELLNQLDGFDSRGDVKVILATNRIESLDPALLRPGRIDRKIEFPLPDIKTRRRIFQIHTSKMTLAEDVNLEEFVMTKDEFSGADIKAICTEAGLLALRERRMKVTHVDFKKAKEKVMFKKKEGVPEGLYM

SEQ ID NO: 23653 - protein, 367 aa, Arabidopsis thaliana
  peptide (1)..(367): Ceres Seq. ID no. 12339649
MEEEFVANQERLKPQEEKAEEDRSKVDDLRGTPMSVGNLEELIDENHAIVSSSVGPEYYVGILSFVDKDQLEPGCSILMHNKVLSVVGILQDEVDPMVSVMKVEKAPLESYADIGGLEAQIQEIKEAVELPLTHPELYEDIGIKPPKGVILYGEPGTGKTLLAKAVANSTSATFLRVVGSELIQKYLGDGPKLVRELFRVADDLSPSIVFIDEIDAVGTKRYDANSGGEREIQRTMLELLNQLDGFDSRGDVKVILATNRIESLDPALLRPGRIDRKIEFPLPDIKTRRRIFQIHTSKMTLAEDVNLEEFVMTKDEFSGADIKAICTEAGLLALRERRMKVTHVDFKKAKEKVMFKKKEGVPEGLYM

SEQ ID NO: 23654 - DNA, 1441 bp, Arabidopsis thaliana
  misc_feature (1)..(1441): Ceres Seq. ID no. 12357651
  misc_feature (1)..(1441): Ortholog of  Ceres SEQ ID NO 13658590 as cited in SEQ ID NO 66762
cgattctctgtttcttctagattgaatttaaaaaccctacttttgaattttcacatgggagaacaatcaccttctcaaccatcgactcaatgccaaagtcatccacaatcacccaaacccgatactcataacctaattccaccggaatccaccgatgaatgtctcgattcagctggagtttcaggctcaatcgtctcatctaccacaatcgacgctcgacggatcactgaactaggcaatgtatcgtctccgccgtccaaaatccctctccgccctcggaaaatcaggaaactcacactcgacggagacgtatccggtgaagattataaggcggaggatatctcctcatctcaagtaaactctccgctctcgacggatggaaaatctcccggtaaaggtaaattgtcgcacttacgagctataactgtgccgaggatccaagctcgtcctctgacatgtgaaggtgagctcgaaacagcgattcactatctccgtaacgcggatcctttgctcgcggcgttaatcgacgttcatccaccgccgacgtttgagtcgtttaagactccgttcttagctctgatacgaaacatcctctaccaacagcttgcaatgaaagctgggaattcaatctacacacgatttgtttctctctgcggcggcgaaaatttggttgtacctgagacggtcttatcattaaatcctcagcagcttcgtcaaattggtgtctcgggacgtaaagcgagttatcttcatgatttagctagaaagtatcaaaacggaatcttgtcggattcggcgattttgaacatggatgagaagtctttgttcacgatgctaacaatggttaatggaattgggtcatggtctgttcatatgttcatgataaattctcttcatcgaccagatgttttgccggttaatgatctcggtgttaggaaaggagtgcagttgctgtatggcttagatgacctgcctcggccatcgcagatggagcagcattgtgctaagtggagaccgtacagatcagtgggttcgtggtacatgtggcggctcattgaagctaagagtacatcaacgagtgctgctgttgcagccggagtgtcattgcctccattggaagatatccaacaagaacatcagcagcaacagcttatggaccctcttaatggtgtgttcagtatcggggcttggggacaatcgtagctgttcttccacgttggtcctggatcgtctgatggcttacgtgagttatttagttctggacttacgtgggttttgtgcctagtaaaagaaaatgtatgggaaagaataataaaaggatgtgctagtctgggttccttcagatacaagctgaagtaacagtgaatatgatcttcttagttgagtgaaagagtctgtaatgttaagagtgagtagctaatgacaaagtagtgtcttcttc

SEQ ID NO: 23655 - protein, 400 aa, Arabidopsis thaliana
  peptide (1)..(400): Ceres Seq. ID no. 12357652
RFSVSSRLNLKTLLLNFHMGEQSPSQPSTQCQSHPQSPKPDTHNLIPPESTDECLDSAGVSGSIVSSTTIDARRITELGNVSSPPSKIPLRPRKIRKLTLDGDVSGEDYKAEDISSSQVNSPLSTDGKSPGKGKLSHLRAITVPRIQARPLTCEGELETAIHYLRNADPLLAALIDVHPPPTFESFKTPFLALIRNILYQQLAMKAGNSIYTRFVSLCGGENLVVPETVLSLNPQQLRQIGVSGRKASYLHDLARKYQNGILSDSAILNMDEKSLFTMLTMVNGIGSWSVHMFMINSLHRPDVLPVNDLGVRKGVQLLYGLDDLPRPSQMEQHCAKWRPYRSVGSWYMWRLIEAKSTSTSAAVAAGVSLPPLEDIQQEHQQQQLMDPLNGVFSIGAWGQS

SEQ ID NO: 23656 - protein, 382 aa, Arabidopsis thaliana
  peptide (1)..(382): Ceres Seq. ID no. 12357653
MGEQSPSQPSTQCQSHPQSPKPDTHNLIPPESTDECLDSAGVSGSIVSSTTIDARRITELGNVSSPPSKIPLRPRKIRKLTLDGDVSGEDYKAEDISSSQVNSPLSTDGKSPGKGKLSHLRAITVPRIQARPLTCEGELETAIHYLRNADPLLAALIDVHPPPTFESFKTPFLALIRNILYQQLAMKAGNSIYTRFVSLCGGENLVVPETVLSLNPQQLRQIGVSGRKASYLHDLARKYQNGILSDSAILNMDEKSLFTMLTMVNGIGSWSVHMFMINSLHRPDVLPVNDLGVRKGVQLLYGLDDLPRPSQMEQHCAKWRPYRSVGSWYMWRLIEAKSTSTSAAVAAGVSLPPLEDIQQEHQQQQLMDPLNGVFSIGAWGQS

SEQ ID NO: 23657 - DNA, 1424 bp, Arabidopsis thaliana
  misc_feature (1)..(1424): Ceres Seq. ID no. 13491455
  misc_feature (1)..(1424): Ortholog of  Ceres SEQ ID NO 15176709 as cited in SEQ ID NO 1148
  misc_feature (1)..(1424): Ortholog of  Ceres SEQ ID NO 13658922 as cited in SEQ ID NO 66316
atattcgtttcttcgatctgtgttttttagatctgtaagagttcaaaatggttgatcaagttcagcaccccactattgcgcagaaagctgccgggcagttcatgcgttcaagtgtttccaaggacgttcaagtgggttaccagaggccttctatgtatcaaagacatgcaacctacggaaactactccaatgctgcatttcaatttcctccgacatcccggatgttggcaacaactgcttctcccgtgtttgtccaaaccccaggagagaaggggttcactaactttgcccttgactttctgatgggtggtgtttctgctgccgtctccaagactgctgctgctcctattgaacgtgttaagcttttgatccagaaccaggatgagatgattaaagctggcaggctttctgaaccctacaagggtattggtgactgtttcggcaggacgattaaggatgaaggttttggttctctatggagaggaaacactgccaatgttatccgttatttccccactcaggccttgaactttgccttcaaagattacttcaaaagacttttcaactttaagaaggacagagatggttactggaagtggtttgctggtaacttggcatctggaggagcagctggtgcctcttcccttctgtttgtgtactcccttgactatgcccgtacccgtctagctaatgatgccaaggctgcaaagaaaggaggtggtggaagacagtttgatggtcttgttgatgtctacagaaagacacttaagactgatggtattgctggtctgtaccgtggattcaacatctcatgtgttggtatcattgtctaccgtggtctgtactttggactctatgactctgtgaagcctgttctcctcactggtgacttacaggacagtttcttcgctagtttcgctcttggatgggttattaccaatggtgcgggtcttgcatcctaccccattgacactgtccgcagaagaatgatgatgacgtctaatgaagctgtcaagtacaagagttctttggacgccttcaagcagatcctcaagaatgaaggagccaagtcactcttcaagggagctggtgccaacattctgcgtgctgttgcaggtgctggtgtgctttccggttacgacaaattgactctgattgtcttcggtaagaagtacggatcaggaggtgcctaagcatgcttcttcctccttttcgatttaattgcggtttaaggcccgcaataaactgagatgttgatgaaattttttttgcttaagacttagggaggcatgtgccctaaaccaaattttatatcgttctgacgccaactttttttacttatggaataattcatgtttgagagagtttgttagactcttcgattttaaagaattttggatttatgaaataaattcttctttttt

SEQ ID NO: 23658 - protein, 381 aa, Arabidopsis thaliana
  peptide (1)..(381): Ceres Seq. ID no. 13491456
MVDQVQHPTIAQKAAGQFMRSSVSKDVQVGYQRPSMYQRHATYGNYSNAAFQFPPTSRMLATTASPVFVQTPGEKGFTNFALDFLMGGVSAAVSKTAAAPIERVKLLIQNQDEMIKAGRLSEPYKGIGDCFGRTIKDEGFGSLWRGNTANVIRYFPTQALNFAFKDYFKRLFNFKKDRDGYWKWFAGNLASGGAAGASSLLFVYSLDYARTRLANDAKAAKKGGGGRQFDGLVDVYRKTLKTDGIAGLYRGFNISCVGIIVYRGLYFGLYDSVKPVLLTGDLQDSFFASFALGWVITNGAGLASYPIDTVRRRMMMTSNEAVKYKSSLDAFKQILKNEGAKSLFKGAGANILRAVAGAGVLSGYDKLTLIVFGKKYGSGGA

SEQ ID NO: 23659 - protein, 363 aa, Arabidopsis thaliana
  peptide (1)..(363): Ceres Seq. ID no. 13491457
MRSSVSKDVQVGYQRPSMYQRHATYGNYSNAAFQFPPTSRMLATTASPVFVQTPGEKGFTNFALDFLMGGVSAAVSKTAAAPIERVKLLIQNQDEMIKAGRLSEPYKGIGDCFGRTIKDEGFGSLWRGNTANVIRYFPTQALNFAFKDYFKRLFNFKKDRDGYWKWFAGNLASGGAAGASSLLFVYSLDYARTRLANDAKAAKKGGGGRQFDGLVDVYRKTLKTDGIAGLYRGFNISCVGIIVYRGLYFGLYDSVKPVLLTGDLQDSFFASFALGWVITNGAGLASYPIDTVRRRMMMTSNEAVKYKSSLDAFKQILKNEGAKSLFKGAGANILRAVAGAGVLSGYDKLTLIVFGKKYGSGGA

SEQ ID NO: 23660 - protein, 346 aa, Arabidopsis thaliana
  peptide (1)..(346): Ceres Seq. ID no. 13491458
MYQRHATYGNYSNAAFQFPPTSRMLATTASPVFVQTPGEKGFTNFALDFLMGGVSAAVSKTAAAPIERVKLLIQNQDEMIKAGRLSEPYKGIGDCFGRTIKDEGFGSLWRGNTANVIRYFPTQALNFAFKDYFKRLFNFKKDRDGYWKWFAGNLASGGAAGASSLLFVYSLDYARTRLANDAKAAKKGGGGRQFDGLVDVYRKTLKTDGIAGLYRGFNISCVGIIVYRGLYFGLYDSVKPVLLTGDLQDSFFASFALGWVITNGAGLASYPIDTVRRRMMMTSNEAVKYKSSLDAFKQILKNEGAKSLFKGAGANILRAVAGAGVLSGYDKLTLIVFGKKYGSGGA

SEQ ID NO: 23661 - DNA, 1494 bp, Arabidopsis thaliana
  misc_feature (1)..(1494): Ceres Seq. ID no. 13487724
  misc_feature (1)..(1494): Ortholog of  Ceres SEQ ID NO 13584646 as cited in SEQ ID NO 60715
gtgaaaaattaattattgcccactttctctctctctctctctctgattgattcttgaaaagaaaatcaaagtctcaatagctttgttttgattctagttccattccacaattgcatctaattctcctaccgtagccttttcttctttatttgtcatcaacaactcctaaaattcatatgaaattagagaaatcgaaacgaaaagataatatttttcaagaaagagctacatatacaccttttgaccttgtaaagttggaaccctagaggcctttcaagcaaatcatcagggtaacaatttcttgatctttctttttagcgaatttccagtttttggtcaatcatggcaaacccttggtggacgaaccagagtggtttagcgggcatggtggaccattcggtctcctcaggccatcaccaaaaccatcaccaccaaagtcttcttaccaaaggagatcttggaatagccatgaatcagagccaagacaacgaccaagacgaagaagatgatcctagagaaggagccgttgaggtggtcaaccgtagaccaagaggtagaccaccaggatccaaaaacaaacccaaagctccaatctttgtgacaagagacagccccaacgcactccgtagccatgtcttggagatctccgacggcagtgacgtcgccgacacaatcgctcacttctcaagacgcaggcaacgcggcgtttgcgttctcagcgggacaggctcagtcgctaacgtcaccctccgccaagccgccgcaccaggaggtgtggtctctctccaaggcaggtttgaaatcttatctttaaccggtgctttcctccctggaccttccccacccgggtcaaccggtttaacggtttacttagccggggtccagggtcaggtcgttggaggtagcgttgtaggcccactcttagccatagggtcggtcatggtgattgctgctactttctctaacgctacttatgagagattgcccatggaagaagaggaagacggtggcggctcaagacagattcacggaggcggtgactcaccgcccagaatcggtagtaacctgcctgatctatcagggatggccgggccaggctacaatatgccgccgcatctgattccaaatggggctggtcagctagggcacgaaccatatacatgggtccacgcaagaccaccttactgactcagtgagccatttctatatataatggtctatataaataaatatatagatgaatataagcaagcaatttgaggtagtctattacaaagcttttgctctggttggaaaaataaataagtatcaaagctttgtttgttcttaatggaaatatagagcttgggaaggtagaaagagacgacattaagggactttcagattttcagtattactactccacgaaattattgaaataaataaacattgtactgtaaattagaatgtttgtctttttgtttttgtgtagtagtatttaactacaatatttgc

SEQ ID NO: 23662 - protein, 281 aa, Arabidopsis thaliana
  peptide (1)..(281): Ceres Seq. ID no. 13487725
MANPWWTNQSGLAGMVDHSVSSGHHQNHHHQSLLTKGDLGIAMNQSQDNDQDEEDDPREGAVEVVNRRPRGRPPGSKNKPKAPIFVTRDSPNALRSHVLEISDGSDVADTIAHFSRRRQRGVCVLSGTGSVANVTLRQAAAPGGVVSLQGRFEILSLTGAFLPGPSPPGSTGLTVYLAGVQGQVVGGSVVGPLLAIGSVMVIAATFSNATYERLPMEEEEDGGGSRQIHGGGDSPPRIGSNLPDLSGMAGPGYNMPPHLIPNGAGQLGHEPYTWVHARPPY

SEQ ID NO: 23663 - protein, 267 aa, Arabidopsis thaliana
  peptide (1)..(267): Ceres Seq. ID no. 13487726
MVDHSVSSGHHQNHHHQSLLTKGDLGIAMNQSQDNDQDEEDDPREGAVEVVNRRPRGRPPGSKNKPKAPIFVTRDSPNALRSHVLEISDGSDVADTIAHFSRRRQRGVCVLSGTGSVANVTLRQAAAPGGVVSLQGRFEILSLTGAFLPGPSPPGSTGLTVYLAGVQGQVVGGSVVGPLLAIGSVMVIAATFSNATYERLPMEEEEDGGGSRQIHGGGDSPPRIGSNLPDLSGMAGPGYNMPPHLIPNGAGQLGHEPYTWVHARPPY

SEQ ID NO: 23664 - protein, 239 aa, Arabidopsis thaliana
  peptide (1)..(239): Ceres Seq. ID no. 13487727
MNQSQDNDQDEEDDPREGAVEVVNRRPRGRPPGSKNKPKAPIFVTRDSPNALRSHVLEISDGSDVADTIAHFSRRRQRGVCVLSGTGSVANVTLRQAAAPGGVVSLQGRFEILSLTGAFLPGPSPPGSTGLTVYLAGVQGQVVGGSVVGPLLAIGSVMVIAATFSNATYERLPMEEEEDGGGSRQIHGGGDSPPRIGSNLPDLSGMAGPGYNMPPHLIPNGAGQLGHEPYTWVHARPPY

SEQ ID NO: 23665 - DNA, 1718 bp, Arabidopsis thaliana
  misc_feature (1)..(1718): Ceres Seq. ID no. 12321491
  misc_feature (1)..(1718): Ortholog of  Ceres SEQ ID NO 14315241 as cited in SEQ ID NO 52516
  misc_feature (1)..(1718): Ortholog of  Ceres SEQ ID NO 13594349 as cited in SEQ ID NO 58161
  misc_feature (1)..(1718): Ortholog of  Ceres SEQ ID NO 13663419 as cited in SEQ ID NO 66561
atttaactgtctcttcttcaaaaccaaaaccaaaaccaaaaccaaaaccttctattgtttccctcccacgctataattcatagacataagagaatgaggaaaggacagggctactcctactctgtaatcgcatcggtgttggtgttactgtgtgtggtggtgtctcgaatcgaatgcagcagccaagtgcacgccctgagccgtctttacctgtctaagcgaggggttggtggttcgtccaccatggacacaagccatttcaaggcggttaaggatttgaaaccgtcttcgctgcggagtgctgctaatcaggaggggttaagaaagagagatctgatacggagattgcccgggacagcctcccgttagtttcgatcagtacggcggctatgttaccgtcaacgaatccgccgggcgttcctttttctactatttcgtggaagcctctaagtctaaagattcttctcctctgcttctctggctcaacggcggaccgggatgctcgtcactggcgtatggagcattacaagagcttgggccgttcagagtacacagcgacggcaaaacgctttttagaaaccgatatgcatggaacaatgctgcgaatgtcttgttcttagaatcgccggcgggagtggggttctcgtacaccaacacgacgtcggacctggagaagcacggggacaggaataccgcagctgataactacatcttcctggttaactggctggagaggttcccggagtacaaaggcagggacttgtacatcgccggtgagagctatgccggccactatgttccgcaacttgcccatactatccttctccatcaccggagcttcttcaatctcaagggcattctgataggaaatgcggtgatcaacgacgagaccgacttgatgggtatgtacgactttttcgagagtcatgctttgatctccgaagattctttggctagactcaagagcaactgcgatctcaagacggagtctgcgagtgtaatgactgaggagtgcgcggtggtgtccgaccaaatagacatggatacatattacctcgacatctacaacatatacgctccattgtgcctcaactccacgctcactcgcaggcccaagcgaggaaccacaataagggagtttgacccctgcagtgaccattacgtgcaggcctacctgaacagacctgaagtccaagcggccctgcacgcaaacgctacgaagctgccttacgagtggcagccgtgcagcagtgtgataaagaagtggaacgacagtcctaccacagtgattcctctcatcaaggagctgatgggtcagggcgtccgcgtctgggtgttcagcggagacacagacgggagaattccagtgacgtccaccaaatactccctcaagaagatgaatctaacggccaaaacggcctggcatccctggtacctagggggtgaggtgggtggatacacagaggagtacaaagggaaattgacatttgccacagtgagaggggctggtcatcaagttcccagcttccagccaaagcgctctctttcactcttcattcacttcctcaatgacactcctctccctgacacctctcgttactaaatattctatctgagattgtaatttctctcttaattagcttttattcctcctcccatccattttttatctactatttcattacatacctttgaatgttaatatctgttttgctccc

SEQ ID NO: 23666 - protein, 234 aa, Arabidopsis thaliana
  peptide (1)..(234): Ceres Seq. ID no. 12321492
MGMYDFFESHALISEDSLARLKSNCDLKTESASVMTEECAVVSDQIDMDTYYLDIYNIYAPLCLNSTLTRRPKRGTTIREFDPCSDHYVQAYLNRPEVQAALHANATKLPYEWQPCSSVIKKWNDSPTTVIPLIKELMGQGVRVWVFSGDTDGRIPVTSTKYSLKKMNLTAKTAWHPWYLGGEVGGYTEEYKGKLTFATVRGAGHQVPSFQPKRSLSLFIHFLNDTPLPDTSRY

SEQ ID NO: 23667 - protein, 232 aa, Arabidopsis thaliana
  peptide (1)..(232): Ceres Seq. ID no. 12321493
MYDFFESHALISEDSLARLKSNCDLKTESASVMTEECAVVSDQIDMDTYYLDIYNIYAPLCLNSTLTRRPKRGTTIREFDPCSDHYVQAYLNRPEVQAALHANATKLPYEWQPCSSVIKKWNDSPTTVIPLIKELMGQGVRVWVFSGDTDGRIPVTSTKYSLKKMNLTAKTAWHPWYLGGEVGGYTEEYKGKLTFATVRGAGHQVPSFQPKRSLSLFIHFLNDTPLPDTSRY

SEQ ID NO: 23668 - protein, 200 aa, Arabidopsis thaliana
  peptide (1)..(200): Ceres Seq. ID no. 12321494
MTEECAVVSDQIDMDTYYLDIYNIYAPLCLNSTLTRRPKRGTTIREFDPCSDHYVQAYLNRPEVQAALHANATKLPYEWQPCSSVIKKWNDSPTTVIPLIKELMGQGVRVWVFSGDTDGRIPVTSTKYSLKKMNLTAKTAWHPWYLGGEVGGYTEEYKGKLTFATVRGAGHQVPSFQPKRSLSLFIHFLNDTPLPDTSRY

SEQ ID NO: 23669 - DNA, 780 bp, Arabidopsis thaliana
  misc_feature (1)..(780): Ceres Seq. ID no. 13486730
  misc_feature (1)..(780): Ortholog of  Ceres SEQ ID NO 15179490 as cited in SEQ ID NO 0
tgagagagatctgttacgacagttatgtctccgtcgacgacgacgattttcatcggtcccatcttagcggtggacgccgccgtatctcacgcgattcacacggcggcgaaaccattcctcccaccatttgtcctcctcctcctcgaaatctcagctgatttccgattctccttccccgtatccctttccttcctcctctcccctccattacgctctttcctcgtccctttcctcctcggcctcctcttcgatctaatcttcgtcggaatcgtaaaattaatcttccgtcgtgctcgtcccgcttacaatcacccttcaatgtccgccgctgtatcagctgatcactactcgttcccctcaggtcacgcttctcgcgttttcttcgttgctgcatctgttcacttcttctctgctgctgctgaagcttccatgactggtccaagctactccttcttagatggatggatcagagatcataacgatggcgatgtgaaggtagaagttgtggtcgttgtatggatctgggcaacagtgactgcaatttcaaggattcttttaggaagacattacgttctcgatgtagctgctggtgcttttttagggattgtagaagctctctttgctcttcgatttctgagatttgatgaaatgatctttgggaggtaacaaatgtatccaaattgttgttgtttttaacaaattgttctgtaatttttgtttcgattacattgagaagaagaattgtattgttcatgaatcaaagattgttccttttgtttc

SEQ ID NO: 23670 - protein, 213 aa, Arabidopsis thaliana
  peptide (1)..(213): Ceres Seq. ID no. 13486731
MSPSTTTIFIGPILAVDAAVSHAIHTAAKPFLPPFVLLLLEISADFRFSFPVSLSFLLSPPLRSFLVPFLLGLLFDLIFVGIVKLIFRRARPAYNHPSMSAAVSADHYSFPSGHASRVFFVAASVHFFSAAAEASMTGPSYSFLDGWIRDHNDGDVKVEVVVVVWIWATVTAISRILLGRHYVLDVAAGAFLGIVEALFALRFLRFDEMIFGR

SEQ ID NO: 23671 - protein, 115 aa, Arabidopsis thaliana
  peptide (1)..(115): Ceres Seq. ID no. 13486732
MSAAVSADHYSFPSGHASRVFFVAASVHFFSAAAEASMTGPSYSFLDGWIRDHNDGDVKVEVVVVVWIWATVTAISRILLGRHYVLDVAAGAFLGIVEALFALRFLRFDEMIFGR

SEQ ID NO: 23672 - DNA, 1365 bp, Arabidopsis thaliana
  misc_feature (1)..(1365): Ceres Seq. ID no. 12338560
  misc_feature (1)..(1365): Ortholog of  Ceres SEQ ID NO 12609045 as cited in SEQ ID NO 51314
  misc_feature (1)..(1365): Ortholog of  Ceres SEQ ID NO 14316312 as cited in SEQ ID NO 60042
  misc_feature (1)..(1365): Ortholog of  Ceres SEQ ID NO 13595877 as cited in SEQ ID NO 67702
  misc_feature (1)..(1365): Ortholog of  Ceres SEQ ID NO 13654367 as cited in SEQ ID NO 67993
aaactctaatctaaaccactattaatggagacaaatttgctaatgtcagacgattctttaggcaaatccaactgcaactttgaatgaaaagtcccaaactttaatgagacgttgatcttttcaacctctaaaatccttattttcccaattcttcttcataatcacacattttcacctcagaaacatatctagctaattctctgaagcatccatggaagctcctccaccttcaagcgatccatacaagttcctcaacattacacttaactcagatggatctctcaccagacaccgtgatttccccaaactgcccccaacagagcaatccaaagacataccattaaaccaaaccaacaataccttcatccgaatcttcaagccacggaatattccgccggaatccaaacttccgatcctcgtttactttcacggcggtggatttatcctctacagcgccgcttcagctcctttccatgaatcttgcaccaaaatggctgatcgtcttcaaactataatcctctccgtcgaataccgtctagctcccgaacaccgtctcccggcggcgtacgaagacgccgtcgaagctatcttatggctccgtgatcaagctcgtgggccaatcaacggtggtgattgcgacacgtggttaaaagacggtgtcgatttctcgaaatgctacgtcatgggttcaagctctggaggaaatattgtctacaacgtggcgttgcgtgtagttgacacagatctttctcctgttaagatccaagggctgataatgaaccaagctttcttcggtggcgttgagccgtcggattctgagtcacggcttaaagacgataagatctgtccgttaccagctactcacttgttgtggtcactttgtttaccggacggtgtagatcgtgaccacgtgtacagtaatccaattaagagcagtgggcctcaggaaaaagataagatgggacgttttccgtcgactcttatcaacggttacggtggggatcctttagtggatcgtcagagacacgtggcggagatgttaaagggacgtggagttcacgtggagacgaggtttgataaagatgggtttcatgcttgtgagttgtttgatgggaacaaagctaaggccctgtacgaaaccgttgaggcctttatgaagagttgttcatcaactggcccatcgtccaactccaacatgtagtagtctgatctaatcatgttttacgaactatatatatatctagctaataattaaattcctacaactattacgcaatttttgttgttttaagtcacatatgatatgtgtggtgcaatggaaaaatgtataccctttcaataaatatagtggatgcaatttaatct

SEQ ID NO: 23673 - protein, 329 aa, Arabidopsis thaliana
  peptide (1)..(329): Ceres Seq. ID no. 12338562
MEAPPPSSDPYKFLNITLNSDGSLTRHRDFPKLPPTEQSKDIPLNQTNNTFIRIFKPRNIPPESKLPILVYFHGGGFILYSAASAPFHESCTKMADRLQTIILSVEYRLAPEHRLPAAYEDAVEAILWLRDQARGPINGGDCDTWLKDGVDFSKCYVMGSSSGGNIVYNVALRVVDTDLSPVKIQGLIMNQAFFGGVEPSDSESRLKDDKICPLPATHLLWSLCLPDGVDRDHVYSNPIKSSGPQEKDKMGRFPSTLINGYGGDPLVDRQRHVAEMLKGRGVHVETRFDKDGFHACELFDGNKAKALYETVEAFMKSCSSTGPSSNSNM

SEQ ID NO: 23674 - protein, 236 aa, Arabidopsis thaliana
  peptide (1)..(236): Ceres Seq. ID no. 12338563
MADRLQTIILSVEYRLAPEHRLPAAYEDAVEAILWLRDQARGPINGGDCDTWLKDGVDFSKCYVMGSSSGGNIVYNVALRVVDTDLSPVKIQGLIMNQAFFGGVEPSDSESRLKDDKICPLPATHLLWSLCLPDGVDRDHVYSNPIKSSGPQEKDKMGRFPSTLINGYGGDPLVDRQRHVAEMLKGRGVHVETRFDKDGFHACELFDGNKAKALYETVEAFMKSCSSTGPSSNSNM

SEQ ID NO: 23675 - protein, 172 aa, Arabidopsis thaliana
  peptide (1)..(172): Ceres Seq. ID no. 12338565
MGSSSGGNIVYNVALRVVDTDLSPVKIQGLIMNQAFFGGVEPSDSESRLKDDKICPLPATHLLWSLCLPDGVDRDHVYSNPIKSSGPQEKDKMGRFPSTLINGYGGDPLVDRQRHVAEMLKGRGVHVETRFDKDGFHACELFDGNKAKALYETVEAFMKSCSSTGPSSNSNM

SEQ ID NO: 23676 - DNA, 1964 bp, Arabidopsis thaliana
  misc_feature (1)..(1964): Ceres Seq. ID no. 12322840
  misc_feature (1)..(1964): Ortholog of  Ceres SEQ ID NO 13663520 as cited in SEQ ID NO 60787
aaacacaaacatatcttctatcaaacaccaacagctctattctctacctcatttctcatcataacaaagagagagaaaaaaactatggaattgacactgaattcctcgagttctcttatcaaacgtaaagatgccaagagttctagaaaccaagaaagttcctccaacaacatgacctttgcgaagatgaagccgccaacatatcaattccaagcaaagaactcggttaaggaaatgaagttcactcacgagaagaccttcacgccagaaggtgaaacccttgagaaatgggagaagctccacgttctctcatacccacactccaagaacgacgctagcgttccggtgttcgtcatgttaccgctcgacacagtaacaatgtcagggcatttgaacaaaccacgagccatgaacgctagtttgatggccctgaaaggagctggtgtggaaggtgtgatggtggatgcttggtggggattggtggagaaagatggacctatgaattataactgggaaggctatgccgagcttatacagatggttcaaaagcacggtctcaaactccaggtcgttatgtcattccatcaatgtggaggaaacgtaggagactcttgcagtatccccttgcctccatgggtgcttgaagagatcagcaagaaccctgatcttgtctacacagacaaatctgggagaaggaaccctgaatatatctccttgggatgtgattctgtgcctgtcctaagaggaagaacacctatccaggtctactcagatttcatgaggagcttccgtgaacgatttgaaggctacataggaggagttattgcggaaattcaagtaggaatgggaccttgtggagaattgagatacccatcataccctgagagcaacgggacctggagattccccggaattggagagttccagtgctacgacaagtatatgaaatcgtcacttcaagcatatgctgagtcaatcgggaaaactaactggggaacaagtggacctcatgatgccggcgagtacaagaacctcccagaagatactgaatttttcaggagagacggaacatggaatagcgagtatggaaagtttttcatggaatggtactccgggaagctgctagaacatggagaccaactcctatcttcagcgaaaggtatctttcaaggaagcggagcaaagctatcaggaaaggtagctggaattcactggcactacaacaccaggtcacacgcagctgagctaaccgctggatactacaacacaagaaaccatgacgggtatctgccaatagctaagatgttcaacaaacatggagttgtgctcaacttcacctgcatggagatgaaagacggggagcaacctgagcacgcgaattgctcaccagaaggtctggtcaagcaagtacagaacgcgacaaggcaggccggaaccgaactagcaggggagaacgcgctagaacgatatgactcaagcgcattcggacaagtggtagcaacaaataggtcagattctggaaatgggttaaccgcatttacttacctaagaatgaacaagcggttatttgagggtcaaaattggcagcagttagtggagtttgttaagaacatgaaggaaggtggtcatgggaggagactctcaaaagaagacacaactggaagtgacctttatgttggatttgtcaaaggcaagatcgctgagaatgtggaggaggctgctttagtgtaatttcccacataggtacatacatatagtgtggtgtttattgtattcctgtctgataaataactagagagatcaaaccagtaagagtgttaaagctatagatttgcacaattctgggtcagagtcagagcaaagagaagcaaaatcaagatgatgtacacttagatgtttcctatgagttttccttgtacatcatcttcatactcttaatctcaaatactatgcatttttctcct

SEQ ID NO: 23677 - protein, 576 aa, Arabidopsis thaliana
  peptide (1)..(576): Ceres Seq. ID no. 12322841
KHKHIFYQTPTALFSTSFLIITKREKKTMELTLNSSSSLIKRKDAKSSRNQESSSNNMTFAKMKPPTYQFQAKNSVKEMKFTHEKTFTPEGETLEKWEKLHVLSYPHSKNDASVPVFVMLPLDTVTMSGHLNKPRAMNASLMALKGAGVEGVMVDAWWGLVEKDGPMNYNWEGYAELIQMVQKHGLKLQVVMSFHQCGGNVGDSCSIPLPPWVLEEISKNPDLVYTDKSGRRNPEYISLGCDSVPVLRGRTPIQVYSDFMRSFRERFEGYIGGVIAEIQVGMGPCGELRYPSYPESNGTWRFPGIGEFQCYDKYMKSSLQAYAESIGKTNWGTSGPHDAGEYKNLPEDTEFFRRDGTWNSEYGKFFMEWYSGKLLEHGDQLLSSAKGIFQGSGAKLSGKVAGIHWHYNTRSHAAELTAGYYNTRNHDGYLPIAKMFNKHGVVLNFTCMEMKDGEQPEHANCSPEGLVKQVQNATRQAGTELAGENALERYDSSAFGQVVATNRSDSGNGLTAFTYLRMNKRLFEGQNWQQLVEFVKNMKEGGHGRRLSKEDTTGSDLYVGFVKGKIAENVEEAALV

SEQ ID NO: 23678 - protein, 548 aa, Arabidopsis thaliana
  peptide (1)..(548): Ceres Seq. ID no. 12322842
MELTLNSSSSLIKRKDAKSSRNQESSSNNMTFAKMKPPTYQFQAKNSVKEMKFTHEKTFTPEGETLEKWEKLHVLSYPHSKNDASVPVFVMLPLDTVTMSGHLNKPRAMNASLMALKGAGVEGVMVDAWWGLVEKDGPMNYNWEGYAELIQMVQKHGLKLQVVMSFHQCGGNVGDSCSIPLPPWVLEEISKNPDLVYTDKSGRRNPEYISLGCDSVPVLRGRTPIQVYSDFMRSFRERFEGYIGGVIAEIQVGMGPCGELRYPSYPESNGTWRFPGIGEFQCYDKYMKSSLQAYAESIGKTNWGTSGPHDAGEYKNLPEDTEFFRRDGTWNSEYGKFFMEWYSGKLLEHGDQLLSSAKGIFQGSGAKLSGKVAGIHWHYNTRSHAAELTAGYYNTRNHDGYLPIAKMFNKHGVVLNFTCMEMKDGEQPEHANCSPEGLVKQVQNATRQAGTELAGENALERYDSSAFGQVVATNRSDSGNGLTAFTYLRMNKRLFEGQNWQQLVEFVKNMKEGGHGRRLSKEDTTGSDLYVGFVKGKIAENVEEAALV

SEQ ID NO: 23679 - protein, 519 aa, Arabidopsis thaliana
  peptide (1)..(519): Ceres Seq. ID no. 12322843
MTFAKMKPPTYQFQAKNSVKEMKFTHEKTFTPEGETLEKWEKLHVLSYPHSKNDASVPVFVMLPLDTVTMSGHLNKPRAMNASLMALKGAGVEGVMVDAWWGLVEKDGPMNYNWEGYAELIQMVQKHGLKLQVVMSFHQCGGNVGDSCSIPLPPWVLEEISKNPDLVYTDKSGRRNPEYISLGCDSVPVLRGRTPIQVYSDFMRSFRERFEGYIGGVIAEIQVGMGPCGELRYPSYPESNGTWRFPGIGEFQCYDKYMKSSLQAYAESIGKTNWGTSGPHDAGEYKNLPEDTEFFRRDGTWNSEYGKFFMEWYSGKLLEHGDQLLSSAKGIFQGSGAKLSGKVAGIHWHYNTRSHAAELTAGYYNTRNHDGYLPIAKMFNKHGVVLNFTCMEMKDGEQPEHANCSPEGLVKQVQNATRQAGTELAGENALERYDSSAFGQVVATNRSDSGNGLTAFTYLRMNKRLFEGQNWQQLVEFVKNMKEGGHGRRLSKEDTTGSDLYVGFVKGKIAENVEEAALV

SEQ ID NO: 23680 - DNA, 1203 bp, Arabidopsis thaliana
  misc_feature (1)..(1203): Ceres Seq. ID no. 12323086
  misc_feature (1)..(1203): Ortholog of  Ceres SEQ ID NO 12611159 as cited in SEQ ID NO 59821
  misc_feature (1)..(1203): Ortholog of  Ceres SEQ ID NO 15180029 as cited in SEQ ID NO 0
atcttctcacttcaaactctctctatctttttctctcacctcatattatgaactaaagatttctctgaaagctgacttcataaactttttctgaagaagaaacacacaaaaacgatcgatcttgaattgattctttgtagtattttatttacatatatatatatagatgggaagacattcatgttgttacaaacagaaactgaggaaaggactttggtctcctgaagaagatgagaagcttcttcgttacatcactaagtacggtcatggttgctggagctctgtccctaaacaagctggtttacagagatgtggaaaaagttgtagattaagatggataaactatttaagaccagatttaaagagaggagcattttctcaagatgaagaaaatctcattattgaacttcatgccgttcttggcaatagatggtctcagatagctgcacagcttcctggaagaaccgacaatgaaatcaaaaatctttggaattcttgtttgaagaagaaattgaggctgagaggaattgacccggttacacacaagctcttaaccgaaatcgaaaccggtacagatgacaaaccaaaaccggttgagaagagtcaacagacctacctcgttgagactgatggctcctctagtaccactacttgtagtactaaccaaaacaacaacactgatcatctttataccggaaatttcggttttcaacggttaagtctagaaaacggttcaagaatcgcagccggttccgacctcggcatctggattccccaaaccggaagaaaccatcatcatcatgtggatgaaaccatccccagtgcagtgagcatcagcaaattcaagagagtaactacaacaattcgacattctttggaaatgggaatctgaattggggattaacaatggaggacaatcaaaatccattcacaatatcgaatcattcgttacagaatcattcaaattcgtccttatacagtgatataaaatcagagaccaatttttttggcacagaggctacaaatgttggtatgtggccatgtaaccagctccagcctcagcaacatgcatatggccatatataaatcttcttgtatattataaggtgtgtgaatctttttttttttctttctcaaatatggacttttaaaaaaaatgggttgtgtatatagtttgtgttatatatcatttaatttaacagc

SEQ ID NO: 23681 - protein, 241 aa, Arabidopsis thaliana
  peptide (1)..(241): Ceres Seq. ID no. 12323087
MGRHSCCYKQKLRKGLWSPEEDEKLLRYITKYGHGCWSSVPKQAGLQRCGKSCRLRWINYLRPDLKRGAFSQDEENLIIELHAVLGNRWSQIAAQLPGRTDNEIKNLWNSCLKKKLRLRGIDPVTHKLLTEIETGTDDKPKPVEKSQQTYLVETDGSSSTTTCSTNQNNNTDHLYTGNFGFQRLSLENGSRIAAGSDLGIWIPQTGRNHHHHVDETIPSAVSISKFKRVTTTIRHSLEMGI

SEQ ID NO: 23682 - DNA, 1580 bp, Arabidopsis thaliana
  misc_feature (1)..(1580): Ceres Seq. ID no. 12370393
  misc_feature (1)..(1580): Ortholog of  Ceres SEQ ID NO 13656012 as cited in SEQ ID NO 69067
ataaagtaggaaaaaattagggttagactcgatcattcatagctgcgactattctctgctctttctacattttctcattttctcttgggctacttttcgactactaacaaatccaacgatgaggggattggtgaacaagctcgtgtccagatctctctccatctccgggaaatggcagaaccaacagcttcgtcgtctcaacatccacgagtatcagggagctgaattgatggggaaatatggagttaatgtgccgaaaggagtagctgcttcttcgttggaagaagttaaaaaggctattcaagatgttttccctaatgaaagcgagttggttgttaagagccagattttggctggtggaagaggtcttggaacattcaagagtggtcttaagggtggtgttcacattgttaaacgtgatgaggctgaagagattgctggaaagatgctaggacaagtacttgtcaccaagcaaactggtcctcaaggcaaagtagttagcaaggtttacttgtgtgagaaattgtcactcgtcaatgagatgtacttttccattattctggaccgtaaatctgctggaccgttgatcattgcctgtaaaaagggtggtaccagtattgaagatcttgctgagaagttccctgacatgatcatcaaggtaccaattgatgtatttgcaggaatcactgatgaagatgctgctaaggttgtggatggtctggctcccaaagctgctgacagaaaagattcgattgaacaagtgaagaagctatacgaactcttccgcaagactgactgcacaatgttggaaatcaatccccttgcggagacatcaactaatcaattggtagctgctgatgccaaattgaacttcgatgataatgctgcgttccgacaaaaagaggttttcgccatgcgtgatccaacacaggaggatccacgagaggtggctgctgctaaagttgacctgaactacatcggtttagatggagagattggttgcatggtgaatggtgctggattggccatggcaaccatggacatcattaaattacacggtggaacacccgccaatttccttgacgttggtggaaatgcttctgagcaccaggtggtggaagcgtttaagatactgacatcggacgataaagtgaaagcaatcttggtgaacatatttggtgggataatgaaatgtgatgtgattgctagtggaatcgtgaacgctgcaaaagaggtcgcattgaaagtgccagtggtggttcgtctagaaggaacgaatgttgagcagggaaagagaatcctcaaggaaagtggaatgaaactcataacagctgatgatttggatgatgcagctgagaaagcggttaaagctttagctcactaatctctctatatataccaaaagccggtttgttaattgttttgtggttgacgcccaatttacactttcttgcggatatcatttcctcaaacagatcaataatgaactggtctcctttttttgtgtgatccatccaaagagattcaaatcagaattctcaatatctttttgtatttaaccaactcatatggttgatact

SEQ ID NO: 23683 - protein, 421 aa, Arabidopsis thaliana
  peptide (1)..(421): Ceres Seq. ID no. 12370394
MRGLVNKLVSRSLSISGKWQNQQLRRLNIHEYQGAELMGKYGVNVPKGVAASSLEEVKKAIQDVFPNESELVVKSQILAGGRGLGTFKSGLKGGVHIVKRDEAEEIAGKMLGQVLVTKQTGPQGKVVSKVYLCEKLSLVNEMYFSIILDRKSAGPLIIACKKGGTSIEDLAEKFPDMIIKVPIDVFAGITDEDAAKVVDGLAPKAADRKDSIEQVKKLYELFRKTDCTMLEINPLAETSTNQLVAADAKLNFDDNAAFRQKEVFAMRDPTQEDPREVAAAKVDLNYIGLDGEIGCMVNGAGLAMATMDIIKLHGGTPANFLDVGGNASEHQVVEAFKILTSDDKVKAILVNIFGGIMKCDVIASGIVNAAKEVALKVPVVVRLEGTNVEQGKRILKESGMKLITADDLDDAAEKAVKALAH

SEQ ID NO: 23684 - protein, 384 aa, Arabidopsis thaliana
  peptide (1)..(384): Ceres Seq. ID no. 12370395
MGKYGVNVPKGVAASSLEEVKKAIQDVFPNESELVVKSQILAGGRGLGTFKSGLKGGVHIVKRDEAEEIAGKMLGQVLVTKQTGPQGKVVSKVYLCEKLSLVNEMYFSIILDRKSAGPLIIACKKGGTSIEDLAEKFPDMIIKVPIDVFAGITDEDAAKVVDGLAPKAADRKDSIEQVKKLYELFRKTDCTMLEINPLAETSTNQLVAADAKLNFDDNAAFRQKEVFAMRDPTQEDPREVAAAKVDLNYIGLDGEIGCMVNGAGLAMATMDIIKLHGGTPANFLDVGGNASEHQVVEAFKILTSDDKVKAILVNIFGGIMKCDVIASGIVNAAKEVALKVPVVVRLEGTNVEQGKRILKESGMKLITADDLDDAAEKAVKALAH

SEQ ID NO: 23685 - protein, 312 aa, Arabidopsis thaliana
  peptide (1)..(312): Ceres Seq. ID no. 12370396
MLGQVLVTKQTGPQGKVVSKVYLCEKLSLVNEMYFSIILDRKSAGPLIIACKKGGTSIEDLAEKFPDMIIKVPIDVFAGITDEDAAKVVDGLAPKAADRKDSIEQVKKLYELFRKTDCTMLEINPLAETSTNQLVAADAKLNFDDNAAFRQKEVFAMRDPTQEDPREVAAAKVDLNYIGLDGEIGCMVNGAGLAMATMDIIKLHGGTPANFLDVGGNASEHQVVEAFKILTSDDKVKAILVNIFGGIMKCDVIASGIVNAAKEVALKVPVVVRLEGTNVEQGKRILKESGMKLITADDLDDAAEKAVKALAH

SEQ ID NO: 23686 - DNA, 1179 bp, Arabidopsis thaliana
  misc_feature (1)..(1179): Ceres Seq. ID no. 12396477
  misc_feature (1)..(1179): Ortholog of  Ceres SEQ ID NO 15179015 as cited in SEQ ID NO 0
  misc_feature (1)..(1179): Ortholog of  Ceres SEQ ID NO 15179613 as cited in SEQ ID NO 0
tttttcgaaattaaagaaaaccctaaacgccgttgtctgatattgagagagagagagagagagattaaaaacttcttctggttccttttatcaacattttttctctctcttaaaacttcgaagcgatttttgatttacagactatggaaatggaatcattcatggacgaccttttgaacttctctgtaccggaagaggaagaagacgacgacgaacatacgcaaccaccgaggaatattactcgccggaaaactggattacggccaacagactccttcggtctctttaataccgacgaccttggagtggttgaagaagaggatttggaatggatttcaaacaaaaatgcttttccggtgattgaaacattcgtcggtgtattaccgtcggagcattttcctataacgtctcttctggaaagagaagcgactgaggtaaaacagctgagtccggtttcagtacttgagacgagtagccatagctccacaacgactacctcaaacagtagcggcggaagtaacggaagcacggccgtggctacgaccaccaccactccaacaataatgagctgttgcgttggttttaaagcgccggctaaagcgagaagcaagcgtcgtcgtacaggacgccgtgatttacgagttttgtggacaggaaacgagcaaggaggaatacagaagaagaagacgatgactgtggcggcggctgcgttgattatgggaaggaagtgtcaacactgtggagcggagaagactccgcaatggagggcaggaccagcggggcctaagactctgtgtaacgcttgtggcgtgaggtataagtccgggaggctagttccggagtatcgtccagcgaacagtccaactttcacggcggagttacattcgaattctcaccggaagattgtagagatgaggaagcagtatcagtccggtgacggtgacggtgatcggaaagattgtggataaaaagtgattaggattaatttttattttttcggagaaacttttttttttttttttcgtttaatttctctttatttgtttttaaagtctgttttagggttttgcagttggaatttaggtttttaattttttgcttatcttttttatttgtgaaattagtggtaattacttatttagggaatattatggtcatggaatggaagataactttctc

SEQ ID NO: 23687 - protein, 274 aa, Arabidopsis thaliana
  peptide (1)..(274): Ceres Seq. ID no. 12396478
MEMESFMDDLLNFSVPEEEEDDDEHTQPPRNITRRKTGLRPTDSFGLFNTDDLGVVEEEDLEWISNKNAFPVIETFVGVLPSEHFPITSLLEREATEVKQLSPVSVLETSSHSSTTTTSNSSGGSNGSTAVATTTTTPTIMSCCVGFKAPAKARSKRRRTGRRDLRVLWTGNEQGGIQKKKTMTVAAAALIMGRKCQHCGAEKTPQWRAGPAGPKTLCNACGVRYKSGRLVPEYRPANSPTFTAELHSNSHRKIVEMRKQYQSGDGDGDRKDCG

SEQ ID NO: 23688 - protein, 272 aa, Arabidopsis thaliana
  peptide (1)..(272): Ceres Seq. ID no. 12396479
MESFMDDLLNFSVPEEEEDDDEHTQPPRNITRRKTGLRPTDSFGLFNTDDLGVVEEEDLEWISNKNAFPVIETFVGVLPSEHFPITSLLEREATEVKQLSPVSVLETSSHSSTTTTSNSSGGSNGSTAVATTTTTPTIMSCCVGFKAPAKARSKRRRTGRRDLRVLWTGNEQGGIQKKKTMTVAAAALIMGRKCQHCGAEKTPQWRAGPAGPKTLCNACGVRYKSGRLVPEYRPANSPTFTAELHSNSHRKIVEMRKQYQSGDGDGDRKDCG

SEQ ID NO: 23689 - protein, 268 aa, Arabidopsis thaliana
  peptide (1)..(268): Ceres Seq. ID no. 12396480
MDDLLNFSVPEEEEDDDEHTQPPRNITRRKTGLRPTDSFGLFNTDDLGVVEEEDLEWISNKNAFPVIETFVGVLPSEHFPITSLLEREATEVKQLSPVSVLETSSHSSTTTTSNSSGGSNGSTAVATTTTTPTIMSCCVGFKAPAKARSKRRRTGRRDLRVLWTGNEQGGIQKKKTMTVAAAALIMGRKCQHCGAEKTPQWRAGPAGPKTLCNACGVRYKSGRLVPEYRPANSPTFTAELHSNSHRKIVEMRKQYQSGDGDGDRKDCG

SEQ ID NO: 23690 - DNA, 1128 bp, Arabidopsis thaliana
  misc_feature (1)..(1128): Ceres Seq. ID no. 12321547
  misc_feature (1)..(1128): Ortholog of  Ceres SEQ ID NO 13594377 as cited in SEQ ID NO 58177
  misc_feature (1)..(1128): Ortholog of  Ceres SEQ ID NO 15224613 as cited in SEQ ID NO 58938
  misc_feature (1)..(1128): Ortholog of  Ceres SEQ ID NO 13664309 as cited in SEQ ID NO 60596
agatcataaagaaccaaaaataaaagccaaaacgtttttagacatggcactcacaaaagagagaagaagcttgttggtttcaatggtgttggtgttcttcttcttcaactttcaccatcttcaagtcacgagttgtccagatcaggcgacgacaaactgtacggaccaggacaggaaattattggagtttccattgaatttggagtaccttgaagctgagtttttcttgttcggggcgttagggtttggtcttgataaggtcgcaccaaatctaacaatgggagggccaagtcctattggagctcagaaagccaatctcgatcctttgacaagagatattattttgcagtttgcttggcaagaggttggccacttgagggcaatcaagaaaacggtgaaaggatttgcaaggccacaacttgatttgagtaagaaagcatttgctaaagtgatggataaagcatttggagtaaaatttgtgccgccgttcaatccttatgccaattcttacaattacctcattgcatcgtatttggtcccttatgttggtctcaccggatacgttggcgctaaccctaaactgcaatgtccagcctcaagaaagttagtagcaggacttttgggagtagaatcgggtcaagacgcggtgattagaggtatgttatatgctcgagcggcacacatagtctatccttatggtgtcacggttgcggctttcacggataagatttcggatctaaggaacaaattgggaaaagcgggtgtgaaagatgagggattgatcgtacctaaattcatgggtgcagaaggacaagtgattgggaatgtattggtcggtaatgagctctcgctttcgtttgatagaacacctgaggagattctacggattgtgtatggaagtggaaatgaaagtgttcccggtggattttaccctaaaggagcggatggagaaatcgctaagtcttatttggttactgttgggagtgagtgaggtttagttttgctttggagtttaatttcctttgtagttcttaggtttttggttatataggagactaatgaaaataattgtcgtattattgtaataaatgttgtgagagtgacatttccataatcgataaaaagttc

SEQ ID NO: 23691 - protein, 329 aa, Arabidopsis thaliana
  peptide (1)..(329): Ceres Seq. ID no. 12321548
DHKEPKIKAKTFLDMALTKERRSLLVSMVLVFFFFNFHHLQVTSCPDQATTNCTDQDRKLLEFPLNLEYLEAEFFLFGALGFGLDKVAPNLTMGGPSPIGAQKANLDPLTRDIILQFAWQEVGHLRAIKKTVKGFARPQLDLSKKAFAKVMDKAFGVKFVPPFNPYANSYNYLIASYLVPYVGLTGYVGANPKLQCPASRKLVAGLLGVESGQDAVIRGMLYARAAHIVYPYGVTVAAFTDKISDLRNKLGKAGVKDEGLIVPKFMGAEGQVIGNVLVGNELSLSFDRTPEEILRIVYGSGNESVPGGFYPKGADGEIAKSYLVTVGSE

SEQ ID NO: 23692 - protein, 315 aa, Arabidopsis thaliana
  peptide (1)..(315): Ceres Seq. ID no. 12321549
MALTKERRSLLVSMVLVFFFFNFHHLQVTSCPDQATTNCTDQDRKLLEFPLNLEYLEAEFFLFGALGFGLDKVAPNLTMGGPSPIGAQKANLDPLTRDIILQFAWQEVGHLRAIKKTVKGFARPQLDLSKKAFAKVMDKAFGVKFVPPFNPYANSYNYLIASYLVPYVGLTGYVGANPKLQCPASRKLVAGLLGVESGQDAVIRGMLYARAAHIVYPYGVTVAAFTDKISDLRNKLGKAGVKDEGLIVPKFMGAEGQVIGNVLVGNELSLSFDRTPEEILRIVYGSGNESVPGGFYPKGADGEIAKSYLVTVGSE

SEQ ID NO: 23693 - protein, 302 aa, Arabidopsis thaliana
  peptide (1)..(302): Ceres Seq. ID no. 12321550
MVLVFFFFNFHHLQVTSCPDQATTNCTDQDRKLLEFPLNLEYLEAEFFLFGALGFGLDKVAPNLTMGGPSPIGAQKANLDPLTRDIILQFAWQEVGHLRAIKKTVKGFARPQLDLSKKAFAKVMDKAFGVKFVPPFNPYANSYNYLIASYLVPYVGLTGYVGANPKLQCPASRKLVAGLLGVESGQDAVIRGMLYARAAHIVYPYGVTVAAFTDKISDLRNKLGKAGVKDEGLIVPKFMGAEGQVIGNVLVGNELSLSFDRTPEEILRIVYGSGNESVPGGFYPKGADGEIAKSYLVTVGSE

SEQ ID NO: 23694 - DNA, 1110 bp, Arabidopsis thaliana
  misc_feature (1)..(1110): Ceres Seq. ID no. 12321543
  misc_feature (1)..(1110): Ortholog of  Ceres SEQ ID NO 12633565 as cited in SEQ ID NO 1190
  misc_feature (1)..(1110): Ortholog of  Ceres SEQ ID NO 15171390 as cited in SEQ ID NO 51650
  misc_feature (1)..(1110): Ortholog of  Ceres SEQ ID NO 13594845 as cited in SEQ ID NO 51940
agcagagcactcgataattaatactagggacgaagaagctctcgtttattaaattttagcttagaacacagaagaagcattttttcggatctgagatctttagatccgaacatcgtttatctcaaatcgtttattcaaggtctaaaaaaaagttttgaagaatcatagccatgtcaagaaggcaagtaaggcgtgtaggggatagtggaagcttcccatttgtaggagctctgcattcaaaatcacgttcgtctcctctgttatcagtttgccttgttctcgtgggagcatgccttctcattggttatgcttacagtggtccaggtatgttcaaaagtatcagagaagtcagcaagattacaggtgactattcttgcacagcagaagttcaaagagccattcctattcttaagagtgcgtatggagatagcatgcgcaaagtcctgcacgtgggtcctgaaacatgctcagtggtctcgagtctgttgaatgaagaagagacagaagcatggggtgttgaaccatatgatgtggaggatgcagactctaactgcaaaagtcttttgcacaaaggccttgtacgtgtggctgacatcaaattccctcttccttaccggtcaaagtcgttttctcttgtgatcgtctcagacgctttggattacctctcacccaggtacctgaacaaaactgtgcctgaacttgctcgcgtcgcttcagatggtgtcgttcttttagcaggtaaccctggtcaacaaaaggctaaaggtgcggaattgtcgaaatttggacggcctgctaaaatgcgtagctcgtcgtggtggatccgtttcttctcacagacgaacttagaggaaaacgaagcagcaagcaagaaattcgaacaagcagcttccaagagttcatacaaaccagcttgtcaagttttccacctcaagccattacattagtacacactattattactggtcttaagacatgaaaccagatatctctcctctctgtttaatacccttttttccgctatagaaagaaactaaactcccacaaattgtaattcattctcaacgatttgattcataatttaactatttaataaatttgcctcttctc

SEQ ID NO: 23695 - protein, 258 aa, Arabidopsis thaliana
  peptide (1)..(258): Ceres Seq. ID no. 12321544
MSRRQVRRVGDSGSFPFVGALHSKSRSSPLLSVCLVLVGACLLIGYAYSGPGMFKSIREVSKITGDYSCTAEVQRAIPILKSAYGDSMRKVLHVGPETCSVVSSLLNEEETEAWGVEPYDVEDADSNCKSLLHKGLVRVADIKFPLPYRSKSFSLVIVSDALDYLSPRYLNKTVPELARVASDGVVLLAGNPGQQKAKGAELSKFGRPAKMRSSSWWIRFFSQTNLEENEAASKKFEQAASKSSYKPACQVFHLKPLH

SEQ ID NO: 23696 - protein, 206 aa, Arabidopsis thaliana
  peptide (1)..(206): Ceres Seq. ID no. 12321545
MFKSIREVSKITGDYSCTAEVQRAIPILKSAYGDSMRKVLHVGPETCSVVSSLLNEEETEAWGVEPYDVEDADSNCKSLLHKGLVRVADIKFPLPYRSKSFSLVIVSDALDYLSPRYLNKTVPELARVASDGVVLLAGNPGQQKAKGAELSKFGRPAKMRSSSWWIRFFSQTNLEENEAASKKFEQAASKSSYKPACQVFHLKPLH

SEQ ID NO: 23697 - protein, 171 aa, Arabidopsis thaliana
  peptide (1)..(171): Ceres Seq. ID no. 12321546
MRKVLHVGPETCSVVSSLLNEEETEAWGVEPYDVEDADSNCKSLLHKGLVRVADIKFPLPYRSKSFSLVIVSDALDYLSPRYLNKTVPELARVASDGVVLLAGNPGQQKAKGAELSKFGRPAKMRSSSWWIRFFSQTNLEENEAASKKFEQAASKSSYKPACQVFHLKPLH

SEQ ID NO: 23698 - DNA, 1387 bp, Arabidopsis thaliana
  misc_feature (1)..(1387): Ceres Seq. ID no. 13486745
  misc_feature (1)..(1387): Ortholog of  Ceres SEQ ID NO 14302154 as cited in SEQ ID NO 0
attgtttcagaaaagctttaacctaatttcacttcgtctctctctcgcgctcccaatttctccgccggcgggaaaaccatgtcgcacttcggaaggtcaggtccaccggatatcagcgacacctactcacttctcgtccttaacatcaccttccgtacgactgctgatgatctctatcctctattcgcaaagtatggaaaggtcgttgatgtgtttattcccagagatcgaaggactggtgattcgcgtggttttgcgtttgttcggtataagtataaagacgaagctcacaaagcagtggaaaggcttgatggaagagttgttgatggcagagaaataactgttcagtttgcgaaatatgggccaaatgctgaaaaaatttccaaaggaagagttgtggaaccaccgccgaagtcacgaagatctagaagccgtagtcctaggcggagtcgtagtcctaggaggagccgtagcccgcctagacgtcgtagtcccagaagaagccgcagtcctcgtaggaggtcccgagatgactatagggaaaaagactaccggaagcagagcaggagcagaagctatgacaggcgtgaaaggcatgaggagaaggatagagatcatcgtcgtcgcactaggtctcgtagtgccagcccagatgaaaaacgcagagtcagaggccgttatgataatgagagccgcagtcacagtcgttccttgagtgcatctcctgctcgccgcagccctagaagttcctccccacagaaaacctctcctgctagagaagtttctcctgataagcgtagcaatgagaggtctccatctcctcgtcgcagcctcagcccaagaagccctgctttgcaaaaggcctctccttctaaggagatgtctcctgaaaggcgtagcaatgagaggtccccatctcctggtagccctgctcctctgcgcaaagttgatgctgcttctcgaagtcaatctccttatgctgcggaatgactgcagccacttgtgaaagtgatacggtgtatgatgaaaaacacgtttgcttgtactgatgatgtttcatcattaagcactggaacgtctaccctctgtagtattacttgctttccgtaggtgccctcaaactactgagtactgactgtatctttgtttcctgttatcgttctggtttagtgttcatgtgcaagaattattactgtttgaacagcctttttagtctctgttttatttgaatcttctctggtttggaattcatagcattctaactccattcccctggcttgtcttggatttttctagtctggttcgagaaaagaattgactgggaagatggcacaaccatgttgagattgtagctgttgatggctgtttatgaaactgtagatgatct

SEQ ID NO: 23699 - protein, 303 aa, Arabidopsis thaliana
  peptide (1)..(303): Ceres Seq. ID no. 13486746
MSHFGRSGPPDISDTYSLLVLNITFRTTADDLYPLFAKYGKVVDVFIPRDRRTGDSRGFAFVRYKYKDEAHKAVERLDGRVVDGREITVQFAKYGPNAEKISKGRVVEPPPKSRRSRSRSPRRSRSPRRSRSPPRRRSPRRSRSPRRRSRDDYREKDYRKQSRSRSYDRRERHEEKDRDHRRRTRSRSASPDEKRRVRGRYDNESRSHSRSLSASPARRSPRSSSPQKTSPAREVSPDKRSNERSPSPRRSLSPRSPALQKASPSKEMSPERRSNERSPSPGSPAPLRKVDAASRSQSPYAAE

SEQ ID NO: 23700 - DNA, 1429 bp, Arabidopsis thaliana
  misc_feature (1)..(1429): Ceres Seq. ID no. 13487883
  misc_feature (1)..(1429): Ortholog of  Ceres SEQ ID NO 12625092 as cited in SEQ ID NO 68848
agatatttttttacgaaaatccacggccactaaccgtaaaggacactcttttgatttttctcttcttctacttaactcgctttgcctgactcactgagtcatggcgcttctgaggccgcatcttcatcgctttcactccaacactctccgccactcagcctatccttccgccgacgctggcggtggccttgtcgtctatcccacgtatggtcgtcaccgttgctccgcgattgcgatcgacgctccgtcgtctctgactggcgtgacgccgattcgttggggttacacgagtgttcaaggattccgagatgagatggaagacgacatcgtaatccgttctgatgctgtcgatagcttctcctacgcagcggtcttcgacggccacgctgggtcgtcctctgtcaaattcctcagggaagagctgtataaagagtgtgttggtgcattgcaagctggatcgttgttgaatggaggcgatttcgcagcaatcaaggaagctttgattaaggcctttgaaagcgttgaccgcaatttgctcaaatggctagaagctaacggtgacgaagaagatgaatcaggttcaacagccactgtaatgatcatcagaaatgatgtttccttcattgctcatattggtgattcgtgtgcagtcttatctcgatctgggcaaatcgaggaattgactgattatcaccgtccatatggaagcagtagagcagctattcaggaagtgaaaagggtcaaagaagcaggtggatggattgtcaatggaaggatttgtggagacatagctgtatctcgtgcttttggtgacatccggtttaagacaaagaagaatgatatgttaaagaagggtgttgatgaaggaagatggtccgagaagtttgtttccagaatcgagtttaaaggggacatggttgtggcgactccagatatcttccaagtacctctgacatctgatgtggaattcattattttagcttctgatggattatgggactacatgaagagctcagatgtggttagttatgttagggatcagctccggaaacatgggaatgtgcagcttgcttgtgaatctcttgcgcaagtagctttggaccggcgatctcaggacaacattagcatcattattgctgatctaggaagaacagagtggaagaatctccccgcgcagcgacaaaacgtagtggttgaactggttcaggctgcaacgactatcggtttagttactgttggcatatggatgtcttcacatctatcttaagtgaattgaacattctatctctttcgttagtgtatataaaacctgtaactatgtctaacactctagtcttcccatagaaatggagatatgaagatacctcacaaacagaaccagctttatattattatatatcccactttcacaagcgttgaaactacattt

SEQ ID NO: 23701 - protein, 388 aa, Arabidopsis thaliana
  peptide (1)..(388): Ceres Seq. ID no. 13487884
MALLRPHLHRFHSNTLRHSAYPSADAGGGLVVYPTYGRHRCSAIAIDAPSSLTGVTPIRWGYTSVQGFRDEMEDDIVIRSDAVDSFSYAAVFDGHAGSSSVKFLREELYKECVGALQAGSLLNGGDFAAIKEALIKAFESVDRNLLKWLEANGDEEDESGSTATVMIIRNDVSFIAHIGDSCAVLSRSGQIEELTDYHRPYGSSRAAIQEVKRVKEAGGWIVNGRICGDIAVSRAFGDIRFKTKKNDMLKKGVDEGRWSEKFVSRIEFKGDMVVATPDIFQVPLTSDVEFIILASDGLWDYMKSSDVVSYVRDQLRKHGNVQLACESLAQVALDRRSQDNISIIIADLGRTEWKNLPAQRQNVVVELVQAATTIGLVTVGIWMSSHLS

SEQ ID NO: 23702 - protein, 317 aa, Arabidopsis thaliana
  peptide (1)..(317): Ceres Seq. ID no. 13487885
MEDDIVIRSDAVDSFSYAAVFDGHAGSSSVKFLREELYKECVGALQAGSLLNGGDFAAIKEALIKAFESVDRNLLKWLEANGDEEDESGSTATVMIIRNDVSFIAHIGDSCAVLSRSGQIEELTDYHRPYGSSRAAIQEVKRVKEAGGWIVNGRICGDIAVSRAFGDIRFKTKKNDMLKKGVDEGRWSEKFVSRIEFKGDMVVATPDIFQVPLTSDVEFIILASDGLWDYMKSSDVVSYVRDQLRKHGNVQLACESLAQVALDRRSQDNISIIIADLGRTEWKNLPAQRQNVVVELVQAATTIGLVTVGIWMSSHLS

SEQ ID NO: 23703 - protein, 223 aa, Arabidopsis thaliana
  peptide (1)..(223): Ceres Seq. ID no. 13487886
MIIRNDVSFIAHIGDSCAVLSRSGQIEELTDYHRPYGSSRAAIQEVKRVKEAGGWIVNGRICGDIAVSRAFGDIRFKTKKNDMLKKGVDEGRWSEKFVSRIEFKGDMVVATPDIFQVPLTSDVEFIILASDGLWDYMKSSDVVSYVRDQLRKHGNVQLACESLAQVALDRRSQDNISIIIADLGRTEWKNLPAQRQNVVVELVQAATTIGLVTVGIWMSSHLS

SEQ ID NO: 23704 - DNA, 1372 bp, Arabidopsis thaliana
  misc_feature (1)..(1372): Ceres Seq. ID no. 12321831
  misc_feature (1)..(1372): Ortholog of  Ceres SEQ ID NO 13595351 as cited in SEQ ID NO 55934
  misc_feature (1)..(1372): Ortholog of  Ceres SEQ ID NO 13639645 as cited in SEQ ID NO 57488
aaatcaaaggatctcaatttcttcagtcaacaggtgttccttctcttcctctccaatttggaggtatacggagagagggaagaaaaatggcagctccggcgatcctaaacggcggagatgcgacggagagagaaacacgaatggctcactctgcaatgacattggttcaggtcataaatggaggataccatgtggttacgaaagtagctcttaacgttggtgtaaatcagctcgtcttttgtgtctttcgcgatcttcttgctctctccattctcgcacctctcgcttttttccgtgaaagaaggatcagacctcctatgaatagaagcatcttcttttcactcttctttcttggtttagcagggatatttgggaaccagttactatttcttatgggtttatcgtacacgaatccaacttatgccgctgctatacaaccatcaatccctgtctttacatttctcttggctgtcttgatgggtacagaaaaagtgaacttgtttaaagtcgagggccaaacgaaagttggaggtactcttgtttgtgtttcgggtgctatagcgatggctttgtttcgtggtccagccttgtttggaggtaaagatgcagcagactcggcaaatagtgttataatcgatagaggtcaaccagagattaatgggtggttagtctctagttttcttggttttgggtttgatcaatggcacataggagttttatgcttgattggaaactgtatgtgtatggctgcttttctcgctgtccaagcaccggttttgaagaagtatcctgcctacctttcggttgctgcatattcatacttcttcggtgcatcaataatgatcacaacagctatcttgtttgttagagagcctaaagattggagcttaacacaatctgaggttcttgctattatattcgctggagtgtttgcctcagctctaaactatggactcttgacttggtccaataaaattcttggagctgctttggtttccctatacaatcctcttcagcctgcaacatccgcctttttatcgacaattttcctcggcagcccgatctatcttggaagcgttttgggtggaaccctcatcatttgcgggctttatatggttacttgggcatcttacagagagcaacaaacaacatcagctgggaatgagattgcttcttctagtaatgtaagaatctcggaacctttcatttacagagatgagactggtaaataaataagaaaaggtaaagaaaggatacttgtaccgttgtacgtagttaatatcagacaaaaacttgacaaatcatacaattttttcgagttcaaacattgattctttaaacggtaaataagtcaaaataattacttcgcccc

SEQ ID NO: 23705 - protein, 409 aa, Arabidopsis thaliana
  peptide (1)..(409): Ceres Seq. ID no. 12321832
IKGSQFLQSTGVPSLPLQFGGIRREGRKMAAPAILNGGDATERETRMAHSAMTLVQVINGGYHVVTKVALNVGVNQLVFCVFRDLLALSILAPLAFFRERRIRPPMNRSIFFSLFFLGLAGIFGNQLLFLMGLSYTNPTYAAAIQPSIPVFTFLLAVLMGTEKVNLFKVEGQTKVGGTLVCVSGAIAMALFRGPALFGGKDAADSANSVIIDRGQPEINGWLVSSFLGFGFDQWHIGVLCLIGNCMCMAAFLAVQAPVLKKYPAYLSVAAYSYFFGASIMITTAILFVREPKDWSLTQSEVLAIIFAGVFASALNYGLLTWSNKILGAALVSLYNPLQPATSAFLSTIFLGSPIYLGSVLGGTLIICGLYMVTWASYREQQTTSAGNEIASSSNVRISEPFIYRDETGK

SEQ ID NO: 23706 - protein, 381 aa, Arabidopsis thaliana
  peptide (1)..(381): Ceres Seq. ID no. 12321833
MAAPAILNGGDATERETRMAHSAMTLVQVINGGYHVVTKVALNVGVNQLVFCVFRDLLALSILAPLAFFRERRIRPPMNRSIFFSLFFLGLAGIFGNQLLFLMGLSYTNPTYAAAIQPSIPVFTFLLAVLMGTEKVNLFKVEGQTKVGGTLVCVSGAIAMALFRGPALFGGKDAADSANSVIIDRGQPEINGWLVSSFLGFGFDQWHIGVLCLIGNCMCMAAFLAVQAPVLKKYPAYLSVAAYSYFFGASIMITTAILFVREPKDWSLTQSEVLAIIFAGVFASALNYGLLTWSNKILGAALVSLYNPLQPATSAFLSTIFLGSPIYLGSVLGGTLIICGLYMVTWASYREQQTTSAGNEIASSSNVRISEPFIYRDETGK

SEQ ID NO: 23707 - protein, 363 aa, Arabidopsis thaliana
  peptide (1)..(363): Ceres Seq. ID no. 12321834
MAHSAMTLVQVINGGYHVVTKVALNVGVNQLVFCVFRDLLALSILAPLAFFRERRIRPPMNRSIFFSLFFLGLAGIFGNQLLFLMGLSYTNPTYAAAIQPSIPVFTFLLAVLMGTEKVNLFKVEGQTKVGGTLVCVSGAIAMALFRGPALFGGKDAADSANSVIIDRGQPEINGWLVSSFLGFGFDQWHIGVLCLIGNCMCMAAFLAVQAPVLKKYPAYLSVAAYSYFFGASIMITTAILFVREPKDWSLTQSEVLAIIFAGVFASALNYGLLTWSNKILGAALVSLYNPLQPATSAFLSTIFLGSPIYLGSVLGGTLIICGLYMVTWASYREQQTTSAGNEIASSSNVRISEPFIYRDETGK

SEQ ID NO: 23708 - DNA, 1387 bp, Arabidopsis thaliana
  misc_feature (1)..(1387): Ceres Seq. ID no. 12324912
  misc_feature (1)..(1387): Ortholog of  Ceres SEQ ID NO 14314015 as cited in SEQ ID NO 56942
  misc_feature (1)..(1387): Ortholog of  Ceres SEQ ID NO 13596745 as cited in SEQ ID NO 60636
atctatctgattctcactctcactactgacacaaatccttttccttttgttcctctttctctaaaccaatctttaaaacaacttattcgtcttcaagatttctccaacaagtcctaccatgtccggcgaaggagacacgaccctcaaagctatctgttacaagcctggctctctccagttactcgatcagaggaagcttcctttagagactatttacttagagattcgtgatgcttcagatggatggagtgctattcaggaaatggttgtacgtggtgctcctgctatagctattgctgctgctctttctttggctgttgaagttttcaactttcatggttttgatggatcagcttcagatgctgttgcttttcttgagaacaagttggattatttagtgtcaagccgtccaacagcagttaatcttgcagatgctgctttgaaacttaaacatgttatagcaaaggccttggctactgccaccgaagccaaatccattttcaaggcatatattgaagctagtgaggatatgcttgaagatgatgttgtttcaaacaaagctataggaaactttggtttaagcttgttgaggcaacaagccaagaatcctgataagctttctgttttgacccattgcaacactggcagccttgctaccgccggatatggtactgccctcggtgtcatccgtgcactccatactcaaggaatcttagaaagagcatactgcacagaaactcgtccatttaatcaaggatcgaggcttacagcgtttgagttggtgcatgagaaaatccctgcaactctcattgcagactcagctgcagctgcactgatgaaagatggtcgtgttgatggtgtcatcgttggagctgatcgtgtggcttcaaatggcgatactgctaacaagattgggacttacagtctcgccttgtgcgcaaaacatcacgggatcccattttatgttgctgcacctcttacctcagttgatctgtcactttcatccgggaaagaaatcgtgatagaggaaagatctccaaaggagttgatgcacacacacggaggacttggtgaacgcattgcagcaccagggatctcagtttggaacccagcttttgatatgactccagcagagctgattgcaggaatcataaccgagaaaggggtcataacaaagaatggcaatgatacatttgacataagcagctttgccaagaagataacaggaaactcatctcgttgaagttagagtcagcattgcgacttgcggatgttcccctctctctatatacttgcaacaaagcaaattactttgtaatgtttgagctactaagtacactgtggtaaaaattgtcaaaaataagaaataatcgatacgttttagcct

SEQ ID NO: 23709 - protein, 374 aa, Arabidopsis thaliana
  peptide (1)..(374): Ceres Seq. ID no. 12324913
MSGEGDTTLKAICYKPGSLQLLDQRKLPLETIYLEIRDASDGWSAIQEMVVRGAPAIAIAAALSLAVEVFNFHGFDGSASDAVAFLENKLDYLVSSRPTAVNLADAALKLKHVIAKALATATEAKSIFKAYIEASEDMLEDDVVSNKAIGNFGLSLLRQQAKNPDKLSVLTHCNTGSLATAGYGTALGVIRALHTQGILERAYCTETRPFNQGSRLTAFELVHEKIPATLIADSAAAALMKDGRVDGVIVGADRVASNGDTANKIGTYSLALCAKHHGIPFYVAAPLTSVDLSLSSGKEIVIEERSPKELMHTHGGLGERIAAPGISVWNPAFDMTPAELIAGIITEKGVITKNGNDTFDISSFAKKITGNSSR

SEQ ID NO: 23710 - protein, 326 aa, Arabidopsis thaliana
  peptide (1)..(326): Ceres Seq. ID no. 12324914
MVVRGAPAIAIAAALSLAVEVFNFHGFDGSASDAVAFLENKLDYLVSSRPTAVNLADAALKLKHVIAKALATATEAKSIFKAYIEASEDMLEDDVVSNKAIGNFGLSLLRQQAKNPDKLSVLTHCNTGSLATAGYGTALGVIRALHTQGILERAYCTETRPFNQGSRLTAFELVHEKIPATLIADSAAAALMKDGRVDGVIVGADRVASNGDTANKIGTYSLALCAKHHGIPFYVAAPLTSVDLSLSSGKEIVIEERSPKELMHTHGGLGERIAAPGISVWNPAFDMTPAELIAGIITEKGVITKNGNDTFDISSFAKKITGNSSR

SEQ ID NO: 23711 - protein, 237 aa, Arabidopsis thaliana
  peptide (1)..(237): Ceres Seq. ID no. 12324915
MLEDDVVSNKAIGNFGLSLLRQQAKNPDKLSVLTHCNTGSLATAGYGTALGVIRALHTQGILERAYCTETRPFNQGSRLTAFELVHEKIPATLIADSAAAALMKDGRVDGVIVGADRVASNGDTANKIGTYSLALCAKHHGIPFYVAAPLTSVDLSLSSGKEIVIEERSPKELMHTHGGLGERIAAPGISVWNPAFDMTPAELIAGIITEKGVITKNGNDTFDISSFAKKITGNSSR

SEQ ID NO: 23712 - DNA, 1317 bp, Arabidopsis thaliana
  misc_feature (1)..(1317): Ceres Seq. ID no. 12396481
  misc_feature (1)..(1317): Ortholog of  Ceres SEQ ID NO 14308359 as cited in SEQ ID NO 55097
  misc_feature (1)..(1317): Ortholog of  Ceres SEQ ID NO 13596689 as cited in SEQ ID NO 62728
acaaagaaaaaacactatctctatcgacaaagataagagaactcagaagcttctactcttaaaatggcaactttctcttatttccaaaactaccctcattcccttcttgatcctcttctcttccctacacctcactcctccattaatctcactagtttcatcgatcaaaaccatctctatccactaccaaacatttccacagttgaagacatttcctttcttgaatataatgttgacaaaactgaaaactctggttcagagaaactggccaacacaaccaaaacagcaaccaccggttcttcttcctgcgaccagctcagccacggaccatcagccatcaccaacaccggaaaaacccgtgggaggaaggccagaaacagtaataactccaaggaaggagtagagggaagaaaaagcaaaaaacagaagagaggaagcaaagaagagcctccaacagattacattcacgttcgagctagaagaggccaagctactgatagccacagccttgctgagagggtgagaagggaaaagataagtgagcggatgaggactctgcaaaaccttgttccgggctgtgataaggtaacagggaaggccctcatgttggatgagattataaattatgtccagaccttgcagactcaagttgagtttctctcaatgaagctaacttctataagtccggtggtctatgactttggctccgaccttgatggcctcatacttcaatctgagatgggttctccagaagtaggaacgtcttttaccaatgcaatgccaacaactactcctatctttccttcactattggataattctgtagttcccacacatgcacaagttcaggaagagggagaagaaagagagaactttgtagacagaagtgggttcaacaacaacaacttctgttctttcccttgataaaattacatgtcgacacaaacacaaaagcctgctttcgttgatttaatctcctcccatttgcacggagggaataaaatctacgtaaaccaggttttgtaaaagtggatgtacttatttgttccgtttatatagtttgaagaaataaagtattttagagacttaaaaagctcattttctctatttgtcccgagagtttcaacataatcattacataaaatcaatggataaattcatactaaaagagaatggtatatgaggcagaggcaaattcgatggaggaaagaaagacatataaactaagaagacctatcagcttaatcattgttttttttaatataattgaattttgatgtatccactcattaattttataagttcttgtattttcac

SEQ ID NO: 23713 - protein, 286 aa, Arabidopsis thaliana
  peptide (1)..(286): Ceres Seq. ID no. 12396482
MATFSYFQNYPHSLLDPLLFPTPHSSINLTSFIDQNHLYPLPNISTVEDISFLEYNVDKTENSGSEKLANTTKTATTGSSSCDQLSHGPSAITNTGKTRGRKARNSNNSKEGVEGRKSKKQKRGSKEEPPTDYIHVRARRGQATDSHSLAERVRREKISERMRTLQNLVPGCDKVTGKALMLDEIINYVQTLQTQVEFLSMKLTSISPVVYDFGSDLDGLILQSEMGSPEVGTSFTNAMPTTTPIFPSLLDNSVVPTHAQVQEEGEERENFVDRSGFNNNNFCSFP

SEQ ID NO: 23714 - DNA, 1809 bp, Arabidopsis thaliana
  misc_feature (1)..(1809): Ceres Seq. ID no. 13591810
  misc_feature (1)..(1809): Ortholog of  Ceres SEQ ID NO 13600220 as cited in SEQ ID NO 0
tggcaacacaaaaacatacacactactaataaaccatgaagcttcttatgctcgcctttgtttttctattagctttggcgacttgtaaaggtgacgagtttgtttgtgaagagaacgagccattcacatgtaaccaaactaaacttttcaacagtggcaatttcgaaaaaggcttcatcttcggtgttgcatcttctgcttaccaggtggaaggcggtagaggccgtggacttaacgtttgggatagcttcactcaccgattcccagagaaaggtggagctgatttgggaaatggagacactacttgtgactcatatactctttggcagaaagatatagacgtgatggacgagctcaactctactggctacagattctccattgcgtggtcaagactccttccaaaaggaaagaggagcaggggagtgaacccaggagctattaagtactacaacggtctcatagatggcctcgtcgcaaagaatatgacgccctttgttaccctctttcattgggaccttcctcaaacactacaagatgaatataacggtttcttgaacaaaacgatcgtagacgatttcaaggattacgcggatctatgtttcgagttatttggtgatagggtaaagaactggatcaccatcaaccagctatacacagtgcctactagaggatatgcattgggaacagatgcacccggtcgatgttctcctaagattgacgttagatgtcccggcggaaattcgtcaacagaaccctatattgttgcacataaccagcttcttgctcatgcagcggccgttgatgtttacaggacgaaatataaggatgaccaaaaaggtatgattggaccagtgatgataactagatggtttcttccatttgatcatagtcaagagagcaaagatgcaactgagcgggctaaaatatttttccatggatggttcatggggcctctaacagaaggtaaatacccagacatcatgagggaatatgttggtgatcggcttccagagttcagtgaaacagaagccgcacttgtaaagggttcatatgattttcttggtctcaactattacgtcactcaatacgcccaaaataatcagacgattgttccttcggacgtacacactgccttgatggactcacgcacaactctcacatctaaaaatgcaactggtcatgctcctggtccaccgttcaatgcagccagttactactacccaaaaggcatttactacgtaatggattacttcaaaaccacttacggtgaccctttaatatatgtcactgagaatggatttagtaccccaggtgatgaggactttgagaaggctactgccgattacaagcggattgattatctctgtagtcatctctgtttcctcagtaaagtcatcaaggagaagaatgtcaacgtgaaaggatattttgcttggtctcttggggataattacgaattctgtaacggatttaccgtcagattcggactaagttacgttgatttcgcaaatatcactggtgatagagacctcaaagcatctggcaaatggttccagaagttcataaacgttaccgacgaagactctacgaaccaagatctactccgctcaagcgtctcctccaagaaccgtgatcggaagagtcttgcagatgcatgaaatatccaatccactatatgtccaccaagatcatcttcatgtttcctctttctacttgctccatagataaggagctttttctaccatatgtattaaaataaaatcctaataaaagatgatcaataataataaagactttgtttactgc

SEQ ID NO: 23715 - protein, 541 aa, Arabidopsis thaliana
  peptide (1)..(541): Ceres Seq. ID no. 13591811
MKLLMLAFVFLLALATCKGDEFVCEENEPFTCNQTKLFNSGNFEKGFIFGVASSAYQVEGGRGRGLNVWDSFTHRFPEKGGADLGNGDTTCDSYTLWQKDIDVMDELNSTGYRFSIAWSRLLPKGKRSRGVNPGAIKYYNGLIDGLVAKNMTPFVTLFHWDLPQTLQDEYNGFLNKTIVDDFKDYADLCFELFGDRVKNWITINQLYTVPTRGYALGTDAPGRCSPKIDVRCPGGNSSTEPYIVAHNQLLAHAAAVDVYRTKYKDDQKGMIGPVMITRWFLPFDHSQESKDATERAKIFFHGWFMGPLTEGKYPDIMREYVGDRLPEFSETEAALVKGSYDFLGLNYYVTQYAQNNQTIVPSDVHTALMDSRTTLTSKNATGHAPGPPFNAASYYYPKGIYYVMDYFKTTYGDPLIYVTENGFSTPGDEDFEKATADYKRIDYLCSHLCFLSKVIKEKNVNVKGYFAWSLGDNYEFCNGFTVRFGLSYVDFANITGDRDLKASGKWFQKFINVTDEDSTNQDLLRSSVSSKNRDRKSLADA

SEQ ID NO: 23716 - protein, 537 aa, Arabidopsis thaliana
  peptide (1)..(537): Ceres Seq. ID no. 13591812
MLAFVFLLALATCKGDEFVCEENEPFTCNQTKLFNSGNFEKGFIFGVASSAYQVEGGRGRGLNVWDSFTHRFPEKGGADLGNGDTTCDSYTLWQKDIDVMDELNSTGYRFSIAWSRLLPKGKRSRGVNPGAIKYYNGLIDGLVAKNMTPFVTLFHWDLPQTLQDEYNGFLNKTIVDDFKDYADLCFELFGDRVKNWITINQLYTVPTRGYALGTDAPGRCSPKIDVRCPGGNSSTEPYIVAHNQLLAHAAAVDVYRTKYKDDQKGMIGPVMITRWFLPFDHSQESKDATERAKIFFHGWFMGPLTEGKYPDIMREYVGDRLPEFSETEAALVKGSYDFLGLNYYVTQYAQNNQTIVPSDVHTALMDSRTTLTSKNATGHAPGPPFNAASYYYPKGIYYVMDYFKTTYGDPLIYVTENGFSTPGDEDFEKATADYKRIDYLCSHLCFLSKVIKEKNVNVKGYFAWSLGDNYEFCNGFTVRFGLSYVDFANITGDRDLKASGKWFQKFINVTDEDSTNQDLLRSSVSSKNRDRKSLADA

SEQ ID NO: 23717 - protein, 438 aa, Arabidopsis thaliana
  peptide (1)..(438): Ceres Seq. ID no. 13591813
MDELNSTGYRFSIAWSRLLPKGKRSRGVNPGAIKYYNGLIDGLVAKNMTPFVTLFHWDLPQTLQDEYNGFLNKTIVDDFKDYADLCFELFGDRVKNWITINQLYTVPTRGYALGTDAPGRCSPKIDVRCPGGNSSTEPYIVAHNQLLAHAAAVDVYRTKYKDDQKGMIGPVMITRWFLPFDHSQESKDATERAKIFFHGWFMGPLTEGKYPDIMREYVGDRLPEFSETEAALVKGSYDFLGLNYYVTQYAQNNQTIVPSDVHTALMDSRTTLTSKNATGHAPGPPFNAASYYYPKGIYYVMDYFKTTYGDPLIYVTENGFSTPGDEDFEKATADYKRIDYLCSHLCFLSKVIKEKNVNVKGYFAWSLGDNYEFCNGFTVRFGLSYVDFANITGDRDLKASGKWFQKFINVTDEDSTNQDLLRSSVSSKNRDRKSLADA

SEQ ID NO: 23718 - DNA, 1291 bp, Arabidopsis thaliana
  misc_feature (1)..(1291): Ceres Seq. ID no. 12396032
  misc_feature (1)..(1291): Ortholog of  Ceres SEQ ID NO 13596048 as cited in SEQ ID NO 68476
  misc_feature (1)..(1291): Ortholog of  Ceres SEQ ID NO 12589137 as cited in SEQ ID NO 0
aaaagcgtgaaagcagcagatcaagataagaaagaagaaagaatcatcaaaaaatgggaataatggaggcagagaggaaaacaacaggctgggctgccagagacccatctgggatcctctctccttacacttacactcttagagagactggaccagaggatgtgaacataagaatcatttgctgtggaatctgccacaccgatcttcatcaaactaaaaatgatcttggcatgtctaattaccccatggttcctgggcatgaagtggtaggggaagtagtggaggtgggatcagatgtgagcaagttcaccgtaggggacatagttggagttggttgcctcgttggatgttgcggaggttgtagcccctgcgagagagatctggaacagtattgtccaaagaagatttggagctacaatgatgtttacatcaatggtcaacctacacaaggcggcttcgctaaagccaccgtcgttcaccaaaagtttgtggtcaagattccagaaggaatggcggttgagcaggctgcgccgctactgtgcgctggtgtgactgtgtacagtccactgagccactttggtctgaaacaaccaggcctaagaggaggtatactagggttaggtggagtcggtcacatgggtgtgaaaatagccaaagcaatgggtcaccatgtgactgtcataagctcatcaaacaagaagagagaagaggcattgcaagatcttggagctgatgattacgtgatcggatccgaccaagcgaagatgagcgaattggctgattcgttggattacgtaattgacacggtgcctgttcatcatgcacttgagccatatttgtctctgcttaagcttgatggtaaactcattctcatgggagttatcaacaatccattacagtttctcactcctctgcttatgcttgggaggaaagtgataacggggagcttcatagggagcatgaaggagacagaggagatgcttgagttctgtaaagaaaagggtttgagttcgattatcgaagttgtgaagatggattatgttaacactgcgtttgagagactcgagaagaacgatgtgcgttataggttcgtcgttgatgtcgaaggaagcaatctcgacgcttgatatcatgaaactcgaggctttttatacatactcgaatactcgatttaaacactcttatgtttgtttgtgagctttttcattcgtgtgtcactatttttcatgagaaagtggtaaaagatataatgatattggatttctaatcatgaatcatatgatatatgtgc

SEQ ID NO: 23719 - protein, 357 aa, Arabidopsis thaliana
  peptide (1)..(357): Ceres Seq. ID no. 12396033
MGIMEAERKTTGWAARDPSGILSPYTYTLRETGPEDVNIRIICCGICHTDLHQTKNDLGMSNYPMVPGHEVVGEVVEVGSDVSKFTVGDIVGVGCLVGCCGGCSPCERDLEQYCPKKIWSYNDVYINGQPTQGGFAKATVVHQKFVVKIPEGMAVEQAAPLLCAGVTVYSPLSHFGLKQPGLRGGILGLGGVGHMGVKIAKAMGHHVTVISSSNKKREEALQDLGADDYVIGSDQAKMSELADSLDYVIDTVPVHHALEPYLSLLKLDGKLILMGVINNPLQFLTPLLMLGRKVITGSFIGSMKETEEMLEFCKEKGLSSIIEVVKMDYVNTAFERLEKNDVRYRFVVDVEGSNLDA

SEQ ID NO: 23720 - protein, 354 aa, Arabidopsis thaliana
  peptide (1)..(354): Ceres Seq. ID no. 12396034
MEAERKTTGWAARDPSGILSPYTYTLRETGPEDVNIRIICCGICHTDLHQTKNDLGMSNYPMVPGHEVVGEVVEVGSDVSKFTVGDIVGVGCLVGCCGGCSPCERDLEQYCPKKIWSYNDVYINGQPTQGGFAKATVVHQKFVVKIPEGMAVEQAAPLLCAGVTVYSPLSHFGLKQPGLRGGILGLGGVGHMGVKIAKAMGHHVTVISSSNKKREEALQDLGADDYVIGSDQAKMSELADSLDYVIDTVPVHHALEPYLSLLKLDGKLILMGVINNPLQFLTPLLMLGRKVITGSFIGSMKETEEMLEFCKEKGLSSIIEVVKMDYVNTAFERLEKNDVRYRFVVDVEGSNLDA

SEQ ID NO: 23721 - protein, 298 aa, Arabidopsis thaliana
  peptide (1)..(298): Ceres Seq. ID no. 12396035
MSNYPMVPGHEVVGEVVEVGSDVSKFTVGDIVGVGCLVGCCGGCSPCERDLEQYCPKKIWSYNDVYINGQPTQGGFAKATVVHQKFVVKIPEGMAVEQAAPLLCAGVTVYSPLSHFGLKQPGLRGGILGLGGVGHMGVKIAKAMGHHVTVISSSNKKREEALQDLGADDYVIGSDQAKMSELADSLDYVIDTVPVHHALEPYLSLLKLDGKLILMGVINNPLQFLTPLLMLGRKVITGSFIGSMKETEEMLEFCKEKGLSSIIEVVKMDYVNTAFERLEKNDVRYRFVVDVEGSNLDA

SEQ ID NO: 23722 - DNA, 1445 bp, Arabidopsis thaliana
  misc_feature (1)..(1445): Ceres Seq. ID no. 13509190
  misc_feature (1)..(1445): Ortholog of  Ceres SEQ ID NO 15177298 as cited in SEQ ID NO 52711
aatcgaaaaatcatcaaaccctttcttcaccacattattttcactgagcgcataacatttttgagacaagagactctctctctctctcttctctctttctctccccctctctccggcgatggttgttgctatggaccaacgcaccaatgtgaacggagatcccggcgccggagaccggaagaaagaagaaaggtttgatccgagtgcacaaccaccgttcaagatcggagatataagggcggcgattcctaagcactgttgggttaagagtcctttgagatcaatgagttacgtcgtcagagacattatcgccgtcgcggctttggccatcgctgccgtgtatgttgatagctggttcctttggcctctttattgggccgcccaaggaacacttttctgggccatctttgttctcggccacgactgtggacatgggagtttctcagacattcctctactgaatagtgtggttggtcacattcttcattctttcatcctcgttccttaccatggttggagaataagccaccggacacaccaccagaaccatggccatgttgaaaacgacgagtcatgggttccgttaccagaaagggtgtacaagaaattgccccacagtactcggatgctcagatacactgtccctctccccatgctcgcatatcctctctatttgtgctacagaagtcctggaaaagaaggatcacattttaacccatacagtagtttatttgctccaagcgagagaaagcttattgcaacttcaactacttgttggtccataatgttcgtcagtcttatcgctctatctttcgtcttcggtccactcgcggttcttaaagtctacggtgtaccgtacattatctttgtgatgtggttggatgctgtcacgtatttgcatcatcatggtcacgatgagaagttgccttggtatagaggcaaggaatggagttatctacgtggaggattaacaacaattgatagagattacggaatctttaacaacattcatcacgacattggaactcacgtgatccatcatctcttcccacaaatccctcactatcacttggtcgacgccacgaaagcagctaaacatgtgttgggaagatactacagagaaccaaagacgtcaggagcaataccgatccacttggtggagagtttggtcgcaagtattaagaaagatcattacgtcagcgacactggtgatattgtcttctacgagacagatccagatctctacgtttacgcttctgacaaatctaaaatcaattaatctccatttgtttagctctattaggaataaaccagcccacttttaaaatttttatttcttgttgtttttaagttaaaagtgtactcgtgaaactcttttttttttcttttttttttattaatgtatttacattacaaggcgtaaagttttgttatttctcttttct

SEQ ID NO: 23723 - protein, 386 aa, Arabidopsis thaliana
  peptide (1)..(386): Ceres Seq. ID no. 13509191
MVVAMDQRTNVNGDPGAGDRKKEERFDPSAQPPFKIGDIRAAIPKHCWVKSPLRSMSYVVRDIIAVAALAIAAVYVDSWFLWPLYWAAQGTLFWAIFVLGHDCGHGSFSDIPLLNSVVGHILHSFILVPYHGWRISHRTHHQNHGHVENDESWVPLPERVYKKLPHSTRMLRYTVPLPMLAYPLYLCYRSPGKEGSHFNPYSSLFAPSERKLIATSTTCWSIMFVSLIALSFVFGPLAVLKVYGVPYIIFVMWLDAVTYLHHHGHDEKLPWYRGKEWSYLRGGLTTIDRDYGIFNNIHHDIGTHVIHHLFPQIPHYHLVDATKAAKHVLGRYYREPKTSGAIPIHLVESLVASIKKDHYVSDTGDIVFYETDPDLYVYASDKSKIN

SEQ ID NO: 23724 - protein, 382 aa, Arabidopsis thaliana
  peptide (1)..(382): Ceres Seq. ID no. 13509192
MDQRTNVNGDPGAGDRKKEERFDPSAQPPFKIGDIRAAIPKHCWVKSPLRSMSYVVRDIIAVAALAIAAVYVDSWFLWPLYWAAQGTLFWAIFVLGHDCGHGSFSDIPLLNSVVGHILHSFILVPYHGWRISHRTHHQNHGHVENDESWVPLPERVYKKLPHSTRMLRYTVPLPMLAYPLYLCYRSPGKEGSHFNPYSSLFAPSERKLIATSTTCWSIMFVSLIALSFVFGPLAVLKVYGVPYIIFVMWLDAVTYLHHHGHDEKLPWYRGKEWSYLRGGLTTIDRDYGIFNNIHHDIGTHVIHHLFPQIPHYHLVDATKAAKHVLGRYYREPKTSGAIPIHLVESLVASIKKDHYVSDTGDIVFYETDPDLYVYASDKSKIN

SEQ ID NO: 23725 - protein, 331 aa, Arabidopsis thaliana
  peptide (1)..(331): Ceres Seq. ID no. 13509193
MSYVVRDIIAVAALAIAAVYVDSWFLWPLYWAAQGTLFWAIFVLGHDCGHGSFSDIPLLNSVVGHILHSFILVPYHGWRISHRTHHQNHGHVENDESWVPLPERVYKKLPHSTRMLRYTVPLPMLAYPLYLCYRSPGKEGSHFNPYSSLFAPSERKLIATSTTCWSIMFVSLIALSFVFGPLAVLKVYGVPYIIFVMWLDAVTYLHHHGHDEKLPWYRGKEWSYLRGGLTTIDRDYGIFNNIHHDIGTHVIHHLFPQIPHYHLVDATKAAKHVLGRYYREPKTSGAIPIHLVESLVASIKKDHYVSDTGDIVFYETDPDLYVYASDKSKIN

SEQ ID NO: 23726 - DNA, 1108 bp, Arabidopsis thaliana
  misc_feature (1)..(1108): Ceres Seq. ID no. 12385437
  misc_feature (1)..(1108): Ortholog of  Ceres SEQ ID NO 13595626 as cited in SEQ ID NO 51116
aaaaacactagagataaccctagaaagatctctctcgatctctggttcgaagaaaatccaccatttccgattgttctttctctttgacaaaacccagatagataaaaattcgttccaattccagtgagctccggaaatggcgtccttcaagttgatgtcttcttccaattccgacttgtctcgccgtaattcttcttctgcttcatcttccccttctataagatcatcgcaccatctccgaccaaatcctcacgccgatcactccagaatcagtttcgcttacggcggaggagtcaacgattacactttcgcgtctgattcaaagcccttcgagatggcgattgatgttgatcggagtatcggagatcggaacagcgttaacaacggaaagagtgttgacgatgtttggaaagagattgtatctggagagcaaaagacgatcatgatgaaggaagaagaaccagaagatataatgacacttgaggatttcttagcgaaagcagaaatggacgagggagcttcagatgaaatcgatgtgaagattccaacggagagactcaacaacgacggtagctatacatttgattttccgatgcagcgacacagttcgttccagatggttgaaggatcaatgggtggaggagtaacgagaggaaagagagggagagtgatgatggaggcaatggataaagctgcagctcagagacagaagaggatgatcaagaaccgtgaatccgctgctaggtctcgagagaggaaacaggcttatcaggttgagttagagactttggctgccaagttagaggaggagaatgagcagcttttgaaggagattgaagagagcactaaagagagatacaagaagctcatggaggttctgattccggtcgatgagaaaccaaggccaccgtcgaggcccttaagcaggagccattccttggaatggtgaagtgtggtaaaaaaaacttttgtatgtaaaaaaaataaaaacatatgggcttgattactatattataatctatatagtaaagtgatggtgatatggttagtacttagttacctttaatgtatctaagggatgtaatggataatacatagctttttgctg

SEQ ID NO: 23727 - protein, 270 aa, Arabidopsis thaliana
  peptide (1)..(270): Ceres Seq. ID no. 12385438
MASFKLMSSSNSDLSRRNSSSASSSPSIRSSHHLRPNPHADHSRISFAYGGGVNDYTFASDSKPFEMAIDVDRSIGDRNSVNNGKSVDDVWKEIVSGEQKTIMMKEEEPEDIMTLEDFLAKAEMDEGASDEIDVKIPTERLNNDGSYTFDFPMQRHSSFQMVEGSMGGGVTRGKRGRVMMEAMDKAAAQRQKRMIKNRESAARSRERKQAYQVELETLAAKLEEENEQLLKEIEESTKERYKKLMEVLIPVDEKPRPPSRPLSRSHSLEW

SEQ ID NO: 23728 - protein, 264 aa, Arabidopsis thaliana
  peptide (1)..(264): Ceres Seq. ID no. 12385439
MSSSNSDLSRRNSSSASSSPSIRSSHHLRPNPHADHSRISFAYGGGVNDYTFASDSKPFEMAIDVDRSIGDRNSVNNGKSVDDVWKEIVSGEQKTIMMKEEEPEDIMTLEDFLAKAEMDEGASDEIDVKIPTERLNNDGSYTFDFPMQRHSSFQMVEGSMGGGVTRGKRGRVMMEAMDKAAAQRQKRMIKNRESAARSRERKQAYQVELETLAAKLEEENEQLLKEIEESTKERYKKLMEVLIPVDEKPRPPSRPLSRSHSLEW

SEQ ID NO: 23729 - protein, 204 aa, Arabidopsis thaliana
  peptide (1)..(204): Ceres Seq. ID no. 12385440
MAIDVDRSIGDRNSVNNGKSVDDVWKEIVSGEQKTIMMKEEEPEDIMTLEDFLAKAEMDEGASDEIDVKIPTERLNNDGSYTFDFPMQRHSSFQMVEGSMGGGVTRGKRGRVMMEAMDKAAAQRQKRMIKNRESAARSRERKQAYQVELETLAAKLEEENEQLLKEIEESTKERYKKLMEVLIPVDEKPRPPSRPLSRSHSLEW

SEQ ID NO: 23730 - DNA, 1216 bp, Arabidopsis thaliana
  misc_feature (1)..(1216): Ceres Seq. ID no. 12324317
  misc_feature (1)..(1216): Ortholog of  Ceres SEQ ID NO 15170885 as cited in SEQ ID NO 54326
tcatttcattgattacttgaaggatgatgtccgaattgttcgagacatacctgactggttcactgacaaagcagagctattctctagtataagaagaacagtcaaaaacattcccaaatatgcagcagcccaattttatattgacaatgttttacctcggataaaggagaagaagataatggccttgaagccttttgtcgatcgacttgggtatgacaatgtacctcaagaaatcaacagattacgatgccgtgtaaattatcatgctctcaaatttcttccagagatagagcagatggctgattcacttgtttctagaatgagaaatcgcactggaaatccaaatccatatatggctcttcatcttagattcgagaaaggaatggttggtctatcgttctgtgattttgtggggacaagggaagagaaagttaaaatggcagaatacagacaaaaggaatggcctcggcgtttcaagaatggttcccatctctggcagctcgccttgcagaagcgcaaagaaggtcgatgccctcttgagccaggagaagttgctgtgatcctacgtgcaatgggctatccaaaagaaacacaaatctatgttgcatctggtcaagtctatggcgggcaaaaccgtatggctccactaagaaacatgttcccaaatttggtaacaaaggaggatttagcaggcaaagaggaactaacaacctttagaaaacacgttacaagtcttgcggctctagatttcttggtgtgcttgaaatcagatgtatttgtgatgacacacggtggaaactttgcaaaactgatcatcggagcgcgtagatatatggggcatcgccagaaatcaatcaaaccggataaagggttgatgtcgaaatcatttggggatccttacatgggatgggcaacttttgtggaagatgtagttgtaacccatcaaacacgaaccggtttacctgaagaaactttccctaactatgatctttgggaaaatcctctcactccatgcatgtgtaaagcttgatgatgatgcttttgtttggtcttggattttgtctgatgaggagcaacaaactatagagattcgtagttttcttcttcttcttcttcttttttgacctttcaaatctttgaagtcttcacttaccatctttgtaatcattttgatattatgtaaagttcctagtgatgaaaaaaaagtttctttttt

SEQ ID NO: 23731 - protein, 342 aa, Arabidopsis thaliana
  peptide (1)..(342): Ceres Seq. ID no. 12324318
HFIDYLKDDVRIVRDIPDWFTDKAELFSSIRRTVKNIPKYAAAQFYIDNVLPRIKEKKIMALKPFVDRLGYDNVPQEINRLRCRVNYHALKFLPEIEQMADSLVSRMRNRTGNPNPYMALHLRFEKGMVGLSFCDFVGTREEKVKMAEYRQKEWPRRFKNGSHLWQLALQKRKEGRCPLEPGEVAVILRAMGYPKETQIYVASGQVYGGQNRMAPLRNMFPNLVTKEDLAGKEELTTFRKHVTSLAALDFLVCLKSDVFVMTHGGNFAKLIIGARRYMGHRQKSIKPDKGLMSKSFGDPYMGWATFVEDVVVTHQTRTGLPEETFPNYDLWENPLTPCMCKA

SEQ ID NO: 23732 - protein, 283 aa, Arabidopsis thaliana
  peptide (1)..(283): Ceres Seq. ID no. 12324319
MALKPFVDRLGYDNVPQEINRLRCRVNYHALKFLPEIEQMADSLVSRMRNRTGNPNPYMALHLRFEKGMVGLSFCDFVGTREEKVKMAEYRQKEWPRRFKNGSHLWQLALQKRKEGRCPLEPGEVAVILRAMGYPKETQIYVASGQVYGGQNRMAPLRNMFPNLVTKEDLAGKEELTTFRKHVTSLAALDFLVCLKSDVFVMTHGGNFAKLIIGARRYMGHRQKSIKPDKGLMSKSFGDPYMGWATFVEDVVVTHQTRTGLPEETFPNYDLWENPLTPCMCKA

SEQ ID NO: 23733 - protein, 244 aa, Arabidopsis thaliana
  peptide (1)..(244): Ceres Seq. ID no. 12324320
MADSLVSRMRNRTGNPNPYMALHLRFEKGMVGLSFCDFVGTREEKVKMAEYRQKEWPRRFKNGSHLWQLALQKRKEGRCPLEPGEVAVILRAMGYPKETQIYVASGQVYGGQNRMAPLRNMFPNLVTKEDLAGKEELTTFRKHVTSLAALDFLVCLKSDVFVMTHGGNFAKLIIGARRYMGHRQKSIKPDKGLMSKSFGDPYMGWATFVEDVVVTHQTRTGLPEETFPNYDLWENPLTPCMCKA

SEQ ID NO: 23734 - DNA, 1257 bp, Arabidopsis thaliana
  misc_feature (1)..(1257): Ceres Seq. ID no. 12324939
  misc_feature (1)..(1257): Ortholog of  Ceres SEQ ID NO 12636774 as cited in SEQ ID NO 372
  misc_feature (1)..(1257): Ortholog of  Ceres SEQ ID NO 15174842 as cited in SEQ ID NO 53054
  misc_feature (1)..(1257): Ortholog of  Ceres SEQ ID NO 14310917 as cited in SEQ ID NO 53231
  misc_feature (1)..(1257): Ortholog of  Ceres SEQ ID NO 15170037 as cited in SEQ ID NO 55447
  misc_feature (1)..(1257): Ortholog of  Ceres SEQ ID NO 13582350 as cited in SEQ ID NO 56734
  misc_feature (1)..(1257): Ortholog of  Ceres SEQ ID NO 12476493 as cited in SEQ ID NO 58163
  misc_feature (1)..(1257): Ortholog of  Ceres SEQ ID NO 13597295 as cited in SEQ ID NO 63743
  misc_feature (1)..(1257): Ortholog of  Ceres SEQ ID NO 12617090 as cited in SEQ ID NO 64005
  misc_feature (1)..(1257): Ortholog of  Ceres SEQ ID NO 13597233 as cited in SEQ ID NO 64370
  misc_feature (1)..(1257): Ortholog of  Ceres SEQ ID NO 13599438 as cited in SEQ ID NO 0
atcgatatctccaaagcctactctaaaaaataaccacaagaatcactgccaaaactgccatgggagaactcgacgaagcttttatccaagctccagaacacagacccaacactcacctcacaaactccggtgatttcattttctccgacgagatcccgaccatcgacctctcttctctcgaagatactcatcatgacaagactgcgatcgccaaggagattgcagaggcatgcaagagatggggattttttcaagtgatcaaccatggcttgccttcagctttaaggcatcgtgtagagaagacagctgctgagtttttcaatctaacgacggaggagaagaggaaagtgaaaagagacgaagtgaatcctatgggttatcacgacgaagaacacactaagaacgttagagattggaaggaaattttcgatttcttcttacaagattccacgatcgttccggcgtcaccggagccggaagatactgagctccgaaagctcacgaaccagtggcctcaaaacccttctcatttcagagaggtatgccaagaatatgcaagagaagttgagaagttagcttttaggctattggaacttgtctccattagtttgggtctacctggtgatcggctaaccggtttcttcaatgagcaaactagttttttgcggtttaaccattaccctccttgcccgaaccccgagctagcattaggtgttggacgtcacaaagatggaggagctttaaccgtcctggcccaagatagtgtaggtggattacaagtgagtcgtagatcggatggacaatggatccccgtgaaaccgatctcggatgctttgatcattaacatgggcaattgtattcaggtgtggacaaatgatgagtattggagtgctgaacatagagtggtcgtgaatacaagcaaagagagattctcaataccattcttcttcttcccatcacatgaagccaatattgagccattggaggagcttataagtgaggaaaacccgccttgttataaaaagtacaattggggaaagttctttgtttcaagaaacagaagtgatttcaagaaactcgaggttgagaatatccagattgatcacttcaaggcttagttaatcacattataattaaaccttatgttgatttctattcgttctttttatataagttagccaagttcatatttcccaaaatgcacgcgagattttacatgtttatgtttaaaataaacggtcatcagaatgttgngcc

SEQ ID NO: 23735 - protein, 352 aa, Arabidopsis thaliana
  peptide (1)..(352): Ceres Seq. ID no. 12324940
MGELDEAFIQAPEHRPNTHLTNSGDFIFSDEIPTIDLSSLEDTHHDKTAIAKEIAEACKRWGFFQVINHGLPSALRHRVEKTAAEFFNLTTEEKRKVKRDEVNPMGYHDEEHTKNVRDWKEIFDFFLQDSTIVPASPEPEDTELRKLTNQWPQNPSHFREVCQEYAREVEKLAFRLLELVSISLGLPGDRLTGFFNEQTSFLRFNHYPPCPNPELALGVGRHKDGGALTVLAQDSVGGLQVSRRSDGQWIPVKPISDALIINMGNCIQVWTNDEYWSAEHRVVVNTSKERFSIPFFFFPSHEANIEPLEELISEENPPCYKKYNWGKFFVSRNRSDFKKLEVENIQIDHFKA

SEQ ID NO: 23736 - protein, 248 aa, Arabidopsis thaliana
  peptide (1)..(248): Ceres Seq. ID no. 12324941
MGYHDEEHTKNVRDWKEIFDFFLQDSTIVPASPEPEDTELRKLTNQWPQNPSHFREVCQEYAREVEKLAFRLLELVSISLGLPGDRLTGFFNEQTSFLRFNHYPPCPNPELALGVGRHKDGGALTVLAQDSVGGLQVSRRSDGQWIPVKPISDALIINMGNCIQVWTNDEYWSAEHRVVVNTSKERFSIPFFFFPSHEANIEPLEELISEENPPCYKKYNWGKFFVSRNRSDFKKLEVENIQIDHFKA

SEQ ID NO: 23737 - DNA, 1607 bp, Arabidopsis thaliana
  misc_feature (1)..(1607): Ceres Seq. ID no. 12324865
  misc_feature (1)..(1607): Ortholog of  Ceres SEQ ID NO 13594176 as cited in SEQ ID NO 59144
atttccaaacctccaaacaattaaagaaacggcaaaaatttatgctgaaatctttttttcttccttattctcctctttcgcttgatttcgccgtccgattatctctatcgccgataaatatccggcgtcactcagtagatcttgaagctgttgctttcttgctttgctcttcgcgcaagattctctttctctgttttcattgaggattcgaagttgatcgctatttgattcgattggttttgagttttcgatcctcgacggatggagattttgaagtgaatcggaggagcgaataagagaaagtgagagatggatgatagagaaggctcgttcgtagctgttaggcggatttctcagggtctcgaacgaggaagcgtttacaattcatcatctgctgaggctgtgcctggatcagcagcttggttaggccgaggtctttcttgtgtttgtgctcagagaagagatagtgacgcaaattctacgtttgatctaacacctgctcaggaggaatgcttgcagagtttgcagaaccgcattgacgtagcttatgatagcacaatacccttgcatcaggaagctctaagggagctgtggaaactttcctttcctgaagaagagcttcatggattaatatctgagcagtggaaagagatgggttggcagggcaaagatccgtcaacagattttaggggtggtggtttcatatctcttgaaaacttgctgtactttgccaggaactttcagaaatccttccaggaccttctgaggaaacaggttggggatcggtctgtgtgggaatacccctttgctgtcgctggtatcaacttaacattcatgctcatccaaatgcttgaccttgaagcagtgaaaccgcgaacaattgttggggcaacttttctgaaatttctttctgagaacgaatctgcatttgaccttctttattgcattgcattcaagctaatggatcagcaatggctttcaatgcgtgcctcatacatggagtttaacacggtgatgaaatcaacaaggagacagctggagagagagctgatgctggaagacataatgcatcttgaggacttaccctcctacgctcttctcaatcaatagcccttatgatgatattaaatagtaagaagagtttctaacctcaggataacacaaggttgctctactctctctctctcttcacttttcatcttcaacgctttcggttctacctcttcgttgaccttttcttgtgtttggtggttctaagaaacaacttcaacaccgagttgttacttgttatattaaaacaagaaaaagagtgtgagagagacggggagaggttgggataaatctcaatttggttgcaaggagtgtgtagctaaaatggaattgttttctaacaacgttcaggttttttagttactgtgtgggtgattgatcttattgtgtggggataataatcatttggtgatgtccacaagttcaaaagcagtctctgttaaagactctacacgaggttaaaacttcatttgtttgtgtattaaaaaaaagaagttactttgattgtttatagctgtgaaaattctgcgtgaataatagagacggccttcacaagc

SEQ ID NO: 23738 - protein, 266 aa, Arabidopsis thaliana
  peptide (1)..(266): Ceres Seq. ID no. 12324866
MDDREGSFVAVRRISQGLERGSVYNSSSAEAVPGSAAWLGRGLSCVCAQRRDSDANSTFDLTPAQEECLQSLQNRIDVAYDSTIPLHQEALRELWKLSFPEEELHGLISEQWKEMGWQGKDPSTDFRGGGFISLENLLYFARNFQKSFQDLLRKQVGDRSVWEYPFAVAGINLTFMLIQMLDLEAVKPRTIVGATFLKFLSENESAFDLLYCIAFKLMDQQWLSMRASYMEFNTVMKSTRRQLERELMLEDIMHLEDLPSYALLNQ

SEQ ID NO: 23739 - protein, 152 aa, Arabidopsis thaliana
  peptide (1)..(152): Ceres Seq. ID no. 12324867
MGWQGKDPSTDFRGGGFISLENLLYFARNFQKSFQDLLRKQVGDRSVWEYPFAVAGINLTFMLIQMLDLEAVKPRTIVGATFLKFLSENESAFDLLYCIAFKLMDQQWLSMRASYMEFNTVMKSTRRQLERELMLEDIMHLEDLPSYALLNQ

SEQ ID NO: 23740 - DNA, 1345 bp, Arabidopsis thaliana
  misc_feature (1)..(1345): Ceres Seq. ID no. 12348347
  misc_feature (1)..(1345): Ortholog of  Ceres SEQ ID NO 12636863 as cited in SEQ ID NO 0
aagaaaaaacaatgggatcaatggctcagaaatcggttttgatgttatgcggagagttcatggaagcctacgagactatagtacctctctacgtcctccaagcgtttggtgttagcgtccactgcgtttctcctggtcgcaaaactggcgacaagtgcgtcatggccgctcacgatctccttggcctcgagatatacaccgaactggtggttgaccatctaacactaaacgctaacttcgatggcgtcatccccgaccaatacgacgccatcatcattcccggtggacgtttcacggaacttttgagcgccgacgagaaatgcgtgagtcttgttgctagattcgccgaactcaagaagctcatcttcacgagctgccacagccagctgtttcttgcggcggcaggtctgctcaccggtggaatgaagtgcacggcgttcgaaagcatgaaaccgtttatcgagctctccggcggcgcatggtggcaacagcctggagtccagacccttttcgaaatcactgattgtgtcaaggacggcagtttcatgtccactatggggtggccaacgcttggccatagtctcaaagttttgttagaatcacttggctccaagatttctagctctaaagagaatcatcagacttctttgcttttcttgattggggattgtgttgaagattatagtatcaacgtaccatttaaagcgtttcaagctttgggatgtaaagtggatgcagtgacgccaaccaagaagagaggtgagaaatgcgctacaatcgtacacgaccttgaagacggacggcaacttcctactgagaagtttggtcacaacttctatgtgaccgttgcgtgggatgatgtctctgtggatgattacgactgcattgtggttcccggaggaagatctccggagctcttggtgatgaaccccaaggccgtcgaattggtcagaaagtttgttgagaaaggcaagtttgttgctgccattggaatgggaaattggctacttgccgccacaggcgcccttaagaagaagagatgtgcaagtagttatgggacaaaggtggctgtgaaggttgctggtggtgagatcgtggaatctgaacggtgcgtgaccgacgacaagctggtcacagccgcatcaacttccgatcttcctgcctttttgtatgcattgtcgactgcacttggtctctctgttgtattctaatgtcaagtggtgctttaacgtctaatgcctaaaaaaataaaaacatatctttgtatgtcgaaatataaggtcgtccctctaattatttatgtacaagcttggatttgcatatatatatgggaagaagagttgcc

SEQ ID NO: 23741 - protein, 402 aa, Arabidopsis thaliana
  peptide (1)..(402): Ceres Seq. ID no. 12348348
EKTMGSMAQKSVLMLCGEFMEAYETIVPLYVLQAFGVSVHCVSPGRKTGDKCVMAAHDLLGLEIYTELVVDHLTLNANFDGVIPDQYDAIIIPGGRFTELLSADEKCVSLVARFAELKKLIFTSCHSQLFLAAAGLLTGGMKCTAFESMKPFIELSGGAWWQQPGVQTLFEITDCVKDGSFMSTMGWPTLGHSLKVLLESLGSKISSSKENHQTSLLFLIGDCVEDYSINVPFKAFQALGCKVDAVTPTKKRGEKCATIVHDLEDGRQLPTEKFGHNFYVTVAWDDVSVDDYDCIVVPGGRSPELLVMNPKAVELVRKFVEKGKFVAAIGMGNWLLAATGALKKKRCASSYGTKVAVKVAGGEIVESERCVTDDKLVTAASTSDLPAFLYALSTALGLSVVF

SEQ ID NO: 23742 - protein, 399 aa, Arabidopsis thaliana
  peptide (1)..(399): Ceres Seq. ID no. 12348349
MGSMAQKSVLMLCGEFMEAYETIVPLYVLQAFGVSVHCVSPGRKTGDKCVMAAHDLLGLEIYTELVVDHLTLNANFDGVIPDQYDAIIIPGGRFTELLSADEKCVSLVARFAELKKLIFTSCHSQLFLAAAGLLTGGMKCTAFESMKPFIELSGGAWWQQPGVQTLFEITDCVKDGSFMSTMGWPTLGHSLKVLLESLGSKISSSKENHQTSLLFLIGDCVEDYSINVPFKAFQALGCKVDAVTPTKKRGEKCATIVHDLEDGRQLPTEKFGHNFYVTVAWDDVSVDDYDCIVVPGGRSPELLVMNPKAVELVRKFVEKGKFVAAIGMGNWLLAATGALKKKRCASSYGTKVAVKVAGGEIVESERCVTDDKLVTAASTSDLPAFLYALSTALGLSVVF

SEQ ID NO: 23743 - protein, 396 aa, Arabidopsis thaliana
  peptide (1)..(396): Ceres Seq. ID no. 12348350
MAQKSVLMLCGEFMEAYETIVPLYVLQAFGVSVHCVSPGRKTGDKCVMAAHDLLGLEIYTELVVDHLTLNANFDGVIPDQYDAIIIPGGRFTELLSADEKCVSLVARFAELKKLIFTSCHSQLFLAAAGLLTGGMKCTAFESMKPFIELSGGAWWQQPGVQTLFEITDCVKDGSFMSTMGWPTLGHSLKVLLESLGSKISSSKENHQTSLLFLIGDCVEDYSINVPFKAFQALGCKVDAVTPTKKRGEKCATIVHDLEDGRQLPTEKFGHNFYVTVAWDDVSVDDYDCIVVPGGRSPELLVMNPKAVELVRKFVEKGKFVAAIGMGNWLLAATGALKKKRCASSYGTKVAVKVAGGEIVESERCVTDDKLVTAASTSDLPAFLYALSTALGLSVVF

SEQ ID NO: 23744 - DNA, 779 bp, Arabidopsis thaliana
  misc_feature (1)..(779): Ceres Seq. ID no. 13497399
  misc_feature (1)..(779): Ortholog of  Ceres SEQ ID NO 13594466 as cited in SEQ ID NO 51247
  misc_feature (1)..(779): Ortholog of  Ceres SEQ ID NO 13622409 as cited in SEQ ID NO 0
aaaacctcacagccacacaaagaagagaagaaatggcttgcaccgtagatttccggtgccttgacgaaggattcggcggcaaaacctacaaacgcaaacgcgaatctcaagaacaagccgccgccgaagcaatcgccgatgaagcttccatggacatcgatggtgctcctcctgccgcgaaacgtagcgccgtcgcttcctctgaaaatccagacaaacctattgctctagctgtcgagagaccaacctacgacggtgtaatcgccgggaaagtctccggacggaactggaaacagccgcgaactcatagatcttcagggaggtttgtgaagaacaggaaaccagatctggaggagatgaagaggcaaagggagattaagaaagcgtataaggagagggtgaatgagctgaaggaagagattaggagtaataaggttgagaagaggaagaagaaggaagagagagagaagcggaagaaggagaatgttttgagaactggtactaagttgcagaagattacaaatcccaagactttgaagaaaatttctatgtctaagaagcagaggaagcagcttaagaaaattcctgacgagatgttgagtggtggtagcaagaagagtatcacgaattagtggttttttgttccttctctttaaaggcaagtgttttcagttttttgtatttcctcatgaggtttattcgatgttgtttagttaacaatctgcagctaagaactaaatgttatgaaagtttaatagtgagaaactgtgttttgcttc

SEQ ID NO: 23745 - protein, 209 aa, Arabidopsis thaliana
  peptide (1)..(209): Ceres Seq. ID no. 13497400
NLTATQRREEMACTVDFRCLDEGFGGKTYKRKRESQEQAAAEAIADEASMDIDGAPPAAKRSAVASSENPDKPIALAVERPTYDGVIAGKVSGRNWKQPRTHRSSGRFVKNRKPDLEEMKRQREIKKAYKERVNELKEEIRSNKVEKRKKKEEREKRKKENVLRTGTKLQKITNPKTLKKISMSKKQRKQLKKIPDEMLSGGSKKSITN

SEQ ID NO: 23746 - protein, 199 aa, Arabidopsis thaliana
  peptide (1)..(199): Ceres Seq. ID no. 13497401
MACTVDFRCLDEGFGGKTYKRKRESQEQAAAEAIADEASMDIDGAPPAAKRSAVASSENPDKPIALAVERPTYDGVIAGKVSGRNWKQPRTHRSSGRFVKNRKPDLEEMKRQREIKKAYKERVNELKEEIRSNKVEKRKKKEEREKRKKENVLRTGTKLQKITNPKTLKKISMSKKQRKQLKKIPDEMLSGGSKKSITN

SEQ ID NO: 23747 - protein, 160 aa, Arabidopsis thaliana
  peptide (1)..(160): Ceres Seq. ID no. 13497402
MDIDGAPPAAKRSAVASSENPDKPIALAVERPTYDGVIAGKVSGRNWKQPRTHRSSGRFVKNRKPDLEEMKRQREIKKAYKERVNELKEEIRSNKVEKRKKKEEREKRKKENVLRTGTKLQKITNPKTLKKISMSKKQRKQLKKIPDEMLSGGSKKSITN

SEQ ID NO: 23748 - DNA, 1294 bp, Arabidopsis thaliana
  misc_feature (1)..(1294): Ceres Seq. ID no. 12371856
  misc_feature (1)..(1294): Ortholog of  Ceres SEQ ID NO 15170659 as cited in SEQ ID NO 67270
ggagaagagatcacagagatctgagagcttgaaacaatggagtaccggaaaatcaaagatgaggacgatcatgacgttgcttctgatatcgagagtgtgaaaggaaaatctcataccgttgcttcgagtaacattgcaatggctactctgggtgttggatccagtgaacggatcaactggaaacgaaagggtgtagtaacatgtgcactgacgattctgacgagttctcaagcgatacttatcgtgtggtcaaaacgagctgggaagtatgagtatagtgttacaaccgccaactttttggttgagactctgaaatgtgcgttatctcttcttgctttgacaaggatatggaaaaatgaaggtgttactgacgacaacaggttaagcacaacatttgatgaagttaaagtctttccaattcccgcagcattgtatctttttaagaatttgttacagtattatatttttgcatatgtagacgccccaggctatcagatattgaagaacttgaacatcataagtaccggtgtcttgtacagaattatactgaagagaaaattgagcgagattcagtgggcgggtttcattctattgtgttgcggatgcaccactgctcagttgaattcaaattctgatcgtgttcttcagacatctcttcctggctggactatggcaattgtcatggctcttttaagtggtttcgccggagtgtacacagaggccattattaaaaagcgaccttcaaggaatataaatgtacagaacttctggctatatgtctttgggatggctttcaatgctgttgctatagtgatccaagattttgatgccgttgcaaataagggattcttccatggttactccttcatcacattactcatgattcttaaccatgctctcagtggcattgctgtgtcgatggtgatgaaatatgcagacaatatcgtgaaggtttattcgacatcagtggcgatgcttctcaccgcagttgtctctgtattcctcttcaattttcatctttccttagccttcttcttgggttcaacggtcgtctctgtttcagtatatttacattccgcagggaagctacgatagtaaagatcttcacacttacatctaccaagaaaacaccattattctagtacagagataaagcttttgaacgattacgattttgtttttcgtgtaggtatattcacatttgtgcttctgtattgatttttttttccgtctcatgaaaccttctattctcatttgtacgataccaaaacttatcaagaatagttacaatttc

SEQ ID NO: 23749 - protein, 352 aa, Arabidopsis thaliana
  peptide (1)..(352): Ceres Seq. ID no. 12371857
MEYRKIKDEDDHDVASDIESVKGKSHTVASSNIAMATLGVGSSERINWKRKGVVTCALTILTSSQAILIVWSKRAGKYEYSVTTANFLVETLKCALSLLALTRIWKNEGVTDDNRLSTTFDEVKVFPIPAALYLFKNLLQYYIFAYVDAPGYQILKNLNIISTGVLYRIILKRKLSEIQWAGFILLCCGCTTAQLNSNSDRVLQTSLPGWTMAIVMALLSGFAGVYTEAIIKKRPSRNINVQNFWLYVFGMAFNAVAIVIQDFDAVANKGFFHGYSFITLLMILNHALSGIAVSMVMKYADNIVKVYSTSVAMLLTAVVSVFLFNFHLSLAFFLGSTVVSVSVYLHSAGKLR

SEQ ID NO: 23750 - protein, 318 aa, Arabidopsis thaliana
  peptide (1)..(318): Ceres Seq. ID no. 12371858
MATLGVGSSERINWKRKGVVTCALTILTSSQAILIVWSKRAGKYEYSVTTANFLVETLKCALSLLALTRIWKNEGVTDDNRLSTTFDEVKVFPIPAALYLFKNLLQYYIFAYVDAPGYQILKNLNIISTGVLYRIILKRKLSEIQWAGFILLCCGCTTAQLNSNSDRVLQTSLPGWTMAIVMALLSGFAGVYTEAIIKKRPSRNINVQNFWLYVFGMAFNAVAIVIQDFDAVANKGFFHGYSFITLLMILNHALSGIAVSMVMKYADNIVKVYSTSVAMLLTAVVSVFLFNFHLSLAFFLGSTVVSVSVYLHSAGKLR

SEQ ID NO: 23751 - DNA, 1490 bp, Arabidopsis thaliana
  misc_feature (1)..(1490): Ceres Seq. ID no. 12321559
  misc_feature (1)..(1490): Ortholog of  Ceres SEQ ID NO 13597805 as cited in SEQ ID NO 64186
gacacgatccatcctaagaaacttcaattttggggtttctcttcgtcttcttcttcttcttcttcttctagatcgagagggacatgggtcttaccagccgccgttgacgactacgacgaccattctcttcctcttcatcttctctccttctgcttttctctatttcctattctctccaaattcaccatttccttccaccactcagagatctccctttcttattagctatgtcttcttctaacacgccatcttctagcgccgccgctgccggatcgatagattcttccgccgcccggagaaattccaagagacccaagtattcgaaatttactcagcaggagcttcctgcttgcaaaccaattcttacgcctggttgggtgatttcaacgtttttgatcattagtgttatcttcattccccttggtgttatttctctctttgcttctcaggatgttgttgagatcgttgatcggtatgatagtgcatgcatacctctatctgatagggctaacaaggttgcatacattcaaggaactggaaataaatcttgtacccggacgctaattgtgcctaagcgtatgaagcagcctatctacgtatattaccagcttgagaacttctaccagaatcaccgcaggtatgtgaaaagccgaagtgattcgcaattgagaagtgtgaaagatgagaatcaaatagacgcatgcaagcctgaggatgattttggtgggcagccaattgtgccatgtggtctaattgcttggagtctctttaatgacacatacgttctatcaagaaataaccagggtttaacggtaaacaagaaaggaattgcatggaagagcgacaaggaacacaagtttgggaaaaatgtgtttcccaagaactttcagaagggcaatctcactggtggtgccagtctagatccaaataaaccattgagtgatcaagaggatctgatcgtgtggatgaggactgctgcgttgccaacatttagaaaattatacgggaagatagagagtgacttggagaagggtgagaacatacaagtgactctgcagaacaactacaacacatacagtttcagtgggaagaagaagcttgttctgtcaacaacaagttggcttggtggaaagaacgacttcctcggcattgcttacctcaccgttgggggaatctgtttcgtcttggcacttgcatttaccgtcatgtatcttgtgaaacccaggcgactcggtgatcctacctacttgtcgtggaacagaattcctggaggtcgttaaacagatgactgcatcatctgcgtatataaatctacttatctctggttgtaatttgatccaaaattgaaagtgatgatctttttttttttaatatagatgtgaaatgtatgtatgatgttacagttggaatatgctcattacatagaatgattgatgcttcctatcatgctcattaccttttctctttttctcccaaaaagcagtccctcg

SEQ ID NO: 23752 - protein, 350 aa, Arabidopsis thaliana
  peptide (1)..(350): Ceres Seq. ID no. 12321560
MSSSNTPSSSAAAAGSIDSSAARRNSKRPKYSKFTQQELPACKPILTPGWVISTFLIISVIFIPLGVISLFASQDVVEIVDRYDSACIPLSDRANKVAYIQGTGNKSCTRTLIVPKRMKQPIYVYYQLENFYQNHRRYVKSRSDSQLRSVKDENQIDACKPEDDFGGQPIVPCGLIAWSLFNDTYVLSRNNQGLTVNKKGIAWKSDKEHKFGKNVFPKNFQKGNLTGGASLDPNKPLSDQEDLIVWMRTAALPTFRKLYGKIESDLEKGENIQVTLQNNYNTYSFSGKKKLVLSTTSWLGGKNDFLGIAYLTVGGICFVLALAFTVMYLVKPRRLGDPTYLSWNRIPGGR

SEQ ID NO: 23753 - protein, 233 aa, Arabidopsis thaliana
  peptide (1)..(233): Ceres Seq. ID no. 12321561
MKQPIYVYYQLENFYQNHRRYVKSRSDSQLRSVKDENQIDACKPEDDFGGQPIVPCGLIAWSLFNDTYVLSRNNQGLTVNKKGIAWKSDKEHKFGKNVFPKNFQKGNLTGGASLDPNKPLSDQEDLIVWMRTAALPTFRKLYGKIESDLEKGENIQVTLQNNYNTYSFSGKKKLVLSTTSWLGGKNDFLGIAYLTVGGICFVLALAFTVMYLVKPRRLGDPTYLSWNRIPGGR

SEQ ID NO: 23754 - DNA, 1423 bp, Arabidopsis thaliana
  misc_feature (1)..(1423): Ceres Seq. ID no. 12396036
  misc_feature (1)..(1423): Ortholog of  Ceres SEQ ID NO 15176919 as cited in SEQ ID NO 54698
  misc_feature (1)..(1423): Ortholog of  Ceres SEQ ID NO 14302702 as cited in SEQ ID NO 57154
  misc_feature (1)..(1423): Ortholog of  Ceres SEQ ID NO 15179344 as cited in SEQ ID NO 0
gacgaggtcccacgaaccaccatacacacttcaatttcaaataagagcttttcttcagttgttgctcagagacttaaccaatcaaccatggcgaagatgatgatgttgcaacagcatcagccttctttctctctccttacttcttctctgtctgacttcaatggcgctaagctccatttacaagtccagtacaagaggaaggttcatcagccaaaaggagcactctatgtttcagcgtcgagcgaaaagaagattctgataatgggtggtactcgattcattggtctgttcttgtccaggatccttgtcaaagagggacatcaggttacattgttcacaaggggtaaatctcctattgccaaacaattgcccggtgaatctgaccaagactttgctgatttctcttctaagattcttcacttgaaaggagacagaaaggactatgactttgtgaagtcaagtctttcagcagaaggcttcgatgttgtttatgatatcaacgggagggaggccgaagaagttgagcccatactagaagcactacccaaactagagcagtacatctactgttcttcagctggtgtttatctgaaatctgatatcttgccacattgtgaggaggatgcagttgatccgaagagcaggcacaaggggaagctggagactgagagcttactgcaatcaaaaggtgtaaactggacttctatacgtcctgtctacatctacggtccattgaattacaaccccgtcgaagaatggtttttccaccgtctaaaggcaggtcgcccaatcccggttccaaactctgggatacagatctcacaactcggtcacgttaaggacttggcaacagcctttctcaacgtgcttggtaacgagaaagccagcagagagatattcaacatctcgggggagaaatatgttacctttgatgggttagcaaaagcttgcgcaaaggccggtgggtttccggagccagagattgttcattacaacccgaaagagttcgactttgggaagaagaaggcattccctttccgtgatcagcatttctttgcatcggtggagaaagcaaagcatgtcctcggatggaaaccggagttcgacttagtggagggtctcactgactcatacaaccttgatttcggtcgcggaacattccggaaagaagcggatttcaccactgacgacatgattctgagcaagaaacttgttcttcaataatcgaaatcctaagagttgctcattcttggcttgtatgattctgatcacccggttctcttaaagttctgaactttattgtcatctcacgtatgttatggtccggattttgttcgacttttctctaaagaagtcaagctagggacgatgaagaaaccgagaaagtaagtacacgagaaagagacggtctggctcttgactt

SEQ ID NO: 23755 - protein, 407 aa, Arabidopsis thaliana
  peptide (1)..(407): Ceres Seq. ID no. 12396037
DEVPRTTIHTSISNKSFSSVVAQRLNQSTMAKMMMLQQHQPSFSLLTSSLSDFNGAKLHLQVQYKRKVHQPKGALYVSASSEKKILIMGGTRFIGLFLSRILVKEGHQVTLFTRGKSPIAKQLPGESDQDFADFSSKILHLKGDRKDYDFVKSSLSAEGFDVVYDINGREAEEVEPILEALPKLEQYIYCSSAGVYLKSDILPHCEEDAVDPKSRHKGKLETESLLQSKGVNWTSIRPVYIYGPLNYNPVEEWFFHRLKAGRPIPVPNSGIQISQLGHVKDLATAFLNVLGNEKASREIFNISGEKYVTFDGLAKACAKAGGFPEPEIVHYNPKEFDFGKKKAFPFRDQHFFASVEKAKHVLGWKPEFDLVEGLTDSYNLDFGRGTFRKEADFTTDDMILSKKLVLQ

SEQ ID NO: 23756 - protein, 378 aa, Arabidopsis thaliana
  peptide (1)..(378): Ceres Seq. ID no. 12396038
MAKMMMLQQHQPSFSLLTSSLSDFNGAKLHLQVQYKRKVHQPKGALYVSASSEKKILIMGGTRFIGLFLSRILVKEGHQVTLFTRGKSPIAKQLPGESDQDFADFSSKILHLKGDRKDYDFVKSSLSAEGFDVVYDINGREAEEVEPILEALPKLEQYIYCSSAGVYLKSDILPHCEEDAVDPKSRHKGKLETESLLQSKGVNWTSIRPVYIYGPLNYNPVEEWFFHRLKAGRPIPVPNSGIQISQLGHVKDLATAFLNVLGNEKASREIFNISGEKYVTFDGLAKACAKAGGFPEPEIVHYNPKEFDFGKKKAFPFRDQHFFASVEKAKHVLGWKPEFDLVEGLTDSYNLDFGRGTFRKEADFTTDDMILSKKLVLQ

SEQ ID NO: 23757 - protein, 375 aa, Arabidopsis thaliana
  peptide (1)..(375): Ceres Seq. ID no. 12396039
MMMLQQHQPSFSLLTSSLSDFNGAKLHLQVQYKRKVHQPKGALYVSASSEKKILIMGGTRFIGLFLSRILVKEGHQVTLFTRGKSPIAKQLPGESDQDFADFSSKILHLKGDRKDYDFVKSSLSAEGFDVVYDINGREAEEVEPILEALPKLEQYIYCSSAGVYLKSDILPHCEEDAVDPKSRHKGKLETESLLQSKGVNWTSIRPVYIYGPLNYNPVEEWFFHRLKAGRPIPVPNSGIQISQLGHVKDLATAFLNVLGNEKASREIFNISGEKYVTFDGLAKACAKAGGFPEPEIVHYNPKEFDFGKKKAFPFRDQHFFASVEKAKHVLGWKPEFDLVEGLTDSYNLDFGRGTFRKEADFTTDDMILSKKLVLQ

SEQ ID NO: 23758 - DNA, 1325 bp, Arabidopsis thaliana
  misc_feature (1)..(1325): Ceres Seq. ID no. 12335697
  misc_feature (1)..(1325): Ortholog of  Ceres SEQ ID NO 15169655 as cited in SEQ ID NO 64922
  misc_feature (1)..(1325): Ortholog of  Ceres SEQ ID NO 13596004 as cited in SEQ ID NO 68212
atcaaatttgtgtgatcttctccagaagaaacttgaggaactttaagctaaacctctgtagttttcagattgattcgttggtggaaagcgtctaaattttgcgtaaatggcggcagctcttgtacgcagattctgccggggatcatcttttccggtctctggtcatggatataggatgctatcgacggttgaaaatgtatctgaaagtggtaaatcgatgaatctatactctgctattaatcaagctcttcacatcgctttagagaccgatcctcggtcttatgtttttggggaagatgttggatttggtggtgtcttccgatgtacaacaggattagctgaacgttttgggaaatctcgagttttcaacactcctctctgcgagcaaggcattgttggctttggcattggtttagctgcaatgggaaatcgagttattgcggaaattcagtttgcggattatattttcccggcttttgatcagattgttaatgaggctgcaaagttcagataccgaagtggaaaccagtttaactgtggaggactcactattagggcaccgtacggagcagttggtcacggtggacattaccactcgcagtcccctgaagctttcttttgtcatgtccctggtatcaaagttgttattcctcgaagtccacgggaagctaagggattattattgtcatccatccgtgatccgaatcccgttgtctttttcgaaccaaagtggctatatcgtcaagcggtagaggatgtccctgaagatgactatatgatacctttatctgaggcagaggttatgcgagaaggttccgacataactcttgttggatggggagcacagctcactatcatggaacaagcatgtcttgacgcagaaaacgaaggaatatcgtgtgaattgatagatctcaagactctgatcccttgggataaggaaatcgttgagacctcagtgagaaagactggcagacttcttattagccatgaagctcctgttacaggaggctttggggccgagatcgctgcaactatagttgagcgttgcttcttgaggttagaagcacctgtaagcagagtttgtggcctggacactcctttccctctagtgttcgaacctttctacatgccaaccaagaacaagatattggatgcaatcagatccactgtgaattactagcccatcttagcattgtacacatgattctctgtctcctatcttcgaaataattattgatgctggtggttcagacatgtaatggatactgtaatcaccacttttgttatttaatctatgatcttgaaactctccatctttgttc

SEQ ID NO: 23759 - protein, 358 aa, Arabidopsis thaliana
  peptide (1)..(358): Ceres Seq. ID no. 12335698
MAAALVRRFCRGSSFPVSGHGYRMLSTVENVSESGKSMNLYSAINQALHIALETDPRSYVFGEDVGFGGVFRCTTGLAERFGKSRVFNTPLCEQGIVGFGIGLAAMGNRVIAEIQFADYIFPAFDQIVNEAAKFRYRSGNQFNCGGLTIRAPYGAVGHGGHYHSQSPEAFFCHVPGIKVVIPRSPREAKGLLLSSIRDPNPVVFFEPKWLYRQAVEDVPEDDYMIPLSEAEVMREGSDITLVGWGAQLTIMEQACLDAENEGISCELIDLKTLIPWDKEIVETSVRKTGRLLISHEAPVTGGFGAEIAATIVERCFLRLEAPVSRVCGLDTPFPLVFEPFYMPTKNKILDAIRSTVNY

SEQ ID NO: 23760 - protein, 335 aa, Arabidopsis thaliana
  peptide (1)..(335): Ceres Seq. ID no. 12335699
MLSTVENVSESGKSMNLYSAINQALHIALETDPRSYVFGEDVGFGGVFRCTTGLAERFGKSRVFNTPLCEQGIVGFGIGLAAMGNRVIAEIQFADYIFPAFDQIVNEAAKFRYRSGNQFNCGGLTIRAPYGAVGHGGHYHSQSPEAFFCHVPGIKVVIPRSPREAKGLLLSSIRDPNPVVFFEPKWLYRQAVEDVPEDDYMIPLSEAEVMREGSDITLVGWGAQLTIMEQACLDAENEGISCELIDLKTLIPWDKEIVETSVRKTGRLLISHEAPVTGGFGAEIAATIVERCFLRLEAPVSRVCGLDTPFPLVFEPFYMPTKNKILDAIRSTVNY

SEQ ID NO: 23761 - protein, 321 aa, Arabidopsis thaliana
  peptide (1)..(321): Ceres Seq. ID no. 12335700
MNLYSAINQALHIALETDPRSYVFGEDVGFGGVFRCTTGLAERFGKSRVFNTPLCEQGIVGFGIGLAAMGNRVIAEIQFADYIFPAFDQIVNEAAKFRYRSGNQFNCGGLTIRAPYGAVGHGGHYHSQSPEAFFCHVPGIKVVIPRSPREAKGLLLSSIRDPNPVVFFEPKWLYRQAVEDVPEDDYMIPLSEAEVMREGSDITLVGWGAQLTIMEQACLDAENEGISCELIDLKTLIPWDKEIVETSVRKTGRLLISHEAPVTGGFGAEIAATIVERCFLRLEAPVSRVCGLDTPFPLVFEPFYMPTKNKILDAIRSTVNY

SEQ ID NO: 23762 - DNA, 1386 bp, Arabidopsis thaliana
  misc_feature (1)..(1386): Ceres Seq. ID no. 13487609
  misc_feature (1)..(1386): Ortholog of  Ceres SEQ ID NO 13639663 as cited in SEQ ID NO 57850
  misc_feature (1)..(1386): Ortholog of  Ceres SEQ ID NO 15224330 as cited in SEQ ID NO 58808
gaaaaatatctcgaatccgattccttttttctcttctgcaatctctttgaaatctcaagcttctcttcaaaatttcgattacagctgaagattctctcgattttctggttttgactttttttttgtttggtttggtgaaagatttggatcaaatgggggtggattactacaatgttctgaaagtgaatcgaaatgctaacgaagatgatctgaagaagtcttaccggcgaatggctatgaaatggcaccctgacaaaaaccctacgagcaagaaagaagctgaagctaagttcaagcagatctctgaagcttacgacgtcttgagcgatcctcagagacgtcagatctacgatcagtacggagaagaaggtcttaaatccaccgatttacctactgcggcggagacggcggcgcatcagcagcagcggagctactcttctagcaactctgagtttcggtattatccgcgtgatgctgaagatatctttgctgagtttttcggcgaatccggtgatgcttttggcggagggagtagcggaaggacacgtggagatggcggtgatggtggcggtcggagatttaaaagtgcagaagcagggagccaggctaatagaaagacgccgccgacgaacaaaaaaacgacgccgccggcgaataggaaggctccggctattgagagtaaattggcttgcacattggaggagctctacaaaggtgcaaagaagaagatgcgaatttctcgcgttgttcctgatgattttggaaagccaaagacagtccaagagatattgaagatagacataaaaccaggttggaagaaaggcacaaagatcacttttccagagaaaggcaaccaagaacctggtgtcactcctgcggatcttatattcgtggttgacgagaaaccgcattcggtattcaagagagacggtaacgatctgattctcgagaagaaagtctctcttatagatgctttaaccggtctcaccattagcgtaacgactctagacgggaggagcctaactatcccggtgctggatatcgtaaaaccgggtcaggagattgtgatcccgaatgagggaatgcctactaaagaccctttgaagagaggagaccttagagttacctttgaaatcttgttcccgtcaaggctaacgtcagaacagaagaatgacctcaagagagttcttggtggaagctgatgagttgacgtttagttttcaagtaagctattgatcttctttaacaacggattccacaggaagttgctagtcatttgagtgtacatacatttacgtttttcctttgtaaacttgtgttataagaaaaacaagaaaacccaaatcgaataagactggatatgcgggatctaataatggctgccac

SEQ ID NO: 23763 - protein, 349 aa, Arabidopsis thaliana
  peptide (1)..(349): Ceres Seq. ID no. 13487610
MGVDYYNVLKVNRNANEDDLKKSYRRMAMKWHPDKNPTSKKEAEAKFKQISEAYDVLSDPQRRQIYDQYGEEGLKSTDLPTAAETAAHQQQRSYSSSNSEFRYYPRDAEDIFAEFFGESGDAFGGGSSGRTRGDGGDGGGRRFKSAEAGSQANRKTPPTNKKTTPPANRKAPAIESKLACTLEELYKGAKKKMRISRVVPDDFGKPKTVQEILKIDIKPGWKKGTKITFPEKGNQEPGVTPADLIFVVDEKPHSVFKRDGNDLILEKKVSLIDALTGLTISVTTLDGRSLTIPVLDIVKPGQEIVIPNEGMPTKDPLKRGDLRVTFEILFPSRLTSEQKNDLKRVLGGS

SEQ ID NO: 23764 - protein, 323 aa, Arabidopsis thaliana
  peptide (1)..(323): Ceres Seq. ID no. 13487611
MAMKWHPDKNPTSKKEAEAKFKQISEAYDVLSDPQRRQIYDQYGEEGLKSTDLPTAAETAAHQQQRSYSSSNSEFRYYPRDAEDIFAEFFGESGDAFGGGSSGRTRGDGGDGGGRRFKSAEAGSQANRKTPPTNKKTTPPANRKAPAIESKLACTLEELYKGAKKKMRISRVVPDDFGKPKTVQEILKIDIKPGWKKGTKITFPEKGNQEPGVTPADLIFVVDEKPHSVFKRDGNDLILEKKVSLIDALTGLTISVTTLDGRSLTIPVLDIVKPGQEIVIPNEGMPTKDPLKRGDLRVTFEILFPSRLTSEQKNDLKRVLGGS

SEQ ID NO: 23765 - protein, 321 aa, Arabidopsis thaliana
  peptide (1)..(321): Ceres Seq. ID no. 13487612
MKWHPDKNPTSKKEAEAKFKQISEAYDVLSDPQRRQIYDQYGEEGLKSTDLPTAAETAAHQQQRSYSSSNSEFRYYPRDAEDIFAEFFGESGDAFGGGSSGRTRGDGGDGGGRRFKSAEAGSQANRKTPPTNKKTTPPANRKAPAIESKLACTLEELYKGAKKKMRISRVVPDDFGKPKTVQEILKIDIKPGWKKGTKITFPEKGNQEPGVTPADLIFVVDEKPHSVFKRDGNDLILEKKVSLIDALTGLTISVTTLDGRSLTIPVLDIVKPGQEIVIPNEGMPTKDPLKRGDLRVTFEILFPSRLTSEQKNDLKRVLGGS

SEQ ID NO: 23766 - DNA, 330 bp, Arabidopsis thaliana
  misc_feature (1)..(330): Ceres Seq. ID no. 12396439
  misc_feature (1)..(330): Ortholog of  Ceres SEQ ID NO 15180432 as cited in SEQ ID NO 0
atttcagaattaagatatggtcttctgtccaacttaattctcaaatggtgcgagggacaggttaccgagtacctcgtggcaactttcggtgattatttcacagatgtgaaaatgtatgtcgaagaaagatcatttagaagatttgtcgaagcatgtttggaagaaacagtcgttgtatgttgaccatctcctaactcagaaaaactacatcaaggaagaaactattgaacggatgaggctagatgaagaggttctcatggatttctttagggagtatataagtgcatctaaagtggagagcagaatcagaataatgagcgatctgagaga

SEQ ID NO: 23767 - protein, 71 aa, Arabidopsis thaliana
  peptide (1)..(71): Ceres Seq. ID no. 12396440
MSKKDHLEDLSKHVWKKQSLYVDHLLTQKNYIKEETIERMRLDEEVLMDFFREYISASKVESRIRIMSDLR

SEQ ID NO: 23768 - protein, 60 aa, Arabidopsis thaliana
  peptide (1)..(60): Ceres Seq. ID no. 12396441
ISELRYGLLSNLILKWCEGQVTEYLVATFGDYFTDVKMYVEERSFRRFVEACLEETVVVC

SEQ ID NO: 23769 - DNA, 827 bp, Arabidopsis thaliana
  misc_feature (1)..(827): Ceres Seq. ID no. 12337933
  misc_feature (1)..(827): Ortholog of  Ceres SEQ ID NO 12635836 as cited in SEQ ID NO 0
  misc_feature (1)..(827): Ortholog of  Ceres SEQ ID NO 13599004 as cited in SEQ ID NO 0
atcaaaagattcttggtctccgatccagtcacctgaagattctcggagcttcttttgaccacacactttcaatggcggatgctgtgaacgctcaaactccatcgctctccgagcaatatcatttggagaaagaagtgaagcaagacacaagtgcaaagcctgttgaagtgaaagaggtggcaccagaagttactacacaagctgaagaggttaagacggagcaagctaaggaagaatctcctgttgaggaagcggtttctgtagttgaagagaagtctgaatctgctcctgaatcaacggaagtggcttctgaggctcctgctgcagcggaagacaatgctgaagagactcctgctgctgctgaagaaaataatgacgaaaacgctagtgaagaagttgctgaagaaacccctgatgagatcaagcttgagacagctcctgctgatttccgtttccctacaacaaaccaaacaaggcattgtttcactcgctacgttgaatatcacagatgtgtagctgctaagggtgatgatgctccagaatgcgataagtttgcaaagttttatcgatctctttgccccagcgaatgggttgataggtggaacgagcaaagagaaaatggaacattccctggtcctctaccctgaagaaaaatcatattgccatcattcctcttttgctgttaccttcatgagattacactgcagagtttaataagattttacaaaaccagcacttctggttcccatcatcataaaatgtgagaatttaacaaaactttatgaatctcaaatttttctcttatataagtttttgaggatcatctg

SEQ ID NO: 23770 - protein, 214 aa, Arabidopsis thaliana
  peptide (1)..(214): Ceres Seq. ID no. 12337934
QKILGLRSSHLKILGASFDHTLSMADAVNAQTPSLSEQYHLEKEVKQDTSAKPVEVKEVAPEVTTQAEEVKTEQAKEESPVEEAVSVVEEKSESAPESTEVASEAPAAAEDNAEETPAAAEENNDENASEEVAEETPDEIKLETAPADFRFPTTNQTRHCFTRYVEYHRCVAAKGDDAPECDKFAKFYRSLCPSEWVDRWNEQRENGTFPGPLP

SEQ ID NO: 23771 - protein, 191 aa, Arabidopsis thaliana
  peptide (1)..(191): Ceres Seq. ID no. 12337935
MADAVNAQTPSLSEQYHLEKEVKQDTSAKPVEVKEVAPEVTTQAEEVKTEQAKEESPVEEAVSVVEEKSESAPESTEVASEAPAAAEDNAEETPAAAEENNDENASEEVAEETPDEIKLETAPADFRFPTTNQTRHCFTRYVEYHRCVAAKGDDAPECDKFAKFYRSLCPSEWVDRWNEQRENGTFPGPLP

SEQ ID NO: 23772 - DNA, 1155 bp, Arabidopsis thaliana
  misc_feature (1)..(1155): Ceres Seq. ID no. 13497499
  misc_feature (1)..(1155): Ortholog of  Ceres SEQ ID NO 13594308 as cited in SEQ ID NO 57706
gaagacactcctccaatggcgcctcagcttctctcctccagtaacttcaaatctctctttgactctgtcgatacgttcctcttcgactgcgatggtgttatatggaagggtgaaacgctcatcgatggcgtctcccaaactctcgaccttatccgttctaagggtaaaaatgttgtctttgtgaccaacaattccgtaaaatcgaggaggcaatacgctgaaaagttccgatctttgggtgtcacttctattactcaggatgagatcttctcttcgtcatttgcggcagctatgtatctcaaagtcaataactttcctaaggacaagaaggtttatgtgattggtggagagggtgttcttgaggagctgcagattgccggttttacaggtcttggtggtcctgaagatggtgaaaagaaggcacaatggaaatcaaactctctctttgaacatgataaaagtgtgggagcagttgtagttggactagaccccaacattaactactataagcttcagtacgggactctctgtgtacgcgagaatccgggatgtctcttcattgcgaccaaccgtgatgcagtaggacatatgacggatctgcaagagtggcctggtgctgggtgtatggttgctgccatgtgtggatcgactgaaagagaaccaatagttgttgggaaaccatctactttcatgatggactttctgctacaaaaatttgggacggaaacgtcaagaatgtgcatggtaggtgataggctagatactgatatcttgtttgggcagaatgctggctgcaaaactctcctcgtcctaacaggggtgacaagtgaatctaatctactagataagggcaacaagatagaaccagactattacacaagcacagtctctgatatcataaaactgatggagtccccctagtaagtaagggcatcatcattcatcatcttgctttacactttggaacagtgatttacgtcctgttgcaagatgaaatttttctgattctttgtcttggttagtaatctgatgaagcatcagaaaacatgatttcattttgttatgttgctgaataaaggatttgagaagtcgatgaagagttgaaagattggtaataagcaaatagtaagattatcatggggaaagtccaaaagc

SEQ ID NO: 23773 - protein, 306 aa, Arabidopsis thaliana
  peptide (1)..(306): Ceres Seq. ID no. 13497500
EDTPPMAPQLLSSSNFKSLFDSVDTFLFDCDGVIWKGETLIDGVSQTLDLIRSKGKNVVFVTNNSVKSRRQYAEKFRSLGVTSITQDEIFSSSFAAAMYLKVNNFPKDKKVYVIGGEGVLEELQIAGFTGLGGPEDGEKKAQWKSNSLFEHDKSVGAVVVGLDPNINYYKLQYGTLCVRENPGCLFIATNRDAVGHMTDLQEWPGAGCMVAAMCGSTEREPIVVGKPSTFMMDFLLQKFGTETSRMCMVGDRLDTDILFGQNAGCKTLLVLTGVTSESNLLDKGNKIEPDYYTSTVSDIIKLMESP

SEQ ID NO: 23774 - protein, 301 aa, Arabidopsis thaliana
  peptide (1)..(301): Ceres Seq. ID no. 13497501
MAPQLLSSSNFKSLFDSVDTFLFDCDGVIWKGETLIDGVSQTLDLIRSKGKNVVFVTNNSVKSRRQYAEKFRSLGVTSITQDEIFSSSFAAAMYLKVNNFPKDKKVYVIGGEGVLEELQIAGFTGLGGPEDGEKKAQWKSNSLFEHDKSVGAVVVGLDPNINYYKLQYGTLCVRENPGCLFIATNRDAVGHMTDLQEWPGAGCMVAAMCGSTEREPIVVGKPSTFMMDFLLQKFGTETSRMCMVGDRLDTDILFGQNAGCKTLLVLTGVTSESNLLDKGNKIEPDYYTSTVSDIIKLMESP

SEQ ID NO: 23775 - protein, 209 aa, Arabidopsis thaliana
  peptide (1)..(209): Ceres Seq. ID no. 13497502
MYLKVNNFPKDKKVYVIGGEGVLEELQIAGFTGLGGPEDGEKKAQWKSNSLFEHDKSVGAVVVGLDPNINYYKLQYGTLCVRENPGCLFIATNRDAVGHMTDLQEWPGAGCMVAAMCGSTEREPIVVGKPSTFMMDFLLQKFGTETSRMCMVGDRLDTDILFGQNAGCKTLLVLTGVTSESNLLDKGNKIEPDYYTSTVSDIIKLMESP

SEQ ID NO: 23776 - DNA, 1401 bp, Arabidopsis thaliana
  misc_feature (1)..(1401): Ceres Seq. ID no. 12396060
  misc_feature (1)..(1401): Ortholog of  Ceres SEQ ID NO 15177079 as cited in SEQ ID NO 51989
  misc_feature (1)..(1401): Ortholog of  Ceres SEQ ID NO 14315354 as cited in SEQ ID NO 58232
  misc_feature (1)..(1401): Ortholog of  Ceres SEQ ID NO 13596392 as cited in SEQ ID NO 62136
  misc_feature (1)..(1401): Ortholog of  Ceres SEQ ID NO 14313244 as cited in SEQ ID NO 66802
  misc_feature (1)..(1401): Ortholog of  Ceres SEQ ID NO 13654360 as cited in SEQ ID NO 67980
  misc_feature (1)..(1401): Ortholog of  Ceres SEQ ID NO 13596394 as cited in SEQ ID NO 68561
tttgttttgatttcctctctcactctgcacacgaaggcgagagagagagagaaagaaaaaagcgaagaatacgcagaatccatccaatttagggttagggctgcccctaatctggaaacctttgcctcgtttctgatctgttttccggatccgacttgaaggaaagaagacgacgacgcactaccaaaaacatgggcgcgaattcgcttccaacggatgcaaccctcgatctagatgagcagatctcgcagctcatgcagtgcaagcctctctccgagcaacaggtcagagcattatgtgagaaagctaaggagatcttaatggatgaaagcaacgttcagcctgttaaaagccctgtgacaatctgcggtgatattcatggacagttccatgatcttgcagagcttttccgtattgggggaaagtgtcctgataccaactatctgtttatgggagactatgtcgaccgtggatattattctgtggaaactgttacgctgttggttggcttgaaagtacggtatccacagcgaatcactattcttagaggaaaccatgaaagtcgtcagattactcaggtttatggattttatgatgaatgtctgcgaaagtatggcaatgcaaatgtttggaagatatttacagacctctttgactatttcccactgacagccttggtggagtcggaaatattctgccttcacggtggattatcaccatccatcgagacccttgacaacattaggaactttgatcgggttcaagaagttccacatgaagggcctatgtgtgacttattatggtctgatcctgatgacagatgtggctggggaatctctcctcgtggtgctggatatacatttggtcaggatatttcggaacaattcaatcacactaacaacttaaagctgatcgcccgagcgcatcagctcgttatggatggattcaattgggcacacgagcaaaaagtggttactatattcagtgcaccaaactattgctatcgctgtggaaacatggcctcaattcttgaggtcgatgactgcaggaaccacacgttcattcagtttgaaccagcaccgaggagaggagagccagatgtaacccgaaggacacctgactatttcctttgaagatactcagctcctcctgcagcttccggttgttggtttttgaagatctctgcttattccatttggttcaacgcatttgtgttccaggttgcttctctttaaaatcaatttagccctctcccttggaatagtgtaatataggcaaagaggtcaatgaactttaaaacctctcatgaacatgtgtttggctgaacttattagctcccttctgcatcagaatctgtttattgtgagatattttttcgatttatttcacgtaatttttcct

SEQ ID NO: 23777 - protein, 313 aa, Arabidopsis thaliana
  peptide (1)..(313): Ceres Seq. ID no. 12396061
MGANSLPTDATLDLDEQISQLMQCKPLSEQQVRALCEKAKEILMDESNVQPVKSPVTICGDIHGQFHDLAELFRIGGKCPDTNYLFMGDYVDRGYYSVETVTLLVGLKVRYPQRITILRGNHESRQITQVYGFYDECLRKYGNANVWKIFTDLFDYFPLTALVESEIFCLHGGLSPSIETLDNIRNFDRVQEVPHEGPMCDLLWSDPDDRCGWGISPRGAGYTFGQDISEQFNHTNNLKLIARAHQLVMDGFNWAHEQKVVTIFSAPNYCYRCGNMASILEVDDCRNHTFIQFEPAPRRGEPDVTRRTPDYFL

SEQ ID NO: 23778 - protein, 292 aa, Arabidopsis thaliana
  peptide (1)..(292): Ceres Seq. ID no. 12396062
MQCKPLSEQQVRALCEKAKEILMDESNVQPVKSPVTICGDIHGQFHDLAELFRIGGKCPDTNYLFMGDYVDRGYYSVETVTLLVGLKVRYPQRITILRGNHESRQITQVYGFYDECLRKYGNANVWKIFTDLFDYFPLTALVESEIFCLHGGLSPSIETLDNIRNFDRVQEVPHEGPMCDLLWSDPDDRCGWGISPRGAGYTFGQDISEQFNHTNNLKLIARAHQLVMDGFNWAHEQKVVTIFSAPNYCYRCGNMASILEVDDCRNHTFIQFEPAPRRGEPDVTRRTPDYFL

SEQ ID NO: 23779 - protein, 270 aa, Arabidopsis thaliana
  peptide (1)..(270): Ceres Seq. ID no. 12396063
MDESNVQPVKSPVTICGDIHGQFHDLAELFRIGGKCPDTNYLFMGDYVDRGYYSVETVTLLVGLKVRYPQRITILRGNHESRQITQVYGFYDECLRKYGNANVWKIFTDLFDYFPLTALVESEIFCLHGGLSPSIETLDNIRNFDRVQEVPHEGPMCDLLWSDPDDRCGWGISPRGAGYTFGQDISEQFNHTNNLKLIARAHQLVMDGFNWAHEQKVVTIFSAPNYCYRCGNMASILEVDDCRNHTFIQFEPAPRRGEPDVTRRTPDYFL

SEQ ID NO: 23780 - DNA, 912 bp, Arabidopsis thaliana
  misc_feature (1)..(912): Ceres Seq. ID no. 12336102
  misc_feature (1)..(912): Ortholog of  Ceres SEQ ID NO 13595561 as cited in SEQ ID NO 59869
  misc_feature (1)..(912): Ortholog of  Ceres SEQ ID NO 15174355 as cited in SEQ ID NO 0
ataaattgaacaagggacctctccaatggccccttctctcgtccttcttcttctgtctaacaatacactaccacacactttcacgctctcttctctcacacctttcttcttcctcaccaaaattcttctctctatgttcttcttcatcttctagctctctcatctcttcttctcgccatagcttcaccttccttctcaagctgtacagttaaagcttaagattaattttcgttaattttaaattcgaagaaaagatgaatcactttgcggttcaaccaaacgcgttcgctgctggcggagatttgagaagcagctccgtttcagttgttgaaagagatcaaaccaccgtcgtttgtccaaaaccacgtcgtattggtctccgtaacaaccatcaccatccttctcgatctctccgttgttacttcagtcatcaattggagctttgtgaatccaaagcagagactgatatcttagatatcatactcaccaaggatggttatggtgcagaacaagttaataagcaggtaatagactcgccgtccccgtttttatgtgggtcgccgccgagcagagtcgctaacccattaacacaggatgctcgatttcgagatgagattgtatcggtttcttcagtgattccgcctcagttgggtttacctccttcttcatctccttcttcttcctctgggaggaaaggaggatgtgttgttagaggcaattttggtaacagcccaaaggttagagttgaagggtttgattgtcttgacagggatagcagaaactgcagcatccctgccttggcttagaaacgaaacccgaaacgaacccttttaggattttcatacatactcttttgagttaactcacaaaaaaaaaaaaacaattagtgcgtcgtaaatataagtgttaagg

SEQ ID NO: 23781 - protein, 183 aa, Arabidopsis thaliana
  peptide (1)..(183): Ceres Seq. ID no. 12336103
MNHFAVQPNAFAAGGDLRSSSVSVVERDQTTVVCPKPRRIGLRNNHHHPSRSLRCYFSHQLELCESKAETDILDIILTKDGYGAEQVNKQVIDSPSPFLCGSPPSRVANPLTQDARFRDEIVSVSSVIPPQLGLPPSSSPSSSSGRKGGCVVRGNFGNSPKVRVEGFDCLDRDSRNCSIPALA

SEQ ID NO: 23782 - DNA, 1103 bp, Arabidopsis thaliana
  misc_feature (1)..(1103): Ceres Seq. ID no. 13494136
  misc_feature (1)..(1103): Ortholog of  Ceres SEQ ID NO 13595084 as cited in SEQ ID NO 56095
  misc_feature (1)..(1103): Ortholog of  Ceres SEQ ID NO 13594252 as cited in SEQ ID NO 57528
  misc_feature (1)..(1103): Ortholog of  Ceres SEQ ID NO 13594430 as cited in SEQ ID NO 60181
gttaaggaaaaatctttgatctttggaaaggaagagagcaggcgcaatcgagtaatccaaaggagttgcgttgttctgcgatcacgaagcggtctctcggcaaatctttcgacgcaagacatcgattcgtgtatttcatttttgctttggaactctatgcggaagaaccctaattgattcgccatgggagattccgtttcttcttcatcccgcgtttctgttcatcaatctcttggtgctggttctgttgctgatttgctgctatggagaaaccggactggtgcagtcattttgctaatctcttctactgggttttggttcttattcgagagagctggatacaatctcttgtctttcgtctccaatgttctgcttcttctcgttgcgatcttcttcttatgggccaagtctgctacagttctcaaccgaccgctacctccagttccgaatatggaaatccctgaggagtttgcaaataaggctgctgatgatcttcgggtttggatcaattatgtactgtcaattgcaagtgatatcaccatagctagaaatccgattcgtctccttcaggtttctcttgtcttgtgggctatatcctatgttgggactttaatcaactccctcactcttgtttacattggagttcttctcagtctttcttttcctattgtgtatgagaagtaccaagaccacattgatgagaaagtgaactcgacttctaaattcgttcgaaatatctcaaggaagtttccattgcccataaacaaagagaagaaacatcagtaggtgaaaaacagtccatttggtcaccagactaattacagctacaagaaggagccattactgtaatgctacaagaggatagtcaaagagcagcggaaaaaagtgaatcacagtacagattttcgttcatttctttctgtttcgcttactaggagttttcttcttgtgtgtttttgttgtgttcaagattcatgagtttctggtttttttggtcttttagtttacacgaatgctttgttgcagtattgttccagtagaaacgagaaagatgaatctaatacaacttgagaggttattcaataattaatttgttgattatt

SEQ ID NO: 23783 - protein, 200 aa, Arabidopsis thaliana
  peptide (1)..(200): Ceres Seq. ID no. 13494137
MGDSVSSSSRVSVHQSLGAGSVADLLLWRNRTGAVILLISSTGFWFLFERAGYNLLSFVSNVLLLLVAIFFLWAKSATVLNRPLPPVPNMEIPEEFANKAADDLRVWINYVLSIASDITIARNPIRLLQVSLVLWAISYVGTLINSLTLVYIGVLLSLSFPIVYEKYQDHIDEKVNSTSKFVRNISRKFPLPINKEKKHQ

SEQ ID NO: 23784 - protein, 111 aa, Arabidopsis thaliana
  peptide (1)..(111): Ceres Seq. ID no. 13494138
MEIPEEFANKAADDLRVWINYVLSIASDITIARNPIRLLQVSLVLWAISYVGTLINSLTLVYIGVLLSLSFPIVYEKYQDHIDEKVNSTSKFVRNISRKFPLPINKEKKHQ

SEQ ID NO: 23785 - DNA, 458 bp, Arabidopsis thaliana
  misc_feature (1)..(458): Ceres Seq. ID no. 12321551
  misc_feature (1)..(458): Ortholog of  Ceres SEQ ID NO 15173156 as cited in SEQ ID NO 61847
aaaccacaagcgtatcgatatttgttctcccagatcttcgtttcgtctcttcgttctcaaactcatggcgactattccggttaacccgaaaccattcttgaacaacttgaccggcaagactgttatcgtcaagcttaaatggggaatggaatacaaaggttttctcgcctctgttgactcctacatgaacttgcagctgggaaacaccgaagaatatattgatggacaattgacagggaaccttggagagatcttgatcaggtgcaacaatgttttgtatgtccgtggtgtgccagaagatgaagagcttgaagacgctgatcaagactaacctgtattgagtacttagaaattgcaagtctgtgtgttttaatttttgtattctgtgagcactttaatcttagtgtgatgttgttgaatcttaagagtttgttgatcatattcataccttaaaaaac

SEQ ID NO: 23786 - protein, 109 aa, Arabidopsis thaliana
  peptide (1)..(109): Ceres Seq. ID no. 12321552
NHKRIDICSPRSSFRLFVLKLMATIPVNPKPFLNNLTGKTVIVKLKWGMEYKGFLASVDSYMNLQLGNTEEYIDGQLTGNLGEILIRCNNVLYVRGVPEDEELEDADQD

SEQ ID NO: 23787 - protein, 88 aa, Arabidopsis thaliana
  peptide (1)..(88): Ceres Seq. ID no. 12321553
MATIPVNPKPFLNNLTGKTVIVKLKWGMEYKGFLASVDSYMNLQLGNTEEYIDGQLTGNLGEILIRCNNVLYVRGVPEDEELEDADQD

SEQ ID NO: 23788 - protein, 61 aa, Arabidopsis thaliana
  peptide (1)..(61): Ceres Seq. ID no. 12321554
MEYKGFLASVDSYMNLQLGNTEEYIDGQLTGNLGEILIRCNNVLYVRGVPEDEELEDADQD

SEQ ID NO: 23789 - DNA, 746 bp, Arabidopsis thaliana
  misc_feature (1)..(746): Ceres Seq. ID no. 12396423
  misc_feature (1)..(746): Ortholog of  Ceres SEQ ID NO 15174034 as cited in SEQ ID NO 0
atttcaagctttatctctttctttctctcgtctctatctttctctcacactcatgggtcttccaacagatttcaaagagcttcagattccaggttacgtactaaaaacactttacgtcatcggtttctttagagacatggtcgatgctctttgtccttacatcggtctaccaagttttcttgaccacaacgagacctctcgatccgacccgacccgactcgctctctccacgtcagcaactcttgccaacgagttaatcccggtggttcgtttctccgatcttttaaccgatccggaagattgctgcacggtttgcttatccgattttgtatccgacgataagattagacagctgccgaagtgtggacacgtgtttcatcatcgttgtttagaccgttggatcgttgactgtaataagataacgtgcccgatttgtcggaaccggttcttaccggaggaaaagtccacgccgtttgattggggtacttcagattggtttagagatgaagtggagagtaccaactaataatgatggttttacttttactttttacttttttcacggtaatatttttctactgtataattctttcttccaaactactgtataattcaagtataagattatgtaattgtgtatattagcatcaatcatctttctttgttaaagaaccgactgtataaaatcatccaatgtaatctgcttttcttttatttgaataaaaaagtggacagataaaacatct

SEQ ID NO: 23790 - protein, 174 aa, Arabidopsis thaliana
  peptide (1)..(174): Ceres Seq. ID no. 12396424
FQALSLSFSRLYLSLTLMGLPTDFKELQIPGYVLKTLYVIGFFRDMVDALCPYIGLPSFLDHNETSRSDPTRLALSTSATLANELIPVVRFSDLLTDPEDCCTVCLSDFVSDDKIRQLPKCGHVFHHRCLDRWIVDCNKITCPICRNRFLPEEKSTPFDWGTSDWFRDEVESTN

SEQ ID NO: 23791 - protein, 157 aa, Arabidopsis thaliana
  peptide (1)..(157): Ceres Seq. ID no. 12396425
MGLPTDFKELQIPGYVLKTLYVIGFFRDMVDALCPYIGLPSFLDHNETSRSDPTRLALSTSATLANELIPVVRFSDLLTDPEDCCTVCLSDFVSDDKIRQLPKCGHVFHHRCLDRWIVDCNKITCPICRNRFLPEEKSTPFDWGTSDWFRDEVESTN

SEQ ID NO: 23792 - protein, 129 aa, Arabidopsis thaliana
  peptide (1)..(129): Ceres Seq. ID no. 12396426
MVDALCPYIGLPSFLDHNETSRSDPTRLALSTSATLANELIPVVRFSDLLTDPEDCCTVCLSDFVSDDKIRQLPKCGHVFHHRCLDRWIVDCNKITCPICRNRFLPEEKSTPFDWGTSDWFRDEVESTN

SEQ ID NO: 23793 - DNA, 1544 bp, Arabidopsis thaliana
  misc_feature (1)..(1544): Ceres Seq. ID no. 12321518
  misc_feature (1)..(1544): Ortholog of  Ceres SEQ ID NO 14311731 as cited in SEQ ID NO 51632
  misc_feature (1)..(1544): Ortholog of  Ceres SEQ ID NO 14315189 as cited in SEQ ID NO 57702
aaaaacgaaaccacagagagaaagcctccgtctcccttatcaaagaagaagaagacgtgtataacaaaacactagacacattgtgaagatagaaaaaaatggagagagcagcaattctcccgagtgttaatcaaaattacctactttgtccttcacgcgccttctccacgcgcctccactcctctactcgtaacttatcgccgccgtcatttgcctccatcaagcttcagcattcttcttcctctgtttcttctaatggtggaatctctcttactcgatgcaacgctgtttcgtccaattcttccagtacgttggtaactgaattagccgacatagattgggataccgttggatttgggcttaagccagctgattatatgtatgtgatgaaatgtaacattgatggagagttctcaaaaggtgagttgcaacgttttgggaatattgaaattagcccatctgctggtgtactcaactatggacagggattgtttgaagggctaaaagcttacagaaagaaagatggtaataacatcctcctctttcgtcctgaggagaatgcaaagcgtatgagaaatggtgctgagaggatgtgtatgcctgctccaaccgttgagcagtttgtagaagctgtgacagaaactgtactagcaaacaaacgttgggttccaccaccaggtaaaggttccttatatgttagaccattgctaatgggaacaggagctgttcttggtcttgcgcctgcaccagaatatactttcattatctatgtttcgcctgttgggaactacttcaaggaaggtgtggcacctatcaatttgattgtggagaatgaatttcaccgtgcaactcctggtggtaccggaggtgttaaaaccataggcaattatgctgcagtactgaaggcacagtcaattgcgaaagctaaaggatattccgatgttttgtaccttgattgcatttacaaaagatatcttgaggaggtctcgtcttgcaatattttcatcgtgaaggacaatgtgatatctactcctgaaataaaaggaaccattttacccggtattactcgaaaaagtatgatagacgtggctcgaacacaagggtttcaggtggaggaacggaatgtgacagtggatgaattgttagaagcagacgaggttttctgcacaggaaccgccgtggttgtctctcctgttggaagcgtcacttacaaaggcaaaagagtgtcttacggagaaggtaccttcggaactgtgtcgaagcaactctacaccgttctgacaagcttgcagatgggtctgattgaagacaacatgaaatggactgtgaatcttagttaagccaggcgaatgcattgcatcaattcggctgcttggttttgctttcttttctttggtctgtggttctgattcgtgaaactatgagttggattgtttagaatctggttgatctagaacttagctggttcaagatcattagatgttgttgcatcataccaataatattatctttagatctctgtttctgattagatggttacatcc

SEQ ID NO: 23794 - protein, 413 aa, Arabidopsis thaliana
  peptide (1)..(413): Ceres Seq. ID no. 12321519
MERAAILPSVNQNYLLCPSRAFSTRLHSSTRNLSPPSFASIKLQHSSSSVSSNGGISLTRCNAVSSNSSSTLVTELADIDWDTVGFGLKPADYMYVMKCNIDGEFSKGELQRFGNIEISPSAGVLNYGQGLFEGLKAYRKKDGNNILLFRPEENAKRMRNGAERMCMPAPTVEQFVEAVTETVLANKRWVPPPGKGSLYVRPLLMGTGAVLGLAPAPEYTFIIYVSPVGNYFKEGVAPINLIVENEFHRATPGGTGGVKTIGNYAAVLKAQSIAKAKGYSDVLYLDCIYKRYLEEVSSCNIFIVKDNVISTPEIKGTILPGITRKSMIDVARTQGFQVEERNVTVDELLEADEVFCTGTAVVVSPVGSVTYKGKRVSYGEGTFGTVSKQLYTVLTSLQMGLIEDNMKWTVNLS

SEQ ID NO: 23795 - protein, 320 aa, Arabidopsis thaliana
  peptide (1)..(320): Ceres Seq. ID no. 12321520
MYVMKCNIDGEFSKGELQRFGNIEISPSAGVLNYGQGLFEGLKAYRKKDGNNILLFRPEENAKRMRNGAERMCMPAPTVEQFVEAVTETVLANKRWVPPPGKGSLYVRPLLMGTGAVLGLAPAPEYTFIIYVSPVGNYFKEGVAPINLIVENEFHRATPGGTGGVKTIGNYAAVLKAQSIAKAKGYSDVLYLDCIYKRYLEEVSSCNIFIVKDNVISTPEIKGTILPGITRKSMIDVARTQGFQVEERNVTVDELLEADEVFCTGTAVVVSPVGSVTYKGKRVSYGEGTFGTVSKQLYTVLTSLQMGLIEDNMKWTVNLS

SEQ ID NO: 23796 - protein, 317 aa, Arabidopsis thaliana
  peptide (1)..(317): Ceres Seq. ID no. 12321521
MKCNIDGEFSKGELQRFGNIEISPSAGVLNYGQGLFEGLKAYRKKDGNNILLFRPEENAKRMRNGAERMCMPAPTVEQFVEAVTETVLANKRWVPPPGKGSLYVRPLLMGTGAVLGLAPAPEYTFIIYVSPVGNYFKEGVAPINLIVENEFHRATPGGTGGVKTIGNYAAVLKAQSIAKAKGYSDVLYLDCIYKRYLEEVSSCNIFIVKDNVISTPEIKGTILPGITRKSMIDVARTQGFQVEERNVTVDELLEADEVFCTGTAVVVSPVGSVTYKGKRVSYGEGTFGTVSKQLYTVLTSLQMGLIEDNMKWTVNLS

SEQ ID NO: 23797 - DNA, 1197 bp, Arabidopsis thaliana
  misc_feature (1)..(1197): Ceres Seq. ID no. 13649307
  misc_feature (1)..(1197): Ortholog of  Ceres SEQ ID NO 12636774 as cited in SEQ ID NO 372
  misc_feature (1)..(1197): Ortholog of  Ceres SEQ ID NO 13582350 as cited in SEQ ID NO 56734
  misc_feature (1)..(1197): Ortholog of  Ceres SEQ ID NO 12578315 as cited in SEQ ID NO 62451
  misc_feature (1)..(1197): Ortholog of  Ceres SEQ ID NO 13597295 as cited in SEQ ID NO 63743
  misc_feature (1)..(1197): Ortholog of  Ceres SEQ ID NO 13597439 as cited in SEQ ID NO 64081
  misc_feature (1)..(1197): Ortholog of  Ceres SEQ ID NO 13597233 as cited in SEQ ID NO 64370
  misc_feature (1)..(1197): Ortholog of  Ceres SEQ ID NO 13584577 as cited in SEQ ID NO 65298
actccctattcttcagtaatgactaatattagaactctctatactactagctaaaactaaaaattgaagaaaaaacatgagtctcaccaccgacgaaatcgaagtgagagatttcgtggtgaaccaaaagaatggagtgaaaggactcgtcgactttctaaccctaaccacacttccttctccatacattcaacctcctcaagaacgcttcacttccgacaagatcctcctcggatcacctgtcccggtcattgacgtgtccaattggaatgaaccgcacgtggctagagagatctgccatgcagcgtcaaagctcggcttgtttcagatagtgaaccacgggatagctccggctgagttcaagggtgtgattgctgcggcgcgtgggtttttcgagttgccggcggaggagagaagaaggtattggagagggagttcagtgtcggagacggcgtggttgaccacaagtttcaatccttgcatagaaagtgttttggaatggagagatttcctcaagtttgagtatcttcctcaacgacatgacttcgctgccacgtggccttctgtctgcaaggaacaagtgatagaccatttcaaaaggatcaaaccaatcacagagaggatcttaaacatactcatcaacaatctaaacacaatcatcgatgagtccaataaagaaaccctaatgggaacaatgagaatgaacttcaactactatccgaaatgtcctgagccaagcctggccataggaactggtcgccactcagacatcaacactctcactctcctcctacaagaagatggtgtattaagcagtctttacgcccgagccactgaggatggagacaaatggattcatgtccctccaattccgggagctattgtcgttaatatcggagatgtattacagatattgagcaatgataggtataggagcgtggagcattgtgtggtggtcaataagtattgtagccgggtttccattccggttttctgcggaccggttcatgattcggttattgagccgttaccggaggtgttagataagaacaatgagatggctcggtatagaaagattgtgtattcggactacttgaagtttttttttggaagacctcatgatggaaagaagactattgagtcgataaaattaccatgatatgatttacgaagcttaaatcatcattatctacggcc

SEQ ID NO: 23798 - protein, 360 aa, Arabidopsis thaliana
  peptide (1)..(360): Ceres Seq. ID no. 13649308
MSLTTDEIEVRDFVVNQKNGVKGLVDFLTLTTLPSPYIQPPQERFTSDKILLGSPVPVIDVSNWNEPHVAREICHAASKLGLFQIVNHGIAPAEFKGVIAAARGFFELPAEERRRYWRGSSVSETAWLTTSFNPCIESVLEWRDFLKFEYLPQRHDFAATWPSVCKEQVIDHFKRIKPITERILNILINNLNTIIDESNKETLMGTMRMNFNYYPKCPEPSLAIGTGRHSDINTLTLLLQEDGVLSSLYARATEDGDKWIHVPPIPGAIVVNIGDVLQILSNDRYRSVEHCVVVNKYCSRVSIPVFCGPVHDSVIEPLPEVLDKNNEMARYRKIVYSDYLKFFFGRPHDGKKTIESIKLP

SEQ ID NO: 23799 - DNA, 1195 bp, Arabidopsis thaliana
  misc_feature (1)..(1195): Ceres Seq. ID no. 12738182
  misc_feature (1)..(1195): Ortholog of  Ceres SEQ ID NO 13595521 as cited in SEQ ID NO 59840
ttttcggcttcaacggaaccgccggaatatggagaatagcggcgataaatgaagctggtgggtggaaagatcggaccaccgtggaagatatggatctcgccgtccgagcaagtcttcgcggctggaaatttctctacctcggtgaccttcaggtgaaaagtgagcttccaagtacttttagagccttccgttttcagcaacatagatggtcttgtggacctgcaaatctctttaggaaaatggttatggagatcgtaagaaacaagaaagtgagattctggaagaaagtgtacgtgatatacagcttcttctttgtgaggaaaatcattgcacattgggtcacattttgtttctactgcgttgttcttcctctcacaattctcgtcccggaggttaaagttccgatttggggttcggtttatatcccatccatcatcactatcctcaattccgtcggtactccaaggtcaattcatctgctgttctattggattctattcgagaatgtgatgtcgctgcaccggacaaaggccactctcattggtctgtttgaggcaggaagggctaacgagttggtagtgactgctaagcttggaagcggtcagagcgctaaaggaaacactaaagggatcaaaaggttcccaagaatcttcaaattgcctgatcgattgaatacattggagcttggatttgcggctttcttgttcgtgtgcggatgctatgactttgtgcacgggaagaacaattacttcatctacctgtttcttcagacaatgtctttcttcatcagtgggctgggctggatcgggacttatgtcccgagttagtagttgtgttgtttcagagagaaaagagaatgttattaattttcttgagaaataaagacaattttcattgaaatgacaaaggaaaattgataggggagatagagacgtaccggtaacaacaagtaggaagaaaggagaagacttttatcaaagaccaggaaagaggagaagctccaagggttcttttgatttatttttattttttctgtgttttatttatatagctatgggatttgtgattcagttgttgtgagattttaattttcgttctttgttttttattttggtttttgggtattttttcgttttgaaagtgttagtctttttgttttgtttttaaattaaattccaagtaaaaattaaattcc

SEQ ID NO: 23800 - protein, 274 aa, Arabidopsis thaliana
  peptide (1)..(274): Ceres Seq. ID no. 12738183
FGFNGTAGIWRIAAINEAGGWKDRTTVEDMDLAVRASLRGWKFLYLGDLQVKSELPSTFRAFRFQQHRWSCGPANLFRKMVMEIVRNKKVRFWKKVYVIYSFFFVRKIIAHWVTFCFYCVVLPLTILVPEVKVPIWGSVYIPSIITILNSVGTPRSIHLLFYWILFENVMSLHRTKATLIGLFEAGRANELVVTAKLGSGQSAKGNTKGIKRFPRIFKLPDRLNTLELGFAAFLFVCGCYDFVHGKNNYFIYLFLQTMSFFISGLGWIGTYVPS

SEQ ID NO: 23801 - protein, 245 aa, Arabidopsis thaliana
  peptide (1)..(245): Ceres Seq. ID no. 12738184
MDLAVRASLRGWKFLYLGDLQVKSELPSTFRAFRFQQHRWSCGPANLFRKMVMEIVRNKKVRFWKKVYVIYSFFFVRKIIAHWVTFCFYCVVLPLTILVPEVKVPIWGSVYIPSIITILNSVGTPRSIHLLFYWILFENVMSLHRTKATLIGLFEAGRANELVVTAKLGSGQSAKGNTKGIKRFPRIFKLPDRLNTLELGFAAFLFVCGCYDFVHGKNNYFIYLFLQTMSFFISGLGWIGTYVPS

SEQ ID NO: 23802 - protein, 195 aa, Arabidopsis thaliana
  peptide (1)..(195): Ceres Seq. ID no. 12738185
MVMEIVRNKKVRFWKKVYVIYSFFFVRKIIAHWVTFCFYCVVLPLTILVPEVKVPIWGSVYIPSIITILNSVGTPRSIHLLFYWILFENVMSLHRTKATLIGLFEAGRANELVVTAKLGSGQSAKGNTKGIKRFPRIFKLPDRLNTLELGFAAFLFVCGCYDFVHGKNNYFIYLFLQTMSFFISGLGWIGTYVPS

SEQ ID NO: 23803 - DNA, 1214 bp, Arabidopsis thaliana
  misc_feature (1)..(1214): Ceres Seq. ID no. 13497259
  misc_feature (1)..(1214): Ortholog of  Ceres SEQ ID NO 14302306 as cited in SEQ ID NO 62834
  misc_feature (1)..(1214): Ortholog of  Ceres SEQ ID NO 14303305 as cited in SEQ ID NO 0
actaccacccgagaacacacgattattctccaaagagaaagagaaaaatcaataacctcatagtgtcgacatgggttgccaagacgaacaattggtgcaaacaatatgcgatctctacgaaaagatctcaaagcttgagagtctaaaaccatccgaagatgtcaacattctcttcaagcagctcgtttccacatgcataccaccaaaccctaacatcgatgtcaccaagatgtgtgacagagtccaagagattcgacttaatctcatcaagatttgtggtctagccgaaggtcacttagaaaaccatttctcttcgatcttgacctcttaccaagacaacccacttcatcatttaaacattttcccttattacaacaactatttgaaactcggaaagctcgagttcgacctcctcgaacaaaacctaaatggctttgtcccaaagagtgtggctttcattggatctggtcctcttcctctcacttccatcgttcttgcttcattccatctcaaagacacaatctttcacaactttgacatcgacccatcagcgaactcactcgcttctcttctggtttcctctgatccagacatctctcaacgcatgttcttccacaccgttgatataatggacgtgacagagagcttaaagagctttgatgtcgtgtttctagctgctcttgttggaatgaacaaagaggagaaagttaaagtgatcgagcatctgcagaaacacatggctcctggtgctgtgctcatgcttaggagtgctcatggtccgagagcgtttctttatccgatcgttgagccgtgtgatcttcaggggttcgaggttttgtctatttatcacccaacagatgatgttatcaactccgtggtgatctctaaaaagcatccagttgtttcaattgggaatgttggtggtcctaattcatgcttgctcaagccttgcaactgttccaagacccacgcgaaaatgaacaagaacatgatgatcgaggagttcggagctagggaggaacagttgtcttaaggaggacgtttcttgtttcctaattctctatcttatggaagcttcctaattatgatttgtgtctttgtgttgtgtgttggtgtcttttctcaattgttctttgtttgttttatttttctttctatattcctagaaatggatttgtttcgcgcgacactgttgggctgaaacagaacacgat

SEQ ID NO: 23804 - protein, 320 aa, Arabidopsis thaliana
  peptide (1)..(320): Ceres Seq. ID no. 13497260
MGCQDEQLVQTICDLYEKISKLESLKPSEDVNILFKQLVSTCIPPNPNIDVTKMCDRVQEIRLNLIKICGLAEGHLENHFSSILTSYQDNPLHHLNIFPYYNNYLKLGKLEFDLLEQNLNGFVPKSVAFIGSGPLPLTSIVLASFHLKDTIFHNFDIDPSANSLASLLVSSDPDISQRMFFHTVDIMDVTESLKSFDVVFLAALVGMNKEEKVKVIEHLQKHMAPGAVLMLRSAHGPRAFLYPIVEPCDLQGFEVLSIYHPTDDVINSVVISKKHPVVSIGNVGGPNSCLLKPCNCSKTHAKMNKNMMIEEFGAREEQLS

SEQ ID NO: 23805 - protein, 267 aa, Arabidopsis thaliana
  peptide (1)..(267): Ceres Seq. ID no. 13497261
MCDRVQEIRLNLIKICGLAEGHLENHFSSILTSYQDNPLHHLNIFPYYNNYLKLGKLEFDLLEQNLNGFVPKSVAFIGSGPLPLTSIVLASFHLKDTIFHNFDIDPSANSLASLLVSSDPDISQRMFFHTVDIMDVTESLKSFDVVFLAALVGMNKEEKVKVIEHLQKHMAPGAVLMLRSAHGPRAFLYPIVEPCDLQGFEVLSIYHPTDDVINSVVISKKHPVVSIGNVGGPNSCLLKPCNCSKTHAKMNKNMMIEEFGAREEQLS

SEQ ID NO: 23806 - DNA, 1461 bp, Arabidopsis thaliana
  misc_feature (1)..(1461): Ceres Seq. ID no. 12605099
  misc_feature (1)..(1461): Ortholog of  Ceres SEQ ID NO 13502952 as cited in SEQ ID NO 62271
  misc_feature (1)..(1461): Ortholog of  Ceres SEQ ID NO 13502973 as cited in SEQ ID NO 68052
  misc_feature (1)..(1461): Ortholog of  Ceres SEQ ID NO 13596000 as cited in SEQ ID NO 68188
atcttaaaagaaaccgaaagctaatctccaaagggaaaaagacgtgtagcagagacctatacatacacctatacattcacgttgcgtgtgataatctactgagggttctatctatattaatccttctctgcttccttcaatctaattgcaaatcaaatggatcgtcttaagctttatttctccgttttcgttttgtctttctttatcgtctcggtttcgtcgtctgatgtcaacgacggcgatgatctcgtgatccgtcaggtggttggtggagccgagcctcaggttttgacctcagaggatcacttttctctcttcaagcggaagttcgggaaggtctacgcttccaacgaggagcatgactatagattctcggttttcaaagcgaatctcaggcgagcgaggcgtcaccagaagttagatccgtcggcgactcatggtgttacgcagttctcagatctgactcggtctgagttccgtaagaagcacttgggggttagaagtggctttaagcttcctaaagatgccaacaaggctccgattctccctaccgaaaatctccctgaggattttgattggagagatcatggcgccgttactcccgtcaaaaatcagggatcttgcggctcttgctggagtttcagcgccactggagctttggaaggtgctaacttcctcgctaccggcaaactcgtcagcctcagcgaacaacagctcgtcgactgtgatcacgagtgtgatcccgaggaggcagattcctgcgactctggttgcaatggtgggctaatgaacagcgcttttgaatacaccctcaaaaccggagggctcatgaaagaagaagactatccttacaccggaaaggacggcaagacctgcaagctagacaagtccaagatcgttgcctctgtctccaacttcagtgttatctccattgatgaagaacagattgctgcaaaccttgtcaagaacggacctcttgctgtagccatcaacgctggctatatgcagacttacattggaggagtctcatgcccttacatatgcaccaggaggctcaaccacggtgtcttattggttggctatggagcggcaggttacgctccggctaggttcaaggagaagccttactggatcatcaagaactcgtggggagagacttggggtgaaaatggtttctacaaaatctgcaaaggccgtaacatttgtggtgttgacagtatggtctccactgttgcagccaccgtctcaaccaccgcccattaagcatctcgtcaataagttttaattactttggtgatttgtatgagcgagctctctttgcgctgctgactctctctatttatctctgcttcttgcttgtaaataaaatgcgttctattgagcaaaaccgtacaatgctcattagcaatgagcccactttaacaagtatcagtttatggcccaatatatgaaagttaaatc

SEQ ID NO: 23807 - protein, 368 aa, Arabidopsis thaliana
  peptide (1)..(368): Ceres Seq. ID no. 12605100
MDRLKLYFSVFVLSFFIVSVSSSDVNDGDDLVIRQVVGGAEPQVLTSEDHFSLFKRKFGKVYASNEEHDYRFSVFKANLRRARRHQKLDPSATHGVTQFSDLTRSEFRKKHLGVRSGFKLPKDANKAPILPTENLPEDFDWRDHGAVTPVKNQGSCGSCWSFSATGALEGANFLATGKLVSLSEQQLVDCDHECDPEEADSCDSGCNGGLMNSAFEYTLKTGGLMKEEDYPYTGKDGKTCKLDKSKIVASVSNFSVISIDEEQIAANLVKNGPLAVAINAGYMQTYIGGVSCPYICTRRLNHGVLLVGYGAAGYAPARFKEKPYWIIKNSWGETWGENGFYKICKGRNICGVDSMVSTVAATVSTTAH

SEQ ID NO: 23808 - DNA, 1459 bp, Arabidopsis thaliana
  misc_feature (1)..(1459): Ceres Seq. ID no. 12394733
  misc_feature (1)..(1459): Ortholog of  Ceres SEQ ID NO 15176514 as cited in SEQ ID NO 1114
  misc_feature (1)..(1459): Ortholog of  Ceres SEQ ID NO 15173688 as cited in SEQ ID NO 61918
  misc_feature (1)..(1459): Ortholog of  Ceres SEQ ID NO 12778345 as cited in SEQ ID NO 62792
  misc_feature (1)..(1459): Ortholog of  Ceres SEQ ID NO 13662513 as cited in SEQ ID NO 63303
  misc_feature (1)..(1459): Ortholog of  Ceres SEQ ID NO 12616929 as cited in SEQ ID NO 63962
  misc_feature (1)..(1459): Ortholog of  Ceres SEQ ID NO 15225803 as cited in SEQ ID NO 67623
  misc_feature (1)..(1459): Ortholog of  Ceres SEQ ID NO 15174088 as cited in SEQ ID NO 0
atctgttttcacactctctcctagggttttatctgcgaagcccaatctagagcttccatggcgacgcataccatttctcgatccattctttgccgaccggcgaaatctctttcgtttctgttcacgcgatcctttgcttcatctgctcctctcgccaaatctccggcgtcttctctgctcagccggtcccgtcctctggtcgccgctttttcctccgttttccgtggcggccttgtgtctgtcaaaggtctctcgacgcaggctacatcgtcttctctgaacgacccgaatcccaactggtcgaacaggccacctaaggagacgatcctgctcgatggttgcgatttcgagcactggcttgtcgtcgtggagccacctcagggtgagcctactagagatgaaatcattgatagctacatcaaaaccctagctcagattgttggcagtgaagacgaagctaggatgaagatctactcggtttcaactaggtgctactatgcttttggggcacttgtgtcagaagatctttctcacaagttaaaagagttgtcaaatgtgcgctgggttcttcctgactcttacctggatgtgaggaacaaagactatggaggggaacctttcatcgatgggaaggctgttccttatgatcctaagtaccacgaggagtggataaggaacaatgctagagcaaatgaaaggaacagacgcaatgaccgtcctcgcaacaatgatagaagcagaaactttgagaggagaagagagaacatggcaggaggccctcctcctcaacgtcctcccatgggaggccctcctcctcctccgcacatcggtggctctgcacctcctccgcctcatatgggtggctctgcacctcctccacctcacatggggcagaactatggaccaccaccaccaaacaacatgggaggaccaaggcatccaccaccttatggagcaccaccgcaaaacaacatgggaggaccgaggccacctcagaactatggaggaacaccacctcccaactatggaggagcaccaccagcaaacaacatgggaggagcaccaccaccaaactatggaggaggaccaccacctcaatatggagcagtaccaccacctcaatacggaggagcacccccacagaacaacaactaccagcagcagggtagtggaatgcagcagccacagtaccagaacaactacccacctaaccgggatggcagtggcaacccctaccagggttaaagcagttgaagcagtcgtgggtttcctttttaatcatgcattctgggctgtgtatagataatttgaggaagagagagtgcagtagcaagactttaaaactccttttatctcgagtgtttatcagtctgggattatgtgagagagaatagcctaagttactgtggcatggttagaacttttcactcttgcgtttctttttagtagtttatatcct

SEQ ID NO: 23809 - protein, 395 aa, Arabidopsis thaliana
  peptide (1)..(395): Ceres Seq. ID no. 12394734
MATHTISRSILCRPAKSLSFLFTRSFASSAPLAKSPASSLLSRSRPLVAAFSSVFRGGLVSVKGLSTQATSSSLNDPNPNWSNRPPKETILLDGCDFEHWLVVVEPPQGEPTRDEIIDSYIKTLAQIVGSEDEARMKIYSVSTRCYYAFGALVSEDLSHKLKELSNVRWVLPDSYLDVRNKDYGGEPFIDGKAVPYDPKYHEEWIRNNARANERNRRNDRPRNNDRSRNFERRRENMAGGPPPQRPPMGGPPPPPHIGGSAPPPPHMGGSAPPPPHMGQNYGPPPPNNMGGPRHPPPYGAPPQNNMGGPRPPQNYGGTPPPNYGGAPPANNMGGAPPPNYGGGPPPQYGAVPPPQYGGAPPQNNNYQQQGSGMQQPQYQNNYPPNRDGSGNPYQG

SEQ ID NO: 23810 - protein, 260 aa, Arabidopsis thaliana
  peptide (1)..(260): Ceres Seq. ID no. 12394735
MKIYSVSTRCYYAFGALVSEDLSHKLKELSNVRWVLPDSYLDVRNKDYGGEPFIDGKAVPYDPKYHEEWIRNNARANERNRRNDRPRNNDRSRNFERRRENMAGGPPPQRPPMGGPPPPPHIGGSAPPPPHMGGSAPPPPHMGQNYGPPPPNNMGGPRHPPPYGAPPQNNMGGPRPPQNYGGTPPPNYGGAPPANNMGGAPPPNYGGGPPPQYGAVPPPQYGGAPPQNNNYQQQGSGMQQPQYQNNYPPNRDGSGNPYQG

SEQ ID NO: 23811 - protein, 208 aa, Arabidopsis thaliana
  peptide (1)..(208): Ceres Seq. ID no. 12394736
MLEQMKGTDAMTVLATMIEAETLRGEERTWQEALLLNVLPWEALLLLRTSVALHLLRLIWVALHLLHLTWGRTMDHHHQTTWEDQGIHHLMEHHRKTTWEDRGHLRTMEEHHLPTMEEHHQQTTWEEHHHQTMEEDHHLNMEQYHHLNTEEHPHRTTTTSSRVVECSSHSTRTTTHLTGMAVATPTRVKAVEAVVGFLFNHAFWAVYR

SEQ ID NO: 23812 - DNA, 1600 bp, Arabidopsis thaliana
  misc_feature (1)..(1600): Ceres Seq. ID no. 13490858
  misc_feature (1)..(1600): Ortholog of  Ceres SEQ ID NO 15176002 as cited in SEQ ID NO 55243
acttcttccaccttcttcttctcttcttcttctcttcttcttctacttccgcaaaaaccctttgagaaagagaagcaaaattctctaatcgttctttctctgccctaatccacgtatcgtttggtgttcttcttcatcgaatcgacatggcttcagatgctgacatggaggactatggattcgagtattctgatgaggagcaagaggaacaagatgttgacattgagaaccagtattataactctaaaggtatggttgagactgaacctgaagaagcactttctggatttgctgaggttgttcagatggaacctgagaaagctgactggggtttcaaagctcttaagcagactgtgaagatctattatcgtctaggtaaatacaaagaaatgatggaagcctatacagagatgcttacatatatcaagtcagcagtcaccaggaattacagcgaaaaatgtataaacaatatcatggatttcgtctctggatctgctagccagaacactggcctgctgcaagagttctatcagaccactttgaaagcccttgaagaggctaagaatgagagactctggttcaagacaaatcttaaactctgcaacatctggtttgacattggtgaatacagacggatgactaagattctgaaggaactccataagtcttgtcaaaaggaagatggaactgatgatcagaagaaaggaagtcagctgcttgaggtttatgcaattgaaattcagatttacactgaaacgaaggacaacaaaaagcttaagcaactataccataaggcacttgccatcaagtctgccatacctcatcctaggatcatgggtataatccgcgagtgtggtggaaaaatgcacatggcagaacgtcagtgggaagaagcagcgacagacttctttgaggcttttaaaaattacgatgaagctggcaaccaaagacgtatacagtgcctgaagtatcttgttctggcgaatatgctgatggagtcagaagtgaatccgtttgatggccaagaggcaaagccgtacaaaaacgaccctgagattttggcaatgacaaatttgatcgcagcatatcaacgaaatgagatcatagagtttgagagaatactaaagagtaaccggaggacgataatggatgatccattcatcagaaactacatggaagatctgctgaagaaagtgagaacacaagtgttactgaagctgattaagccatacacaaagatagggattccgttcatatcaaaggaactgaacgtgccagagacggatgtgacggagttactagtgtcgctgatactcgacagcagaatcgatggtcacattgatgaaatgaaccgttacttactgagaggcgacagtggcaatggaaggaagttgcataaggcggttgataaatggaactcacagctcaagtctctttcttcaaatatcaccagccgagtctgttaacttggaaacctctcttttggatagattttgtgatttggcgttgattctttgtggattatctgtttctcttcacatagctggatttgatggagtttataaaccacttcaatgccaagaaaaaggatttgaaactc

SEQ ID NO: 23813 - protein, 439 aa, Arabidopsis thaliana
  peptide (1)..(439): Ceres Seq. ID no. 13490859
MASDADMEDYGFEYSDEEQEEQDVDIENQYYNSKGMVETEPEEALSGFAEVVQMEPEKADWGFKALKQTVKIYYRLGKYKEMMEAYTEMLTYIKSAVTRNYSEKCINNIMDFVSGSASQNTGLLQEFYQTTLKALEEAKNERLWFKTNLKLCNIWFDIGEYRRMTKILKELHKSCQKEDGTDDQKKGSQLLEVYAIEIQIYTETKDNKKLKQLYHKALAIKSAIPHPRIMGIIRECGGKMHMAERQWEEAATDFFEAFKNYDEAGNQRRIQCLKYLVLANMLMESEVNPFDGQEAKPYKNDPEILAMTNLIAAYQRNEIIEFERILKSNRRTIMDDPFIRNYMEDLLKKVRTQVLLKLIKPYTKIGIPFISKELNVPETDVTELLVSLILDSRIDGHIDEMNRYLLRGDSGNGRKLHKAVDKWNSQLKSLSSNITSRVC

SEQ ID NO: 23814 - protein, 433 aa, Arabidopsis thaliana
  peptide (1)..(433): Ceres Seq. ID no. 13490860
MEDYGFEYSDEEQEEQDVDIENQYYNSKGMVETEPEEALSGFAEVVQMEPEKADWGFKALKQTVKIYYRLGKYKEMMEAYTEMLTYIKSAVTRNYSEKCINNIMDFVSGSASQNTGLLQEFYQTTLKALEEAKNERLWFKTNLKLCNIWFDIGEYRRMTKILKELHKSCQKEDGTDDQKKGSQLLEVYAIEIQIYTETKDNKKLKQLYHKALAIKSAIPHPRIMGIIRECGGKMHMAERQWEEAATDFFEAFKNYDEAGNQRRIQCLKYLVLANMLMESEVNPFDGQEAKPYKNDPEILAMTNLIAAYQRNEIIEFERILKSNRRTIMDDPFIRNYMEDLLKKVRTQVLLKLIKPYTKIGIPFISKELNVPETDVTELLVSLILDSRIDGHIDEMNRYLLRGDSGNGRKLHKAVDKWNSQLKSLSSNITSRVC

SEQ ID NO: 23815 - protein, 404 aa, Arabidopsis thaliana
  peptide (1)..(404): Ceres Seq. ID no. 13490861
MVETEPEEALSGFAEVVQMEPEKADWGFKALKQTVKIYYRLGKYKEMMEAYTEMLTYIKSAVTRNYSEKCINNIMDFVSGSASQNTGLLQEFYQTTLKALEEAKNERLWFKTNLKLCNIWFDIGEYRRMTKILKELHKSCQKEDGTDDQKKGSQLLEVYAIEIQIYTETKDNKKLKQLYHKALAIKSAIPHPRIMGIIRECGGKMHMAERQWEEAATDFFEAFKNYDEAGNQRRIQCLKYLVLANMLMESEVNPFDGQEAKPYKNDPEILAMTNLIAAYQRNEIIEFERILKSNRRTIMDDPFIRNYMEDLLKKVRTQVLLKLIKPYTKIGIPFISKELNVPETDVTELLVSLILDSRIDGHIDEMNRYLLRGDSGNGRKLHKAVDKWNSQLKSLSSNITSRVC

SEQ ID NO: 23816 - DNA, 1305 bp, Arabidopsis thaliana
  misc_feature (1)..(1305): Ceres Seq. ID no. 13490738
  misc_feature (1)..(1305): Ortholog of  Ceres SEQ ID NO 12609045 as cited in SEQ ID NO 51314
  misc_feature (1)..(1305): Ortholog of  Ceres SEQ ID NO 14316312 as cited in SEQ ID NO 60042
  misc_feature (1)..(1305): Ortholog of  Ceres SEQ ID NO 13595877 as cited in SEQ ID NO 67702
  misc_feature (1)..(1305): Ortholog of  Ceres SEQ ID NO 13654367 as cited in SEQ ID NO 67993
actcaatccaaactcaacccacaacgctacacattaaaaaataaaaaacctatggcaaccatttccttctctcacaaccaccaatcctccgacaaccgccgtggtggatcccatcaccaccgtcacggccccgtcgtggaagagatcgaaggactcatcaaagttttcaacgacggctgcgtcgaaagacctcccatagttcccatcgtctcaccaaccattcacccatcttctaaagccacagcctttgacatcaaactatccaacgacacatggacacgtgtctacatccccgatgccgcagcagcctcgccgtccgttactctccctctcctcgtttacttccacggcggtggtttctgcgttggctccgccgcttggagttgctaccatgacttcttgaccagccttgccgttaaagcccgttgcgtcatcgtttccgtaaactaccgtttagcccctgaacaccgtctcccggcggcgtacgacgacggcgttaatgtcgtctcgtggctagtcaagcaacaaatatctaccggtggtggatatccttcttggttgagtaaatgtaacctctcaaacgttttcttggccggagatagcgccggagccaacatagcttaccaagtcgccgtaagaatcatggccagtggcaaatacgcaaacactctacacctcaagggcattattctcatccaccctttcttcggcggcgaatcaagaacgtcttcggagaaacaacaacatcacaccaagtcatcggcgcttactctttcagcttccgacgcatattggcgtctagctctgccacgtggagcgagtagagaccatccatggtgtaaccctctgatgagctcggcgggagcgaagttaccgacgacgatggtgttcatggcggagtttgatatactaaaagaacgaaacttggagatgtgtaaagtgatgagaagccatgggaagagagttgaaggtatagttcatggaggtgttggtcacgcttttcatattctcgacaactcgtcggtgtcacgtgatcgaatccacgacatgatgtgtcgtcttcacaacttcatacatccatcataataattccctaaagaccttttttctgaaacctttaattgatttaaaatgttgttcttgaaaaataataagagataaaaacttgaaatgttgtgtttttattgtggattaaagtaagctttgctttgtagtgttttttcagtgaaggtgaatagtataaattatgtaatacaatagatggacttgtacttttaagttaagttatgtatccaatgcttgaat

SEQ ID NO: 23817 - protein, 361 aa, Arabidopsis thaliana
  peptide (1)..(361): Ceres Seq. ID no. 13490739
TQSKLNPQRYTLKNKKPMATISFSHNHQSSDNRRGGSHHHRHGPVVEEIEGLIKVFNDGCVERPPIVPIVSPTIHPSSKATAFDIKLSNDTWTRVYIPDAAAASPSVTLPLLVYFHGGGFCVGSAAWSCYHDFLTSLAVKARCVIVSVNYRLAPEHRLPAAYDDGVNVVSWLVKQQISTGGGYPSWLSKCNLSNVFLAGDSAGANIAYQVAVRIMASGKYANTLHLKGIILIHPFFGGESRTSSEKQQHHTKSSALTLSASDAYWRLALPRGASRDHPWCNPLMSSAGAKLPTTMVFMAEFDILKERNLEMCKVMRSHGKRVEGIVHGGVGHAFHILDNSSVSRDRIHDMMCRLHNFIHPS

SEQ ID NO: 23818 - protein, 344 aa, Arabidopsis thaliana
  peptide (1)..(344): Ceres Seq. ID no. 13490740
MATISFSHNHQSSDNRRGGSHHHRHGPVVEEIEGLIKVFNDGCVERPPIVPIVSPTIHPSSKATAFDIKLSNDTWTRVYIPDAAAASPSVTLPLLVYFHGGGFCVGSAAWSCYHDFLTSLAVKARCVIVSVNYRLAPEHRLPAAYDDGVNVVSWLVKQQISTGGGYPSWLSKCNLSNVFLAGDSAGANIAYQVAVRIMASGKYANTLHLKGIILIHPFFGGESRTSSEKQQHHTKSSALTLSASDAYWRLALPRGASRDHPWCNPLMSSAGAKLPTTMVFMAEFDILKERNLEMCKVMRSHGKRVEGIVHGGVGHAFHILDNSSVSRDRIHDMMCRLHNFIHPS

SEQ ID NO: 23819 - DNA, 1515 bp, Arabidopsis thaliana
  misc_feature (1)..(1515): Ceres Seq. ID no. 12324419
  misc_feature (1)..(1515): Ortholog of  Ceres SEQ ID NO 14314276 as cited in SEQ ID NO 57382
aagttcagcttcgtacctgagccaaagagtgtttcaggatggagctaaggtcgagaatgctcaaagactgtctcttggaagattccaactcatgttcctcaaacgggttcaaatcgattcccagacggcatcctctcaaccctttcccaatgataccaaagaggaaacaatccaatgcattgcaggctgtgattaacgccatcaagaacctccattccaacaccatcaaatccgctccatcggggatcttaccaaggagcctttctcggcggttagcaaccaagaacaaagcagaaaaccaagcaagcatcaccgttattcgggtcaaagacatcgtgcgatggcactcgtctaaggacctgcatgaggacatatcacattttgaacctcatcagtacacaaccaagaacacgacaacaaccacaggatcctccaccaccagcggcacatcctgcagcagttggtctgacttggattttacatcggagtttttaccatcatcatggggaagtaacgttgaggagtgcggtgaaaaacagagtgttaaaaacaacttacactgcgtcggcgaagattcttgcacagcagtaatactagccgacactgaagtgggacctgaggagaacttacagtgtgaaaaggagcacaacagccctgtctcagtgtttgagattcaacatgaggaatatgacgaaacatcagactcttctttcagtcaatgccttgacaatgtggaaagaaccaaacaaaagctcatgcaaacgattcagcggtttgagtctttggccaacattagtcctttcaatttggatgaatggggctcaatggatgaagcatcttgcatggaaggaggacaagagacagataccaagtatgatgatgatgagaattgtgatactgttgatagagaaagtgaagatgaatacaatgatgaggttgaagagaaggcagcacagctatggaaccgagtcaaagaaagacacgccatttggatccacgaagaacatctgataatggactatttcagagatgaattgatgcaaaggacaaactcattccacgaaactcaaacactttgagaaccaattggtatgcgaggcaaaaggatggttgcagggaaagagagaatcagagcttgaacgcggaacaagtgagcagaggagacaagcatgtgctagagaaatcgaaagacgagactggaatgagaaacagatagaggaggagcacgaagtggtggttacacagattgaggaagaactcttcagcctgttaatggacgaaactttaacaacgctctctaccaaaactgattccagtccacctgaacatcacaaaacagtaacatcaatgcttaagctttagaaattagaaagcaaaaacatttttgaataaggctttgacttaaaagctcaggtttttttagctctacttttgtaagaatgaagcaaacgaataatacaatgtatattgacctctaaaaccatatatatatatatgcctaattcatatttctgc

SEQ ID NO: 23820 - protein, 346 aa, Arabidopsis thaliana
  peptide (1)..(346): Ceres Seq. ID no. 12324420
MELRSRMLKDCLLEDSNSCSSNGFKSIPRRHPLNPFPMIPKRKQSNALQAVINAIKNLHSNTIKSAPSGILPRSLSRRLATKNKAENQASITVIRVKDIVRWHSSKDLHEDISHFEPHQYTTKNTTTTTGSSTTSGTSCSSWSDLDFTSEFLPSSWGSNVEECGEKQSVKNNLHCVGEDSCTAVILADTEVGPEENLQCEKEHNSPVSVFEIQHEEYDETSDSSFSQCLDNVERTKQKLMQTIQRFESLANISPFNLDEWGSMDEASCMEGGQETDTKYDDDENCDTVDRESEDEYNDEVEEKAAQLWNRVKERHAIWIHEEHLIMDYFRDELMQRTNSFHETQTL

SEQ ID NO: 23821 - protein, 340 aa, Arabidopsis thaliana
  peptide (1)..(340): Ceres Seq. ID no. 12324421
MLKDCLLEDSNSCSSNGFKSIPRRHPLNPFPMIPKRKQSNALQAVINAIKNLHSNTIKSAPSGILPRSLSRRLATKNKAENQASITVIRVKDIVRWHSSKDLHEDISHFEPHQYTTKNTTTTTGSSTTSGTSCSSWSDLDFTSEFLPSSWGSNVEECGEKQSVKNNLHCVGEDSCTAVILADTEVGPEENLQCEKEHNSPVSVFEIQHEEYDETSDSSFSQCLDNVERTKQKLMQTIQRFESLANISPFNLDEWGSMDEASCMEGGQETDTKYDDDENCDTVDRESEDEYNDEVEEKAAQLWNRVKERHAIWIHEEHLIMDYFRDELMQRTNSFHETQTL

SEQ ID NO: 23822 - protein, 309 aa, Arabidopsis thaliana
  peptide (1)..(309): Ceres Seq. ID no. 12324422
MIPKRKQSNALQAVINAIKNLHSNTIKSAPSGILPRSLSRRLATKNKAENQASITVIRVKDIVRWHSSKDLHEDISHFEPHQYTTKNTTTTTGSSTTSGTSCSSWSDLDFTSEFLPSSWGSNVEECGEKQSVKNNLHCVGEDSCTAVILADTEVGPEENLQCEKEHNSPVSVFEIQHEEYDETSDSSFSQCLDNVERTKQKLMQTIQRFESLANISPFNLDEWGSMDEASCMEGGQETDTKYDDDENCDTVDRESEDEYNDEVEEKAAQLWNRVKERHAIWIHEEHLIMDYFRDELMQRTNSFHETQTL

SEQ ID NO: 23823 - DNA, 1065 bp, Arabidopsis thaliana; identical to SEQ ID NO: 22230
  misc_feature (1)..(1065): Ceres Seq. ID no. 13500131
  misc_feature (1)..(1065): Ortholog of  Ceres SEQ ID NO 14316161 as cited in SEQ ID NO 52384
  misc_feature (1)..(1065): Ortholog of  Ceres SEQ ID NO 14315249 as cited in SEQ ID NO 52512
  misc_feature (1)..(1065): Ortholog of  Ceres SEQ ID NO 15174595 as cited in SEQ ID NO 53460
  misc_feature (1)..(1065): Ortholog of  Ceres SEQ ID NO 13503553 as cited in SEQ ID NO 64822
  misc_feature (1)..(1065): Ortholog of  Ceres SEQ ID NO 13660155 as cited in SEQ ID NO 67635

SEQ ID NO: 23824 - protein, 276 aa, Arabidopsis thaliana; identical to SEQ ID NO: 22231
  peptide (1)..(276): Ceres Seq. ID no. 13500132

SEQ ID NO: 23825 - protein, 263 aa, Arabidopsis thaliana; identical to SEQ ID NO: 22232
  peptide (1)..(263): Ceres Seq. ID no. 13500133

SEQ ID NO: 23826 - DNA, 1453 bp, Arabidopsis thaliana
  misc_feature (1)..(1453): Ceres Seq. ID no. 12325387
  misc_feature (1)..(1453): Ortholog of  Ceres SEQ ID NO 15177742 as cited in SEQ ID NO 1202
  misc_feature (1)..(1453): Ortholog of  Ceres SEQ ID NO 15226750 as cited in SEQ ID NO 58711
aacgagtggtgttgctctctccatcttcctcttcatcttcttctgttctctctctataaatacaagtttactcttcctcttcctcaaatctctgactcttctctgcattatctcttcgatctctccaactctccaaaaccttcctcagatgggaactaccaatggaacagactatggagcatacacatacaaggagctagaaagagagcaatattggccatctgagaatctcaagatatcaataacaggagctggaggtttcattgcatctcacattgctcgtcgtttgaagcacgaaggtcattacgtgattgcttctgactggaaaaagaatgaacacatgactgaagacatgttctgtgatgagttccatcttgttgatcttagggttatggagaattgtctcaaagttactgaaggagttgatcatgtttttaacttagctgctgatatgggtggtatgggttttatccagagtaatcactctgtgattatgtataataatactatgattagtttcaatatgattgaggctgctaggatcaatgggattaagaggttcttttatgcttcgagtgcttgtatctatccagagtttaagcagttggagactactaatgtgagcttgaaggagtcagatgcttggcctgcagagcctcaagatgcttatggtttggagaagcttgctacggaggagttgtgtaagcattacaacaaagattttggtattgagtgtcgaattggaaggttccataacatttatggtccttttggaacatggaaaggtggaagggagaaggctccagctgctttctgtaggaaggctcagacttccactgataggtttgagatgtggggagacgggcttcagacccgttcttttacctttatcgatgagtgtgttgaaggtgtactcaggttgacaaaatcagatttccgtgagccggtgaacatcggaagcgatgagatggtgagcatgaatgagatggctgagatggttctcagctttgaggaaaagaagcttccaattcaccacattcctggcccggaaggtgttcgtggtcgtaactcagacaacaatctgatcaaagaaaagcttggttgggctcctaatatgagattgaaggaggggcttagaataacctacttctggataaaggaacagatcgagaaagagaaagcaaagggaagcgatgtgtcgctttacgggtcatcaaaggtggttggaactcaagcaccggttcagctaggctcactccgcgcggctgatggaaaagagtgaagttcaccaaagtataagtcaagctcaaatatggccttttaagttcagcaaaatgtttagatatatttttaggtagcttcctattaaaaaagcaataataagtgttttggattttggttccttctcttctgctaatccttgtttatgtttagttgaaaaagtttgcttgct

SEQ ID NO: 23827 - protein, 426 aa, Arabidopsis thaliana
  peptide (1)..(426): Ceres Seq. ID no. 12325388
TSGVALSIFLFIFFCSLSINTSLLFLFLKSLTLLCIISSISPTLQNLPQMGTTNGTDYGAYTYKELEREQYWPSENLKISITGAGGFIASHIARRLKHEGHYVIASDWKKNEHMTEDMFCDEFHLVDLRVMENCLKVTEGVDHVFNLAADMGGMGFIQSNHSVIMYNNTMISFNMIEAARINGIKRFFYASSACIYPEFKQLETTNVSLKESDAWPAEPQDAYGLEKLATEELCKHYNKDFGIECRIGRFHNIYGPFGTWKGGREKAPAAFCRKAQTSTDRFEMWGDGLQTRSFTFIDECVEGVLRLTKSDFREPVNIGSDEMVSMNEMAEMVLSFEEKKLPIHHIPGPEGVRGRNSDNNLIKEKLGWAPNMRLKEGLRITYFWIKEQIEKEKAKGSDVSLYGSSKVVGTQAPVQLGSLRAADGKE

SEQ ID NO: 23828 - protein, 377 aa, Arabidopsis thaliana
  peptide (1)..(377): Ceres Seq. ID no. 12325389
MGTTNGTDYGAYTYKELEREQYWPSENLKISITGAGGFIASHIARRLKHEGHYVIASDWKKNEHMTEDMFCDEFHLVDLRVMENCLKVTEGVDHVFNLAADMGGMGFIQSNHSVIMYNNTMISFNMIEAARINGIKRFFYASSACIYPEFKQLETTNVSLKESDAWPAEPQDAYGLEKLATEELCKHYNKDFGIECRIGRFHNIYGPFGTWKGGREKAPAAFCRKAQTSTDRFEMWGDGLQTRSFTFIDECVEGVLRLTKSDFREPVNIGSDEMVSMNEMAEMVLSFEEKKLPIHHIPGPEGVRGRNSDNNLIKEKLGWAPNMRLKEGLRITYFWIKEQIEKEKAKGSDVSLYGSSKVVGTQAPVQLGSLRAADGKE

SEQ ID NO: 23829 - protein, 313 aa, Arabidopsis thaliana
  peptide (1)..(313): Ceres Seq. ID no. 12325390
MTEDMFCDEFHLVDLRVMENCLKVTEGVDHVFNLAADMGGMGFIQSNHSVIMYNNTMISFNMIEAARINGIKRFFYASSACIYPEFKQLETTNVSLKESDAWPAEPQDAYGLEKLATEELCKHYNKDFGIECRIGRFHNIYGPFGTWKGGREKAPAAFCRKAQTSTDRFEMWGDGLQTRSFTFIDECVEGVLRLTKSDFREPVNIGSDEMVSMNEMAEMVLSFEEKKLPIHHIPGPEGVRGRNSDNNLIKEKLGWAPNMRLKEGLRITYFWIKEQIEKEKAKGSDVSLYGSSKVVGTQAPVQLGSLRAADGKE

SEQ ID NO: 23830 - DNA, 1313 bp, Arabidopsis thaliana
  misc_feature (1)..(1313): Ceres Seq. ID no. 12325272
  misc_feature (1)..(1313): Ortholog of  Ceres SEQ ID NO 15227099 as cited in SEQ ID NO 53558
  misc_feature (1)..(1313): Ortholog of  Ceres SEQ ID NO 14314563 as cited in SEQ ID NO 59349
  misc_feature (1)..(1313): Ortholog of  Ceres SEQ ID NO 12616360 as cited in SEQ ID NO 63543
acttcatcatcatcatcatcatcgtcatcactcgtgtcttcaagcgtctggacatctgtcacgtcgtctatatcaccgaatattctcgagctttccacgaaatcccgtcaaagatctcaactttcgtctaagtcttgccgatttctcgagtttttctttatctacacgtggcactgtgtttgctgtaagagctctgagtacagtcgcggtagaagagtcgtccgagaagaagatggtgaaagggattagggtttatgagcatggcggtcctgaggttctgaaatgggaagatgtggaagtaggggaaccaaaggagggtgagatacgtgtgaagaacaaggctatcgggcttaactttattgatgtttacttcaggaaaggtgtttacaagccagcttctatgcccttcacaccaggtatggaggctgttggagaggtggtagctgttgggtcgggattgactggcagaatgatcggtgatctcgttgcttatgctggaaatccgatgggtgcgtatgctgaggaacaaatccttccagcggataaagtggttcctgttccttcatctattgatcctatcgttgcagcatcaatcatgctcaagggtatgactgcacagtttctccttcgccgttgcttcaaggtcgaacctgggcacacaatccttgttcatgctgcagctggtggagttgggtctctgttgtgtcaatgggcaaatgcgcttggagccactgtgattggaactgtctcgaccaatgagaaagcggctcaagccaaagaagatggatgccaccatgttattatgtacaagaacgaggattttgtttcccgagtcaatgacattacatcgggtaaaggagtaaatgttgtttatgactctgtgggaaaagacacctttaagggatcgttagcatgtttgaagagccgaggatacatggtgagctttggacaatcctcaggatctccagatccgattccattatctgatcttgctccaaagtcgctcttcttgacaagaccttccatgatgcattacaatgaaactcgagatgagctcttggaatgtgcaggagaggttttcgctaatgttacctccggcatcttaaaggctcgtgtgaatcacaagtacccgttgtctcgagtcgctgacgcccacgcagatcttgagaataggatcacctctggctccgttgtgctcttgccatgaaaacatatacaatgatgttagtatctttcaataagggcaattagattcctttgtgatgtaaagaatattaaatgtaccttttggacctgaatgacaatttgagaat

SEQ ID NO: 23831 - protein, 401 aa, Arabidopsis thaliana
  peptide (1)..(401): Ceres Seq. ID no. 12325273
LHHHHHHRHHSCLQASGHLSRRLYHRIFSSFPRNPVKDLNFRLSLADFSSFSLSTRGTVFAVRALSTVAVEESSEKKMVKGIRVYEHGGPEVLKWEDVEVGEPKEGEIRVKNKAIGLNFIDVYFRKGVYKPASMPFTPGMEAVGEVVAVGSGLTGRMIGDLVAYAGNPMGAYAEEQILPADKVVPVPSSIDPIVAASIMLKGMTAQFLLRRCFKVEPGHTILVHAAAGGVGSLLCQWANALGATVIGTVSTNEKAAQAKEDGCHHVIMYKNEDFVSRVNDITSGKGVNVVYDSVGKDTFKGSLACLKSRGYMVSFGQSSGSPDPIPLSDLAPKSLFLTRPSMMHYNETRDELLECAGEVFANVTSGILKARVNHKYPLSRVADAHADLENRITSGSVVLLP

SEQ ID NO: 23832 - protein, 324 aa, Arabidopsis thaliana
  peptide (1)..(324): Ceres Seq. ID no. 12325274
MVKGIRVYEHGGPEVLKWEDVEVGEPKEGEIRVKNKAIGLNFIDVYFRKGVYKPASMPFTPGMEAVGEVVAVGSGLTGRMIGDLVAYAGNPMGAYAEEQILPADKVVPVPSSIDPIVAASIMLKGMTAQFLLRRCFKVEPGHTILVHAAAGGVGSLLCQWANALGATVIGTVSTNEKAAQAKEDGCHHVIMYKNEDFVSRVNDITSGKGVNVVYDSVGKDTFKGSLACLKSRGYMVSFGQSSGSPDPIPLSDLAPKSLFLTRPSMMHYNETRDELLECAGEVFANVTSGILKARVNHKYPLSRVADAHADLENRITSGSVVLLP

SEQ ID NO: 23833 - protein, 268 aa, Arabidopsis thaliana
  peptide (1)..(268): Ceres Seq. ID no. 12325275
MPFTPGMEAVGEVVAVGSGLTGRMIGDLVAYAGNPMGAYAEEQILPADKVVPVPSSIDPIVAASIMLKGMTAQFLLRRCFKVEPGHTILVHAAAGGVGSLLCQWANALGATVIGTVSTNEKAAQAKEDGCHHVIMYKNEDFVSRVNDITSGKGVNVVYDSVGKDTFKGSLACLKSRGYMVSFGQSSGSPDPIPLSDLAPKSLFLTRPSMMHYNETRDELLECAGEVFANVTSGILKARVNHKYPLSRVADAHADLENRITSGSVVLLP

SEQ ID NO: 23834 - DNA, 1408 bp, Arabidopsis thaliana
  misc_feature (1)..(1408): Ceres Seq. ID no. 12397240
  misc_feature (1)..(1408): Ortholog of  Ceres SEQ ID NO 15171275 as cited in SEQ ID NO 51428
aacaattcccgaaattctctcaaatcacagatccttttagggtttttccactgtttctaggttttttttattgctcaaatctgatcaatggatagttgtctctctaatcaaacggcgcttcagtttctcccgtcgcgttccaggagacagagcggcgatggaggcggtggttttgttattccggcgaagaggaagatccagtatagttcgatggttgtggttgcggcggcgggacagagtcggtgtgagcctggaagcagtctaaacgcgccgcttgagccacgatcggcgcaggggaggtttctgagaagcgtgttgctaaacaaacggcagctatttcattacgccgccgctgatgagctaaagcaactggctgatgatagggaagctgctttagctcgtatgtctctcagctctggttccgatgaggcttctctccacagaaggatagctgaactcaaggaacgctactgtaaaactgcagtccaagacataatgtacatgttaatcttttacaaatactccgagataagagtccctcttgttccaaagctatccagatgcatctataatggaagactcgagatctggccttcaaaagactgggagttagagtcaatttacagctgcgatacccttgagatcatcaaagaacacgttagcgcagtcatcggattacgggtcaactcatgtgtgactgacaattgggcaacaacgcagatacagaaactgcatctcaggaaagtatatgctgcctcgatcttgtacggttacttcttgaaatcagcttccctaaggcaccagcttgagtgttccttatcagatattcatggaagcggatatctgaaaagtcccatctttggatgctcattcacaacgggcactgcacagatctccaacaagcagcagctgagacattacatctcagactttgatcccgagacattgcagagatgcgcaaaaccaaggacagaggaggcaaggaatctgatagagaagcaaagtttggctctttttggcacggaagagagtgatgagaccatagtgacatcgttttcgagtctgaagcggttggttctcgaggctgtggcgtttgggacattcctgtgggacacggaattgtatgtagatggtgcatataagctgaaggagaatgggaatgcagaagaacaagaaggaaagaaaagcatatgatgaacaagtctggttagaagaaaagcttcatgatcttctggtagtgtatatatagagaaatgtatctgccgaatctctcaggcagttgttcagttcaatgtatagatcttgcttagaaatattttgatttctgaataagaatgtggtgtggttataaggaataagagatactgtagttgggttcaattttatgttatgtgttaagtttccttgt

SEQ ID NO: 23835 - protein, 368 aa, Arabidopsis thaliana
  peptide (1)..(368): Ceres Seq. ID no. 12397241
MDSCLSNQTALQFLPSRSRRQSGDGGGGFVIPAKRKIQYSSMVVVAAAGQSRCEPGSSLNAPLEPRSAQGRFLRSVLLNKRQLFHYAAADELKQLADDREAALARMSLSSGSDEASLHRRIAELKERYCKTAVQDIMYMLIFYKYSEIRVPLVPKLSRCIYNGRLEIWPSKDWELESIYSCDTLEIIKEHVSAVIGLRVNSCVTDNWATTQIQKLHLRKVYAASILYGYFLKSASLRHQLECSLSDIHGSGYLKSPIFGCSFTTGTAQISNKQQLRHYISDFDPETLQRCAKPRTEEARNLIEKQSLALFGTEESDETIVTSFSSLKRLVLEAVAFGTFLWDTELYVDGAYKLKENGNAEEQEGKKSI

SEQ ID NO: 23836 - protein, 327 aa, Arabidopsis thaliana
  peptide (1)..(327): Ceres Seq. ID no. 12397242
MVVVAAAGQSRCEPGSSLNAPLEPRSAQGRFLRSVLLNKRQLFHYAAADELKQLADDREAALARMSLSSGSDEASLHRRIAELKERYCKTAVQDIMYMLIFYKYSEIRVPLVPKLSRCIYNGRLEIWPSKDWELESIYSCDTLEIIKEHVSAVIGLRVNSCVTDNWATTQIQKLHLRKVYAASILYGYFLKSASLRHQLECSLSDIHGSGYLKSPIFGCSFTTGTAQISNKQQLRHYISDFDPETLQRCAKPRTEEARNLIEKQSLALFGTEESDETIVTSFSSLKRLVLEAVAFGTFLWDTELYVDGAYKLKENGNAEEQEGKKSI

SEQ ID NO: 23837 - protein, 263 aa, Arabidopsis thaliana
  peptide (1)..(263): Ceres Seq. ID no. 12397243
MSLSSGSDEASLHRRIAELKERYCKTAVQDIMYMLIFYKYSEIRVPLVPKLSRCIYNGRLEIWPSKDWELESIYSCDTLEIIKEHVSAVIGLRVNSCVTDNWATTQIQKLHLRKVYAASILYGYFLKSASLRHQLECSLSDIHGSGYLKSPIFGCSFTTGTAQISNKQQLRHYISDFDPETLQRCAKPRTEEARNLIEKQSLALFGTEESDETIVTSFSSLKRLVLEAVAFGTFLWDTELYVDGAYKLKENGNAEEQEGKKSI

SEQ ID NO: 23838 - DNA, 1355 bp, Arabidopsis thaliana
  misc_feature (1)..(1355): Ceres Seq. ID no. 12385811
  misc_feature (1)..(1355): Ortholog of  Ceres SEQ ID NO 13596030 as cited in SEQ ID NO 62043
gtcgctttagcttctccggtttttaagcaagtaatcttctttcgtctctatcttctttacttgattgcttattcatctgttgattctgtggttaggtttgattcttctgactctgttttgttctgtttttggtgtttaattcttcttagcaagcaagtaatattcgatcgtcactgtttttgctttgattttgtgatttctctatcaaagattagaactttacgtgaccctttaagcgatcgacaattatctcactgttttttcagataagggtatatgagtttgttggacatgggtggagatatgatggaagatgattgggaatttgcgtcatcatcaaaccctaaaagaaccctagttcttgtgggccgtactggaaacggaaagagtgcgacaggtaacagtatccttgggaggaaagcttttaggtcaagagctagaactgtaggagtgacaagcacgtgcgagtcacagagagttgttcaagaagatggtgatatcattaatgttgttgatactcctggtttgtttgatttgtctactgcagctgattttattggtaaagagattgtgaggtgtataagtttggcagaagatgggattcatgcgatcttgttggtattctctgtgaggcggcttgctgaagaggagcaaactgtgcttagtttcttgcaagcgctattcggcagtaagatcgctgactatatgatcgttgtttttaccggtggcgatgagttggaagagaatgaggagacattggaggagtatttggctgactattgccctgagtttcttaaagaaattcttgggatatgtgacaatcggttggtgttgtttaataacaagactactgataaggtgaagaaagctgagcaagttcagaagcttctctcacttgttgaatctgttgttaaacagaacaatggaaaaccgtattcagatgagttgttccatgagctacaggaagaggctatcaagctaagggaccagaaaaaggaggttgagttacttcagggttactctaataatgagatagatgagttcaagaagcaaatcgatatgtcctatgataggcagcttagccgcatcaccgagatggtggagactaagctgagagacactgctaagagactagagcagcaactaggtgaagagcaagctgcaagacttgaagcggagaagagggcaaacgaagttcagaagcggtcaagcgatgagattaagaaactcagagagaatctggagagggcggagaaagagacgaaggaactccagaagaaactgggaaagtgcatcaatctatgatatattgagatgttgtagctccagtgaaatctgataagattattcatgtc

SEQ ID NO: 23839 - protein, 342 aa, Arabidopsis thaliana
  peptide (1)..(342): Ceres Seq. ID no. 12385812
MSLLDMGGDMMEDDWEFASSSNPKRTLVLVGRTGNGKSATGNSILGRKAFRSRARTVGVTSTCESQRVVQEDGDIINVVDTPGLFDLSTAADFIGKEIVRCISLAEDGIHAILLVFSVRRLAEEEQTVLSFLQALFGSKIADYMIVVFTGGDELEENEETLEEYLADYCPEFLKEILGICDNRLVLFNNKTTDKVKKAEQVQKLLSLVESVVKQNNGKPYSDELFHELQEEAIKLRDQKKEVELLQGYSNNEIDEFKKQIDMSYDRQLSRITEMVETKLRDTAKRLEQQLGEEQAARLEAEKRANEVQKRSSDEIKKLRENLERAEKETKELQKKLGKCINL

SEQ ID NO: 23840 - protein, 337 aa, Arabidopsis thaliana
  peptide (1)..(337): Ceres Seq. ID no. 12385813
MGGDMMEDDWEFASSSNPKRTLVLVGRTGNGKSATGNSILGRKAFRSRARTVGVTSTCESQRVVQEDGDIINVVDTPGLFDLSTAADFIGKEIVRCISLAEDGIHAILLVFSVRRLAEEEQTVLSFLQALFGSKIADYMIVVFTGGDELEENEETLEEYLADYCPEFLKEILGICDNRLVLFNNKTTDKVKKAEQVQKLLSLVESVVKQNNGKPYSDELFHELQEEAIKLRDQKKEVELLQGYSNNEIDEFKKQIDMSYDRQLSRITEMVETKLRDTAKRLEQQLGEEQAARLEAEKRANEVQKRSSDEIKKLRENLERAEKETKELQKKLGKCINL

SEQ ID NO: 23841 - protein, 333 aa, Arabidopsis thaliana
  peptide (1)..(333): Ceres Seq. ID no. 12385814
MMEDDWEFASSSNPKRTLVLVGRTGNGKSATGNSILGRKAFRSRARTVGVTSTCESQRVVQEDGDIINVVDTPGLFDLSTAADFIGKEIVRCISLAEDGIHAILLVFSVRRLAEEEQTVLSFLQALFGSKIADYMIVVFTGGDELEENEETLEEYLADYCPEFLKEILGICDNRLVLFNNKTTDKVKKAEQVQKLLSLVESVVKQNNGKPYSDELFHELQEEAIKLRDQKKEVELLQGYSNNEIDEFKKQIDMSYDRQLSRITEMVETKLRDTAKRLEQQLGEEQAARLEAEKRANEVQKRSSDEIKKLRENLERAEKETKELQKKLGKCINL

SEQ ID NO: 23842 - DNA, 1458 bp, Arabidopsis thaliana
  misc_feature (1)..(1458): Ceres Seq. ID no. 12422463
  misc_feature (1)..(1458): Ortholog of  Ceres SEQ ID NO 15177414 as cited in SEQ ID NO 57242
  misc_feature (1)..(1458): Ortholog of  Ceres SEQ ID NO 13594151 as cited in SEQ ID NO 58886
aaaaatttcgaaatcggaaaatttacacagagaagcgccatgacctaaaaatctcaaaacttccccaacaaaaatggcgcttttactcaacccatttccttttacctaccttgtacattaccccttttctcaaatctcactttcccactgaaataaccccatggcggagaatcagaactgtgcgaggatgacgagagcggcggcgaaacgaaaagcgtcgtccatggcgttagacgaaaacccagttagtaagaagagagttgttctcggagagcttccgaatatgtccaatgtcgttgctgtacccaatcaagaaagagagacccttaaggctaaaacaagtgttaatacctcgaagaggcagatgaagaaggctttgatgattcctgaagctagcgtactaatcgaatcgagatctgttgatcctcagatgtgtgagccttttgctagtgatatttgtgcttatctccgtgaaatggaggggaagccgaaacatagaccactacctgattatattgaaaaggttcagagtgatttaactccacacatgagagcggttttggtggattggttagtggaggttgctgaggagtacaagcttgtttcggatacgctttatctcactatctcctatgttgatagattcttgtctgtgaagcctattaacaggcagaagcttcagcttgtgggagtttctgcaatgcttattgcgtcgaaatatgaagagataggtcctcctaaagttgaagatttttgttacattacggataatacatttactaaacaagaagtggtgtcgatggaggcggatatacttcttgctctgcagtttgaattaggaagcccaaccatcaaaacattcctaagacggtttacacgggttgcacaagaagatttcaaagactcacaattgcagatagagttcctttgttgctatctatcagaattgagtatgttagattacacctgtgtgaagtatttgccatctcttttgtctgcttcagctgtatttcttgcccggttcatcatccgtccaaaacaacatccttggaatcaaatgctagaagaatacacaaagtacaaagcagctgatctacaagtgtgcgtgggtatcatacatgacttgtatctaagcagaagaggaaacactctagaagctgttagaaataagtacaagcaacacaagtacaagtgcgttgcgaccatgcctgtttcaccggagctacctcttgctttctttgaagatattaccattagaggaatggcgtaaaagaagcttgaagcttatgtattggaagtgttagttacctgaattttgggttgtatatatctgttagaatggcagattagtattgagtattatctcttttagcgtatgttcaatgattttttgctaacactagttaagaaactttttttttttgcttgaccattttttcaatggtttattagattttt

SEQ ID NO: 23843 - protein, 369 aa, Arabidopsis thaliana
  peptide (1)..(369): Ceres Seq. ID no. 12422464
MAENQNCARMTRAAAKRKASSMALDENPVSKKRVVLGELPNMSNVVAVPNQERETLKAKTSVNTSKRQMKKALMIPEASVLIESRSVDPQMCEPFASDICAYLREMEGKPKHRPLPDYIEKVQSDLTPHMRAVLVDWLVEVAEEYKLVSDTLYLTISYVDRFLSVKPINRQKLQLVGVSAMLIASKYEEIGPPKVEDFCYITDNTFTKQEVVSMEADILLALQFELGSPTIKTFLRRFTRVAQEDFKDSQLQIEFLCCYLSELSMLDYTCVKYLPSLLSASAVFLARFIIRPKQHPWNQMLEEYTKYKAADLQVCVGIIHDLYLSRRGNTLEAVRNKYKQHKYKCVATMPVSPELPLAFFEDITIRGMA

SEQ ID NO: 23844 - protein, 360 aa, Arabidopsis thaliana
  peptide (1)..(360): Ceres Seq. ID no. 12422465
MTRAAAKRKASSMALDENPVSKKRVVLGELPNMSNVVAVPNQERETLKAKTSVNTSKRQMKKALMIPEASVLIESRSVDPQMCEPFASDICAYLREMEGKPKHRPLPDYIEKVQSDLTPHMRAVLVDWLVEVAEEYKLVSDTLYLTISYVDRFLSVKPINRQKLQLVGVSAMLIASKYEEIGPPKVEDFCYITDNTFTKQEVVSMEADILLALQFELGSPTIKTFLRRFTRVAQEDFKDSQLQIEFLCCYLSELSMLDYTCVKYLPSLLSASAVFLARFIIRPKQHPWNQMLEEYTKYKAADLQVCVGIIHDLYLSRRGNTLEAVRNKYKQHKYKCVATMPVSPELPLAFFEDITIRGMA

SEQ ID NO: 23845 - protein, 348 aa, Arabidopsis thaliana
  peptide (1)..(348): Ceres Seq. ID no. 12422466
MALDENPVSKKRVVLGELPNMSNVVAVPNQERETLKAKTSVNTSKRQMKKALMIPEASVLIESRSVDPQMCEPFASDICAYLREMEGKPKHRPLPDYIEKVQSDLTPHMRAVLVDWLVEVAEEYKLVSDTLYLTISYVDRFLSVKPINRQKLQLVGVSAMLIASKYEEIGPPKVEDFCYITDNTFTKQEVVSMEADILLALQFELGSPTIKTFLRRFTRVAQEDFKDSQLQIEFLCCYLSELSMLDYTCVKYLPSLLSASAVFLARFIIRPKQHPWNQMLEEYTKYKAADLQVCVGIIHDLYLSRRGNTLEAVRNKYKQHKYKCVATMPVSPELPLAFFEDITIRGMA

SEQ ID NO: 23846 - DNA, 1174 bp, Arabidopsis thaliana
  misc_feature (1)..(1174): Ceres Seq. ID no. 12323560
  misc_feature (1)..(1174): Ortholog of  Ceres SEQ ID NO 13596519 as cited in SEQ ID NO 62572
  misc_feature (1)..(1174): Ortholog of  Ceres SEQ ID NO 13584209 as cited in SEQ ID NO 63683
  misc_feature (1)..(1174): Ortholog of  Ceres SEQ ID NO 12625108 as cited in SEQ ID NO 68102
aaaccaaaattaaatcatcaaaaatcaaaatctctaaaatcaaaaattcgcattttctctctcgccggagagatgcaacggtttcttctacctttactcttccttgcactatcgccgccggcgatttgtcattactcttcctcaacctcttcaccttcttcgtcctccgtttcttccgacgcctcagaatggcgtccagctcgagccacctactacgccgctacgaatcctcgagacgcggtgggcggtgcgtgtggatacggagatctcgtcaaatctgggtacggtatggctactgttggtctaagcgagactctgtttgagcgtggtcagatctgtggtgcttgtttcgagctcagatgtgttgatgatctccgttggtgtatccctggaacttcaattatactcaccgctacgaatttctgtgctcctaattacggatttgatcccgacggtggtggtcattgtaatccacctaacaaacatttcgtgcttccgatcgaagcgtttgagaagatcgctatttggaaagctgggaacatgccggtgcagtatcgaaggatcaactgtagaaaggaagggagcatgcggtttacagtcgatggtggaggcattttcatttcggttttgatcaccaatgttgcagggtccggtgatatagctgctgtgaagatcaaagggtcgagaaccgggtggttacctatgggtcgtaattggggacaaaattggcatattaatgctgatctcaggaaccaagctctctcatttgaagtaacttctagtgacaggtcaaccgtgacatcttacaatgtctccccgaaaaactggaattatggacagaccttcgaagggaaacaattcgagactccgtgagacagagacggacacattgagatacaatcccatgattctttttttccgggtcagaattttttgatggcaagtatatcgatcttggtctaaggttatctttagggttgaaaaggaaagaacttgggtcagacttttgcatttcatagttctctctctcccacgcataggtacaaaaactcaccaatgtactaagaacagtgatcacacaaacatcactattgtatctatttgtttacattactaaggagcgaaagcttccttcaagtgcttaaagctaatgatgagtactgagtcttatcgt

SEQ ID NO: 23847 - protein, 290 aa, Arabidopsis thaliana
  peptide (1)..(290): Ceres Seq. ID no. 12323561
KPKLNHQKSKSLKSKIRIFSLAGEMQRFLLPLLFLALSPPAICHYSSSTSSPSSSSVSSDASEWRPARATYYAATNPRDAVGGACGYGDLVKSGYGMATVGLSETLFERGQICGACFELRCVDDLRWCIPGTSIILTATNFCAPNYGFDPDGGGHCNPPNKHFVLPIEAFEKIAIWKAGNMPVQYRRINCRKEGSMRFTVDGGGIFISVLITNVAGSGDIAAVKIKGSRTGWLPMGRNWGQNWHINADLRNQALSFEVTSSDRSTVTSYNVSPKNWNYGQTFEGKQFETP

SEQ ID NO: 23848 - protein, 266 aa, Arabidopsis thaliana
  peptide (1)..(266): Ceres Seq. ID no. 12323562
MQRFLLPLLFLALSPPAICHYSSSTSSPSSSSVSSDASEWRPARATYYAATNPRDAVGGACGYGDLVKSGYGMATVGLSETLFERGQICGACFELRCVDDLRWCIPGTSIILTATNFCAPNYGFDPDGGGHCNPPNKHFVLPIEAFEKIAIWKAGNMPVQYRRINCRKEGSMRFTVDGGGIFISVLITNVAGSGDIAAVKIKGSRTGWLPMGRNWGQNWHINADLRNQALSFEVTSSDRSTVTSYNVSPKNWNYGQTFEGKQFETP

SEQ ID NO: 23849 - protein, 194 aa, Arabidopsis thaliana
  peptide (1)..(194): Ceres Seq. ID no. 12323563
MATVGLSETLFERGQICGACFELRCVDDLRWCIPGTSIILTATNFCAPNYGFDPDGGGHCNPPNKHFVLPIEAFEKIAIWKAGNMPVQYRRINCRKEGSMRFTVDGGGIFISVLITNVAGSGDIAAVKIKGSRTGWLPMGRNWGQNWHINADLRNQALSFEVTSSDRSTVTSYNVSPKNWNYGQTFEGKQFETP

SEQ ID NO: 23850 - DNA, 1204 bp, Arabidopsis thaliana
  misc_feature (1)..(1204): Ceres Seq. ID no. 12337922
  misc_feature (1)..(1204): Ortholog of  Ceres SEQ ID NO 14302396 as cited in SEQ ID NO 66907
  misc_feature (1)..(1204): Ortholog of  Ceres SEQ ID NO 13496281 as cited in SEQ ID NO 69175
atctagggttccagatttactcttcgtcttcctctcttcgcttcttccccactgggattttccttttcttctccttttttctctacccatcgatctacacatcctgatcttcttagaagccccaatccttatacattccgggaacaaaaaacctagctttttttttattccggcttaaccagttttcgaaaaaccctagcttccatggcgaaaactcgacctggtgtcgcctccaaaattaagacgggaaggaaggggactcttataccatcaagggcaccaacaaagttgtgagagcgggagactgtgtgttgatgcgcccatcagatgctggtaaaccaccatatgtggcccgtgttgagaagattgaagctgatgcgaggaacaatgtgaaggtgcactgtcgatggtattaccgccctgaggagtcacttggtggtaggagacaatttcatggagccaaagagcttttcttgtctgaccattttgatgttcaaagtgcacacaccattgagggaaaatgcattgttcacaccttcaaaaactacacgaggcttgaaaacgttggggcagaggattattattgtagattcgagtacaaggctgctactggcgcatttacccctgatcgagttgctgtgtactgcaaatgtgaaatgccttacaatccagacgatctcatggtgcagtgtgaaggctgcaaagactggtatcatcctgcgtgtgttggcatgacgattgaagaagcaaagaagcttgatcactttgtatgtgctgaatgcagttctgatgacgatgtcaaaaaatcgcagaatgggtttacttcatctccagctgatgatgttaaggtggaaacgaagcgcagaaaaaggtaatcgcgagttcttggggataaaagccacaagagatgataagttatataacttgggaagctctttggtgcagattttagtaagttagggtttatctttgtcggtctttgtcgtctatggttgtgatgtctgtatggtgcgttccaaaacttagagaaatgtgaaaaagaggagagatcagagagatgatgaagaaaactatgttggtagaatcagttgtatagacttccgtggggtttaagttaactttaggtttgtttattgttatggtctgttgttattttgtggctgatgagaacagatgaacatgaacaacgcttttgacttgggtc

SEQ ID NO: 23851 - protein, 186 aa, Arabidopsis thaliana
  peptide (1)..(186): Ceres Seq. ID no. 12337923
MRPSDAGKPPYVARVEKIEADARNNVKVHCRWYYRPEESLGGRRQFHGAKELFLSDHFDVQSAHTIEGKCIVHTFKNYTRLENVGAEDYYCRFEYKAATGAFTPDRVAVYCKCEMPYNPDDLMVQCEGCKDWYHPACVGMTIEEAKKLDHFVCAECSSDDDVKKSQNGFTSSPADDVKVETKRRKR

SEQ ID NO: 23852 - protein, 93 aa, Arabidopsis thaliana
  peptide (1)..(93): Ceres Seq. ID no. 12337924
MEPKSFSCLTILMFKVHTPLRENALFTPSKTTRGLKTLGQRIIIVDSSTRLLLAHLPLIELLCTANVKCLTIQTISWCSVKAAKTGIILRVLA

SEQ ID NO: 23853 - DNA, 1202 bp, Arabidopsis thaliana
  misc_feature (1)..(1202): Ceres Seq. ID no. 12602498
  misc_feature (1)..(1202): Ortholog of  Ceres SEQ ID NO 14311659 as cited in SEQ ID NO 51212
  misc_feature (1)..(1202): Ortholog of  Ceres SEQ ID NO 12635180 as cited in SEQ ID NO 0
agcccttttgattattactctttagtctttactttgctcacagctttggatcaccaaaaaaaaaactcaagagagactttgtggccatggcagcctctctccaatccaccgctacattcctccagtcggcgaagatcgccaccgctccttctcgcggaagttctcacctccgatcgactcaagccgtcggcaaatcctttgggctcgaaacttcctcggctcgcctcacttgctccttccagtctgactttaagaacttcaccggtaaatgctccgacgctgtcaaaatcgccggattcgctcttgccacctctgctctcgtcgtctcgggagcaagtgcggagggagctccaaagagattgacctatgatgagattcagagcaagacatacatggaagtgaaaggaactggaacggctaaccagtgccctactattgacggtggctctgagactttctcgttcaaacccggaaagtatgcaggaaagaagttctgcttcgagcctacttccttcaccgtcaaggcagacagtgtaagcaagaacgctcctccagagttccagaacacaaagctcatgacccgtcttacctacacccttgacgagatcgaaggacccttcgaggttgcttcagacggaagcgtcaatttcaaggaagaagatggaatcgactatgctgcagtcacagtccaacttccaggaggtgaacgtgtgccattccttttcacagtcaaacagcttgacgcctcaggcaaaccagacagcttcaccggaaaattcttggttccatcgtaccgtggctcttccttcttggacccaaagggccgtggtggatccacaggatatgacaacgccgtggcattgccagctggaggcagaggagacgaggaggagcttgtaaaggagaacgtgaagaacactgccgcttcagtgggagagatcactctgaaagtgacaaagagcaagccggagacaggagaggtgatcggagtgttcgagagtcttcagccgtcggatactgacttgggtgctaaggtaccaaaggatgtgaagatccaaggggtgtggtatggtcaacttgagtgatcatgttattatattttccgttgattgtgtttgatgataatgataacatcttttgatgctttcttcgtttatctctcttatataaaatgcacatgcctaagatcttgaattttctgt

SEQ ID NO: 23854 - protein, 332 aa, Arabidopsis thaliana
  peptide (1)..(332): Ceres Seq. ID no. 12602499
MAASLQSTATFLQSAKIATAPSRGSSHLRSTQAVGKSFGLETSSARLTCSFQSDFKNFTGKCSDAVKIAGFALATSALVVSGASAEGAPKRLTYDEIQSKTYMEVKGTGTANQCPTIDGGSETFSFKPGKYAGKKFCFEPTSFTVKADSVSKNAPPEFQNTKLMTRLTYTLDEIEGPFEVASDGSVNFKEEDGIDYAAVTVQLPGGERVPFLFTVKQLDASGKPDSFTGKFLVPSYRGSSFLDPKGRGGSTGYDNAVALPAGGRGDEEELVKENVKNTAASVGEITLKVTKSKPETGEVIGVFESLQPSDTDLGAKVPKDVKIQGVWYGQLE

SEQ ID NO: 23855 - protein, 230 aa, Arabidopsis thaliana
  peptide (1)..(230): Ceres Seq. ID no. 12602500
MEVKGTGTANQCPTIDGGSETFSFKPGKYAGKKFCFEPTSFTVKADSVSKNAPPEFQNTKLMTRLTYTLDEIEGPFEVASDGSVNFKEEDGIDYAAVTVQLPGGERVPFLFTVKQLDASGKPDSFTGKFLVPSYRGSSFLDPKGRGGSTGYDNAVALPAGGRGDEEELVKENVKNTAASVGEITLKVTKSKPETGEVIGVFESLQPSDTDLGAKVPKDVKIQGVWYGQLE

SEQ ID NO: 23856 - protein, 169 aa, Arabidopsis thaliana
  peptide (1)..(169): Ceres Seq. ID no. 12602501
MTRLTYTLDEIEGPFEVASDGSVNFKEEDGIDYAAVTVQLPGGERVPFLFTVKQLDASGKPDSFTGKFLVPSYRGSSFLDPKGRGGSTGYDNAVALPAGGRGDEEELVKENVKNTAASVGEITLKVTKSKPETGEVIGVFESLQPSDTDLGAKVPKDVKIQGVWYGQLE

SEQ ID NO: 23857 - DNA, 922 bp, Arabidopsis thaliana
  misc_feature (1)..(922): Ceres Seq. ID no. 12395771
  misc_feature (1)..(922): Ortholog of  Ceres SEQ ID NO 14301475 as cited in SEQ ID NO 62936
  misc_feature (1)..(922): Ortholog of  Ceres SEQ ID NO 12619999 as cited in SEQ ID NO 66123
  misc_feature (1)..(922): Ortholog of  Ceres SEQ ID NO 13656436 as cited in SEQ ID NO 69154
tcgttctcgtcatcgtcttaaagaaggaattcgatttttcgcctgaacctgcggatttttcgattcttcaaattcaatgtcttatgcttatcttttcaagtatatcatcatcggcgatactggagtggggaaatcatgtcttctgcttcagttcaccgacaagaggtttcagccggtgcatgaccttaccattggtgttgaatttggggctaggatgatcaccatcgataacaaacctatcaagcttcagatctgggatacggctggtcaagaatcctttaggtctattacaaggtcatactatagaggagctgcaggggcattgcttgtctatgatatcacaaggagggagacatttaaccatctagctagctggctagaagatgcaaggcagcatgcaaatgcaaatatgacgataatgctcattgggaataagtgtgatcttgctcacagaagggcagtgagtacagaggaaggagagcagtttgcaaaggagcacggtcttatattcatggaggcctctgccaagactgctcagaatgttgaggaggcattcattaagacagctgcaacaatatacaagaagattcaagatggtgtgtttgatgtgtcaaatgagtcatatggaatcaaagttggatatggaggaattccaggaccatcaggtggaagagatggatcaacctcgcaaggaggagggtgctgcggctgagatgggaaaaatatgtctatatcattatgtaaaaatgatcattatgtaaaaatgatcacatatgatatagcaaaaatgtctctgcttctttctatagttgtaaatcgttttggaattcgatttggtgactgttgtggttggttttggaacggtttgacaatacacgtgtatgcctattcatatatctaaaagttaagatgtgttttgcgc

SEQ ID NO: 23858 - protein, 211 aa, Arabidopsis thaliana
  peptide (1)..(211): Ceres Seq. ID no. 12395772
MSYAYLFKYIIIGDTGVGKSCLLLQFTDKRFQPVHDLTIGVEFGARMITIDNKPIKLQIWDTAGQESFRSITRSYYRGAAGALLVYDITRRETFNHLASWLEDARQHANANMTIMLIGNKCDLAHRRAVSTEEGEQFAKEHGLIFMEASAKTAQNVEEAFIKTAATIYKKIQDGVFDVSNESYGIKVGYGGIPGPSGGRDGSTSQGGGCCG

SEQ ID NO: 23859 - protein, 165 aa, Arabidopsis thaliana
  peptide (1)..(165): Ceres Seq. ID no. 12395773
MITIDNKPIKLQIWDTAGQESFRSITRSYYRGAAGALLVYDITRRETFNHLASWLEDARQHANANMTIMLIGNKCDLAHRRAVSTEEGEQFAKEHGLIFMEASAKTAQNVEEAFIKTAATIYKKIQDGVFDVSNESYGIKVGYGGIPGPSGGRDGSTSQGGGCCG

SEQ ID NO: 23860 - DNA, 1273 bp, Arabidopsis thaliana
  misc_feature (1)..(1273): Ceres Seq. ID no. 12421943
  misc_feature (1)..(1273): Ortholog of  Ceres SEQ ID NO 14312320 as cited in SEQ ID NO 59385
aaagatcaggtttcgatttcaccaaaaaccgaacactgtgtcttccgtcctaaagattgtaaagggaaaccgttttcgattttcagagaagatcacacatctttcgtcccttcactgccatacgtgtcgataaagatggcggctatggcggcgaagcttcagttatcggcgaaatctgatcaaagcagtgtgcgattaccgagagtgatcaacctctcccgcgatccaacgactagagtctcgtttccgcgaaatggatcagtttgttccctccacaccaatttctcttctccacatctcgcgaaaccttgcgccggaggtggtggtggtggaagcaccggtaataacggcggcggaagcggaagcggaggaggaggtggtggttttggaggttcagggggtgaagcaagtgaagaatcatctccatggggaccaatagggttattcatccaaggatggagatcaagagttgcagctgatcctcagttcccttttaaggtactaatggaagagatcgtaggacttagcgcttgtgttctcggtgacatggcttcacgacctaatttcggattaaacgagctagatttcgtcttctccacgctcgttgtaggttcgattctcaatttcgtactcatgtacatgttagctcctactgcagcaactcttggctcctctcagactttgcctggaatctttagaaactgtccatcaagccatatgtttgaacagggtagcttcaccgttatgaaccgtttcgggactcttgtgtacaaaggaatggtttttgctagtgtaggattagctgcaggtcttgtaggtactgccatttctaatggggttgattatgctgaggaagaagatggacccgagcttcgaaacgccaaacaaaccgccaccgactgtgcttaattctttaacttgggcaactcatatgggagtgagtgcgaatgcaaggtaccaaacgttgaatgggattgagttcttgctggcaaaggtgttgcccccattggtgtttaagacaagtgtgatagttttgaggtgtgcaaacaatgttgctggaggaatgtcgtttgttttgttggcaaggatgacgggatcacagtcggtggaggagaagacagagatgtcagagatttcagagaaagagaaggatgattgaatctcatcctagtctttcaaggtttttgttcctgtgtgtttttcgccagttcataggcttcttgagttgaaaccatttgtgttggaataaataagatgaatcccttcttaggcc

SEQ ID NO: 23861 - protein, 302 aa, Arabidopsis thaliana
  peptide (1)..(302): Ceres Seq. ID no. 12421944
KDQVSISPKTEHCVFRPKDCKGKPFSIFREDHTSFVPSLPYVSIKMAAMAAKLQLSAKSDQSSVRLPRVINLSRDPTTRVSFPRNGSVCSLHTNFSSPHLAKPCAGGGGGGSTGNNGGGSGSGGGGGGFGGSGGEASEESSPWGPIGLFIQGWRSRVAADPQFPFKVLMEEIVGLSACVLGDMASRPNFGLNELDFVFSTLVVGSILNFVLMYMLAPTAATLGSSQTLPGIFRNCPSSHMFEQGSFTVMNRFGTLVYKGMVFASVGLAAGLVGTAISNGVDYAEEEDGPELRNAKQTATDCA

SEQ ID NO: 23862 - protein, 257 aa, Arabidopsis thaliana
  peptide (1)..(257): Ceres Seq. ID no. 12421945
MAAMAAKLQLSAKSDQSSVRLPRVINLSRDPTTRVSFPRNGSVCSLHTNFSSPHLAKPCAGGGGGGSTGNNGGGSGSGGGGGGFGGSGGEASEESSPWGPIGLFIQGWRSRVAADPQFPFKVLMEEIVGLSACVLGDMASRPNFGLNELDFVFSTLVVGSILNFVLMYMLAPTAATLGSSQTLPGIFRNCPSSHMFEQGSFTVMNRFGTLVYKGMVFASVGLAAGLVGTAISNGVDYAEEEDGPELRNAKQTATDCA

SEQ ID NO: 23863 - protein, 254 aa, Arabidopsis thaliana
  peptide (1)..(254): Ceres Seq. ID no. 12421946
MAAKLQLSAKSDQSSVRLPRVINLSRDPTTRVSFPRNGSVCSLHTNFSSPHLAKPCAGGGGGGSTGNNGGGSGSGGGGGGFGGSGGEASEESSPWGPIGLFIQGWRSRVAADPQFPFKVLMEEIVGLSACVLGDMASRPNFGLNELDFVFSTLVVGSILNFVLMYMLAPTAATLGSSQTLPGIFRNCPSSHMFEQGSFTVMNRFGTLVYKGMVFASVGLAAGLVGTAISNGVDYAEEEDGPELRNAKQTATDCA

SEQ ID NO: 23864 - DNA, 1209 bp, Arabidopsis thaliana
  misc_feature (1)..(1209): Ceres Seq. ID no. 12324683
  misc_feature (1)..(1209): Ortholog of  Ceres SEQ ID NO 13596440 as cited in SEQ ID NO 68769
aaccccattaaccgtttcaaaaggaaattaaggagttgttcatagtttcgtttgtaaattgcaattgtaagtttgtaactgtaatagaattagattatttagggtttgcttgatcctcgatctgtgatcgattgatctcgcttcgcacccagcaggtttatttaatgagcgtgaaagatggctaagataatgcttggatctcactcggttaagagccatggatggaaggtggctcgtgaacatctttgtgactggctcatcctcgtagtcctcggtctcatcgacattgtactcaatgttatcgagccttttcatcgctatattggacctgacatgttaaccgatctcactttcccattttatgaagacaccatccctatgtgggctgtcccgattatttgtatattggttccgatatgcatcttcatagtgtactattactatcgaagagatgtttatgatcttcatcacgccattctcggtatcggattctcatgtcttgtgactggagtcaccactgattccatcaaagacgcggtcggtaggccacgccctaacttcttttaccgatgttttcccaatggtaaaccgaaatttcatccggatactaaggatgttgtgtgtcatggagttaaaaagataatcaaagaaggttacaagagtttccctagtggtcacacttcatggtcattcgctggtttaactttcctagcgtggtacttatcgggtaaaatcaaagtctttgacagaagaggtcacgtggcgaagctatgcctcgtgttcttaccgatactcatatcaattctcatcggaatatcacgcgtagacgactattggcaccattggaccgatgtcttcgccggagctatcatcggaatttttgtcgcttctttctcttacctccacttttttccttacccttacgacgaaaacggatgggctccacatgcgtattttagaatgttggcggagaggagcactggtcgagccacgacgatgactcgaaccggttctcgaggaatgttggacaacgacgttgagcctggcaactccgcgtcctcgccgcacgatcgccaccgtgaaagcactgattctgacttttgaaaatttcctccacaatgttttaaaaaaaagaagttaattatccgtgtaatttttaattgtatgattgttttcacttactgatatataatatgtatacttttcatt

SEQ ID NO: 23865 - protein, 308 aa, Arabidopsis thaliana
  peptide (1)..(308): Ceres Seq. ID no. 12324684
MAKIMLGSHSVKSHGWKVAREHLCDWLILVVLGLIDIVLNVIEPFHRYIGPDMLTDLTFPFYEDTIPMWAVPIICILVPICIFIVYYYYRRDVYDLHHAILGIGFSCLVTGVTTDSIKDAVGRPRPNFFYRCFPNGKPKFHPDTKDVVCHGVKKIIKEGYKSFPSGHTSWSFAGLTFLAWYLSGKIKVFDRRGHVAKLCLVFLPILISILIGISRVDDYWHHWTDVFAGAIIGIFVASFSYLHFFPYPYDENGWAPHAYFRMLAERSTGRATTMTRTGSRGMLDNDVEPGNSASSPHDRHRESTDSDF

SEQ ID NO: 23866 - protein, 304 aa, Arabidopsis thaliana
  peptide (1)..(304): Ceres Seq. ID no. 12324685
MLGSHSVKSHGWKVAREHLCDWLILVVLGLIDIVLNVIEPFHRYIGPDMLTDLTFPFYEDTIPMWAVPIICILVPICIFIVYYYYRRDVYDLHHAILGIGFSCLVTGVTTDSIKDAVGRPRPNFFYRCFPNGKPKFHPDTKDVVCHGVKKIIKEGYKSFPSGHTSWSFAGLTFLAWYLSGKIKVFDRRGHVAKLCLVFLPILISILIGISRVDDYWHHWTDVFAGAIIGIFVASFSYLHFFPYPYDENGWAPHAYFRMLAERSTGRATTMTRTGSRGMLDNDVEPGNSASSPHDRHRESTDSDF

SEQ ID NO: 23867 - protein, 256 aa, Arabidopsis thaliana
  peptide (1)..(256): Ceres Seq. ID no. 12324686
MLTDLTFPFYEDTIPMWAVPIICILVPICIFIVYYYYRRDVYDLHHAILGIGFSCLVTGVTTDSIKDAVGRPRPNFFYRCFPNGKPKFHPDTKDVVCHGVKKIIKEGYKSFPSGHTSWSFAGLTFLAWYLSGKIKVFDRRGHVAKLCLVFLPILISILIGISRVDDYWHHWTDVFAGAIIGIFVASFSYLHFFPYPYDENGWAPHAYFRMLAERSTGRATTMTRTGSRGMLDNDVEPGNSASSPHDRHRESTDSDF

SEQ ID NO: 23868 - DNA, 888 bp, Arabidopsis thaliana
  misc_feature (1)..(888): Ceres Seq. ID no. 13504847
  misc_feature (1)..(888): Ortholog of  Ceres SEQ ID NO 14309484 as cited in SEQ ID NO 52876
atcttcttaaacccaaacgttcaagaaaaagaaaaaaaaacgatacttacgatgagtgcggtaaaatcggcgttaggtgatatggtgataacctttttgtgggttattctctcggcgacgtttgggatacagacggcggcgattgtttccgccgtagggtttcatggtatcacttgggctcctcttgtgatctcaacgttggttgtttttgtctccatctcgatttttacggttattggaaacgttcttggtggtgctagcttcaatccttgtggaaacgcagcgttttataccgccggtgtttccagtgattctctcttctccttggccattagatctcctgctcaggcaattggtgcggcaggcggtgcgataacgatcatggagatgataccggaaaagtataagactaggattggaggaaagccttcattgcaatttggtgcacacaatggagctatttctgaagtggtcctaagttttagtgttacatttttggttttactaattatcctaagaggtcctcgaaaactgctcgcgaaaacgttcttgctcgcactcgctaccgtatcggtgtttgtcgtaggttctaaattcactagaccattcatgaatcctgccattgcgtttgggtgggcatatatctacaagtctcacaacacatgggaccatttttatgtgtattggatcagctcctacaccggagctattttatctgcgatgctctttagaattatatttccggctccacctctggttcagaaaaaacagaagaaagcttgagaaaaaaatggaaaaatctaagtaaaaatttcatgaatcataatcccatttgttgtatgttttatgctgttgtcgtatttgtacttaatttatagtttatagccc

SEQ ID NO: 23869 - protein, 260 aa, Arabidopsis thaliana
  peptide (1)..(260): Ceres Seq. ID no. 13504848
IFLNPNVQEKEKKTILTMSAVKSALGDMVITFLWVILSATFGIQTAAIVSAVGFHGITWAPLVISTLVVFVSISIFTVIGNVLGGASFNPCGNAAFYTAGVSSDSLFSLAIRSPAQAIGAAGGAITIMEMIPEKYKTRIGGKPSLQFGAHNGAISEVVLSFSVTFLVLLIILRGPRKLLAKTFLLALATVSVFVVGSKFTRPFMNPAIAFGWAYIYKSHNTWDHFYVYWISSYTGAILSAMLFRIIFPAPPLVQKKQKKA

SEQ ID NO: 23870 - protein, 243 aa, Arabidopsis thaliana
  peptide (1)..(243): Ceres Seq. ID no. 13504849
MSAVKSALGDMVITFLWVILSATFGIQTAAIVSAVGFHGITWAPLVISTLVVFVSISIFTVIGNVLGGASFNPCGNAAFYTAGVSSDSLFSLAIRSPAQAIGAAGGAITIMEMIPEKYKTRIGGKPSLQFGAHNGAISEVVLSFSVTFLVLLIILRGPRKLLAKTFLLALATVSVFVVGSKFTRPFMNPAIAFGWAYIYKSHNTWDHFYVYWISSYTGAILSAMLFRIIFPAPPLVQKKQKKA

SEQ ID NO: 23871 - protein, 233 aa, Arabidopsis thaliana
  peptide (1)..(233): Ceres Seq. ID no. 13504850
MVITFLWVILSATFGIQTAAIVSAVGFHGITWAPLVISTLVVFVSISIFTVIGNVLGGASFNPCGNAAFYTAGVSSDSLFSLAIRSPAQAIGAAGGAITIMEMIPEKYKTRIGGKPSLQFGAHNGAISEVVLSFSVTFLVLLIILRGPRKLLAKTFLLALATVSVFVVGSKFTRPFMNPAIAFGWAYIYKSHNTWDHFYVYWISSYTGAILSAMLFRIIFPAPPLVQKKQKKA

SEQ ID NO: 23872 - DNA, 1525 bp, Arabidopsis thaliana
  misc_feature (1)..(1525): Ceres Seq. ID no. 12335249
  misc_feature (1)..(1525): Ortholog of  Ceres SEQ ID NO 13581947 as cited in SEQ ID NO 51812
agaggatattcttcgtcacaaaattaaaaaaaaaagagtaggagaagagggaagcgactagcaccttttgtagttttccgtttattttctgtataaggcgggtgatttcggctccttcatcggaaattatgagcaacgttatcggcgatcgcactgaagacggcctttccaccgccgctgcggcctctggctctacggctgtccagagttctcctcccactgatcgtcctgtccgcgtctacgccgatgggatctacgatcttttccactttggtcatgctcgatctctcgaacaagccaaattagcgtttccaaacaacacttaccttcttgttggatgttgcaatgatgagactacccataagtacaagggaaggactgtaatgactgcagaagagcgatatgaatcacttcgacattgcaagtgggtggatgaagtcatccctgatgcaccatgggtggtcaaccaggagtttcttgacaagcaccagattgactatgttgcccacgattctcttccctatgctgattcaagcggagctggaaaggatgtctatgaatttgttaagaaagttgggaggtttaaggaaacacagcgaactgaaggaatatcgacctcggatataataatgagaatagtgaaagattacaatcagtatgtcatgcgtaacttggatagaggatactcaagggaagatcttggagttagctttgtcaaggaaaagagacttagagttaatatgaggctaaagaaactccaggagagggtcaaagaacaacaagaaagagtgggagaaaagatccaaactgtaaaaatgctgcgcaacgagtgggtagagaatgcagatcgatgggtcgctggatttcttgaaatatttgaagaaggttgccataagatgggaactgcaatcgtagacagtatccaagaaaggttaatgagacaaaagtcggcagagaggctggagaacggtcaggatgatgacacagacgaccagttctatgaagaatacttcgatcatgacatgggtagtgacgatgatgaagatgaaaaattctacgacgaggaagaagtaaaggaagaagagacagagaaaactgttatgacggatgctaaagacaacaagtaagaacaaatttggcttgcagaaacctcagattagctctacttatggccacttctactaaactcccttaagcctcgcactctctctcgaaattcatctacttaacatataataccaatgtttagaaagagagagtgtgtgatgtgtttgtttgtgtgtgttgaacaaacgaacgtgcgtggttgtctttggtgagttggtctcatctttgttgatttttgaatgcgcatgtatttttttcttctttttcatgacgggcaaagtgttatgaagtacaatgcaattgtctaaaacaggataagtcaatggttcgtgtgtgccataaagtaaacatcgctgtgtacatcttccatgttccaaactcaactcgttttcttcaaatattgaaatacaaattggtc

SEQ ID NO: 23873 - protein, 332 aa, Arabidopsis thaliana
  peptide (1)..(332): Ceres Seq. ID no. 12335250
MSNVIGDRTEDGLSTAAAASGSTAVQSSPPTDRPVRVYADGIYDLFHFGHARSLEQAKLAFPNNTYLLVGCCNDETTHKYKGRTVMTAEERYESLRHCKWVDEVIPDAPWVVNQEFLDKHQIDYVAHDSLPYADSSGAGKDVYEFVKKVGRFKETQRTEGISTSDIIMRIVKDYNQYVMRNLDRGYSREDLGVSFVKEKRLRVNMRLKKLQERVKEQQERVGEKIQTVKMLRNEWVENADRWVAGFLEIFEEGCHKMGTAIVDSIQERLMRQKSAERLENGQDDDTDDQFYEEYFDHDMGSDDDEDEKFYDEEEVKEEETEKTVMTDAKDNK

SEQ ID NO: 23874 - protein, 247 aa, Arabidopsis thaliana
  peptide (1)..(247): Ceres Seq. ID no. 12335251
MTAEERYESLRHCKWVDEVIPDAPWVVNQEFLDKHQIDYVAHDSLPYADSSGAGKDVYEFVKKVGRFKETQRTEGISTSDIIMRIVKDYNQYVMRNLDRGYSREDLGVSFVKEKRLRVNMRLKKLQERVKEQQERVGEKIQTVKMLRNEWVENADRWVAGFLEIFEEGCHKMGTAIVDSIQERLMRQKSAERLENGQDDDTDDQFYEEYFDHDMGSDDDEDEKFYDEEEVKEEETEKTVMTDAKDNK

SEQ ID NO: 23875 - DNA, 986 bp, Arabidopsis thaliana
  misc_feature (1)..(986): Ceres Seq. ID no. 12377274
  misc_feature (1)..(986): Ortholog of  Ceres SEQ ID NO 15170395 as cited in SEQ ID NO 58055
acaaattcactttccacaattaatctctctctctctttatctccctcacacctcagccttctgtgttcgtctctatctctctcccaaatctcaattttggactcgtctgcttttgtttatataaacacttctcttcttcttcaatctccacacaccacaacaaaaccacctaccttcttcgatttctccagaaatcctccttcaagttcatactcatggaagaagctaaagtggaagcaaaagatggtaccatctccgtagcttctgcattttccggtcaccaacaagctgttcacgatagcgaccataaattcctaacgcaagctgttgaagaagcttacaagggagtggactgtggtgatggtggcccatttggtgcggtgattgtgcataataacgaggttgtcgctagttgccacaatatggttttgaaatatactgacccaactgcacatgctgaagtcaccgccattagagaggcatgtaagaaacttaacaaaatcgagttatcagaatgcgagatttatgcatcttgtgagccgtgtcccatgtgcttcggagccatccatctctcgagactcaagaggttggtttatggagccaaagccgaagcagctatagccatcgggtttgatgacttcatagctgatgctttgagaggcacaggggtttaccagaaatctagtctggagatcaagaaagctgacgggaatggcgctgcgattgcggagcaagttttccagaacactaaggagaagttccgtttatactgaagcacttctccattaccacattcttcttcttcttctccttcatgatggtaattagaagtagtagaagaagaactgcacttgccttgactaaaataaatctctgtttcaaattgttcattttaaaaacagaaggaaacgaaaaaaaaaaaaaaatcaatttcggttcttgttgacacgatttgtaatttcttttcttcatttgaattgaactgg

SEQ ID NO: 23876 - protein, 185 aa, Arabidopsis thaliana
  peptide (1)..(185): Ceres Seq. ID no. 12377275
MEEAKVEAKDGTISVASAFSGHQQAVHDSDHKFLTQAVEEAYKGVDCGDGGPFGAVIVHNNEVVASCHNMVLKYTDPTAHAEVTAIREACKKLNKIELSECEIYASCEPCPMCFGAIHLSRLKRLVYGAKAEAAIAIGFDDFIADALRGTGVYQKSSLEIKKADGNGAAIAEQVFQNTKEKFRLY

SEQ ID NO: 23877 - protein, 116 aa, Arabidopsis thaliana
  peptide (1)..(116): Ceres Seq. ID no. 12377276
MVLKYTDPTAHAEVTAIREACKKLNKIELSECEIYASCEPCPMCFGAIHLSRLKRLVYGAKAEAAIAIGFDDFIADALRGTGVYQKSSLEIKKADGNGAAIAEQVFQNTKEKFRLY

SEQ ID NO: 23878 - DNA, 1301 bp, Arabidopsis thaliana
  misc_feature (1)..(1301): Ceres Seq. ID no. 13495742
  misc_feature (1)..(1301): Ortholog of  Ceres SEQ ID NO 15179926 as cited in SEQ ID NO 57010
  misc_feature (1)..(1301): Ortholog of  Ceres SEQ ID NO 14316075 as cited in SEQ ID NO 60059
ccatatttgactcgtcaatataaatacaattgtaacaaacagattttgatcaaaagattttacttttctcaattcctttcaactttcaaaatcgaagatctcttaagccatgaacgatcttctctccggctcgtttaaaacctccgtcgcggacggttcatcgccgccgcactcacacaacatcgagatgtcaaaagcgaaagtctccggcggaagttgccacggtggtaacaacctagacacgttcttcctcgacgtggaggttgtaaacgaagaccttaaagagctagatcgtctctgtcacaacctccgatcgagcaacgaacagagcaagacgcttcataacgctaacgcggtgaaggagctgaagaagaagatggacgctgacgtcactgctgcgcttaagacggcgaggcgcttgaaaggaaacctcgaggctttagatcgggctaatgaagtcaaccgaagtttaccggaaagtggaccgggttcgtcgtcggaccggcaaagaacttcggtggttaacgggttgaggaagaagctgaaggatgagatggaaaaatttagtcgagtgagagaaacgatcacgaatgagtacaaagagacggttgggagaatgtgcttcaccgtcaccggcgaatatcccgacgaagctaccctcgagcgtctcatctccacaggtgaaagtgaaacatttttgcagaaagcgattcaagaacaaggtcgtggtaggattttggacactattagcgagatacaggagaggcacgacgcagtgaaagatattgagaagagtttgaatgagttgcaccaagtgtttcttgatatggctgtgttggttgagcatcagggtgcacagcttgatgacattgaaggcaacgtcaaacgagctaactcgcttgttcggtctggtgcggaccggcttgttaaggcacggttttatcagaagaacacacggaagtggacttgctttgccattttgctattgctcattattgtggttttaattgtggtgtttactgttaagccttgggagagtaatggtgggggaggtggaggtgcacctcgtcaagctactccggttcaagctcagccaccgccacctccggctgtgaatcggcggctactacgctaaataattttttttttgaggttccctctgtctatgcatgagcatatctatgttttgaagattgttttttattttacagtattttgtctttaatgtttttgtaatgttttggttggttaaactctgtgtatatataatgcgatcaccacatttctttgttttattatgg

SEQ ID NO: 23879 - protein, 341 aa, Arabidopsis thaliana
  peptide (1)..(341): Ceres Seq. ID no. 13495743
MNDLLSGSFKTSVADGSSPPHSHNIEMSKAKVSGGSCHGGNNLDTFFLDVEVVNEDLKELDRLCHNLRSSNEQSKTLHNANAVKELKKKMDADVTAALKTARRLKGNLEALDRANEVNRSLPESGPGSSSDRQRTSVVNGLRKKLKDEMEKFSRVRETITNEYKETVGRMCFTVTGEYPDEATLERLISTGESETFLQKAIQEQGRGRILDTISEIQERHDAVKDIEKSLNELHQVFLDMAVLVEHQGAQLDDIEGNVKRANSLVRSGADRLVKARFYQKNTRKWTCFAILLLLIIVVLIVVFTVKPWESNGGGGGGAPRQATPVQAQPPPPPAVNRRLLR

SEQ ID NO: 23880 - protein, 315 aa, Arabidopsis thaliana
  peptide (1)..(315): Ceres Seq. ID no. 13495744
MSKAKVSGGSCHGGNNLDTFFLDVEVVNEDLKELDRLCHNLRSSNEQSKTLHNANAVKELKKKMDADVTAALKTARRLKGNLEALDRANEVNRSLPESGPGSSSDRQRTSVVNGLRKKLKDEMEKFSRVRETITNEYKETVGRMCFTVTGEYPDEATLERLISTGESETFLQKAIQEQGRGRILDTISEIQERHDAVKDIEKSLNELHQVFLDMAVLVEHQGAQLDDIEGNVKRANSLVRSGADRLVKARFYQKNTRKWTCFAILLLLIIVVLIVVFTVKPWESNGGGGGGAPRQATPVQAQPPPPPAVNRRLLR

SEQ ID NO: 23881 - protein, 252 aa, Arabidopsis thaliana
  peptide (1)..(252): Ceres Seq. ID no. 13495745
MDADVTAALKTARRLKGNLEALDRANEVNRSLPESGPGSSSDRQRTSVVNGLRKKLKDEMEKFSRVRETITNEYKETVGRMCFTVTGEYPDEATLERLISTGESETFLQKAIQEQGRGRILDTISEIQERHDAVKDIEKSLNELHQVFLDMAVLVEHQGAQLDDIEGNVKRANSLVRSGADRLVKARFYQKNTRKWTCFAILLLLIIVVLIVVFTVKPWESNGGGGGGAPRQATPVQAQPPPPPAVNRRLLR

SEQ ID NO: 23882 - DNA, 1297 bp, Arabidopsis thaliana
  misc_feature (1)..(1297): Ceres Seq. ID no. 12577564
  misc_feature (1)..(1297): Ortholog of  Ceres SEQ ID NO 15177750 as cited in SEQ ID NO 57772
  misc_feature (1)..(1297): Ortholog of  Ceres SEQ ID NO 13596581 as cited in SEQ ID NO 62420
  misc_feature (1)..(1297): Ortholog of  Ceres SEQ ID NO 13591273 as cited in SEQ ID NO 65904
  misc_feature (1)..(1297): Ortholog of  Ceres SEQ ID NO 13623086 as cited in SEQ ID NO 0
cttcctgcgtcaatggcgactcaaggtcaggttatcacttgcaaagctgcggtggcttacgagccgaacaagcctctgtcatcgaagatgtgcaagtggctccacctcaagctggtgaggttcggatcaagatcctctacactgctctttgtcacaccgacgcttacacttggagcggcaaggatcctgaaggtctctttccttgtattctaggtcatgaggctgctgggattgttgagagtgttggtgaaggagtaactgaagttcaagctggagatcatgttatcccttgttatcaagctgagtgtcgtgaatgcaagttttgcaaatctgggaagactaacctttgtggcaaggtgagatctgctactggtgttgggattatgatgaatgaccgtaagtcgaggttctcggttaatgggaaacccatttatcacttcatgggtacttccacgtttagtcagtatactgttgttcatgatgttagcgtcgccaaaattgatcctactgctcctttggataaagtttgccttcttggatgtggtgttcccactggccttggagcagtttggaatactgcaaaagtagaaccagggtcaaatgttgccattttcggtcttggcactgttggacttgctgttgccgagggtgcgaaaacagctggtgcttcaaggatcattggcattgacatcgatagcaagaagtatgaaactgcaaagaagtttggtgttaacgaatttgtgaacccaaaggatcacgacaagccaattcaggaagtgattgtcgatctcactgatggcggtgttgactacagctttgagtgcatcgggaatgtctccgtaatgagagctgcattggagtgctgtcacaagggatggggaacttcggtcatagttggtgttgcagcatcaggacaagagatatcaactcgtccgttccaactcgtgactggccgtgtgtggaaaggaacagcttttggtggtttcaagagtcgaacccaagtgccttggcttgtagaaaagtacatgaacaaggagataaaagtggatgaatacataacacacaacttgaccttgggagaaatcaataaggctttcgatctattgcacgaaggtacttgccttcgttgtgtcctcgataccagcaaatgactatatgggtcctctctgctttaatctatgtgttcttgtgactttcgtcttttatcggtattgacatttcctaagagcaacagactactctactcttgtgtgtctcgtttctatcttatgcttcaataaaatatcaattaagacct

SEQ ID NO: 23883 - protein, 382 aa, Arabidopsis thaliana
  peptide (1)..(382): Ceres Seq. ID no. 12577565
SCVNGDSRSGYHLQSCGGLRAEQASVIEDVQVAPPQAGEVRIKILYTALCHTDAYTWSGKDPEGLFPCILGHEAAGIVESVGEGVTEVQAGDHVIPCYQAECRECKFCKSGKTNLCGKVRSATGVGIMMNDRKSRFSVNGKPIYHFMGTSTFSQYTVVHDVSVAKIDPTAPLDKVCLLGCGVPTGLGAVWNTAKVEPGSNVAIFGLGTVGLAVAEGAKTAGASRIIGIDIDSKKYETAKKFGVNEFVNPKDHDKPIQEVIVDLTDGGVDYSFECIGNVSVMRAALECCHKGWGTSVIVGVAASGQEISTRPFQLVTGRVWKGTAFGGFKSRTQVPWLVEKYMNKEIKVDEYITHNLTLGEINKAFDLLHEGTCLRCVLDTSK

SEQ ID NO: 23884 - protein, 255 aa, Arabidopsis thaliana; identical to SEQ ID NO: 22338
  peptide (1)..(255): Ceres Seq. ID no. 12577566

SEQ ID NO: 23885 - protein, 254 aa, Arabidopsis thaliana
  peptide (1)..(254): Ceres Seq. ID no. 12577567
MNDRKSRFSVNGKPIYHFMGTSTFSQYTVVHDVSVAKIDPTAPLDKVCLLGCGVPTGLGAVWNTAKVEPGSNVAIFGLGTVGLAVAEGAKTAGASRIIGIDIDSKKYETAKKFGVNEFVNPKDHDKPIQEVIVDLTDGGVDYSFECIGNVSVMRAALECCHKGWGTSVIVGVAASGQEISTRPFQLVTGRVWKGTAFGGFKSRTQVPWLVEKYMNKEIKVDEYITHNLTLGEINKAFDLLHEGTCLRCVLDTSK

SEQ ID NO: 23886 - DNA, 1403 bp, Arabidopsis thaliana
  misc_feature (1)..(1403): Ceres Seq. ID no. 12601443
  misc_feature (1)..(1403): Ortholog of  Ceres SEQ ID NO 14304969 as cited in SEQ ID NO 53193
  misc_feature (1)..(1403): Ortholog of  Ceres SEQ ID NO 14314851 as cited in SEQ ID NO 54014
  misc_feature (1)..(1403): Ortholog of  Ceres SEQ ID NO 14307442 as cited in SEQ ID NO 54239
  misc_feature (1)..(1403): Ortholog of  Ceres SEQ ID NO 15227214 as cited in SEQ ID NO 55368
  misc_feature (1)..(1403): Ortholog of  Ceres SEQ ID NO 13638897 as cited in SEQ ID NO 55839
  misc_feature (1)..(1403): Ortholog of  Ceres SEQ ID NO 15173484 as cited in SEQ ID NO 61804
  misc_feature (1)..(1403): Ortholog of  Ceres SEQ ID NO 13596958 as cited in SEQ ID NO 63319
  misc_feature (1)..(1403): Ortholog of  Ceres SEQ ID NO 12614573 as cited in SEQ ID NO 68344
  misc_feature (1)..(1403): Ortholog of  Ceres SEQ ID NO 12614814 as cited in SEQ ID NO 68816
  misc_feature (1)..(1403): Ortholog of  Ceres SEQ ID NO 13624040 as cited in SEQ ID NO 0
aaaatttaccactccttccatgtttttgtttctctcttcttcttgattgttgcgcttttgttagctttctctggttcattttccatggacggaccttgacctctctgcttcccttcgtgcattttctctctctcactatcctctctctttctagtgtttgtttgatcctctgcgtactctgttcttcttctctcttcagataaaacaagtcctgcatattgaagatctgatgtcttatcgattgctaagtgtggataaggatgaactggttacgtcaccttgtttgaaagaacgtaactacttgggtctctctgattgttcctctgttgatagctcaactattcccaatgttgttgggaagagcaatctcaatttcaaagctactgaactgaggctaggtcttcctgagtctcaatctcctgagagagagactgatttcggtttgctgagtccgagaacacccgatgagaagcttctcttcccgttgctaccttctaaagacaatggttctgctactacagggcataagaatgttgtttctggtaacaagagaggatttgctgacacttgggatgagttttcgggtgtgaaaggatctgttagacctggaggaggaatcaacatgatgttgtcgccgaaagttaaggatgtctcgaagagtattcaagaagaaagatctcatgctaagggtggcttgaacaatgcaccagctgccaaggcacaggttgttggttggcctccaatcagatcataccggaagaatacaatggcttcttctacttcgaagaacactgatgaggttgatgggaaacctggtcttggtgttctgtttgtgaaggtgagcatggatggtgctccgtatctgagaaaggtcgacttgagaacttacacttcctatcaacagttgtcttctgcacttgagaaaatgttcagctgcttcacccttggtcaatgtggtcttcatggtgctcaagggagggaaagaatgagcgagattaaactgaaggatcttcttcatggatcagaatttgtgcttacttatgaagataaagacggtgattggatgcttgttggcgatgttccatgggagatatttactgaaacatgccagaaactgaagatcatgaagggttctgattctattggcttagctccaggtgcagtggagaaatcgaagaacaaagagcgggtttgaaacgaagatgctcaagacaaaaaaaaaacactatgcacagttccaatgtttaagttttatttactgatgtgtttgaaaactctttagtctttttactaatttgtgttgtaagactttggattctcttatttgtgtgtgcttgttcaaaacaaatacattcttatgtgtgtgtttctactttgaccttcaagatatttcgtctctacgc

SEQ ID NO: 23887 - protein, 321 aa, Arabidopsis thaliana
  peptide (1)..(321): Ceres Seq. ID no. 12601444
MSYRLLSVDKDELVTSPCLKERNYLGLSDCSSVDSSTIPNVVGKSNLNFKATELRLGLPESQSPERETDFGLLSPRTPDEKLLFPLLPSKDNGSATTGHKNVVSGNKRGFADTWDEFSGVKGSVRPGGGINMMLSPKVKDVSKSIQEERSHAKGGLNNAPAAKAQVVGWPPIRSYRKNTMASSTSKNTDEVDGKPGLGVLFVKVSMDGAPYLRKVDLRTYTSYQQLSSALEKMFSCFTLGQCGLHGAQGRERMSEIKLKDLLHGSEFVLTYEDKDGDWMLVGDVPWEIFTETCQKLKIMKGSDSIGLAPGAVEKSKNKERV

SEQ ID NO: 23888 - protein, 190 aa, Arabidopsis thaliana
  peptide (1)..(190): Ceres Seq. ID no. 12601445
MMLSPKVKDVSKSIQEERSHAKGGLNNAPAAKAQVVGWPPIRSYRKNTMASSTSKNTDEVDGKPGLGVLFVKVSMDGAPYLRKVDLRTYTSYQQLSSALEKMFSCFTLGQCGLHGAQGRERMSEIKLKDLLHGSEFVLTYEDKDGDWMLVGDVPWEIFTETCQKLKIMKGSDSIGLAPGAVEKSKNKERV

SEQ ID NO: 23889 - protein, 189 aa, Arabidopsis thaliana
  peptide (1)..(189): Ceres Seq. ID no. 12601446
MLSPKVKDVSKSIQEERSHAKGGLNNAPAAKAQVVGWPPIRSYRKNTMASSTSKNTDEVDGKPGLGVLFVKVSMDGAPYLRKVDLRTYTSYQQLSSALEKMFSCFTLGQCGLHGAQGRERMSEIKLKDLLHGSEFVLTYEDKDGDWMLVGDVPWEIFTETCQKLKIMKGSDSIGLAPGAVEKSKNKERV

SEQ ID NO: 23890 - DNA, 1058 bp, Arabidopsis thaliana
  misc_feature (1)..(1058): Ceres Seq. ID no. 12340085
  misc_feature (1)..(1058): Ortholog of  Ceres SEQ ID NO 15172778 as cited in SEQ ID NO 59302
gttttcttctagactttgcagtcacagagatagtgagtgagatagagagagtgataatggcgagtggactaagcgagatcgggagcacgaagatgttcgatggctacaacaaaagatacaaacacttcagtgagacacttggatgttccatgaccttttccatctacttccctccttctgcttcttcttcccataaatctcctgtgctttactggctttctggcctcacctgcacggacgagaacttcattatcaaatcaggagctcaacgtgctgcttctactcacggcattgctcttgttgctccagacacttctccaagaggactaaatgttgaaggggaggcagacagttacgactttggtgtaggagccggattctacctcaatgctactcaggaaaagtggaagaactggcgtatgtatgactatgttgtcaaagagttgccaaaactcctgagtgaaaacttttcccagcttgacacaacaaaagcatctatatctggacactccatgggtggacatggagctcttactatatacctgaggaacctcgataaatacaagtctgtatctgcgtttgcaccaatcacgaatcccataaattgtgcatggggacagaaggcattcaccaattatctaggtgacaacaaagctgcttgggaggaatacgatgccacttgtcttatttcaaagtacaacaatctttctgcaacaattctaattgatcagggagaaaacgaccagttctaccctgatcagttattgcccagcaagtttgaggaggcgtgcaagaaagtgaatgcaccgctcttattgcgcctccatccaggatacgaccactcctactatttcattgccaccttcatcgaagaccacattagtcaccatgctcaagcccttgagctatagctcacttcatctgcttggaaaccggctttgggtttgtccaagtattagtatctcaataaagcaagtggacttgtaatgttttatgttcaataactcccctgtgtgctcttttgtctacgataataataagaaaatcatctttgctac

SEQ ID NO: 23891 - protein, 302 aa, Arabidopsis thaliana
  peptide (1)..(302): Ceres Seq. ID no. 12340086
FLLDFAVTEIVSEIERVIMASGLSEIGSTKMFDGYNKRYKHFSETLGCSMTFSIYFPPSASSSHKSPVLYWLSGLTCTDENFIIKSGAQRAASTHGIALVAPDTSPRGLNVEGEADSYDFGVGAGFYLNATQEKWKNWRMYDYVVKELPKLLSENFSQLDTTKASISGHSMGGHGALTIYLRNLDKYKSVSAFAPITNPINCAWGQKAFTNYLGDNKAAWEEYDATCLISKYNNLSATILIDQGENDQFYPDQLLPSKFEEACKKVNAPLLLRLHPGYDHSYYFIATFIEDHISHHAQALEL

SEQ ID NO: 23892 - protein, 284 aa, Arabidopsis thaliana
  peptide (1)..(284): Ceres Seq. ID no. 12340087
MASGLSEIGSTKMFDGYNKRYKHFSETLGCSMTFSIYFPPSASSSHKSPVLYWLSGLTCTDENFIIKSGAQRAASTHGIALVAPDTSPRGLNVEGEADSYDFGVGAGFYLNATQEKWKNWRMYDYVVKELPKLLSENFSQLDTTKASISGHSMGGHGALTIYLRNLDKYKSVSAFAPITNPINCAWGQKAFTNYLGDNKAAWEEYDATCLISKYNNLSATILIDQGENDQFYPDQLLPSKFEEACKKVNAPLLLRLHPGYDHSYYFIATFIEDHISHHAQALEL

SEQ ID NO: 23893 - protein, 272 aa, Arabidopsis thaliana
  peptide (1)..(272): Ceres Seq. ID no. 12340088
MFDGYNKRYKHFSETLGCSMTFSIYFPPSASSSHKSPVLYWLSGLTCTDENFIIKSGAQRAASTHGIALVAPDTSPRGLNVEGEADSYDFGVGAGFYLNATQEKWKNWRMYDYVVKELPKLLSENFSQLDTTKASISGHSMGGHGALTIYLRNLDKYKSVSAFAPITNPINCAWGQKAFTNYLGDNKAAWEEYDATCLISKYNNLSATILIDQGENDQFYPDQLLPSKFEEACKKVNAPLLLRLHPGYDHSYYFIATFIEDHISHHAQALEL

SEQ ID NO: 23894 - DNA, 1764 bp, Arabidopsis thaliana
  misc_feature (1)..(1764): Ceres Seq. ID no. 13487561
  misc_feature (1)..(1764): Ortholog of  Ceres SEQ ID NO 13659971 as cited in SEQ ID NO 67565
tgctctctcgattgactttattgactgagagaaagcttttgacaatgggccacagacacagcaagtccaaatcctccgatccgccaccgtcctcctcctcctcttcctccggcaacgtagtccaccatgttaaacctgccggagaacgccgcggatcatccggttccggaaccgtcggatcgtcaggctccggaacaggcggatctcgttccaccacatctactcagcagaatggtcggatcttaggtcggccgatggaggaagtacggagaacctatgagtttggtcgtgagcttggtcgtggccagtttggtgtcacgtacctcgtaactcacaaagagacgaaacaacaggtcgcttgcaagtcaatccctacgcgccgccttgttcacaaagacgacattgaagatgttcgccgtgaagtccagattatgcaccatctcagcggtcaccggaacatagtggacttgaagggagcctacgaggacagacactctgtgaatctgataatggagttgtgtgaaggaggggaattgttcgataggatcatttctaaaggtctttactcagagagagctgctgcggatttgtgtaggcagatggtgatggttgtgcatagttgtcattctatgggtgtaatgcaccgagacttgaagcccgaaaactttctctttcttagtaaagatgagaactcaccattgaaagctacagactttggtctctctgtcttcttcaagccaggtgataagtttaaggatcttgttggaagtgcatactatgttgccccagaagttctaaaacggaactatggaccagaggctgatatctggagtgctggtgtgattctatacatccttctcagtggtgttccgcctttctggggagaaaatgaaacggggatctttgatgccattcttcaagggcaacttgatttttcagctgatccatggccagcactatcagatggtgccaaagatcttgtgaggaaaatgttaaaatatgaccctaaagatcggcttacagctgcggaagtgctaaatcatccgtggattagagaagatggggaggcatcagacaaaccgcttgacaatgcggtgttatccaggatgaaacaattccgggcgatgaacaaactaaaaaaaatggccctgaaggttatcgctgagaacctttctgaagaagaaatcattggtcttaaagagatgttcaaatctctagacactgataacaatggaatagtcaccttggaggaattgagaaccggtctcccaaaacttggttcaaagatctctgaagctgaaataaggcagttaatggaagcagctgatatggatggagatggatcaattgattacttggagtttatatcagccacaatgcatatgaacagaatcgaacgtgaggatcacttgtacaccgcattccagttctttgacaatgacaacagcggctacataacaatggaagagctagagctagccatgaagaaatacaacatgggtgatgataaatccatcaaagagatcattgctgaagtagacaccgatcgtgacggaaaaatcaactacgaagaatttgtagcgatgatgaagaagggaaatccagaattggtgccaaaccgacgcagaatgtgagagatcttttgatgttgtttgtttgtttttggttatcactttactcaaactttgtgtttctgttacaatcaattattttgtttcctgcaatctctttttatcaacacaacataaaaaatactttgagatc

SEQ ID NO: 23895 - protein, 543 aa, Arabidopsis thaliana
  peptide (1)..(543): Ceres Seq. ID no. 13487562
LSRLTLLTERKLLTMGHRHSKSKSSDPPPSSSSSSSGNVVHHVKPAGERRGSSGSGTVGSSGSGTGGSRSTTSTQQNGRILGRPMEEVRRTYEFGRELGRGQFGVTYLVTHKETKQQVACKSIPTRRLVHKDDIEDVRREVQIMHHLSGHRNIVDLKGAYEDRHSVNLIMELCEGGELFDRIISKGLYSERAAADLCRQMVMVVHSCHSMGVMHRDLKPENFLFLSKDENSPLKATDFGLSVFFKPGDKFKDLVGSAYYVAPEVLKRNYGPEADIWSAGVILYILLSGVPPFWGENETGIFDAILQGQLDFSADPWPALSDGAKDLVRKMLKYDPKDRLTAAEVLNHPWIREDGEASDKPLDNAVLSRMKQFRAMNKLKKMALKVIAENLSEEEIIGLKEMFKSLDTDNNGIVTLEELRTGLPKLGSKISEAEIRQLMEAADMDGDGSIDYLEFISATMHMNRIEREDHLYTAFQFFDNDNSGYITMEELELAMKKYNMGDDKSIKEIIAEVDTDRDGKINYEEFVAMMKKGNPELVPNRRRM

SEQ ID NO: 23896 - protein, 529 aa, Arabidopsis thaliana
  peptide (1)..(529): Ceres Seq. ID no. 13487563
MGHRHSKSKSSDPPPSSSSSSSGNVVHHVKPAGERRGSSGSGTVGSSGSGTGGSRSTTSTQQNGRILGRPMEEVRRTYEFGRELGRGQFGVTYLVTHKETKQQVACKSIPTRRLVHKDDIEDVRREVQIMHHLSGHRNIVDLKGAYEDRHSVNLIMELCEGGELFDRIISKGLYSERAAADLCRQMVMVVHSCHSMGVMHRDLKPENFLFLSKDENSPLKATDFGLSVFFKPGDKFKDLVGSAYYVAPEVLKRNYGPEADIWSAGVILYILLSGVPPFWGENETGIFDAILQGQLDFSADPWPALSDGAKDLVRKMLKYDPKDRLTAAEVLNHPWIREDGEASDKPLDNAVLSRMKQFRAMNKLKKMALKVIAENLSEEEIIGLKEMFKSLDTDNNGIVTLEELRTGLPKLGSKISEAEIRQLMEAADMDGDGSIDYLEFISATMHMNRIEREDHLYTAFQFFDNDNSGYITMEELELAMKKYNMGDDKSIKEIIAEVDTDRDGKINYEEFVAMMKKGNPELVPNRRRM

SEQ ID NO: 23897 - protein, 459 aa, Arabidopsis thaliana
  peptide (1)..(459): Ceres Seq. ID no. 13487564
MEEVRRTYEFGRELGRGQFGVTYLVTHKETKQQVACKSIPTRRLVHKDDIEDVRREVQIMHHLSGHRNIVDLKGAYEDRHSVNLIMELCEGGELFDRIISKGLYSERAAADLCRQMVMVVHSCHSMGVMHRDLKPENFLFLSKDENSPLKATDFGLSVFFKPGDKFKDLVGSAYYVAPEVLKRNYGPEADIWSAGVILYILLSGVPPFWGENETGIFDAILQGQLDFSADPWPALSDGAKDLVRKMLKYDPKDRLTAAEVLNHPWIREDGEASDKPLDNAVLSRMKQFRAMNKLKKMALKVIAENLSEEEIIGLKEMFKSLDTDNNGIVTLEELRTGLPKLGSKISEAEIRQLMEAADMDGDGSIDYLEFISATMHMNRIEREDHLYTAFQFFDNDNSGYITMEELELAMKKYNMGDDKSIKEIIAEVDTDRDGKINYEEFVAMMKKGNPELVPNRRRM

SEQ ID NO: 23898 - DNA, 1099 bp, Arabidopsis thaliana
  misc_feature (1)..(1099): Ceres Seq. ID no. 12331129
  misc_feature (1)..(1099): Ortholog of  Ceres SEQ ID NO 15169809 as cited in SEQ ID NO 52839
  misc_feature (1)..(1099): Ortholog of  Ceres SEQ ID NO 15224302 as cited in SEQ ID NO 53942
acaacaaatcgtctccgtcttcctcgctcagcttcaacaaccagagccgacttgagattgagaatcaacgtaatcgatactctcgcaaagtctcatcctttctcagcaaaaaacactaggaaatggttgaaaggcatggagagttttgatttgctgcttaagatatatcatgtcgcagtgcgttgacggtatcaagcatttatgcacctctgttttagggtgttttgatcttgatttgtataaacaatctggtggccttggagatcctgaattgcttgcaagagacactgtttttagtgtgagtgaaatagaagctctttatgagctttttaagaaaatcagcagtgccgtgattgatgatgggctaataaacaaggaagagtttcagttggctttgtttaagacaaataaaaaagagagtttgtttgcagatcgggttttcgatttgtttgatacaaagcacaatggaatactggggtttgaggaatttgctcgtgctctctccgtctttcacccaaatgcgcctatagatgacaaaattcacttttcatttcagctatatgatcttaaacagcaagggtttatcgaacggcaagaggtgaaacaaatggttgtcgctacgcttgctgaatctggaatgaatttgaaggatactgtcattgaggatataatcgacaagacgtttgaggaagcagacacaaaacacgatggaaagatcgataaggaagagtggagaagccttgttcttagacatcccagccttctgaagaacatgactcttcaatatctcaaggatatcacgactacgtttccaagctttgtgttccattctcaggttgaagatacctgaaaaagcaaaagcaaaagcaagcagcggcaagacatcattgtattgttgaaggttgttctttcgttatggttctttatttgttacatttctaaatctctgaactcattttattttttattgagctttttttgtgaagcaaaattcttctttttagtttggtttttgtcctttttgatttcgctcggtctatctgtagatacaacttttgcatcttgatgttatggtaatgtaaagtttttcagtttattc

SEQ ID NO: 23899 - protein, 226 aa, Arabidopsis thaliana
  peptide (1)..(226): Ceres Seq. ID no. 12331130
MSQCVDGIKHLCTSVLGCFDLDLYKQSGGLGDPELLARDTVFSVSEIEALYELFKKISSAVIDDGLINKEEFQLALFKTNKKESLFADRVFDLFDTKHNGILGFEEFARALSVFHPNAPIDDKIHFSFQLYDLKQQGFIERQEVKQMVVATLAESGMNLKDTVIEDIIDKTFEEADTKHDGKIDKEEWRSLVLRHPSLLKNMTLQYLKDITTTFPSFVFHSQVEDT

SEQ ID NO: 23900 - DNA, 1294 bp, Arabidopsis thaliana
  misc_feature (1)..(1294): Ceres Seq. ID no. 13487716
  misc_feature (1)..(1294): Ortholog of  Ceres SEQ ID NO 12636774 as cited in SEQ ID NO 372
  misc_feature (1)..(1294): Ortholog of  Ceres SEQ ID NO 12578315 as cited in SEQ ID NO 62451
  misc_feature (1)..(1294): Ortholog of  Ceres SEQ ID NO 12615466 as cited in SEQ ID NO 62761
  misc_feature (1)..(1294): Ortholog of  Ceres SEQ ID NO 13597295 as cited in SEQ ID NO 63743
  misc_feature (1)..(1294): Ortholog of  Ceres SEQ ID NO 12617090 as cited in SEQ ID NO 64005
  misc_feature (1)..(1294): Ortholog of  Ceres SEQ ID NO 13597439 as cited in SEQ ID NO 64081
  misc_feature (1)..(1294): Ortholog of  Ceres SEQ ID NO 13597233 as cited in SEQ ID NO 64370
  misc_feature (1)..(1294): Ortholog of  Ceres SEQ ID NO 13584577 as cited in SEQ ID NO 65298
  misc_feature (1)..(1294): Ortholog of  Ceres SEQ ID NO 13599438 as cited in SEQ ID NO 0
tggtcttacgagagaccaaaacgatggagagcacgaagattgctccttcattcgatcgtgccagtgagcttaaagctttcgatgagacgaagactggtgtgaaaggactcgttgactctggaatctcaaagattccacgcattttccatcactcatctgtcgaactagcaaaccctaaaccacttccctcggacctgctacatctcaagacgatcccaacgatcgatctcggaggacgggacttccaggacgcgattaagcacaagaacgcgattgaagggattaaagaagcagctgccaagtggggtttcttccaagtgatcaaccatggagtttcgctcgagcttcttgagaagatgaaagatggagttcgtgactttcatgagcaacctcctgaagtgaggaaagatttgtacagccgcgatttcggcagaaagtttatctatttaagtaatttcgatctctacactgctgcagctgcgaattggagagacacattctattgttacatggctccagatcctccagaaccacaggatctgccagagatttgtagggatgttatgatggaatactcaaagcaagtgatgattttgggtgaatttctgtttgagcttttgtcagaagcactagggttgaaccctaatcacctcaaggacatggagtgcttaaagggtttgcgcatgctttgccactacttcccaccgtgtccggagcctgacctaacttttggcacaagtaagcactccgacggctcttttcttaccgtccttctaccagataacatagaagggcttcaggtttgtcgtgagggatactggttcgatgttcctcatgttcccggcgctctcatcatcaacatcggagatcttctgcagcttataacaaacgacaagttcatcagtttgaagcatagagtattggcgaacagagccacaagagctcgagtctctgtcgcatgtttcttccatacccacgtaaaaccaaatcctagagtgtacggacccattaaagagcttgtgtccgaagaaaatcctccaaagtacagagagaccaccatcagagattacgctacttacttcaatggcaaaggacttggcgggacctctgctttgctggattttaaagtatgaatcatgccgagctactactttctcacagatatacgacatgacattatatgtaacatgttggagatgtgtgaaccaaatgtggaatttatgtattgaacattgtcatcaaggtttggtccaaataaagtgtaatcggatatggttaatcaattggattacgc

SEQ ID NO: 23901 - protein, 376 aa, Arabidopsis thaliana
  peptide (1)..(376): Ceres Seq. ID no. 13487717
VLRETKTMESTKIAPSFDRASELKAFDETKTGVKGLVDSGISKIPRIFHHSSVELANPKPLPSDLLHLKTIPTIDLGGRDFQDAIKHKNAIEGIKEAAAKWGFFQVINHGVSLELLEKMKDGVRDFHEQPPEVRKDLYSRDFGRKFIYLSNFDLYTAAAANWRDTFYCYMAPDPPEPQDLPEICRDVMMEYSKQVMILGEFLFELLSEALGLNPNHLKDMECLKGLRMLCHYFPPCPEPDLTFGTSKHSDGSFLTVLLPDNIEGLQVCREGYWFDVPHVPGALIINIGDLLQLITNDKFISLKHRVLANRATRARVSVACFFHTHVKPNPRVYGPIKELVSEENPPKYRETTIRDYATYFNGKGLGGTSALLDFKV

SEQ ID NO: 23902 - protein, 369 aa, Arabidopsis thaliana
  peptide (1)..(369): Ceres Seq. ID no. 13487718
MESTKIAPSFDRASELKAFDETKTGVKGLVDSGISKIPRIFHHSSVELANPKPLPSDLLHLKTIPTIDLGGRDFQDAIKHKNAIEGIKEAAAKWGFFQVINHGVSLELLEKMKDGVRDFHEQPPEVRKDLYSRDFGRKFIYLSNFDLYTAAAANWRDTFYCYMAPDPPEPQDLPEICRDVMMEYSKQVMILGEFLFELLSEALGLNPNHLKDMECLKGLRMLCHYFPPCPEPDLTFGTSKHSDGSFLTVLLPDNIEGLQVCREGYWFDVPHVPGALIINIGDLLQLITNDKFISLKHRVLANRATRARVSVACFFHTHVKPNPRVYGPIKELVSEENPPKYRETTIRDYATYFNGKGLGGTSALLDFKV

SEQ ID NO: 23903 - protein, 258 aa, Arabidopsis thaliana
  peptide (1)..(258): Ceres Seq. ID no. 13487719
MKDGVRDFHEQPPEVRKDLYSRDFGRKFIYLSNFDLYTAAAANWRDTFYCYMAPDPPEPQDLPEICRDVMMEYSKQVMILGEFLFELLSEALGLNPNHLKDMECLKGLRMLCHYFPPCPEPDLTFGTSKHSDGSFLTVLLPDNIEGLQVCREGYWFDVPHVPGALIINIGDLLQLITNDKFISLKHRVLANRATRARVSVACFFHTHVKPNPRVYGPIKELVSEENPPKYRETTIRDYATYFNGKGLGGTSALLDFKV

SEQ ID NO: 23904 - DNA, 1101 bp, Arabidopsis thaliana
  misc_feature (1)..(1101): Ceres Seq. ID no. 12338473
  misc_feature (1)..(1101): Ortholog of  Ceres SEQ ID NO 14305357 as cited in SEQ ID NO 60046
  misc_feature (1)..(1101): Ortholog of  Ceres SEQ ID NO 14313511 as cited in SEQ ID NO 64459
  misc_feature (1)..(1101): Ortholog of  Ceres SEQ ID NO 14303006 as cited in SEQ ID NO 67498
  misc_feature (1)..(1101): Ortholog of  Ceres SEQ ID NO 13599627 as cited in SEQ ID NO 0
  misc_feature (1)..(1101): Ortholog of  Ceres SEQ ID NO 14305069 as cited in SEQ ID NO 0
aggaagattatttgacattttaagtaagaacagctagctttgccatctccctaaaggcaataaatctcggatccactttcacgatattttgatattttttctatttataatctttctgggttttgcgtcttttgaaggctgaattgctctgaaatctcaattgtataatcatctcctgggtcgtcgttatcgtgatcatctagaagaaagcatgactacactagatttgaccagagccgagcttgctcttattgttctctatttgaacaaagctgaggctagagataagatatgcagagctatccaatatggttccaaattcttgagcggtggccaacctggtactgctcaaactgtcgacaaaaacaccagcttggcgagaaaagttttccgtcttttcaagtttgtcaatgattttcacggtcttatcagccccgtgcctaaagggactccacttcctcttgtcttactcgggaagtcgaagaatgcgctcttgtctacctttttgtttcttgatcaaatcgtctggcttggtagatccggcatatacaagaacaaagaacgaactgaattgcttggacgtatatcacttttctgctggctgggatcatccgtttgtacaagtgcagtcgagattggtgagcttggaaggctctcttcatctatgaagaagatggaaaaggaactcaaagctgatgatgagctgtatcgtgctaagcttcagaaatcaaacgacagaactctagctttgattaaatcaagcatggacattattgtagccattggtctccttcagttagctccaaagacgattagtcctcgtgtcactggtgctttcgggtttaccacctcacttatctcttgttatcagttgcttccatcgcgccccaagttgaagacaccttgaagaaggaataagcttgttctctagactttcagaataattgtttcatattcatcagtaaacctattgtgttcaggtattctaaggagtctatgttcctcctttgaatgaatttgctgctcttataacgcgtttgcaagaataatgataagttttagaataagattattatgatacatcttcaagattttttgatt

SEQ ID NO: 23905 - protein, 231 aa, Arabidopsis thaliana
  peptide (1)..(231): Ceres Seq. ID no. 12338474
MTTLDLTRAELALIVLYLNKAEARDKICRAIQYGSKFLSGGQPGTAQTVDKNTSLARKVFRLFKFVNDFHGLISPVPKGTPLPLVLLGKSKNALLSTFLFLDQIVWLGRSGIYKNKERTELLGRISLFCWLGSSVCTSAVEIGELGRLSSSMKKMEKELKADDELYRAKLQKSNDRTLALIKSSMDIIVAIGLLQLAPKTISPRVTGAFGFTTSLISCYQLLPSRPKLKTP

SEQ ID NO: 23906 - DNA, 1153 bp, Arabidopsis thaliana
  misc_feature (1)..(1153): Ceres Seq. ID no. 13495746
  misc_feature (1)..(1153): Ortholog of  Ceres SEQ ID NO 15169703 as cited in SEQ ID NO 59628
agcccctttcccaatatttgatcaatttctaaagaaaaccccttcctctactagtcctcctcctatatatacaaaatcttaagaaatctctctacttgtttcctctgttatcataatctcttctctctatatctcttctcttcttcttttaccctgtttttttttttcattccacagagcccaggttgattgattttgttattcagagatatggggagaggaaggattgagattaagaagattgagaatatcaacagtcgtcaagtcactttctctaagagacgaaacggtttgatcaagaaggctaaagagctttcgattctctgtgacgccgaggttgctcttatcatcttctccagcaccggcaagatttacgatttctccagcgtctgtatggagcaaattctttctagatatggatacactactgcgtccactgagcataaacaacaaagagaacaccaacttctaatttgtgcttcacatggaaatgaagctgtgttgcgaaatgatgattctatgaaggtggaacttgaaagattacagcttgcaattgagagacttaagggtaaggagcttgaaggtatgagtttcccggatcttatttcttttgaaaaccagttgaacgagagcttgcatagtgtcaaggatcaaaagacacaaatcctgctcaaccagattgagagatccaggatacaggagaaaaaagcattggaagaaaaccaaatcttgcgcaaacaggttgagatgttggggagaggttcaggaccaaaagtgttgaatgaaaggcctcaagattctagcccagaagccgatcccgagagctcttcatcagaagaggatgagaatgacaacgaggagcaccattccgacacttccttgcagttggggttgtcgtcgacggggtattgcacaaagagaaagaagccgaagatcgaactggtctgcgataactctgggagtcaagtggcttctgattgatggaatcgattatttttctaattctggttgtttaggggtctctatgtgtcttcttgtttctggctgttcttttgctttatttcatctcaagtagagttttcttaatgtttaggtggaacatttttccataatcaagaagggatttgatcaatcaataacattagattttctt

SEQ ID NO: 23907 - protein, 256 aa, Arabidopsis thaliana
  peptide (1)..(256): Ceres Seq. ID no. 13495747
MGRGRIEIKKIENINSRQVTFSKRRNGLIKKAKELSILCDAEVALIIFSSTGKIYDFSSVCMEQILSRYGYTTASTEHKQQREHQLLICASHGNEAVLRNDDSMKVELERLQLAIERLKGKELEGMSFPDLISFENQLNESLHSVKDQKTQILLNQIERSRIQEKKALEENQILRKQVEMLGRGSGPKVLNERPQDSSPEADPESSSSEEDENDNEEHHSDTSLQLGLSSTGYCTKRKKPKIELVCDNSGSQVASD

SEQ ID NO: 23908 - protein, 195 aa, Arabidopsis thaliana
  peptide (1)..(195): Ceres Seq. ID no. 13495748
MEQILSRYGYTTASTEHKQQREHQLLICASHGNEAVLRNDDSMKVELERLQLAIERLKGKELEGMSFPDLISFENQLNESLHSVKDQKTQILLNQIERSRIQEKKALEENQILRKQVEMLGRGSGPKVLNERPQDSSPEADPESSSSEEDENDNEEHHSDTSLQLGLSSTGYCTKRKKPKIELVCDNSGSQVASD

SEQ ID NO: 23909 - protein, 153 aa, Arabidopsis thaliana
  peptide (1)..(153): Ceres Seq. ID no. 13495749
MKVELERLQLAIERLKGKELEGMSFPDLISFENQLNESLHSVKDQKTQILLNQIERSRIQEKKALEENQILRKQVEMLGRGSGPKVLNERPQDSSPEADPESSSSEEDENDNEEHHSDTSLQLGLSSTGYCTKRKKPKIELVCDNSGSQVASD

SEQ ID NO: 23910 - DNA, 1396 bp, Arabidopsis thaliana
  misc_feature (1)..(1396): Ceres Seq. ID no. 12394721
  misc_feature (1)..(1396): Ortholog of  Ceres SEQ ID NO 13639663 as cited in SEQ ID NO 57850
aatcgtttccacgaaaacaagtagagagagtgattcgagttttccaatcataaaaatcagcgaagaagatcttcgttcttgttcattctgtgaggtttcattgttaaaatcgaaacgaatctcaggttggagtaatccttgggagagatccgatttccgtttccatggcgattcggtggtcggagctgtgtatcgtactgttcgctctttcctacgccatctgcgtccttgccgggaagagttactacgatgtgttgcaagtcccgaaaggtgcatctgatgaacagatcaagagagcttataggaaactagctttgaagtatcatcccgataagaatcaaggaaatgaggaagcgactcgcaaattcgctgagatcaacaatgcttatgaagtgttatcggatgaggagaagagggagatatataacaagtatggtgaagagggacttaaacagttttctgcaaatggaggaagaggaggaggaggaggcggcatgaatatgcaggacatcttcagctcgttttttggtggaggttcgatggaggaagaagagaaggttgtcaagggggatgacgtaattgtggaacttgaggcaactctagaagatttgtacatgggaggctctatgaaggtatggagggaaaagaatgtgataaaaccagctcctggaaagagaaagtgtaactgcaggaacgaggtctatcacagacaaattggtcctggaatgttccaacagatgacagagcaggtctgtgacaaatgccctaatgtcaaatacgaacgggagggatactttgtgacagttgatatcgagaaaggaatgaaagatggagaagaagtgtctttctatgaagacggcgaacccattcttgacggtgaccctggtgaccttaagttccgaatcagaactgcaccacatgcccgtttcagaagggatggcaacgatctacacatgaacgtgaacattacactggttgaggcgctagttggttttgagaaatcattcaaacacttggatgatcacgaagttgacatcagttccaagggaattacaaagccgaaggaagtaaagaagttcaaaggagaagggatgccacttcactacagcacaaagaaaggcaacctctttgtcacttttgaggttttgtttccgtcttctctcactgacgatcagaagaagaagattaaagaagtctttgcttagtgctcttctctcgctttcgctctctctctctttagaagtttggggattaaagagaagaacatgtgatggtcctaatgtataacatgattaggttttaatatagaaagaaaaaagatatggggagacaaagtcggaaggacgttttgatcaagttgtcatttttgtttgctctttgttaatcatattagtgt

SEQ ID NO: 23911 - protein, 346 aa, Arabidopsis thaliana
  peptide (1)..(346): Ceres Seq. ID no. 12394722
MAIRWSELCIVLFALSYAICVLAGKSYYDVLQVPKGASDEQIKRAYRKLALKYHPDKNQGNEEATRKFAEINNAYEVLSDEEKREIYNKYGEEGLKQFSANGGRGGGGGGMNMQDIFSSFFGGGSMEEEEKVVKGDDVIVELEATLEDLYMGGSMKVWREKNVIKPAPGKRKCNCRNEVYHRQIGPGMFQQMTEQVCDKCPNVKYEREGYFVTVDIEKGMKDGEEVSFYEDGEPILDGDPGDLKFRIRTAPHARFRRDGNDLHMNVNITLVEALVGFEKSFKHLDDHEVDISSKGITKPKEVKKFKGEGMPLHYSTKKGNLFVTFEVLFPSSLTDDQKKKIKEVFA

SEQ ID NO: 23912 - protein, 236 aa, Arabidopsis thaliana
  peptide (1)..(236): Ceres Seq. ID no. 12394723
MNMQDIFSSFFGGGSMEEEEKVVKGDDVIVELEATLEDLYMGGSMKVWREKNVIKPAPGKRKCNCRNEVYHRQIGPGMFQQMTEQVCDKCPNVKYEREGYFVTVDIEKGMKDGEEVSFYEDGEPILDGDPGDLKFRIRTAPHARFRRDGNDLHMNVNITLVEALVGFEKSFKHLDDHEVDISSKGITKPKEVKKFKGEGMPLHYSTKKGNLFVTFEVLFPSSLTDDQKKKIKEVFA

SEQ ID NO: 23913 - protein, 234 aa, Arabidopsis thaliana
  peptide (1)..(234): Ceres Seq. ID no. 12394724
MQDIFSSFFGGGSMEEEEKVVKGDDVIVELEATLEDLYMGGSMKVWREKNVIKPAPGKRKCNCRNEVYHRQIGPGMFQQMTEQVCDKCPNVKYEREGYFVTVDIEKGMKDGEEVSFYEDGEPILDGDPGDLKFRIRTAPHARFRRDGNDLHMNVNITLVEALVGFEKSFKHLDDHEVDISSKGITKPKEVKKFKGEGMPLHYSTKKGNLFVTFEVLFPSSLTDDQKKKIKEVFA

SEQ ID NO: 23914 - DNA, 1087 bp, Arabidopsis thaliana
  misc_feature (1)..(1087): Ceres Seq. ID no. 12322036
  misc_feature (1)..(1087): Ortholog of  Ceres SEQ ID NO 13596643 as cited in SEQ ID NO 62565
  misc_feature (1)..(1087): Ortholog of  Ceres SEQ ID NO 13597550 as cited in SEQ ID NO 65037
cttcttctcctcttcttctcgacgacgaaagagaaagagagaaaacaccgaagcgacgaagaagaagattataatctaatctctccttcgtgtagtttagcgaagagtgatgcgattttcttctggcgtttgatttcgttttctcgagttgttgtgcgggggagagattgattagaattagagatgatagtttcgtgatttcagatgaatttctggggacatttgtgccgattctggtgtattgggtgtattcagggatgtacatttgcttaggatctttggataaatatagattgcattcgaagatagatgaggatgagaagaatctcgtttctaaatctgccgtcgttaagggcgttcttcttcaacagactcttcaggctattatctccgttattctcttcaagataacaggaagtgatgcagatgctgctacgacacagcaattttccattctacttctggctaggcagtttatcatcgctatgcttgtaattgacacttggcaatatttcattcatcgatatatgcacctcaacaagttcttatacaagcacatccactctcagcatcatcgccttattgtgccttattcgtatggagctctatacaaccatccactagaaggtcttctcttggacactattggtggtgctttgtctttcctcttctctggtatgtccccaagaacagccatctttttcttctccttcgctaccatcaaaacagtagatgatcattgtggactatggcttccgggaaatccatttcacatcttcttcagtaataactctgcttaccatgatgttcaccaccaactctatgtaaccaaatacaacttctcgcagccattctttgttatgtgggataggattctcggcacttacttgccttattcattggagaaaagagccaatggaggatttgaaacacggccaatcaaagtatccaaagatgagtaatttctctttctttcttttggggcttcttgtcaatgctaagtcatcattttgctcgttagagaaccactgtaacctttgcgtacttgtaattgtacatacaattccaatctatccttttttcgatc

SEQ ID NO: 23915 - protein, 234 aa, Arabidopsis thaliana
  peptide (1)..(234): Ceres Seq. ID no. 12322037
MYICLGSLDKYRLHSKIDEDEKNLVSKSAVVKGVLLQQTLQAIISVILFKITGSDADAATTQQFSILLLARQFIIAMLVIDTWQYFIHRYMHLNKFLYKHIHSQHHRLIVPYSYGALYNHPLEGLLLDTIGGALSFLFSGMSPRTAIFFFSFATIKTVDDHCGLWLPGNPFHIFFSNNSAYHDVHHQLYVTKYNFSQPFFVMWDRILGTYLPYSLEKRANGGFETRPIKVSKDE

SEQ ID NO: 23916 - protein, 158 aa, Arabidopsis thaliana
  peptide (1)..(158): Ceres Seq. ID no. 12322038
MLVIDTWQYFIHRYMHLNKFLYKHIHSQHHRLIVPYSYGALYNHPLEGLLLDTIGGALSFLFSGMSPRTAIFFFSFATIKTVDDHCGLWLPGNPFHIFFSNNSAYHDVHHQLYVTKYNFSQPFFVMWDRILGTYLPYSLEKRANGGFETRPIKVSKDE

SEQ ID NO: 23917 - protein, 144 aa, Arabidopsis thaliana
  peptide (1)..(144): Ceres Seq. ID no. 12322039
MHLNKFLYKHIHSQHHRLIVPYSYGALYNHPLEGLLLDTIGGALSFLFSGMSPRTAIFFFSFATIKTVDDHCGLWLPGNPFHIFFSNNSAYHDVHHQLYVTKYNFSQPFFVMWDRILGTYLPYSLEKRANGGFETRPIKVSKDE

SEQ ID NO: 23918 - DNA, 1155 bp, Arabidopsis thaliana
  misc_feature (1)..(1155): Ceres Seq. ID no. 12339505
  misc_feature (1)..(1155): Ortholog of  Ceres SEQ ID NO 13599444 as cited in SEQ ID NO 517
  misc_feature (1)..(1155): Ortholog of  Ceres SEQ ID NO 15169431 as cited in SEQ ID NO 60449
  misc_feature (1)..(1155): Ortholog of  Ceres SEQ ID NO 12615444 as cited in SEQ ID NO 62593
  misc_feature (1)..(1155): Ortholog of  Ceres SEQ ID NO 14302204 as cited in SEQ ID NO 63150
ctctctcgtcgtctcaaatctcttcttccttcttcttctctctcgattcaagataatccacacgcaaaaatgggaagccaacaagcggctgtttcgttcctttccaatttggcgaaggctgctttcggtcttggaacggcggcgacggtgctgaatacatcgcttttcaccgttgacggcggagaaagagctgttatcttcgatcgattcaggggagtgatggatcagactgtgggtgaagggactcatttcttgatcccgattcttcagaggcctcacatcttcgatatccgcacgaagcctcacacgttctcttcaatctctggtactaaggatctccagatggttaatctcactcttcgtgttctctctcgtcctgaggtgtcgcgtctcccgtacatcttccaaactttgggtctagagtatgacgagaaggttcttccttcgattggaaatgaggttttgaaagctgtggttgcacagttcaacgctgaccagcttctcactgagcgtcctcacgtctcagcacttgttcgggagtcactaatcacccgtgcgaaggacttcaacattgtgcttgatgatgtagctatcacgcatttgtcctatggtgtggagttttcaagggctgttgagcagaaacaagtggctcagcaagaggcagagaggtctaagtttgttgtgatgaaggctgatcaagagaggagagctgcggttataagagctgaaggtgaaagtgaagctgctcagttgatttctgatgctacggctaaagctggtatgggacttatcgagcttaggaggattgaagcttcaagggagattgcgtctacacttgctaggtctcctaatgtggcctacttacccggtggccagagcatgctctttgccctgaaccgttgatcttgatcagatatgatggttgtttgggagcattttgcgatattttaatgatcaagttgtgaatctgattgaatcaaaaaggtgaaatgctcttttgttttgatgaactctgaagaagaaaaagaaactagttgtttgagttgtcattattgtgttctgaatctcggcaaaatttactctacctgaagaatctttgttttcagcatcatgtttatctaattctcaacaaataaatgattttggctgaactgt

SEQ ID NO: 23919 - protein, 300 aa, Arabidopsis thaliana
  peptide (1)..(300): Ceres Seq. ID no. 12339506
LSRRLKSLLPSSSLSIQDNPHAKMGSQQAAVSFLSNLAKAAFGLGTAATVLNTSLFTVDGGERAVIFDRFRGVMDQTVGEGTHFLIPILQRPHIFDIRTKPHTFSSISGTKDLQMVNLTLRVLSRPEVSRLPYIFQTLGLEYDEKVLPSIGNEVLKAVVAQFNADQLLTERPHVSALVRESLITRAKDFNIVLDDVAITHLSYGVEFSRAVEQKQVAQQEAERSKFVVMKADQERRAAVIRAEGESEAAQLISDATAKAGMGLIELRRIEASREIASTLARSPNVAYLPGGQSMLFALNR

SEQ ID NO: 23920 - protein, 277 aa, Arabidopsis thaliana
  peptide (1)..(277): Ceres Seq. ID no. 12339507
MGSQQAAVSFLSNLAKAAFGLGTAATVLNTSLFTVDGGERAVIFDRFRGVMDQTVGEGTHFLIPILQRPHIFDIRTKPHTFSSISGTKDLQMVNLTLRVLSRPEVSRLPYIFQTLGLEYDEKVLPSIGNEVLKAVVAQFNADQLLTERPHVSALVRESLITRAKDFNIVLDDVAITHLSYGVEFSRAVEQKQVAQQEAERSKFVVMKADQERRAAVIRAEGESEAAQLISDATAKAGMGLIELRRIEASREIASTLARSPNVAYLPGGQSMLFALNR

SEQ ID NO: 23921 - protein, 227 aa, Arabidopsis thaliana
  peptide (1)..(227): Ceres Seq. ID no. 12339508
MDQTVGEGTHFLIPILQRPHIFDIRTKPHTFSSISGTKDLQMVNLTLRVLSRPEVSRLPYIFQTLGLEYDEKVLPSIGNEVLKAVVAQFNADQLLTERPHVSALVRESLITRAKDFNIVLDDVAITHLSYGVEFSRAVEQKQVAQQEAERSKFVVMKADQERRAAVIRAEGESEAAQLISDATAKAGMGLIELRRIEASREIASTLARSPNVAYLPGGQSMLFALNR

SEQ ID NO: 23922 - DNA, 1414 bp, Arabidopsis thaliana
  misc_feature (1)..(1414): Ceres Seq. ID no. 13500085
  misc_feature (1)..(1414): Ortholog of  Ceres SEQ ID NO 13592961 as cited in SEQ ID NO 20522
  misc_feature (1)..(1414): Ortholog of  Ceres SEQ ID NO 12583469 as cited in SEQ ID NO 51031
  misc_feature (1)..(1414): Ortholog of  Ceres SEQ ID NO 15226378 as cited in SEQ ID NO 62741
  misc_feature (1)..(1414): Ortholog of  Ceres SEQ ID NO 13597389 as cited in SEQ ID NO 63426
  misc_feature (1)..(1414): Ortholog of  Ceres SEQ ID NO 15169639 as cited in SEQ ID NO 64624
  misc_feature (1)..(1414): Ortholog of  Ceres SEQ ID NO 14303071 as cited in SEQ ID NO 67114
  misc_feature (1)..(1414): Ortholog of  Ceres SEQ ID NO 13595998 as cited in SEQ ID NO 68161
  misc_feature (1)..(1414): Ortholog of  Ceres SEQ ID NO 14303635 as cited in SEQ ID NO 68503
aaaaaaaaaaaaaaaaataagatagaaactcactcctgacctctcgcatggcgtctctagactctctagtcatctttcttttttctactctttttgtcactatcgtgagctcggaaacgccgtgcccgaatttcaagtcgatcatcagtttcggcgattcgattgcggacacgggaaacttggttggtctctctgatcgtaaccagcttcctgtgactgcgtttccaccgtacggagaaaccttcttccaccacccaaccggtcgttcctgcgatggccgcatcatcatggactttatcgctgaatttgtggggcttccttatgtgcctccgtactttggatctaaaaatagaaactttgataagggtgttaatttcgcggtagccggagcaacggcactgaaaagttcctttcttaagaagagaggaattcaaccacacaccaacgttagtttaggagttcagctaaagagcttcaaaaagagtttaccaaatttatgcggctcaccatcagactgtagagatatgattggaaatgctttgattctcatgggagagattggagggaatgattataatttcccattcttcaaccgcaaacccgttaaggaagttgaagagctggttccatttgtaatcgcttctatttcttctacaataacggagttgattggtatggggggtaaaacctttctagtgcccggagagttccctatcggatgctcagtagtctatttgacattatacaaaacatcaaacaaggacgaatacgatccttcaacaggatgtttgaaatggttgaacaagtttggcgaataccatagcgagaaacttaaggtggaactcaacagacttaggaagctctaccctcatgtcaacatcatatacgctgactactacaactctctcttgcgcatttttaaagaaccagccaaattcgggttcatggaaagacccttccctgcttgttgcggtataggaggaccgtacaacttcaacttcactaggaaatgtgggagtgtaggagtgaaatcttgtaaggatccttcaaagtatgtgggctgggatggcgttcatatgactgaggctgcatacaaatggatagctgatggaatactcaatggaccatatgcgaatcctccttttgatcggtcctgcctcagatctgagattaagaaggagtcattgtacaatcaaagtactctgacacaagcttgtgtgaaactttgacagacaaaagtgatgataagaatattccctctattccttattaatccaaattcaagcaaacaaatttgttgcaaaaaagatatgtttctaggtttctatgtatttttttattacttattgatgatgaattgtagaccttaattttctttttcttttttacttttattggtttaaatttgttaacc

SEQ ID NO: 23923 - protein, 393 aa, Arabidopsis thaliana
  peptide (1)..(393): Ceres Seq. ID no. 13500086
MASLDSLVIFLFSTLFVTIVSSETPCPNFKSIISFGDSIADTGNLVGLSDRNQLPVTAFPPYGETFFHHPTGRSCDGRIIMDFIAEFVGLPYVPPYFGSKNRNFDKGVNFAVAGATALKSSFLKKRGIQPHTNVSLGVQLKSFKKSLPNLCGSPSDCRDMIGNALILMGEIGGNDYNFPFFNRKPVKEVEELVPFVIASISSTITELIGMGGKTFLVPGEFPIGCSVVYLTLYKTSNKDEYDPSTGCLKWLNKFGEYHSEKLKVELNRLRKLYPHVNIIYADYYNSLLRIFKEPAKFGFMERPFPACCGIGGPYNFNFTRKCGSVGVKSCKDPSKYVGWDGVHMTEAAYKWIADGILNGPYANPPFDRSCLRSEIKKESLYNQSTLTQACVKL

SEQ ID NO: 23924 - protein, 313 aa, Arabidopsis thaliana
  peptide (1)..(313): Ceres Seq. ID no. 13500087
MDFIAEFVGLPYVPPYFGSKNRNFDKGVNFAVAGATALKSSFLKKRGIQPHTNVSLGVQLKSFKKSLPNLCGSPSDCRDMIGNALILMGEIGGNDYNFPFFNRKPVKEVEELVPFVIASISSTITELIGMGGKTFLVPGEFPIGCSVVYLTLYKTSNKDEYDPSTGCLKWLNKFGEYHSEKLKVELNRLRKLYPHVNIIYADYYNSLLRIFKEPAKFGFMERPFPACCGIGGPYNFNFTRKCGSVGVKSCKDPSKYVGWDGVHMTEAAYKWIADGILNGPYANPPFDRSCLRSEIKKESLYNQSTLTQACVKL

SEQ ID NO: 23925 - protein, 234 aa, Arabidopsis thaliana
  peptide (1)..(234): Ceres Seq. ID no. 13500088
MIGNALILMGEIGGNDYNFPFFNRKPVKEVEELVPFVIASISSTITELIGMGGKTFLVPGEFPIGCSVVYLTLYKTSNKDEYDPSTGCLKWLNKFGEYHSEKLKVELNRLRKLYPHVNIIYADYYNSLLRIFKEPAKFGFMERPFPACCGIGGPYNFNFTRKCGSVGVKSCKDPSKYVGWDGVHMTEAAYKWIADGILNGPYANPPFDRSCLRSEIKKESLYNQSTLTQACVKL

SEQ ID NO: 23926 - DNA, 1399 bp, Arabidopsis thaliana
  misc_feature (1)..(1399): Ceres Seq. ID no. 12335393
  misc_feature (1)..(1399): Ortholog of  Ceres SEQ ID NO 13582619 as cited in SEQ ID NO 56520
  misc_feature (1)..(1399): Ortholog of  Ceres SEQ ID NO 14314632 as cited in SEQ ID NO 59923
  misc_feature (1)..(1399): Ortholog of  Ceres SEQ ID NO 13660872 as cited in SEQ ID NO 60830
  misc_feature (1)..(1399): Ortholog of  Ceres SEQ ID NO 12616221 as cited in SEQ ID NO 63291
acctttctagttcctctgcgtctccttaatctctctccctaacttctctttcacctttactctctctatctctcttacatatatctatatatattccctgaacccatctcttgaaaacattcaagatcaaatctttctcgatctattcaaagaaaaactatttaagaaacatatgttttggatcaagtaagggtttgatcttgtaccggaatcaggtttttgcttttcttctagggtttaaggttatttaaaaacagatggaaactttcggtgtgtttcacaaggaagatgatgagcagatggatttgcctcctggttttaggtttcatccaacagacgaagaactcataacccactatctccacaagaaggttcttgaccttggtttctcggctaaagctattggtgaggttgatttgaacaaagctgagccatgggagttgccatataaagcaaaaattggtgagaaagaatggtactttttctgtgtgagggatagaaagtatccgactggtctgaggactaaccgagcaactcaagccggttattggaaggcgacagggaaggataaagaaatcttccgaggtaaatcgcttgttggtatgaagaaaacacttgttttctacagaggaagagctcctaaaggccagaaaacaaattgggtgatgcatgagtataggctagatggaaaactctctgctcacaacttgcctaaaaccgctaagaatgaatgggtgatctgcagggtatttcataaaactgctggaggtaagaagatcccgatttcgacgttaatccgaatcggttcttacggaaccgggtctagtttaccacctttaactgattcttcaccatacaacgacaaaaccaagaccgaaccagtttacgtgccctgcttctccaaccaagctgaaactagaggaacaatactcaattgcttcagcaacccttcccttagctccatccaaccagattttctccagatgattccactctaccaacctcaatctctcaacatttccgagagttccaatccggttcttacgcaagaacaatcagttttacaagcgatgatggaaaacaacagaaggcagaacttcaaaacattgagcatctcgcaagaaaccggggtttcgaacaccgataactcatcggtttttgaatttgggaggaagcgatttgatcatcaagaagttccatctccctcttccggtccggttgatcttgaacctttctggaattactgaagattcagaacctgaaaagtctattaatttaggtcacaagtaagaaaatctttgcaaagttttatccttttagcgtggtgtgctaagcttgtatagattattgacactacttcctgtattagtgttttatattattatattcaactaaagtt

SEQ ID NO: 23927 - protein, 329 aa, Arabidopsis thaliana
  peptide (1)..(329): Ceres Seq. ID no. 12335394
METFGVFHKEDDEQMDLPPGFRFHPTDEELITHYLHKKVLDLGFSAKAIGEVDLNKAEPWELPYKAKIGEKEWYFFCVRDRKYPTGLRTNRATQAGYWKATGKDKEIFRGKSLVGMKKTLVFYRGRAPKGQKTNWVMHEYRLDGKLSAHNLPKTAKNEWVICRVFHKTAGGKKIPISTLIRIGSYGTGSSLPPLTDSSPYNDKTKTEPVYVPCFSNQAETRGTILNCFSNPSLSSIQPDFLQMIPLYQPQSLNISESSNPVLTQEQSVLQAMMENNRRQNFKTLSISQETGVSNTDNSSVFEFGRKRFDHQEVPSPSSGPVDLEPFWNY

SEQ ID NO: 23928 - protein, 315 aa, Arabidopsis thaliana
  peptide (1)..(315): Ceres Seq. ID no. 12335395
MDLPPGFRFHPTDEELITHYLHKKVLDLGFSAKAIGEVDLNKAEPWELPYKAKIGEKEWYFFCVRDRKYPTGLRTNRATQAGYWKATGKDKEIFRGKSLVGMKKTLVFYRGRAPKGQKTNWVMHEYRLDGKLSAHNLPKTAKNEWVICRVFHKTAGGKKIPISTLIRIGSYGTGSSLPPLTDSSPYNDKTKTEPVYVPCFSNQAETRGTILNCFSNPSLSSIQPDFLQMIPLYQPQSLNISESSNPVLTQEQSVLQAMMENNRRQNFKTLSISQETGVSNTDNSSVFEFGRKRFDHQEVPSPSSGPVDLEPFWNY

SEQ ID NO: 23929 - protein, 214 aa, Arabidopsis thaliana
  peptide (1)..(214): Ceres Seq. ID no. 12335396
MKKTLVFYRGRAPKGQKTNWVMHEYRLDGKLSAHNLPKTAKNEWVICRVFHKTAGGKKIPISTLIRIGSYGTGSSLPPLTDSSPYNDKTKTEPVYVPCFSNQAETRGTILNCFSNPSLSSIQPDFLQMIPLYQPQSLNISESSNPVLTQEQSVLQAMMENNRRQNFKTLSISQETGVSNTDNSSVFEFGRKRFDHQEVPSPSSGPVDLEPFWNY

SEQ ID NO: 23930 - DNA, 1152 bp, Arabidopsis thaliana
  misc_feature (1)..(1152): Ceres Seq. ID no. 12337900
  misc_feature (1)..(1152): Ortholog of  Ceres SEQ ID NO 13586635 as cited in SEQ ID NO 14217
  misc_feature (1)..(1152): Ortholog of  Ceres SEQ ID NO 12616285 as cited in SEQ ID NO 63483
atcttaaaaagtaaaaacacattcatctatccaacaaaaaaaaaaaaaaaaaggagaaatggaaggaatcgatcatagaatggtgagtgtcaatggcataactatgcacattgccgagaaaggtcccaaagaaggacctgtggtgcttctcctccatggattccctgatctcgtacacgtggcgtcaccagattagtgggttatcatctctaggttaccgcgctgtagctccagacctccgaggctacggagactctgattcgccagagtctttctccgagtacacgtgtcttaacgtcgttggggacctcgtagctcttctggacagtgttgctggaaatcagagaaggtgtttctggtcggtcatgattggggagccattatcggatggtttctctgtttgtttcgacctgaaaagattaacggctttgtgtgtttgagtgtgccgtatagatcaaggaaaccctaaagtcaagcccgttcaagggttcaaggctgtatttggagatgattactacatttgtagatttcaggaaccggggaagattgaaggagagattgcaagtgcagatccaagaatatttctgaggaacctcttcacagggaggacactcggtccgccgattttacctaaggataatccctttggggaaaaacctaaccctaatagcgaaaacattgaattgcctgaatggttttctaagaaagatctcgatttctatgtctccaaattcgagaaggcaggatttaccggtggattgaactactacagagccatggatctgaattgggagctcactgcaccatggaccggagctaagattcaagttccagtgaagttcatgacaggtgacttcaacatggtttacaccacaccagggatgaaagagtacattcacggtggtggatttgctgcagatgttccaactcttcaagagatagtggtgattgaagatgctggtcacttcgttaaccaagagaaacctcaagaggtcactgctcacatcaatgacttcttcaccaatcttcgggacaacaacaaaagcttttagagttctcgtttggttctattatgttggctctcaaaacaagttggttcttgcatgtgttgtttcgacaagattttgaataagacttggcattatgaagccc

SEQ ID NO: 23931 - protein, 94 aa, Arabidopsis thaliana
  peptide (1)..(94): Ceres Seq. ID no. 12337901
MDSLISYTWRHQISGLSSLGYRAVAPDLRGYGDSDSPESFSEYTCLNVVGDLVALLDSVAGNQRRCFWSVMIGEPLSDGFSVCFDLKRLTALCV

SEQ ID NO: 23932 - protein, 91 aa, Arabidopsis thaliana
  peptide (1)..(91): Ceres Seq. ID no. 12337902
MDLNWELTAPWTGAKIQVPVKFMTGDFNMVYTTPGMKEYIHGGGFAADVPTLQEIVVIEDAGHFVNQEKPQEVTAHINDFFTNLRDNNKSF

SEQ ID NO: 23933 - protein, 69 aa, Arabidopsis thaliana
  peptide (1)..(69): Ceres Seq. ID no. 12337903
MTGDFNMVYTTPGMKEYIHGGGFAADVPTLQEIVVIEDAGHFVNQEKPQEVTAHINDFFTNLRDNNKSF

SEQ ID NO: 23934 - DNA, 1236 bp, Arabidopsis thaliana
  misc_feature (1)..(1236): Ceres Seq. ID no. 12384820
  misc_feature (1)..(1236): Ortholog of  Ceres SEQ ID NO 14303572 as cited in SEQ ID NO 65530
acaacttttatattttactctgctgcttcgagatcaacgcattaaaagtaatggggtacattaagaatatttcgattttaaggggttgaagttgtaattttgaagaagtggaagatcaatcaaaaataatagaagaacagagacgacgaaacctgccggagaactgaggagagaaaaaaccccggcgaaaaagggaaattcgaattcgtcttctgttgatcattgcttcacttctgcttccagagcttttactcagaagaagctcgctgatctcaaatctctctttgtttccctcgcttccaagtctcagagcaatgaccaatacgtctcgtaccctgttttccaggagtattttggtctgagtggttctttaggagaaaggatctttgatatggttactcaacacaggaaagatgataaaatgacttttgaagatcttgttattgctaaggcaacatacgagaaaggaactgatgatgagattgctgagtttatttaccagactttggatgttaatggcaatggggtcttgagaaggtctgatttagagtcgttcctggtggtgattttgaagagtgtgttctccactgagagttctgatgcggaatcaagtgattacaaggagatggtagatgcgctactcgatgccgctactttctcaaaatctgatgatggttctgaaaaaggaatgtcttttgaagacttcagaagctggtgcccactcgttccaactatcagaaagttcctcggcagcttgcttattcccccgggtccagtgagacctggatatcaagtcccggatctgctatatgaagatagtgtgagttcagataggctactattaaagaaggaatacgcttggcatattggaggagctcttcctcaccacgagcttgtagagtggaagctgttgtatcgcagttccttacacggtcaaagcttcaacacattcctcggacacacatcggggatggagggatcgaacatggcctgatggatggactgcagttaccgcagatggaaaacgcagcgctcagtttgagcataccctattggtaactgagactggtgttgaggttttaacagcgaggcttccttcatcgcctgacgtatacccttggcttaccaagtgattaagtgtttggttcctttttggttgtgattcattgggtttgattcttaaacttgggaataatagtgtcatctttttgccattatagaccatttgatgttgtt

SEQ ID NO: 23935 - protein, 200 aa, Arabidopsis thaliana
  peptide (1)..(200): Ceres Seq. ID no. 12384821
MVTQHRKDDKMTFEDLVIAKATYEKGTDDEIAEFIYQTLDVNGNGVLRRSDLESFLVVILKSVFSTESSDAESSDYKEMVDALLDAATFSKSDDGSEKGMSFEDFRSWCPLVPTIRKFLGSLLIPPGPVRPGYQVPDLLYEDSVSSDRLLLKKEYAWHIGGALPHHELVEWKLLYRSSLHGQSFNTFLGHTSGMEGSNMA

SEQ ID NO: 23936 - protein, 190 aa, Arabidopsis thaliana
  peptide (1)..(190): Ceres Seq. ID no. 12384822
MTFEDLVIAKATYEKGTDDEIAEFIYQTLDVNGNGVLRRSDLESFLVVILKSVFSTESSDAESSDYKEMVDALLDAATFSKSDDGSEKGMSFEDFRSWCPLVPTIRKFLGSLLIPPGPVRPGYQVPDLLYEDSVSSDRLLLKKEYAWHIGGALPHHELVEWKLLYRSSLHGQSFNTFLGHTSGMEGSNMA

SEQ ID NO: 23937 - protein, 122 aa, Arabidopsis thaliana
  peptide (1)..(122): Ceres Seq. ID no. 12384823
MVDALLDAATFSKSDDGSEKGMSFEDFRSWCPLVPTIRKFLGSLLIPPGPVRPGYQVPDLLYEDSVSSDRLLLKKEYAWHIGGALPHHELVEWKLLYRSSLHGQSFNTFLGHTSGMEGSNMA

SEQ ID NO: 23938 - DNA, 2217 bp, Arabidopsis thaliana
  misc_feature (1)..(2217): Ceres Seq. ID no. 13497123
  misc_feature (1)..(2217): Ortholog of  Ceres SEQ ID NO 15171438 as cited in SEQ ID NO 51665
  misc_feature (1)..(2217): Ortholog of  Ceres SEQ ID NO 15170804 as cited in SEQ ID NO 52653
  misc_feature (1)..(2217): Ortholog of  Ceres SEQ ID NO 14303083 as cited in SEQ ID NO 66573
gcaaccccataaacaattcctcaagagccgttgacaaaccaaaaaacttgttaattaaaagtcaatatttgctctagaccctccaattttccgtaaaaatctccataaaagtctctgtccctccttgccaaccaaaaactacaaacacacatcatccttcgactatcttattcatagctatcaccacccaaaaaagaaatcaccctaatcaaaaaaaaaaaggcaaggagagattttatcattattctattttcatattttttgaaaaaactcaagcaattgacttttgtgataaagatttgaagaaagagatgaggaacgaaacgggtggtaccatggtcgttgatctccaaaccgatccatataacaacattcacagtcgccataatctgagctacgaccttagcgagggtcccaaacctaggcctaaatttggtaatatctcgaaaactgaccacgacgagatattccctcccgacgatcccatcattatcaacagcaacgtgactcaccagcggtttagcagcgtctcggcctcgaccatgagcagcggtccggccagcggagaaggttctccttgcgtaatgtcgccttgggcccgcgtgtcgcctccttggggtgcagatttcaacgaagacaatgtcctcgagaccaacggtctcattggatctattgttagaaaagaagggcatatatactcgctagccgcttctggtgaccttctctacacgggctcggattcgaagaacattagggtttggaagaatttgaaggaacacgctgggtttaaatccagtagtgggctaatcaaggccattgtgatattcggagaccgaatctttaccggccatcaagacgggaagatccggatttggaaggtttcgaagagaaaaccaggaaaacataagcgggttggaacattgccaacatttaaatcaatggtcaagagctccgtcaaccctaagcatttcatggaggtacgccgcaacagaaactctgtgaagacgaagcataacgacgcagtgtctagtcttagcttggacgtggagcttggattgttgtactcgagttcttgggacacgacaatcaaagtgtggagaatcgcggattcaaaatgtttggaatcgatacatgcacacgatgacgcgataaactctgtaatgtccggttttgatgacttggtgttcacgggatccgcagatggtactgttaaagtgtggaaacgtgagttgcaaggcaaaggaacaaaacatacgttagctcaagttttgctcaagcaagaaaatgcggtcacggcgttggccgtaaaatcacaatcttccatcgtatattgcggttcttcggacgggctagtgaactattgggagcgttcaaagcggtcattcacaggcggaatactcaaaggccacaaatccgcagtgctttgtctaggtatagcggggaacttgctgttgagtggttccgccgacaagaacatatgcgtatggaggcgggacccgtctgacaagtcccatcagtgtctctctgttttgacgggacacatggggccggtcaagtgcctagccgtggaggaggaacgggcttgtcatcagggagcaaaagcctcagtggccgagggagaccggaagtggattatatacagcggaagtttggacaagtcggtgaaagtgtggcgcgtgtcggagagaatggccacgtggaaggagatggacgagccagcagcatcttcagagcggaagagctcttcgtctccgcatgaaggaagtggcgcgtggagttcacgcaatgtggaaaaataagagtggaggagcatagtgtgattatttacgagagtgtcacgtcgtcacgagagccatattcacgccgggaaagagacagaggattgatttcatttttatgactaagtcaacggagaggtttgtgccacgctagctggtgtgagaatcaaagtcgggttaatggttttcacgtaatgagttttttggttatttttttctttaaaaaaaatgtttgaaacgaaattgaattatttatttattttccataaatttgtaagataacaagaacaaagaccgaatcaaacatatatatttgttttctttagtggtctatgtcgtggttgcaactttataacttgggaattttggatgagtcgttttcctcttcattagaattagtctttctatattattataatataggatgttgatatttttc

SEQ ID NO: 23939 - protein, 495 aa, Arabidopsis thaliana
  peptide (1)..(495): Ceres Seq. ID no. 13497124
MRNETGGTMVVDLQTDPYNNIHSRHNLSYDLSEGPKPRPKFGNISKTDHDEIFPPDDPIIINSNVTHQRFSSVSASTMSSGPASGEGSPCVMSPWARVSPPWGADFNEDNVLETNGLIGSIVRKEGHIYSLAASGDLLYTGSDSKNIRVWKNLKEHAGFKSSSGLIKAIVIFGDRIFTGHQDGKIRIWKVSKRKPGKHKRVGTLPTFKSMVKSSVNPKHFMEVRRNRNSVKTKHNDAVSSLSLDVELGLLYSSSWDTTIKVWRIADSKCLESIHAHDDAINSVMSGFDDLVFTGSADGTVKVWKRELQGKGTKHTLAQVLLKQENAVTALAVKSQSSIVYCGSSDGLVNYWERSKRSFTGGILKGHKSAVLCLGIAGNLLLSGSADKNICVWRRDPSDKSHQCLSVLTGHMGPVKCLAVEEERACHQGAKASVAEGDRKWIIYSGSLDKSVKVWRVSERMATWKEMDEPAASSERKSSSSPHEGSGAWSSRNVEK

SEQ ID NO: 23940 - protein, 487 aa, Arabidopsis thaliana
  peptide (1)..(487): Ceres Seq. ID no. 13497125
MVVDLQTDPYNNIHSRHNLSYDLSEGPKPRPKFGNISKTDHDEIFPPDDPIIINSNVTHQRFSSVSASTMSSGPASGEGSPCVMSPWARVSPPWGADFNEDNVLETNGLIGSIVRKEGHIYSLAASGDLLYTGSDSKNIRVWKNLKEHAGFKSSSGLIKAIVIFGDRIFTGHQDGKIRIWKVSKRKPGKHKRVGTLPTFKSMVKSSVNPKHFMEVRRNRNSVKTKHNDAVSSLSLDVELGLLYSSSWDTTIKVWRIADSKCLESIHAHDDAINSVMSGFDDLVFTGSADGTVKVWKRELQGKGTKHTLAQVLLKQENAVTALAVKSQSSIVYCGSSDGLVNYWERSKRSFTGGILKGHKSAVLCLGIAGNLLLSGSADKNICVWRRDPSDKSHQCLSVLTGHMGPVKCLAVEEERACHQGAKASVAEGDRKWIIYSGSLDKSVKVWRVSERMATWKEMDEPAASSERKSSSSPHEGSGAWSSRNVEK

SEQ ID NO: 23941 - protein, 418 aa, Arabidopsis thaliana
  peptide (1)..(418): Ceres Seq. ID no. 13497126
MSSGPASGEGSPCVMSPWARVSPPWGADFNEDNVLETNGLIGSIVRKEGHIYSLAASGDLLYTGSDSKNIRVWKNLKEHAGFKSSSGLIKAIVIFGDRIFTGHQDGKIRIWKVSKRKPGKHKRVGTLPTFKSMVKSSVNPKHFMEVRRNRNSVKTKHNDAVSSLSLDVELGLLYSSSWDTTIKVWRIADSKCLESIHAHDDAINSVMSGFDDLVFTGSADGTVKVWKRELQGKGTKHTLAQVLLKQENAVTALAVKSQSSIVYCGSSDGLVNYWERSKRSFTGGILKGHKSAVLCLGIAGNLLLSGSADKNICVWRRDPSDKSHQCLSVLTGHMGPVKCLAVEEERACHQGAKASVAEGDRKWIIYSGSLDKSVKVWRVSERMATWKEMDEPAASSERKSSSSPHEGSGAWSSRNVEK

SEQ ID NO: 23942 - DNA, 1182 bp, Arabidopsis thaliana
  misc_feature (1)..(1182): Ceres Seq. ID no. 12738321
  misc_feature (1)..(1182): Ortholog of  Ceres SEQ ID NO 14314164 as cited in SEQ ID NO 54346
  misc_feature (1)..(1182): Ortholog of  Ceres SEQ ID NO 13595066 as cited in SEQ ID NO 55849
  misc_feature (1)..(1182): Ortholog of  Ceres SEQ ID NO 13597721 as cited in SEQ ID NO 65430
  misc_feature (1)..(1182): Ortholog of  Ceres SEQ ID NO 14309100 as cited in SEQ ID NO 0
ctcgtctctaagcagtagcagatctgagttttggagagttcaaaggaagaagataactccaataccagagtgaaagcattcaggaaacatgcctcctcagaagattgaaactggtcatagcgacactattcatgatgtggtcatggattactatggaaagcgagtagcaactgcctcgtctgactgcacgatcaagataaccggagtaagcaacagcggtggatctcagcatctagctaccttaaccggtcatcgaggtcctgtctggcaagtcgcttgggcgcacccaaagtttggttcacttctcgcttcatgttcctatgatgggcaaattatattatggaaagaaggtaaccaaaaccaatggacacaagctcatgtcttcacagaccacaaagtatctgtcaactctatcgcttgggctcctcatgaacttggactctccttagcttgcggagcatctgatggaaacatatcagttttctcggctcgagctgatggcggttgggacacgacaaagatagaccaagcacaccctgttggtgtcacttcagtgtcgtgggcaccggccacagaaccaggcgcactcgttagctctggtatgatcgatccggtctacaaactagcatccggcgggtgtgatagcacggtgaaagtgtggaagttctcgaacgggtcatggaaaatggattgtttcccggctctcaacaagcacacggattgggtccgtgatgtggcttgggcaccgaacttgggtctcccaaagtcaaccatagccagtggttcagaagatgggaaagtgatcatatggaccatagggaaaggtgagcaatgggaaggtactgttttgaaagatttcaaaacaccagtgtggcgggtctcgtggtcgttgaccgctaatttgttggctgtttccgatgggaacaataacgttacagtgtggaaagagtctgttgatggagagtgggaacaagtgactgttgttgagccatagattgttgtttgtttgtttggttatcttttgttttgtggtaatatcaaaatgtggtgtgttctgtatacaatttctagggacctgtttctctctatacgtttctcaggaaagtatattcttatgtattttaatcagacaacagagattgcaaaagaaatgtatttttcataaaactttttaattccgat

SEQ ID NO: 23943 - protein, 301 aa, Arabidopsis thaliana
  peptide (1)..(301): Ceres Seq. ID no. 12738322
MPPQKIETGHSDTIHDVVMDYYGKRVATASSDCTIKITGVSNSGGSQHLATLTGHRGPVWQVAWAHPKFGSLLASCSYDGQIILWKEGNQNQWTQAHVFTDHKVSVNSIAWAPHELGLSLACGASDGNISVFSARADGGWDTTKIDQAHPVGVTSVSWAPATEPGALVSSGMIDPVYKLASGGCDSTVKVWKFSNGSWKMDCFPALNKHTDWVRDVAWAPNLGLPKSTIASGSEDGKVIIWTIGKGEQWEGTVLKDFKTPVWRVSWSLTANLLAVSDGNNNVTVWKESVDGEWEQVTVVEP

SEQ ID NO: 23944 - protein, 283 aa, Arabidopsis thaliana
  peptide (1)..(283): Ceres Seq. ID no. 12738323
MDYYGKRVATASSDCTIKITGVSNSGGSQHLATLTGHRGPVWQVAWAHPKFGSLLASCSYDGQIILWKEGNQNQWTQAHVFTDHKVSVNSIAWAPHELGLSLACGASDGNISVFSARADGGWDTTKIDQAHPVGVTSVSWAPATEPGALVSSGMIDPVYKLASGGCDSTVKVWKFSNGSWKMDCFPALNKHTDWVRDVAWAPNLGLPKSTIASGSEDGKVIIWTIGKGEQWEGTVLKDFKTPVWRVSWSLTANLLAVSDGNNNVTVWKESVDGEWEQVTVVEP

SEQ ID NO: 23945 - DNA, 1916 bp, Arabidopsis thaliana
  misc_feature (1)..(1916): Ceres Seq. ID no. 12385354
  misc_feature (1)..(1916): Ortholog of  Ceres SEQ ID NO 14311305 as cited in SEQ ID NO 53731
  misc_feature (1)..(1916): Ortholog of  Ceres SEQ ID NO 13501807 as cited in SEQ ID NO 67558
aataaaaattcgaactatcaaactccaccccataacaaaattctccaaactagtgaaaattttgtcgccaccgtcgcagagtgttaaaaaactattggaagatgggttctggtcaatggcatatggagaagaggtctactttaaagaatgattcgtttgtacaagaatacaatccagtcactgaaactgggagtctctctatcattgttcttggtgcttctggtgatcttgctaagaagaagacttttcctgcacttttcaatctatttcatcagggatttcttaatccagatgaagttcatatatttggatatgcaaggagtaagattactgatgaggagcttagagataaaatccgcggatatcttgttgatgagaagaatgcatctaagaaaacagaagctttgtccaagtttctaaagctgattaagtatgtgagtggaccttatgattctgaggaagggtttaagagattagacaaggcgatttcggagcacgagatatctaaaaagactgctgaaggatcttctaggagattgttttatcttgcacttcctccgtctgtataccctcctgtaagcaagatgatcaaggcatggtgcactaacaaatctgatcttggtggatggactaggattgttgttgagaaaccatttggaaaggatttggaatctgcagagcagctgagttctcagattggagccttgtttgaagaaccacagatttatcgtattgatcactatctgggaaaagagttagttcaaaacatgttggttcttcggtttgccaatcgcttgtttttgccactatggaaccgcgacaatattgcaaacgtacagatcgttttcagagaagattttggaactgaaggtcgcggtggatattttgatgaatacggaatcattcgtgatattattcaaaaccacttgctccaggttctttgccttgtcgccatggagaaaccaatctctcttaaacccgagcacatccgggatgagaaagtgaaggttcttcaatctgtgattcccataaaagatgaagaggtggttcttggacaatatgaaggatatagagatgatccaactgttccaaatgactcaaacactccaacgtttgccacaacaattcttcgcattaacaatgaaagatgggaaggtgttccttttatactgaaggccggaaaggcaatgagttcaaagaaggcagatattcgcattcagtttaaagatgttcctggcgacatattcaaatgtcaaaaccaagggaggaacgagtttgttatacgcttgcagccttcagaggccatgtacatgaagctaactgtgaagcaaccgggtctggagatgcaaaccgtgcagagtgaactagacctatcgtacaagcagcgttaccaagatgtctcgattccagaggcttacgaacgccttattcttgacacaatcagaggcgaccaacaacactttgttcgcagagacgaattaaaggcagcttgggaaatcttcactccactgcttcacaggatcgacggagaagtgaaatcggtcccatacaaacaaggtagccgtggcccagcggaagcagatcagctacttaagaaagctggttatatgcagactcatggctacatttggatccctcctacattgtaaatggtataatcatagagatgatgatgatgagtacacacaaaataagagggttttttttttcttttttttccttgcttgctgaataaaaactcttcaccagtttggagtttgtttaagtgaatcttatgtatactagtgatcttcactaggacattgtttgtttatgccttgtagtttttgttgtactagtcccttgttttctttttttacataatgcaaaacagctttgtggaaaagctaattaaattaagagatcttattctgctc

SEQ ID NO: 23946 - protein, 515 aa, Arabidopsis thaliana
  peptide (1)..(515): Ceres Seq. ID no. 12385355
MGSGQWHMEKRSTLKNDSFVQEYNPVTETGSLSIIVLGASGDLAKKKTFPALFNLFHQGFLNPDEVHIFGYARSKITDEELRDKIRGYLVDEKNASKKTEALSKFLKLIKYVSGPYDSEEGFKRLDKAISEHEISKKTAEGSSRRLFYLALPPSVYPPVSKMIKAWCTNKSDLGGWTRIVVEKPFGKDLESAEQLSSQIGALFEEPQIYRIDHYLGKELVQNMLVLRFANRLFLPLWNRDNIANVQIVFREDFGTEGRGGYFDEYGIIRDIIQNHLLQVLCLVAMEKPISLKPEHIRDEKVKVLQSVIPIKDEEVVLGQYEGYRDDPTVPNDSNTPTFATTILRINNERWEGVPFILKAGKAMSSKKADIRIQFKDVPGDIFKCQNQGRNEFVIRLQPSEAMYMKLTVKQPGLEMQTVQSELDLSYKQRYQDVSIPEAYERLILDTIRGDQQHFVRRDELKAAWEIFTPLLHRIDGEVKSVPYKQGSRGPAEADQLLKKAGYMQTHGYIWIPPTL

SEQ ID NO: 23947 - protein, 508 aa, Arabidopsis thaliana
  peptide (1)..(508): Ceres Seq. ID no. 12385356
MEKRSTLKNDSFVQEYNPVTETGSLSIIVLGASGDLAKKKTFPALFNLFHQGFLNPDEVHIFGYARSKITDEELRDKIRGYLVDEKNASKKTEALSKFLKLIKYVSGPYDSEEGFKRLDKAISEHEISKKTAEGSSRRLFYLALPPSVYPPVSKMIKAWCTNKSDLGGWTRIVVEKPFGKDLESAEQLSSQIGALFEEPQIYRIDHYLGKELVQNMLVLRFANRLFLPLWNRDNIANVQIVFREDFGTEGRGGYFDEYGIIRDIIQNHLLQVLCLVAMEKPISLKPEHIRDEKVKVLQSVIPIKDEEVVLGQYEGYRDDPTVPNDSNTPTFATTILRINNERWEGVPFILKAGKAMSSKKADIRIQFKDVPGDIFKCQNQGRNEFVIRLQPSEAMYMKLTVKQPGLEMQTVQSELDLSYKQRYQDVSIPEAYERLILDTIRGDQQHFVRRDELKAAWEIFTPLLHRIDGEVKSVPYKQGSRGPAEADQLLKKAGYMQTHGYIWIPPTL

SEQ ID NO: 23948 - protein, 354 aa, Arabidopsis thaliana
  peptide (1)..(354): Ceres Seq. ID no. 12385357
MIKAWCTNKSDLGGWTRIVVEKPFGKDLESAEQLSSQIGALFEEPQIYRIDHYLGKELVQNMLVLRFANRLFLPLWNRDNIANVQIVFREDFGTEGRGGYFDEYGIIRDIIQNHLLQVLCLVAMEKPISLKPEHIRDEKVKVLQSVIPIKDEEVVLGQYEGYRDDPTVPNDSNTPTFATTILRINNERWEGVPFILKAGKAMSSKKADIRIQFKDVPGDIFKCQNQGRNEFVIRLQPSEAMYMKLTVKQPGLEMQTVQSELDLSYKQRYQDVSIPEAYERLILDTIRGDQQHFVRRDELKAAWEIFTPLLHRIDGEVKSVPYKQGSRGPAEADQLLKKAGYMQTHGYIWIPPTL

SEQ ID NO: 23949 - DNA, 1222 bp, Arabidopsis thaliana
  misc_feature (1)..(1222): Ceres Seq. ID no. 12335796
  misc_feature (1)..(1222): Ortholog of  Ceres SEQ ID NO 14306793 as cited in SEQ ID NO 53342
gaacttacttgagtacttcttcttcttttgaccagagctctcacacatacgagtcactataatggaaggcgatcaagagacgaatgtttatactttggtggcaaggaagccttccttcgatctcccaacagcttgccctaattgtcttcctgcttatatatacctgaaattagcccagctaccttttgaacttgcgttcaattcaaccttccctgattcagatgaactgccgtactttgaaagtgatacatatgttgcatataacaatgaagatggaggagtaattgaaaaactgaagaaagatgggattgttaatctggactctcagctacagtctctttcggattatttatctttgaaggctcttattgtgtcttggctagaagaagcgcttacctatgagatatgggttggtaccgaggggatatctacatcgaaaatctactattcagatcttccttgggtgatcagcaaggtcctgttttataagcagacatacttggcaaagaaccgtttaggaatcaccaaagagaacgcagagcaaagagaaaaacagatatacaagagagcaagtgaggcatatgaagctttgtcgactaggttaggtgagcagaagtttctctttgaagacaggccatcgagtttggatgctttcttactctcgcacatactttttataatccaagcgttaccagttacatcagtgcttcggtgcaaacttctggaacatagtaatcttgtgcgatatgctgagaaacttaagtcagagttccttgaagcctcttcttcatctccttcacctccacttcactcattcccttcctcatttccaagaaagagttcgaagccaaagagcaaaccaaaggtagaaaagaccgaagaggagaaaaaatttaagaaaagagcaaggttctttctagctgctcagtttctagctgtcgtcatttacgtatcagtgatgggaggaggtagttctgatgaactggagtatgaagatgaagatgactaaactaaagcttttcttattaaatggaccggtaactctcaggcgaactctctgagactaagataaaaacataaccagtaatctctacgcttttttcttcttgaactcttagttatggagaggatacagatgtgagatttagtcacattataatggttttcgacttttcgttctgaaggagagcttttggcttttatataaatttcattggttttt

SEQ ID NO: 23950 - protein, 315 aa, Arabidopsis thaliana
  peptide (1)..(315): Ceres Seq. ID no. 12335797
MEGDQETNVYTLVARKPSFDLPTACPNCLPAYIYLKLAQLPFELAFNSTFPDSDELPYFESDTYVAYNNEDGGVIEKLKKDGIVNLDSQLQSLSDYLSLKALIVSWLEEALTYEIWVGTEGISTSKIYYSDLPWVISKVLFYKQTYLAKNRLGITKENAEQREKQIYKRASEAYEALSTRLGEQKFLFEDRPSSLDAFLLSHILFIIQALPVTSVLRCKLLEHSNLVRYAEKLKSEFLEASSSSPSPPLHSFPSSFPRKSSKPKSKPKVEKTEEEKKFKKRARFFLAAQFLAVVIYVSVMGGGSSDELEYEDEDD

SEQ ID NO: 23951 - DNA, 1961 bp, Arabidopsis thaliana
  misc_feature (1)..(1961): Ceres Seq. ID no. 12370944
  misc_feature (1)..(1961): Ortholog of  Ceres SEQ ID NO 12587358 as cited in SEQ ID NO 62228
  misc_feature (1)..(1961): Ortholog of  Ceres SEQ ID NO 12635930 as cited in SEQ ID NO 0
gccagattatcgcctttcgttcagagaaaactttttccgatacacaaaatcggaggaagaagaagatgaagctcaaagtgtatgcggatcgaatgtcacagccatctcgtgctgtcctcatattctgcaaggttaatgaaatccaattcgatgagatattgatttacttggcgaatcgtcaacaattatcccctgaatttaaagatattaacccaatggggaaagttccagctattgttgatggcaaacttaagctctctgagagtcacgctatcttgatatatctttcctcagcatacccaagtgtagttgatcattggtacccgactgatctttccaaaagggccagaattcactctgttttggattggcatcacaccaatttacgccctggtgcagctggatacgttctgaatagtgtactaggtccagctctcggtcttcctctgaatccgaaagcagctgctgaagctgagcagttactaacaaagtctctgaccactctagacactttttggcttaagggcaatgccatgttcttgctcggaagcaaccaaccatctatagctgatctgagccttgtatgtgaactaacgcagctgcaggttttggatgataaagatcgtcttagattgctcagccctcataaaaatgttgaacaatggattgagaatacgagaaaagcgacgatgcctcactttgatgaggtccatgaggtccttttcagagccaaagatagatgtcagaagcagcgagagatggcaaccgcatctaaaccgggtcctcaatctaagattatccaatttagtactattggtgagaagagtgatgatccaaacctcgttcaaaacacaaccgatcgtagaaaacatagacgcaaatggagtcgagctgaagatgccattcttattagtgcttggttaaatactagcaaggatccaattgtcgataatgaacataaagcatgcgctttttggaagagaattggtgcatattttaacaatagcgcttcacttgcaaatctgccaaagcgagagccgagtcactgcagcaaagatggagtaaacttaacgacaaagtctgcaaatttgttggatgttatgatcaagctttgaatcaaagaagtagtggtcaatctgaagatgatgttttccaagttgcataccaagtctacacgaacaattacaagagtaattttacacttgagcatgcatggagggagctccgacacagtaaaaaatggtgtagtttgtacccctttgaaaattctaagggtggtggaagctcaaagagaacaaagttgaataatggagatcgtgtatattcttcaagctctaatccggagagtgtgcctatagctctagatgaagaggagcaagtcatggatcttcctcttggtgtgaagtcatcgaagcagaaagagaagaaagttgctactattataacgattgaagaaagggaggccgattctggatcaagacttgagaacttgtgggtactagatgaagaggagcaagttatggatcgtcctcttggtgtgaagtcattagagcaaaaagagaataaagttgctcctaaaccaacgattgaagaaagggaggcggccgattctcgatcaagacttgagaacttgtgggcactaaaggagaaagaagaaagggaggcagattcccgatcaagacttgagaacttgtgggcactgaaggagaaagacatagaagagcaaaagaaactaacaaggatggaagtccttaaaagtcttcttggaagaacaactgatcaactttctgaaaaagaagacattttgaagaacaagctcattgatgagatgctctaatctctatgttcatctctgtattttagctatgtttcattgtatttatctctgtattttctctaggtttatctcactatctatgttcaacatttgtttcactttccaattcacatcatgaaacgtt

SEQ ID NO: 23952 - protein, 370 aa, Arabidopsis thaliana
  peptide (1)..(370): Ceres Seq. ID no. 12370945
QIIAFRSEKTFSDTQNRRKKKMKLKVYADRMSQPSRAVLIFCKVNEIQFDEILIYLANRQQLSPEFKDINPMGKVPAIVDGKLKLSESHAILIYLSSAYPSVVDHWYPTDLSKRARIHSVLDWHHTNLRPGAAGYVLNSVLGPALGLPLNPKAAAEAEQLLTKSLTTLDTFWLKGNAMFLLGSNQPSIADLSLVCELTQLQVLDDKDRLRLLSPHKNVEQWIENTRKATMPHFDEVHEVLFRAKDRCQKQREMATASKPGPQSKIIQFSTIGEKSDDPNLVQNTTDRRKHRRKWSRAEDAILISAWLNTSKDPIVDNEHKACAFWKRIGAYFNNSASLANLPKREPSHCSKDGVNLTTKSANLLDVMIKL

SEQ ID NO: 23953 - protein, 349 aa, Arabidopsis thaliana
  peptide (1)..(349): Ceres Seq. ID no. 12370946
MKLKVYADRMSQPSRAVLIFCKVNEIQFDEILIYLANRQQLSPEFKDINPMGKVPAIVDGKLKLSESHAILIYLSSAYPSVVDHWYPTDLSKRARIHSVLDWHHTNLRPGAAGYVLNSVLGPALGLPLNPKAAAEAEQLLTKSLTTLDTFWLKGNAMFLLGSNQPSIADLSLVCELTQLQVLDDKDRLRLLSPHKNVEQWIENTRKATMPHFDEVHEVLFRAKDRCQKQREMATASKPGPQSKIIQFSTIGEKSDDPNLVQNTTDRRKHRRKWSRAEDAILISAWLNTSKDPIVDNEHKACAFWKRIGAYFNNSASLANLPKREPSHCSKDGVNLTTKSANLLDVMIKL

SEQ ID NO: 23954 - protein, 340 aa, Arabidopsis thaliana
  peptide (1)..(340): Ceres Seq. ID no. 12370947
MSQPSRAVLIFCKVNEIQFDEILIYLANRQQLSPEFKDINPMGKVPAIVDGKLKLSESHAILIYLSSAYPSVVDHWYPTDLSKRARIHSVLDWHHTNLRPGAAGYVLNSVLGPALGLPLNPKAAAEAEQLLTKSLTTLDTFWLKGNAMFLLGSNQPSIADLSLVCELTQLQVLDDKDRLRLLSPHKNVEQWIENTRKATMPHFDEVHEVLFRAKDRCQKQREMATASKPGPQSKIIQFSTIGEKSDDPNLVQNTTDRRKHRRKWSRAEDAILISAWLNTSKDPIVDNEHKACAFWKRIGAYFNNSASLANLPKREPSHCSKDGVNLTTKSANLLDVMIKL

SEQ ID NO: 23955 - DNA, 1324 bp, Arabidopsis thaliana
  misc_feature (1)..(1324): Ceres Seq. ID no. 13591589
  misc_feature (1)..(1324): Ortholog of  Ceres SEQ ID NO 15179641 as cited in SEQ ID NO 56414
  misc_feature (1)..(1324): Ortholog of  Ceres SEQ ID NO 14316049 as cited in SEQ ID NO 67036
  misc_feature (1)..(1324): Ortholog of  Ceres SEQ ID NO 14313252 as cited in SEQ ID NO 67134
  misc_feature (1)..(1324): Ortholog of  Ceres SEQ ID NO 14302220 as cited in SEQ ID NO 69121
tgcacctatctcactctaaaatctctctctgccaatctcatcttcaacctctctctaactctcgttttcgattctacaatggctgacaagaagattaggatcggaatcaacggattcggaagaattggtcgtttggttgctagagttgttctccagagggacgatgttgagctcgtcgctgtcaacgaccccttcatcactactgagtacatgacctacatgttcaagtacgacagtgttcacggtcaatggaaacacaatgaactcaagatcaaggatgagaagacccttctcttcggtgagaagccagtcactgttttcggcatcaggaaccctgaggatatcccatgggccgaggctggagctgactacgttgttgagtctactggtgtcttcactgacaaagacaaggctgcagctcacttgaagggtggtgccaagaaggttgttatctctgcccccagcaaagacgctccaatgtttgttgttggtgtcaacgagcacgaatacaagtccgaccttgacattgtctccaacgctagctgcaccactaactgccttgctccccttgccaaggttatcaatgacagatttggaattgttgagggtcttatgactacagtccactcaatcactgctactcagaagactgttgatgggccttcaatgaaggactggagaggtggaagagctgcttcattcaacattattcccagcagcactggagctgccaaggctgtcggaaaggtgcttccagctcttaacggaaagttgactggaatgtctttccgtgtcccaaccgttgatgtctcagttgttgaccttactgtcagactcgagaaagctgctacctacgatgaaatcaaaaaggctatcaaggaggaatccgaaggcaaactcaagggaatccttggatacaccgaggatgatgttgtctcaactgacttcgttggcgacaacaggtcgagcatttttgacgccaaggctggaattgcattgagcgacaagtttgtgaaattggtgtcatggtacgacaacgaatggggttacagttcccgtgtggtcgacttgatcgtccacatgtcaaaggcctaagctaagaagcagatctcgaatgatagggagtggaaagtcatctgttcatccccttttatggtctgaatttgtcgttttcgaataaaatttctttgaacttggaactttttttttttttggttttcttaattctcattcatgtgaggtgatgggagtttgtagaccgatgttttactggaagccctttgtttttggcttttgatatattgagttaacgttatggttttcg

SEQ ID NO: 23956 - protein, 364 aa, Arabidopsis thaliana
  peptide (1)..(364): Ceres Seq. ID no. 13591590
CTYLTLKSLSANLIFNLSLTLVFDSTMADKKIRIGINGFGRIGRLVARVVLQRDDVELVAVNDPFITTEYMTYMFKYDSVHGQWKHNELKIKDEKTLLFGEKPVTVFGIRNPEDIPWAEAGADYVVESTGVFTDKDKAAAHLKGGAKKVVISAPSKDAPMFVVGVNEHEYKSDLDIVSNASCTTNCLAPLAKVINDRFGIVEGLMTTVHSITATQKTVDGPSMKDWRGGRAASFNIIPSSTGAAKAVGKVLPALNGKLTGMSFRVPTVDVSVVDLTVRLEKAATYDEIKKAIKEESEGKLKGILGYTEDDVVSTDFVGDNRSSIFDAKAGIALSDKFVKLVSWYDNEWGYSSRVVDLIVHMSKA

SEQ ID NO: 23957 - protein, 338 aa, Arabidopsis thaliana
  peptide (1)..(338): Ceres Seq. ID no. 13591591
MADKKIRIGINGFGRIGRLVARVVLQRDDVELVAVNDPFITTEYMTYMFKYDSVHGQWKHNELKIKDEKTLLFGEKPVTVFGIRNPEDIPWAEAGADYVVESTGVFTDKDKAAAHLKGGAKKVVISAPSKDAPMFVVGVNEHEYKSDLDIVSNASCTTNCLAPLAKVINDRFGIVEGLMTTVHSITATQKTVDGPSMKDWRGGRAASFNIIPSSTGAAKAVGKVLPALNGKLTGMSFRVPTVDVSVVDLTVRLEKAATYDEIKKAIKEESEGKLKGILGYTEDDVVSTDFVGDNRSSIFDAKAGIALSDKFVKLVSWYDNEWGYSSRVVDLIVHMSKA

SEQ ID NO: 23958 - protein, 294 aa, Arabidopsis thaliana
  peptide (1)..(294): Ceres Seq. ID no. 13591592
MTYMFKYDSVHGQWKHNELKIKDEKTLLFGEKPVTVFGIRNPEDIPWAEAGADYVVESTGVFTDKDKAAAHLKGGAKKVVISAPSKDAPMFVVGVNEHEYKSDLDIVSNASCTTNCLAPLAKVINDRFGIVEGLMTTVHSITATQKTVDGPSMKDWRGGRAASFNIIPSSTGAAKAVGKVLPALNGKLTGMSFRVPTVDVSVVDLTVRLEKAATYDEIKKAIKEESEGKLKGILGYTEDDVVSTDFVGDNRSSIFDAKAGIALSDKFVKLVSWYDNEWGYSSRVVDLIVHMSKA

SEQ ID NO: 23959 - DNA, 1218 bp, Arabidopsis thaliana
  misc_feature (1)..(1218): Ceres Seq. ID no. 12326995
  misc_feature (1)..(1218): Ortholog of  Ceres SEQ ID NO 12598859 as cited in SEQ ID NO 62872
  misc_feature (1)..(1218): Ortholog of  Ceres SEQ ID NO 12617350 as cited in SEQ ID NO 63777
  misc_feature (1)..(1218): Ortholog of  Ceres SEQ ID NO 13598749 as cited in SEQ ID NO 64341
  misc_feature (1)..(1218): Ortholog of  Ceres SEQ ID NO 15176153 as cited in SEQ ID NO 0
  misc_feature (1)..(1218): Ortholog of  Ceres SEQ ID NO 15179157 as cited in SEQ ID NO 0
aaatcaaaacctctcctatatctcttcaatctgatataactacccttctcaatggcttctaattaccgttttgccatcttcctcactctctttttcgccaccgctggtttctccgccgccgcgttggtcgaggagcagccgcttgttatgaaataccacaacggagttctgttgaaaggtaacatcacagtcaatctcgtatggtacgggaaattcacaccgatccaacggtccgtaatcgtcgatttcatccactcgctaaactccaaagacgttgcatcttccgccgcagttccttccgttgcttcgtggtggaagacgacggagaaatacaaaggtggctcttcaacactcgtcgtcgggaaacagcttctactcgagaactatcctctcggaaaatctctcaaaaatccttacctccgtgctttatccaccaaacttaacggcggtctccgttccataaccgtcgttctaacggcgaaagatgttaccgtcgaaagattctgtatgagccggtgcgggactcacggatcctccggttcgaatccccgtcgcgcagctaacggcgcggcttacgtatgggtcgggaactccgagacgcagtgccctggatattgcgcgtggccgtttcaccagccgatttacggaccacaaacgccgccgttagtagcgcctaacggtgacgttggagttgacggaatgattataaaccttgccacacttctagctaacaccgtgacgaatccgtttaataacggatattaccaaggcccaccaactgcaccgcttgaagctgtgtctgcttgtcctggtatattcgggtcaggttcttatccgggttacgcgggtcgggtacttgttgacaaaacaaccgggtctagttacaacgctcgtggactcgccggtaggaaatatctattgccggcgatgtgggatccgcagagttcgacgtgcaagactctggtttgatccaagggatgtgagtaagacacgtggcatagtagtgagagcgatgacgagatctagacggcatgtgtagtcaaaatcaagttgcacgcgagcgtgtgtataaaaaaatctttcgggtttgggtctcgggtttggattgtggatagggctctctctttgctttttgtcgttttgtaatgacgtgtaaaaactgtactcggaaatgtgaagaatgcatataaaataataaaaaatcattttgtttctact

SEQ ID NO: 23960 - protein, 305 aa, Arabidopsis thaliana
  peptide (1)..(305): Ceres Seq. ID no. 12326996
MASNYRFAIFLTLFFATAGFSAAALVEEQPLVMKYHNGVLLKGNITVNLVWYGKFTPIQRSVIVDFIHSLNSKDVASSAAVPSVASWWKTTEKYKGGSSTLVVGKQLLLENYPLGKSLKNPYLRALSTKLNGGLRSITVVLTAKDVTVERFCMSRCGTHGSSGSNPRRAANGAAYVWVGNSETQCPGYCAWPFHQPIYGPQTPPLVAPNGDVGVDGMIINLATLLANTVTNPFNNGYYQGPPTAPLEAVSACPGIFGSGSYPGYAGRVLVDKTTGSSYNARGLAGRKYLLPAMWDPQSSTCKTLV

SEQ ID NO: 23961 - protein, 273 aa, Arabidopsis thaliana
  peptide (1)..(273): Ceres Seq. ID no. 12326997
MKYHNGVLLKGNITVNLVWYGKFTPIQRSVIVDFIHSLNSKDVASSAAVPSVASWWKTTEKYKGGSSTLVVGKQLLLENYPLGKSLKNPYLRALSTKLNGGLRSITVVLTAKDVTVERFCMSRCGTHGSSGSNPRRAANGAAYVWVGNSETQCPGYCAWPFHQPIYGPQTPPLVAPNGDVGVDGMIINLATLLANTVTNPFNNGYYQGPPTAPLEAVSACPGIFGSGSYPGYAGRVLVDKTTGSSYNARGLAGRKYLLPAMWDPQSSTCKTLV

SEQ ID NO: 23962 - protein, 153 aa, Arabidopsis thaliana
  peptide (1)..(153): Ceres Seq. ID no. 12326998
MSRCGTHGSSGSNPRRAANGAAYVWVGNSETQCPGYCAWPFHQPIYGPQTPPLVAPNGDVGVDGMIINLATLLANTVTNPFNNGYYQGPPTAPLEAVSACPGIFGSGSYPGYAGRVLVDKTTGSSYNARGLAGRKYLLPAMWDPQSSTCKTLV

SEQ ID NO: 23963 - DNA, 1574 bp, Arabidopsis thaliana
  misc_feature (1)..(1574): Ceres Seq. ID no. 12328206
  misc_feature (1)..(1574): Ortholog of  Ceres SEQ ID NO 13595688 as cited in SEQ ID NO 54342
  misc_feature (1)..(1574): Ortholog of  Ceres SEQ ID NO 13595240 as cited in SEQ ID NO 56316
  misc_feature (1)..(1574): Ortholog of  Ceres SEQ ID NO 15168425 as cited in SEQ ID NO 57370
cttcttcctcctcctctgttcgtcaatcgccgatctcgttgcttcattttccttgagatcgattggtacaagtgttcatccaatggttggaggaggagttatccggcagcttcttagaaggaaacttcattcccaatcagtcgtgagctttttccctgttacatctttttgattttctgctgtagcttaggatctgtttgaagatagaatcatatgatttgttttggttctgtctacaccttcattgctctgagagattgtccttgaagaattgtaactggaattgttgtggcgttggagattttgggatataagaacttagacttattgatttgtgcttcgagagtatgattaatgttcgatttcttttcagaaaaagtagtcttttgatttgttgagcatacaccttcttgtgtcttggcctttttttttgttttcttactgttgttctgtattatctaccaccataggcaactccggtattgtcatggttgtcttcgaagaaagctaatgaagatgctgggtctgctggtttaagagcatttgctctcatgggtgctggtattaccggattattgagtttttctactgttgcatctgctgatgaggctgaacatggtctggagtgtcctaactacccttggccacatgagggcattctcagctcatatgaccatgcttcgatccgtcgtggtcaccaagtttatcagcaagtttgtgcgtcttgccattcgatgtctctgatctcatacagagacttggtgggtgttgcctacacagaggaagaggcgaaggccatggcagctgaaatcgaggttgttgatggaccaaatgatgagggtgagatgttcacccgacctggtaaactcagtgatcggcttcctgaaccatactcaaatgaatcggctgctaggttcgccaatggaggagcgtatccaccggatctaagtcttgtaactaaggcacgtcacaatggccaaaattatgtctttgctctgttgactggttatcgtgatcctcctgctggaatttcaatcagagaggggctacactacaatccttatttccctggtggagcaatcgctatgccaaaaatgctcaacgatgaagctgtggaatatgaagatggaactcctgcaacagaagcacagatgggtaaagatgttgtatccttcttgtcctgggcagctgaaccagagatggaagagaggaaattgatggggttcaaatggatattcttactgtctttggctctgcttcaagctgcgtattacaggagactgaaatggtcagtgctcaaatcccgtaagcttgttctcgacgttgttaactaatcccgtgaagatcaccttttctctgggtaataatcattaatcttgaaagggataaatggtgaatcccactttttgtctcaaaagacatgtttctttgtttattgtttagaaagtctaatgaggcaaagaagtaaagcttttttaacctcaagtcacacatgattttgagattatattatttctttttggtttgttgtctcctaaaccggactcggtttgtcttaataaaaatgtggtttt

SEQ ID NO: 23964 - protein, 260 aa, Arabidopsis thaliana
  peptide (1)..(260): Ceres Seq. ID no. 12328207
MGAGITGLLSFSTVASADEAEHGLECPNYPWPHEGILSSYDHASIRRGHQVYQQVCASCHSMSLISYRDLVGVAYTEEEAKAMAAEIEVVDGPNDEGEMFTRPGKLSDRLPEPYSNESAARFANGGAYPPDLSLVTKARHNGQNYVFALLTGYRDPPAGISIREGLHYNPYFPGGAIAMPKMLNDEAVEYEDGTPATEAQMGKDVVSFLSWAAEPEMEERKLMGFKWIFLLSLALLQAAYYRRLKWSVLKSRKLVLDVVN

SEQ ID NO: 23965 - protein, 199 aa, Arabidopsis thaliana
  peptide (1)..(199): Ceres Seq. ID no. 12328208
MSLISYRDLVGVAYTEEEAKAMAAEIEVVDGPNDEGEMFTRPGKLSDRLPEPYSNESAARFANGGAYPPDLSLVTKARHNGQNYVFALLTGYRDPPAGISIREGLHYNPYFPGGAIAMPKMLNDEAVEYEDGTPATEAQMGKDVVSFLSWAAEPEMEERKLMGFKWIFLLSLALLQAAYYRRLKWSVLKSRKLVLDVVN

SEQ ID NO: 23966 - protein, 178 aa, Arabidopsis thaliana
  peptide (1)..(178): Ceres Seq. ID no. 12328209
MAAEIEVVDGPNDEGEMFTRPGKLSDRLPEPYSNESAARFANGGAYPPDLSLVTKARHNGQNYVFALLTGYRDPPAGISIREGLHYNPYFPGGAIAMPKMLNDEAVEYEDGTPATEAQMGKDVVSFLSWAAEPEMEERKLMGFKWIFLLSLALLQAAYYRRLKWSVLKSRKLVLDVVN

SEQ ID NO: 23967 - DNA, 1373 bp, Arabidopsis thaliana
  misc_feature (1)..(1373): Ceres Seq. ID no. 13487812
  misc_feature (1)..(1373): Ortholog of  Ceres SEQ ID NO 12609528 as cited in SEQ ID NO 51902
gtgaatcgaaagattaaaggtcaaatttttgtgtcttctcttcctctgtctcatgccacaatttttagatttcaaactttgatccatgacactctccatagcttcctctctcattcccttcagctttctcagagaattgaagtcgagacattagaagtgtttgttgtgtgtgtgtgtgtgtttctatagaatttttgaattttgtgataaaattgtgtgaatgggagctccaaagctgaagtggacaccagaagaagaaacagctcttaaagctggagtacttaaacatggaactggaaaatggcgtaccattctctcagatcctgtgtatagcacaattctgaagtctcgttctaatgtggatctcaaggacaaatggagaaatataagtgtaacagctttatggggatctaggaagaaggctaagcttgctcttaaaagaactcctttgtcgggtagtaggcaagacgataacgctacagctattaccattgtgtctttagctaatggtgatgtaggaggacaacagattgatgcaccatctcctcctgcaggttcttgtgaacctccaagaccttctacaagtgtggataagattatattggaggctattaccagcttgaagagaccatttggtcctgacggaaagtcgatcttgatgtatatagaggagaatttcaagatgcaaccggatatgaaacggcttgtgacttcaaggctgaagtatttgacaaatgttggaacattagttaagaaaaagcacaaatacaggatttctcagaattatatggctgaaggagaaggacaaaggtctcctcaactcttgttggaaggaaacaaggaaaacactccgaaaccggaggagaatggcgtcaaaaatcttactaaatcccaagtaggtggagaagttatgataatgggtatgacagaaaaagaagctgctgcagcagctgcaagagctgtggcagaagcagaatttgcaatggcagaagctgaagaagcagcaagagaggcagataaagcagaagccgaagctgaagctgcccatatttttgcaaaagcggcgatgaaagctgtgaagtatagaatgcatagccaaactcggtaagaattaagaaaatcattgatgttgtatcggttgatatatcttcaattcttcatgttatgtcaagtttcgatcttgcatcgaaatcaacattttacaatcgccgcagtgtttttagtcagtaacagtgtcttctaactcagatgattatgtaaaacctgttccttctcttgcttctgttgatctggttttgttagtaacttcacaggtttctcgtgaaccattttgaaactggtttgaaaagatataaataaggcctttgatttgt

SEQ ID NO: 23968 - protein, 295 aa, Arabidopsis thaliana
  peptide (1)..(295): Ceres Seq. ID no. 13487813
MGAPKLKWTPEEETALKAGVLKHGTGKWRTILSDPVYSTILKSRSNVDLKDKWRNISVTALWGSRKKAKLALKRTPLSGSRQDDNATAITIVSLANGDVGGQQIDAPSPPAGSCEPPRPSTSVDKIILEAITSLKRPFGPDGKSILMYIEENFKMQPDMKRLVTSRLKYLTNVGTLVKKKHKYRISQNYMAEGEGQRSPQLLLEGNKENTPKPEENGVKNLTKSQVGGEVMIMGMTEKEAAAAAARAVAEAEFAMAEAEEAAREADKAEAEAEAAHIFAKAAMKAVKYRMHSQTR

SEQ ID NO: 23969 - protein, 149 aa, Arabidopsis thaliana
  peptide (1)..(149): Ceres Seq. ID no. 13487814
MYIEENFKMQPDMKRLVTSRLKYLTNVGTLVKKKHKYRISQNYMAEGEGQRSPQLLLEGNKENTPKPEENGVKNLTKSQVGGEVMIMGMTEKEAAAAAARAVAEAEFAMAEAEEAAREADKAEAEAEAAHIFAKAAMKAVKYRMHSQTR

SEQ ID NO: 23970 - DNA, 1314 bp, Arabidopsis thaliana
  misc_feature (1)..(1314): Ceres Seq. ID no. 13504718
  misc_feature (1)..(1314): Ortholog of  Ceres SEQ ID NO 13532807 as cited in SEQ ID NO 53012
  misc_feature (1)..(1314): Ortholog of  Ceres SEQ ID NO 13663060 as cited in SEQ ID NO 60964
  misc_feature (1)..(1314): Ortholog of  Ceres SEQ ID NO 13656849 as cited in SEQ ID NO 65764
  misc_feature (1)..(1314): Ortholog of  Ceres SEQ ID NO 13500573 as cited in SEQ ID NO 67431
  misc_feature (1)..(1314): Ortholog of  Ceres SEQ ID NO 13656501 as cited in SEQ ID NO 69206
ctgcttggtttctctcgttctcggtctgatcattgcatcatcatgtctggagaatcaagctctggttctaccgaacattgcatcaaagttgtaccgacacacggtggccgctatgttcagtacaacgtttatggacaactctttgaagtttccagaaagtatgtccctcctattcgtcccattggtagaggcgcttgcggtattgtctgtgctgcggtgaactcagtgactggagagaaagtggctattaagaagatcggtaatgcttttgataacatcatcgatgctaagagaacgctacgtgaaattaaacttctcaggcatatggatcatgagaacgttataaccatcaaagatattgtaagacctccgcaacgagatatcttcaatgatgtctacattgtctatgagttaatggacactgatcttcagcgaatcctccgttctaaccaaacactgaccagtgatcaatgccgtttcctagtataccagctcttaagagggctcaaatacgtgcactcggccaacatattacatcgtgatctaaggccaagcaacgtgctacttaactcgaaaaacgagctaaagattggtgattttgggcttgcaagaacaacttccgacacagacttcatgactgaatatgtcgttacccgttggtacagggctcctgagttgcttcttaactgctcagagtacaccgcagctattgatatttggtctgttggctgcatactcggcgaaatcatgacgggacaaccgttgtttccaggcaaagattatgttcatcagcttaggcttataacagagcttgtaggctctccagacaattccagcctcggcttccttcgcagtgacaacgcaagaagatacgtcaggcaacttccgcgatacccgaaacaacagtttgctgctagattcccgaaaatgcccactacggctatcgatttgcttgagagaatgctcgtctttgatcctaaccggcgcatctcagtcgatgaagcccttggccatgcttacctatcaccgcaccatgatgtggccaaagaaccggtctgttcgactcctttcagctttgatttcgaacatccttcttgcacagaagaacacataaaggagcttatctacaaggagtctgtcaaattcaatcctgaccactgagagagaaacatgtttgaatgatttgattcctttttaaaagtctgctccgtttggtttgatctaagattcctttatattgaatctaaactcattttatctttgattgaataattgctatgatgatacacacatatttatccatatcgtaagccc

SEQ ID NO: 23971 - protein, 386 aa, Arabidopsis thaliana
  peptide (1)..(386): Ceres Seq. ID no. 13504719
LLGFSRSRSDHCIIMSGESSSGSTEHCIKVVPTHGGRYVQYNVYGQLFEVSRKYVPPIRPIGRGACGIVCAAVNSVTGEKVAIKKIGNAFDNIIDAKRTLREIKLLRHMDHENVITIKDIVRPPQRDIFNDVYIVYELMDTDLQRILRSNQTLTSDQCRFLVYQLLRGLKYVHSANILHRDLRPSNVLLNSKNELKIGDFGLARTTSDTDFMTEYVVTRWYRAPELLLNCSEYTAAIDIWSVGCILGEIMTGQPLFPGKDYVHQLRLITELVGSPDNSSLGFLRSDNARRYVRQLPRYPKQQFAARFPKMPTTAIDLLERMLVFDPNRRISVDEALGHAYLSPHHDVAKEPVCSTPFSFDFEHPSCTEEHIKELIYKESVKFNPDH

SEQ ID NO: 23972 - protein, 372 aa, Arabidopsis thaliana
  peptide (1)..(372): Ceres Seq. ID no. 13504720
MSGESSSGSTEHCIKVVPTHGGRYVQYNVYGQLFEVSRKYVPPIRPIGRGACGIVCAAVNSVTGEKVAIKKIGNAFDNIIDAKRTLREIKLLRHMDHENVITIKDIVRPPQRDIFNDVYIVYELMDTDLQRILRSNQTLTSDQCRFLVYQLLRGLKYVHSANILHRDLRPSNVLLNSKNELKIGDFGLARTTSDTDFMTEYVVTRWYRAPELLLNCSEYTAAIDIWSVGCILGEIMTGQPLFPGKDYVHQLRLITELVGSPDNSSLGFLRSDNARRYVRQLPRYPKQQFAARFPKMPTTAIDLLERMLVFDPNRRISVDEALGHAYLSPHHDVAKEPVCSTPFSFDFEHPSCTEEHIKELIYKESVKFNPDH

SEQ ID NO: 23973 - protein, 278 aa, Arabidopsis thaliana
  peptide (1)..(278): Ceres Seq. ID no. 13504721
MDHENVITIKDIVRPPQRDIFNDVYIVYELMDTDLQRILRSNQTLTSDQCRFLVYQLLRGLKYVHSANILHRDLRPSNVLLNSKNELKIGDFGLARTTSDTDFMTEYVVTRWYRAPELLLNCSEYTAAIDIWSVGCILGEIMTGQPLFPGKDYVHQLRLITELVGSPDNSSLGFLRSDNARRYVRQLPRYPKQQFAARFPKMPTTAIDLLERMLVFDPNRRISVDEALGHAYLSPHHDVAKEPVCSTPFSFDFEHPSCTEEHIKELIYKESVKFNPDH

SEQ ID NO: 23974 - DNA, 1473 bp, Arabidopsis thaliana
  misc_feature (1)..(1473): Ceres Seq. ID no. 12357838
  misc_feature (1)..(1473): Ortholog of  Ceres SEQ ID NO 13542155 as cited in SEQ ID NO 64236
attttcaactactttgaagctgcagatctcttttggagattcacatggcgacggagaaatgggtgttcatggtgacagcgcaaactccgacgaacattgcggtgattaagtattggggaaagagacatgaagtccggattctccccgttaacgatagcattagcgtaactcttgatcctgatcatctctgcacagtcactactgttgccgttagtcctgcttttgatcgggatcgaatgtggctcaatggcaaggaaatatctctttctggaagtaggtaccaaaattgtttgagggaaatacgaagtcgtgctggtgatgttgaagacatggaaaaggggatcaagataaggaagaaagattgggagaaattgaatctacatattgcttctcataataacttccctactgctgctggcttagcatcttcagctgctggatttgcttgtctagttttttctcttgcaaagttgatgaatgtagatgaagatccaagccatctttctgcaatagccaggcaaggttcaggaagtgcttgccggagtttatttggtggatttgtcaagtggacaatgggaagcaaagaagatggaagtgacagcgttgcagttcaactggcagatgagaagcattgggatgatcttgttatcatcattgctgtggtgagttcacggcagaaggaaacgagcagtacctccggaatgcgtgaaagtgttgagacaagtttgcttttacagcatagagcaaaagaagttgtgccaaaacggattttgcaaatggaggaagctataaaaaatcgagactttgcatcgtttacacaattgacatgtacagatagtaatcagtttcatgctgtttgtctggatacatctccacccatattctacatgaatgacacttcacacagaataattagcttagttgaaaagtggaaccgttctgaagggacaccacaggttgcttacacatttgatgctggtccaaatgctgtactgattgcacgcaacagaaaggtcgcagtccaattgctccaggggcttctgtactattttccccctaagtcagacactgatatgaagagttacgtagtgggcgataattcaattctaaaagaagcaggattagatggagcaagtggtgtagagaatctgcaacctccacctgaaattaaagacaatattggatctcaggatcaaaaaggagaagtcagttattttatctgcactagacctggaaaaggtcccatcgtgcttcacgaccaaactcaagcccttctcgatcctgaaactggccttcctaagtgagcattctctctgcttcaaactaattattatgattagcatctcctttaactgcaagtttaagatacaatatttgtggcagaataggtgcagctacgttgtcatctaactcttagctttcctattttcaaataaaagaaattcactggttttgttttaccaggataaaacc

SEQ ID NO: 23975 - protein, 419 aa, Arabidopsis thaliana
  peptide (1)..(419): Ceres Seq. ID no. 12357839
MATEKWVFMVTAQTPTNIAVIKYWGKRHEVRILPVNDSISVTLDPDHLCTVTTVAVSPAFDRDRMWLNGKEISLSGSRYQNCLREIRSRAGDVEDMEKGIKIRKKDWEKLNLHIASHNNFPTAAGLASSAAGFACLVFSLAKLMNVDEDPSHLSAIARQGSGSACRSLFGGFVKWTMGSKEDGSDSVAVQLADEKHWDDLVIIIAVVSSRQKETSSTSGMRESVETSLLLQHRAKEVVPKRILQMEEAIKNRDFASFTQLTCTDSNQFHAVCLDTSPPIFYMNDTSHRIISLVEKWNRSEGTPQVAYTFDAGPNAVLIARNRKVAVQLLQGLLYYFPPKSDTDMKSYVVGDNSILKEAGLDGASGVENLQPPPEIKDNIGSQDQKGEVSYFICTRPGKGPIVLHDQTQALLDPETGLPK

SEQ ID NO: 23976 - protein, 411 aa, Arabidopsis thaliana
  peptide (1)..(411): Ceres Seq. ID no. 12357840
MVTAQTPTNIAVIKYWGKRHEVRILPVNDSISVTLDPDHLCTVTTVAVSPAFDRDRMWLNGKEISLSGSRYQNCLREIRSRAGDVEDMEKGIKIRKKDWEKLNLHIASHNNFPTAAGLASSAAGFACLVFSLAKLMNVDEDPSHLSAIARQGSGSACRSLFGGFVKWTMGSKEDGSDSVAVQLADEKHWDDLVIIIAVVSSRQKETSSTSGMRESVETSLLLQHRAKEVVPKRILQMEEAIKNRDFASFTQLTCTDSNQFHAVCLDTSPPIFYMNDTSHRIISLVEKWNRSEGTPQVAYTFDAGPNAVLIARNRKVAVQLLQGLLYYFPPKSDTDMKSYVVGDNSILKEAGLDGASGVENLQPPPEIKDNIGSQDQKGEVSYFICTRPGKGPIVLHDQTQALLDPETGLPK

SEQ ID NO: 23977 - protein, 355 aa, Arabidopsis thaliana
  peptide (1)..(355): Ceres Seq. ID no. 12357841
MWLNGKEISLSGSRYQNCLREIRSRAGDVEDMEKGIKIRKKDWEKLNLHIASHNNFPTAAGLASSAAGFACLVFSLAKLMNVDEDPSHLSAIARQGSGSACRSLFGGFVKWTMGSKEDGSDSVAVQLADEKHWDDLVIIIAVVSSRQKETSSTSGMRESVETSLLLQHRAKEVVPKRILQMEEAIKNRDFASFTQLTCTDSNQFHAVCLDTSPPIFYMNDTSHRIISLVEKWNRSEGTPQVAYTFDAGPNAVLIARNRKVAVQLLQGLLYYFPPKSDTDMKSYVVGDNSILKEAGLDGASGVENLQPPPEIKDNIGSQDQKGEVSYFICTRPGKGPIVLHDQTQALLDPETGLPK

SEQ ID NO: 23978 - DNA, 1302 bp, Arabidopsis thaliana
  misc_feature (1)..(1302): Ceres Seq. ID no. 12338811
  misc_feature (1)..(1302): Ortholog of  Ceres SEQ ID NO 15169191 as cited in SEQ ID NO 58440
  misc_feature (1)..(1302): Ortholog of  Ceres SEQ ID NO 13597523 as cited in SEQ ID NO 64778
atccaacaaatgttaagttcttcagtttccttcaaaattgggttttcttgagaaagcattacagacacagtaatggcggctcctcggaatttaacaggtgacggtggagcaagacagctagtaaaagacgaagaaagccccgcagcttcatcggcagctaaaggactcttaaacgatgactcaccgactggtaaacgaaccaaatcggagagatttcctctctcacggtgggaattcgccgtgtttttcaccgtctttctcgttttcaccaccggactcttttgtatttacctcaccatgcctgccgctgaatacggcaagctcaaagttcctagaactatctccgatcttcgattgctcaaagagaatcttgggtcttatgcaagtgagtaccaagcacggttcattttaggttactgttcgacgtatatctttatgcagacatttatgatacctggaacgatctttatgtcattgcttgctggagctcttttcggtgtggttagaggttttgttcttgttgtccttaatgcaactgctggagcatgttcttgcttcttcttatcgaaattggtcggtaggccattggttaactggttatggcctgaaaagttgaggtttttccaagctgagattgcgaaaagaagagataggctgctaaactacatgctgttcttaaggataacaccaacacttccaaacctctttatcaatttgtcttctccaatcgttgacataccctttcacgtcttctttttggcgactctagtcggtcttatgccagcttcgtacatcacagttagagctggtttggctcttggagatctcagatcagtaaaggatttgtatgatttcaagaccttgtcagtgctgttcctcattggatccatctccatattccctgcccttctaaagagaaagagagtatatgaatgaagagtcgaagactgaagagtataatcatttatatagatattgatgagcagcacctttcagtcgcatggcagcatttcaaaggtgtttatgagctcaagataaaagaagaagattgtttctgcaacatcgcggagcttaaaatcgctaactctggctttgatttgtttattgtcttcgatttgagagcttctcttacccccttgtagtagtaagtgtttgtgtagctagtttactgaatcatgattggctttgtatattgaatacttgattcagagatctgactctgcagcctattggcttatgtataacaaacatgattatgtaaatgcttgaagacattgctttgaccaaatatgggtgattctg

SEQ ID NO: 23979 - protein, 287 aa, Arabidopsis thaliana
  peptide (1)..(287): Ceres Seq. ID no. 12338812
MAAPRNLTGDGGARQLVKDEESPAASSAAKGLLNDDSPTGKRTKSERFPLSRWEFAVFFTVFLVFTTGLFCIYLTMPAAEYGKLKVPRTISDLRLLKENLGSYASEYQARFILGYCSTYIFMQTFMIPGTIFMSLLAGALFGVVRGFVLVVLNATAGACSCFFLSKLVGRPLVNWLWPEKLRFFQAEIAKRRDRLLNYMLFLRITPTLPNLFINLSSPIVDIPFHVFFLATLVGLMPASYITVRAGLALGDLRSVKDLYDFKTLSVLFLIGSISIFPALLKRKRVYE

SEQ ID NO: 23980 - protein, 212 aa, Arabidopsis thaliana
  peptide (1)..(212): Ceres Seq. ID no. 12338814
MPAAEYGKLKVPRTISDLRLLKENLGSYASEYQARFILGYCSTYIFMQTFMIPGTIFMSLLAGALFGVVRGFVLVVLNATAGACSCFFLSKLVGRPLVNWLWPEKLRFFQAEIAKRRDRLLNYMLFLRITPTLPNLFINLSSPIVDIPFHVFFLATLVGLMPASYITVRAGLALGDLRSVKDLYDFKTLSVLFLIGSISIFPALLKRKRVYE

SEQ ID NO: 23981 - protein, 166 aa, Arabidopsis thaliana
  peptide (1)..(166): Ceres Seq. ID no. 12338815
MQTFMIPGTIFMSLLAGALFGVVRGFVLVVLNATAGACSCFFLSKLVGRPLVNWLWPEKLRFFQAEIAKRRDRLLNYMLFLRITPTLPNLFINLSSPIVDIPFHVFFLATLVGLMPASYITVRAGLALGDLRSVKDLYDFKTLSVLFLIGSISIFPALLKRKRVYE

SEQ ID NO: 23982 - DNA, 1551 bp, Arabidopsis thaliana
  misc_feature (1)..(1551): Ceres Seq. ID no. 13487155
  misc_feature (1)..(1551): Ortholog of  Ceres SEQ ID NO 13599900 as cited in SEQ ID NO 531
  misc_feature (1)..(1551): Ortholog of  Ceres SEQ ID NO 13596509 as cited in SEQ ID NO 62004
  misc_feature (1)..(1551): Ortholog of  Ceres SEQ ID NO 13659971 as cited in SEQ ID NO 67565
  misc_feature (1)..(1551): Ortholog of  Ceres SEQ ID NO 13500385 as cited in SEQ ID NO 67583
aattcgaacccttcaagattttcttctctctatctctctgtttctctctgtttctgagatgggtttgtttggaacgaagaagatcgggaagtatgagataggaagaacaatcggagaagggaatttcgcaaaagtgaaacttggttacgacacgaccaatggtacttacgtagctgtcaaaatcatagacaaggctttggttattcaaaagggtcttgagtctcaagtcaagagagagatacgaacgatgaagcttcttaaccatcccaacatcgtccaaatacacgaggtgattggaaccaagacaaagatctgtatagttatggaatacgtttcaggtggtcagctttcagacagacttggaagacagaaaatgaaagaatcagatgctagaaaacttttccaacaattgattgatgctgttgattgttgtcataacagaggagtttatcatagagatcttaagccacaaaacttgttactagattcaaagggtaatctcaaagtttctgactttggattaagtgcagttcctaaatcgggggatatgctctctacagcttgtggctctccatgttatatagcaccagagttgattatgaacaaaggctactcaggagcagcagtagatgtatggtcttgtggagtgattctatttgaattgcttgctggttatccacctttcgatgatcatacacttccggttttgtataagaagatactcagagcagattacacgttcccacctggattcactggagagcagaagaggctaatctttaacattcttgacccaaatcctctaagtcgtataacactagctgagataatcatcaaagattcttggttcaagataggttatacaccagtttatcatcaactttcagactcaatcaaggacaatgtcgcggagataaatgcagcaaccgcgtcatcaaatttcataaatgcttttcagataatagcaatgtctagtgatctagatttgtcaggtctcttcgaagaaaatgatgataagagatataaaacaagaattgggtccaagaacacagcacaagaaacaatcaagaagattgaagctgcagcaacttatgttagtttatcagttgagagaataaagcacttcaaggttaagattcagccaaaggagataagatcaagatcttcttatgacttattatcagcagaggtgatagaggtgactccaacaaattgtgttatagaaatatcgaaatccgcaggcgagttaagactatacatggagttttgccagagcttatcaagcttacttaccgcggaagtaagctaagatagagagccatagattctcaagtaaaaatgttaaaacagaggaagcaaatgaagcatatttttgcagattgaagttgaagtgtaaagaagacaatgaagagaagaaatccaaagaatttagttatgtcttggatcttggtgatcccaaagggttcttattcaggatgtaaaatgatagattggtttctaatcaaactcgtttataaaatagatatataaaaagctgaacaagttctattt

SEQ ID NO: 23983 - protein, 435 aa, Arabidopsis thaliana
  peptide (1)..(435): Ceres Seq. ID no. 13487156
IRTLQDFLLSISLFLSVSEMGLFGTKKIGKYEIGRTIGEGNFAKVKLGYDTTNGTYVAVKIIDKALVIQKGLESQVKREIRTMKLLNHPNIVQIHEVIGTKTKICIVMEYVSGGQLSDRLGRQKMKESDARKLFQQLIDAVDCCHNRGVYHRDLKPQNLLLDSKGNLKVSDFGLSAVPKSGDMLSTACGSPCYIAPELIMNKGYSGAAVDVWSCGVILFELLAGYPPFDDHTLPVLYKKILRADYTFPPGFTGEQKRLIFNILDPNPLSRITLAEIIIKDSWFKIGYTPVYHQLSDSIKDNVAEINAATASSNFINAFQIIAMSSDLDLSGLFEENDDKRYKTRIGSKNTAQETIKKIEAAATYVSLSVERIKHFKVKIQPKEIRSRSSYDLLSAEVIEVTPTNCVIEISKSAGELRLYMEFCQSLSSLLTAEVS

SEQ ID NO: 23984 - protein, 416 aa, Arabidopsis thaliana
  peptide (1)..(416): Ceres Seq. ID no. 13487157
MGLFGTKKIGKYEIGRTIGEGNFAKVKLGYDTTNGTYVAVKIIDKALVIQKGLESQVKREIRTMKLLNHPNIVQIHEVIGTKTKICIVMEYVSGGQLSDRLGRQKMKESDARKLFQQLIDAVDCCHNRGVYHRDLKPQNLLLDSKGNLKVSDFGLSAVPKSGDMLSTACGSPCYIAPELIMNKGYSGAAVDVWSCGVILFELLAGYPPFDDHTLPVLYKKILRADYTFPPGFTGEQKRLIFNILDPNPLSRITLAEIIIKDSWFKIGYTPVYHQLSDSIKDNVAEINAATASSNFINAFQIIAMSSDLDLSGLFEENDDKRYKTRIGSKNTAQETIKKIEAAATYVSLSVERIKHFKVKIQPKEIRSRSSYDLLSAEVIEVTPTNCVIEISKSAGELRLYMEFCQSLSSLLTAEVS

SEQ ID NO: 23985 - protein, 353 aa, Arabidopsis thaliana
  peptide (1)..(353): Ceres Seq. ID no. 13487158
MKLLNHPNIVQIHEVIGTKTKICIVMEYVSGGQLSDRLGRQKMKESDARKLFQQLIDAVDCCHNRGVYHRDLKPQNLLLDSKGNLKVSDFGLSAVPKSGDMLSTACGSPCYIAPELIMNKGYSGAAVDVWSCGVILFELLAGYPPFDDHTLPVLYKKILRADYTFPPGFTGEQKRLIFNILDPNPLSRITLAEIIIKDSWFKIGYTPVYHQLSDSIKDNVAEINAATASSNFINAFQIIAMSSDLDLSGLFEENDDKRYKTRIGSKNTAQETIKKIEAAATYVSLSVERIKHFKVKIQPKEIRSRSSYDLLSAEVIEVTPTNCVIEISKSAGELRLYMEFCQSLSSLLTAEVS

SEQ ID NO: 23986 - DNA, 1206 bp, Arabidopsis thaliana
  misc_feature (1)..(1206): Ceres Seq. ID no. 12335319
  misc_feature (1)..(1206): Ortholog of  Ceres SEQ ID NO 14301430 as cited in SEQ ID NO 56553
  misc_feature (1)..(1206): Ortholog of  Ceres SEQ ID NO 13639124 as cited in SEQ ID NO 56718
  misc_feature (1)..(1206): Ortholog of  Ceres SEQ ID NO 15175700 as cited in SEQ ID NO 58584
  misc_feature (1)..(1206): Ortholog of  Ceres SEQ ID NO 13596474 as cited in SEQ ID NO 62169
  misc_feature (1)..(1206): Ortholog of  Ceres SEQ ID NO 13598714 as cited in SEQ ID NO 62656
  misc_feature (1)..(1206): Ortholog of  Ceres SEQ ID NO 13596969 as cited in SEQ ID NO 63375
  misc_feature (1)..(1206): Ortholog of  Ceres SEQ ID NO 13597519 as cited in SEQ ID NO 64759
  misc_feature (1)..(1206): Ortholog of  Ceres SEQ ID NO 13597870 as cited in SEQ ID NO 64982
  misc_feature (1)..(1206): Ortholog of  Ceres SEQ ID NO 13656123 as cited in SEQ ID NO 65212
  misc_feature (1)..(1206): Ortholog of  Ceres SEQ ID NO 13595926 as cited in SEQ ID NO 67778
  misc_feature (1)..(1206): Ortholog of  Ceres SEQ ID NO 13662323 as cited in SEQ ID NO 68305
aaaacatagtcaaatcaaattttctaagtgtctcataaaaaatgacgagattcggattagctcttttgatgattcttgtgattcaagggtttgtgatcttttcagaagcacaattgaagatgggattctacgaccaaacgtgcccttacgcagagaagatcgtacaagatgttgtcaaccaacatataaacaatgcaccctctttggctgctggcctaattaggatgcattttcatgactgcttcgttcggggttgtgatggttcgatcttaatcaacgcgacatcgagcaaccaacaagtggagaagcttgctcctccgaatctaactgtgagaggtttcgattttatcgataaagtaaagtctgctctagaatcaaagtgccctggaatcgtctcttgcgctgatatcatcacacttgctactagagactctattgttgctattgcttagggtggaccgacatggaacgttccaacggggcgcagagacggacgtatctctaactttgccgaggctatgaacaatattcctcctcctttcggaaacttcacgactctgataaccctctttggaaaccaaggacttgatgttaaagacctcgtcttgttatccggtgcccacacgattggagtgtctcattgctcctccttctcaaaccgtctcttcaatttcaccggcgttggagaccaagatccatcgctcgacagcgaatatgccgacaatctcaaatcacggagatgtttatctatcgctgacaataccacaaaagtcgaaatggatcccggtagtcgaaacaccttcgatcttagctactaccgtcttgtcctaaaacgtcgtggactttttgagtctgacgctgcattgactatgaatcctgcggcattggctcaggtcaaacgcttcgccggaggatcggagcaagagttctttgctgagttctccaactccatggagaaaatgggaaggattggggtcaaaacagggtcggatggggagattcgaagaacatgtgcatttgttaactaaaagtgtttcttactttttctttcgcaacttttttgttttgttttaaatatcttttatattggtttttatgttccttttgtcaacttttttgggtgtttggaagaatttcgagatatgtattattgtatgtggtgaatatgtgattttcaaataaatttcacgtctgtgaaaatcgttg

SEQ ID NO: 23987 - protein, 169 aa, Arabidopsis thaliana
  peptide (1)..(169): Ceres Seq. ID no. 12335320
MNNIPPPFGNFTTLITLFGNQGLDVKDLVLLSGAHTIGVSHCSSFSNRLFNFTGVGDQDPSLDSEYADNLKSRRCLSIADNTTKVEMDPGSRNTFDLSYYRLVLKRRGLFESDAALTMNPAALAQVKRFAGGSEQEFFAEFSNSMEKMGRIGVKTGSDGEIRRTCAFVN

SEQ ID NO: 23988 - protein, 136 aa, Arabidopsis thaliana
  peptide (1)..(136): Ceres Seq. ID no. 12335321
MTRFGLALLMILVIQGFVIFSEAQLKMGFYDQTCPYAEKIVQDVVNQHINNAPSLAAGLIRMHFHDCFVRGCDGSILINATSSNQQVEKLAPPNLTVRGFDFIDKVKSALESKCPGIVSCADIITLATRDSIVAIA

SEQ ID NO: 23989 - protein, 127 aa, Arabidopsis thaliana
  peptide (1)..(127): Ceres Seq. ID no. 12335322
MILVIQGFVIFSEAQLKMGFYDQTCPYAEKIVQDVVNQHINNAPSLAAGLIRMHFHDCFVRGCDGSILINATSSNQQVEKLAPPNLTVRGFDFIDKVKSALESKCPGIVSCADIITLATRDSIVAIA

SEQ ID NO: 23990 - DNA, 1101 bp, Arabidopsis thaliana
  misc_feature (1)..(1101): Ceres Seq. ID no. 12396161
  misc_feature (1)..(1101): Ortholog of  Ceres SEQ ID NO 14303471 as cited in SEQ ID NO 59423
aaaaaaccccaaacttcttgattctcccctccgataaccaaaaaatccctattttccgagatgaataatacacgagaagaagtaggggaattcactcaaatcttcaacgctttaatgagtcttatgaggaaatttatattcaaagttctacgcgtcggtccaatccctactaacatttctttcatcatggatggaaaccgtaggttcgccaagaaacgcaatcttgaaggcctagacgcaggacacagagctggtttcatatccgtcaaatatattcttcaatactgcaaagagattggtgtaccgtatgtcacactctacgcatttggtatggacaatttcaagagaggacctgaagaagtcaagtgtgtgatggatctaatgcttgagaaagtcgagctcacgatcgatcaagctgtatcagggaatatgaacggcgtgagaataatctttgccggcgatttgaattcgttaaacgagcgttttagagctgcgacaaagaaactgatggagcttacggaggagaacagagatctgattgttgtggtttgcgttgcttatagcacaagtgtcgagattgttcacgctgttcgagattcttgtgttagaaagagtaaaactggagatggttcttcagctttggagttgagtgatattgaagagtgtatgtatacatcggttgtgccggttccggatcttatggtaagaaccggaggaggagatcggctgagtaacttcatgacgtggcaaacttctagggcacttcttcatagaacggaggctctttggccggagttagggctatggcatttggtttgggccattctgaaattccagagaatgcaagattacttgcagaagaagaagaagctccactaaatagtttctaagttaaaccctagaatgaacttaaacccttatgtttgattacatgtttcttgtggtataagaaacaacgaaccgaaactgagaaaccacaagaaaatcctttttattatgtatgggatacaaaataacaaaaacagacataaaacatcgataattattcaatttaacgatgctaaaacactacaattagaggcttaatttaaagacagtttg

SEQ ID NO: 23991 - protein, 272 aa, Arabidopsis thaliana
  peptide (1)..(272): Ceres Seq. ID no. 12396162
MNNTREEVGEFTQIFNALMSLMRKFIFKVLRVGPIPTNISFIMDGNRRFAKKRNLEGLDAGHRAGFISVKYILQYCKEIGVPYVTLYAFGMDNFKRGPEEVKCVMDLMLEKVELTIDQAVSGNMNGVRIIFAGDLNSLNERFRAATKKLMELTEENRDLIVVVCVAYSTSVEIVHAVRDSCVRKSKTGDGSSALELSDIEECMYTSVVPVPDLMVRTGGGDRLSNFMTWQTSRALLHRTEALWPELGLWHLVWAILKFQRMQDYLQKKKKLH

SEQ ID NO: 23992 - protein, 254 aa, Arabidopsis thaliana
  peptide (1)..(254): Ceres Seq. ID no. 12396163
MSLMRKFIFKVLRVGPIPTNISFIMDGNRRFAKKRNLEGLDAGHRAGFISVKYILQYCKEIGVPYVTLYAFGMDNFKRGPEEVKCVMDLMLEKVELTIDQAVSGNMNGVRIIFAGDLNSLNERFRAATKKLMELTEENRDLIVVVCVAYSTSVEIVHAVRDSCVRKSKTGDGSSALELSDIEECMYTSVVPVPDLMVRTGGGDRLSNFMTWQTSRALLHRTEALWPELGLWHLVWAILKFQRMQDYLQKKKKLH

SEQ ID NO: 23993 - protein, 251 aa, Arabidopsis thaliana
  peptide (1)..(251): Ceres Seq. ID no. 12396164
MRKFIFKVLRVGPIPTNISFIMDGNRRFAKKRNLEGLDAGHRAGFISVKYILQYCKEIGVPYVTLYAFGMDNFKRGPEEVKCVMDLMLEKVELTIDQAVSGNMNGVRIIFAGDLNSLNERFRAATKKLMELTEENRDLIVVVCVAYSTSVEIVHAVRDSCVRKSKTGDGSSALELSDIEECMYTSVVPVPDLMVRTGGGDRLSNFMTWQTSRALLHRTEALWPELGLWHLVWAILKFQRMQDYLQKKKKLH

SEQ ID NO: 23994 - DNA, 1965 bp, Arabidopsis thaliana
  misc_feature (1)..(1965): Ceres Seq. ID no. 12340033
  misc_feature (1)..(1965): Ortholog of  Ceres SEQ ID NO 15175923 as cited in SEQ ID NO 54037
  misc_feature (1)..(1965): Ortholog of  Ceres SEQ ID NO 13503610 as cited in SEQ ID NO 62416
  misc_feature (1)..(1965): Ortholog of  Ceres SEQ ID NO 13657610 as cited in SEQ ID NO 66165
  misc_feature (1)..(1965): Ortholog of  Ceres SEQ ID NO 13598312 as cited in SEQ ID NO 68448
  misc_feature (1)..(1965): Ortholog of  Ceres SEQ ID NO 13596100 as cited in SEQ ID NO 68573
gccaacacaactccttataagatatacacttcatcaacctatagatctcactcacataatcaacctacaaaacaaaaacaagaatgggtagatccaacgagcaagatctgctctctaccgagatcgttaatcgtgggatcgaaccatccggtcctaacgccggctcaccaacgttctcggttagggtcaggagacgtttgcctgattttcttcagtcggtgaacttgaagtacgtgaaacttggttaccactacctcataaaccatgcggtttatttggcgaccataccggttcttgtgctggtttttagtgctgaggttgggagtttaagcagagaagagatttggaagaagctttgggactatgatcttgcaactgttatcggattcttcggtgtctttgttttaaccgcttgtgtctacttcatgtctcgtcctcgctctgtttatcttattgatttcgcttgttacaagccctccgatgaacacaaggtgacaaaagaagagttcatagaactagcgagaaaatcagggaagttcgacgaagagacactcggtttcaagaagaggatcttacaagcctcaggcataggcgacgagacatacgtcccaagatccatctcttcatcagaaaacataacaacgatgaaagaaggtcgtgaagaagcctctacagtgatctttggagcactagacgaactcttcgagaagacacgtgtaaaacctaaagacgttggtgtccttgtggttaactgtagcattttcaacccgacaccgtcgttgtccgcaatggtgataaaccattacaagatgagagggaacatacttagttacaaccttggagggatgggatgttcggctggaatcatagctattgatcttgctcgtgacatgcttcagtctaaccctaatagttatgctgttgttgtgagtactgagatggttgggtataattggtacgtgggaagtgacaagtcaatggttatacctaattgtttctttaggatgggttgttctgccgttatgctctctaaccgtcgtcgtgactttcgccatgctaagtaccgtctcgagcacattgtccgaactcataaggctgctgacgaccgtagcttcaggagtgtgtaccaggaagaagatgaacaaggattcaaggggttgaagataagtagagacttaatggaagttggaggtgaagctctcaagacaaacatcactaccttaggtcctcttgtcctacctttctccgagcagcttctcttctttgctgctttgctccgccgaacattctcacctgctgccaaaacgtccacaaccacttccttctctacttccgccaccgcaaaaaccaatggaatcaagtcttcctcttccgatctgtccaagccatacatcccggactacaagctcgccttcgagcatttttgcttccacgcggcaagcaaagtagtgcttgaagagcttcaaaagaatctaggcttgagtgaagagaatatggaggcttctaggatgacacttcacaggtttggaaacacttctagcagtggaatctggtatgagttggcttacatggaggccaaggaaagtgttcgtagaggcgatagggtttggcagatcgctttcggttctggttttaagtgtaacagtgtggtgtggaaggcaatgaggaaggtgaagaagccaaccaggaacaatccttgggtggattgcatcaaccgttaccctgtgcctctctaaattatcattcttctaaattaaatcaagtaagatctctaattactccaaccaaaagatacagtttggttggatgataggagttatttactgatcattcgtatctaagtctgttataagaatggatgtggctagagtcctgttcagcttcaacttgttttattttttgtttgttctctattggatcttcataaactttgagagattaaagaaaaaaactcttctttagttc

SEQ ID NO: 23995 - protein, 550 aa, Arabidopsis thaliana
  peptide (1)..(550): Ceres Seq. ID no. 12340034
MGRSNEQDLLSTEIVNRGIEPSGPNAGSPTFSVRVRRRLPDFLQSVNLKYVKLGYHYLINHAVYLATIPVLVLVFSAEVGSLSREEIWKKLWDYDLATVIGFFGVFVLTACVYFMSRPRSVYLIDFACYKPSDEHKVTKEEFIELARKSGKFDEETLGFKKRILQASGIGDETYVPRSISSSENITTMKEGREEASTVIFGALDELFEKTRVKPKDVGVLVVNCSIFNPTPSLSAMVINHYKMRGNILSYNLGGMGCSAGIIAIDLARDMLQSNPNSYAVVVSTEMVGYNWYVGSDKSMVIPNCFFRMGCSAVMLSNRRRDFRHAKYRLEHIVRTHKAADDRSFRSVYQEEDEQGFKGLKISRDLMEVGGEALKTNITTLGPLVLPFSEQLLFFAALLRRTFSPAAKTSTTTSFSTSATAKTNGIKSSSSDLSKPYIPDYKLAFEHFCFHAASKVVLEELQKNLGLSEENMEASRMTLHRFGNTSSSGIWYELAYMEAKESVRRGDRVWQIAFGSGFKCNSVVWKAMRKVKKPTRNNPWVDCINRYPVPL

SEQ ID NO: 23996 - protein, 436 aa, Arabidopsis thaliana
  peptide (1)..(436): Ceres Seq. ID no. 12340035
MSRPRSVYLIDFACYKPSDEHKVTKEEFIELARKSGKFDEETLGFKKRILQASGIGDETYVPRSISSSENITTMKEGREEASTVIFGALDELFEKTRVKPKDVGVLVVNCSIFNPTPSLSAMVINHYKMRGNILSYNLGGMGCSAGIIAIDLARDMLQSNPNSYAVVVSTEMVGYNWYVGSDKSMVIPNCFFRMGCSAVMLSNRRRDFRHAKYRLEHIVRTHKAADDRSFRSVYQEEDEQGFKGLKISRDLMEVGGEALKTNITTLGPLVLPFSEQLLFFAALLRRTFSPAAKTSTTTSFSTSATAKTNGIKSSSSDLSKPYIPDYKLAFEHFCFHAASKVVLEELQKNLGLSEENMEASRMTLHRFGNTSSSGIWYELAYMEAKESVRRGDRVWQIAFGSGFKCNSVVWKAMRKVKKPTRNNPWVDCINRYPVPL

SEQ ID NO: 23997 - protein, 363 aa, Arabidopsis thaliana
  peptide (1)..(363): Ceres Seq. ID no. 12340036
MKEGREEASTVIFGALDELFEKTRVKPKDVGVLVVNCSIFNPTPSLSAMVINHYKMRGNILSYNLGGMGCSAGIIAIDLARDMLQSNPNSYAVVVSTEMVGYNWYVGSDKSMVIPNCFFRMGCSAVMLSNRRRDFRHAKYRLEHIVRTHKAADDRSFRSVYQEEDEQGFKGLKISRDLMEVGGEALKTNITTLGPLVLPFSEQLLFFAALLRRTFSPAAKTSTTTSFSTSATAKTNGIKSSSSDLSKPYIPDYKLAFEHFCFHAASKVVLEELQKNLGLSEENMEASRMTLHRFGNTSSSGIWYELAYMEAKESVRRGDRVWQIAFGSGFKCNSVVWKAMRKVKKPTRNNPWVDCINRYPVPL

SEQ ID NO: 23998 - DNA, 1454 bp, Arabidopsis thaliana
  misc_feature (1)..(1454): Ceres Seq. ID no. 12376228
  misc_feature (1)..(1454): Ortholog of  Ceres SEQ ID NO 13595870 as cited in SEQ ID NO 62101
  misc_feature (1)..(1454): Ortholog of  Ceres SEQ ID NO 13590241 as cited in SEQ ID NO 63878
  misc_feature (1)..(1454): Ortholog of  Ceres SEQ ID NO 13657939 as cited in SEQ ID NO 66349
  misc_feature (1)..(1454): Ortholog of  Ceres SEQ ID NO 13660597 as cited in SEQ ID NO 67655
actttaaaacaaaaaaaaagttgataaattgcttcagtgtcaaattctgagatctgtaaaagatgagcgacggagacgacgctgctagacgccgtaccgcggcggtgactgattaccggaagaagctccttcatcacaaggagctcgaatcccgtgtccgaacagctagggagaatttaagagcagctaagaaggaattcaacaaaactgaggatgatttgaagtctcttcaaagcgttggccagattattggagaagtactacgtcctcttgataacgagcgattgattgttaaggcaagtagtggccctcgttatgtggtgggttgtcgtagcaaggtggacaaggaaaagcttacttctggaactcgagttgtcctggatatgactacgctgacaattatgcgagcccttcctcgtgaagttgatcctgttgtttataacatgttgcatgaagatccaggcaacattagttactcagctgtgggtggtttaggtgatcagatcagagaacttagggaatctattgagctgcctctcatgaatcctgaacttttccttagagttgggattaaacctcctaagggtgtccttctgtatggacctccgggtactggaaaaactctactagctagggctattgccagcaatatcgacgccaacttcttgaaggttgtatctagtgcaatcatagacaaatacattggagaaagtgctaggttgattcgagaaatgtttaactatgctcgtgaacatcagccttgtatcattttcatggatgaaatcgatgctattggtggacgccgttttagtgaaggaactagtgctgatcgtgaaattcaaagaacacttatggagttacttaaccagcttgatgggtttgaccaacttggaaaggtgaaaatgataatggccaccaacaggccggatgttcttgatccagcacttctccgtccgggtaggttagatagaaagatcgagatcccgttgccaaatgaacaatcaagaatggaaatcctcaagatccacgcatctggcattgccaagcatggagaaatagactatgaggctatcgtgaaacttggagagggtttcaatggtgccgatctgcgtaacatatgcactgaagctggaatgttcgcaatcagagcagagcgtgactatgtaatacatgaagacttcatgaaggctgtgagaaagctgagcgaggccaagaagcttgagtcgagctctcactataacgcggattttgggaaagagtaagaaaagaataagctcagagaagaagagagggcctaaagggcagtgaaaaactctgttatttacttcgaaaaacaagctgatgattctgtttcagtttctcaatgttttgttttgaggttctagtaaacacaaaaattcttgttttagtaatgacaacaattttctgtttatgcatcatcctatatctttttt

SEQ ID NO: 23999 - protein, 399 aa, Arabidopsis thaliana
  peptide (1)..(399): Ceres Seq. ID no. 12376229
MSDGDDAARRRTAAVTDYRKKLLHHKELESRVRTARENLRAAKKEFNKTEDDLKSLQSVGQIIGEVLRPLDNERLIVKASSGPRYVVGCRSKVDKEKLTSGTRVVLDMTTLTIMRALPREVDPVVYNMLHEDPGNISYSAVGGLGDQIRELRESIELPLMNPELFLRVGIKPPKGVLLYGPPGTGKTLLARAIASNIDANFLKVVSSAIIDKYIGESARLIREMFNYAREHQPCIIFMDEIDAIGGRRFSEGTSADREIQRTLMELLNQLDGFDQLGKVKMIMATNRPDVLDPALLRPGRLDRKIEIPLPNEQSRMEILKIHASGIAKHGEIDYEAIVKLGEGFNGADLRNICTEAGMFAIRAERDYVIHEDFMKAVRKLSEAKKLESSSHYNADFGKE

SEQ ID NO: 24000 - protein, 292 aa, Arabidopsis thaliana
  peptide (1)..(292): Ceres Seq. ID no. 12376230
MTTLTIMRALPREVDPVVYNMLHEDPGNISYSAVGGLGDQIRELRESIELPLMNPELFLRVGIKPPKGVLLYGPPGTGKTLLARAIASNIDANFLKVVSSAIIDKYIGESARLIREMFNYAREHQPCIIFMDEIDAIGGRRFSEGTSADREIQRTLMELLNQLDGFDQLGKVKMIMATNRPDVLDPALLRPGRLDRKIEIPLPNEQSRMEILKIHASGIAKHGEIDYEAIVKLGEGFNGADLRNICTEAGMFAIRAERDYVIHEDFMKAVRKLSEAKKLESSSHYNADFGKE

SEQ ID NO: 24001 - protein, 286 aa, Arabidopsis thaliana
  peptide (1)..(286): Ceres Seq. ID no. 12376231
MRALPREVDPVVYNMLHEDPGNISYSAVGGLGDQIRELRESIELPLMNPELFLRVGIKPPKGVLLYGPPGTGKTLLARAIASNIDANFLKVVSSAIIDKYIGESARLIREMFNYAREHQPCIIFMDEIDAIGGRRFSEGTSADREIQRTLMELLNQLDGFDQLGKVKMIMATNRPDVLDPALLRPGRLDRKIEIPLPNEQSRMEILKIHASGIAKHGEIDYEAIVKLGEGFNGADLRNICTEAGMFAIRAERDYVIHEDFMKAVRKLSEAKKLESSSHYNADFGKE

SEQ ID NO: 24002 - DNA, 1736 bp, Arabidopsis thaliana
  misc_feature (1)..(1736): Ceres Seq. ID no. 12601746
  misc_feature (1)..(1736): Ortholog of  Ceres SEQ ID NO 15174547 as cited in SEQ ID NO 59586
  misc_feature (1)..(1736): Ortholog of  Ceres SEQ ID NO 15169470 as cited in SEQ ID NO 66036
atccattctctgccgaactagtcgtcaatcgaaatcccaaagatcagcgatggtgactctaaacgcttcttctcctctcacgaccaagtcgttcctcccctaccgtcacgctcctcgccgtccaatctctttctcccctgtcttcgccgttcattcgactgaccccaagaaatctacccaatcagcctccgcttcggttaaatggagtctagagagttggaagtcgaagaaagctttgcaattgccggattatcctgatcagaaggatgttgattcggttctacagacgctttcttcttttcctcctatagttttcgctggtgaggctaggaaactagaggataagcttggtcaagcggctatgggtcaagcctttatgcttcaaggtggtgattgtgctgagagtttcaaggaatttaacgctaataacattagagacacctttagggttcttcttcagatgggtgttgttctcatgttcggtggccagttaccagttatcaaggtgggaagaatggctggtcagtttgcgaagccgagatcagacccatttgaggagaaagatggtgtgaagctgccgagttacagaggagataacataaatggtgatgcttttgatgagaaatcgaggattcctgatcctcataggatggttagagcgtacacacagtctgtggctacgttgaatctcttgagagcatttgctactggaggttatgcagctatgcagagagttagccagtggaaccttgatttcacgcaacatagtgaacagggtgacaggtaccgtgaattggctaatagagttgatgaggctttgggattcatgggtgcagctggacttactagtgctcacccgatcatgactactactgagttttggacatcccatgagtgtttgttattgccttatgagcaagcactcacaagagaggattcaacatctggactttactatgattgctctgcgcacatgctttgggttggagaacgaactcgccaacttgatggtgctcatgttgagtttctgaggggaatcgctaaccccctcggaatcaaggtgagtgataaaatggtccctagtgaactggttaagctgatagagatactaaaccctcagaacaagcctggaaggattacggttatagtgagaatgggagctgagaatatgcgggtcaagcttcctaatttgatcagagcagtccgtggagccggtcagattgtgacttgggttagtgatccaatgcacggaaacacaatcatggctcctggtgggctaaaaactcgttctttcgatgcaatcagggcggaattgagagcgttcttcgacgtccatgatcaagaagggagtttccctggcggggttcatttagaaatgactggtcaaaacgtgacagaatgtgtcggagggtcacgcaccatcacttacaacgatctaagctcacgctaccacactcactgtgacccaagactcaacgcatctcagtctctggagcttgcattcatcattgcagagcgtctgcgaaagagaaggcttggttccgggaatcttccgtcatctattggagtctagagaacaagaaaatacttatccgagctaggatgtgtgtgtatagaggctgatctctacttattaagttgccaagttaaatgagcttgtgtactgttaaaagtaagatattgttgtttttgtgtgttgggttatgattttgtttgaaataagtggctgactttat

SEQ ID NO: 24003 - protein, 523 aa, Arabidopsis thaliana
  peptide (1)..(523): Ceres Seq. ID no. 12601747
SILCRTSRQSKSQRSAMVTLNASSPLTTKSFLPYRHAPRRPISFSPVFAVHSTDPKKSTQSASASVKWSLESWKSKKALQLPDYPDQKDVDSVLQTLSSFPPIVFAGEARKLEDKLGQAAMGQAFMLQGGDCAESFKEFNANNIRDTFRVLLQMGVVLMFGGQLPVIKVGRMAGQFAKPRSDPFEEKDGVKLPSYRGDNINGDAFDEKSRIPDPHRMVRAYTQSVATLNLLRAFATGGYAAMQRVSQWNLDFTQHSEQGDRYRELANRVDEALGFMGAAGLTSAHPIMTTTEFWTSHECLLLPYEQALTREDSTSGLYYDCSAHMLWVGERTRQLDGAHVEFLRGIANPLGIKVSDKMVPSELVKLIEILNPQNKPGRITVIVRMGAENMRVKLPNLIRAVRGAGQIVTWVSDPMHGNTIMAPGGLKTRSFDAIRAELRAFFDVHDQEGSFPGGVHLEMTGQNVTECVGGSRTITYNDLSSRYHTHCDPRLNASQSLELAFIIAERLRKRRLGSGNLPSSIGV

SEQ ID NO: 24004 - protein, 507 aa, Arabidopsis thaliana
  peptide (1)..(507): Ceres Seq. ID no. 12601748
MVTLNASSPLTTKSFLPYRHAPRRPISFSPVFAVHSTDPKKSTQSASASVKWSLESWKSKKALQLPDYPDQKDVDSVLQTLSSFPPIVFAGEARKLEDKLGQAAMGQAFMLQGGDCAESFKEFNANNIRDTFRVLLQMGVVLMFGGQLPVIKVGRMAGQFAKPRSDPFEEKDGVKLPSYRGDNINGDAFDEKSRIPDPHRMVRAYTQSVATLNLLRAFATGGYAAMQRVSQWNLDFTQHSEQGDRYRELANRVDEALGFMGAAGLTSAHPIMTTTEFWTSHECLLLPYEQALTREDSTSGLYYDCSAHMLWVGERTRQLDGAHVEFLRGIANPLGIKVSDKMVPSELVKLIEILNPQNKPGRITVIVRMGAENMRVKLPNLIRAVRGAGQIVTWVSDPMHGNTIMAPGGLKTRSFDAIRAELRAFFDVHDQEGSFPGGVHLEMTGQNVTECVGGSRTITYNDLSSRYHTHCDPRLNASQSLELAFIIAERLRKRRLGSGNLPSSIGV

SEQ ID NO: 24005 - protein, 403 aa, Arabidopsis thaliana
  peptide (1)..(403): Ceres Seq. ID no. 12601749
MGQAFMLQGGDCAESFKEFNANNIRDTFRVLLQMGVVLMFGGQLPVIKVGRMAGQFAKPRSDPFEEKDGVKLPSYRGDNINGDAFDEKSRIPDPHRMVRAYTQSVATLNLLRAFATGGYAAMQRVSQWNLDFTQHSEQGDRYRELANRVDEALGFMGAAGLTSAHPIMTTTEFWTSHECLLLPYEQALTREDSTSGLYYDCSAHMLWVGERTRQLDGAHVEFLRGIANPLGIKVSDKMVPSELVKLIEILNPQNKPGRITVIVRMGAENMRVKLPNLIRAVRGAGQIVTWVSDPMHGNTIMAPGGLKTRSFDAIRAELRAFFDVHDQEGSFPGGVHLEMTGQNVTECVGGSRTITYNDLSSRYHTHCDPRLNASQSLELAFIIAERLRKRRLGSGNLPSSIGV

SEQ ID NO: 24006 - DNA, 2643 bp, Arabidopsis thaliana
  misc_feature (1)..(2643): Ceres Seq. ID no. 13508995
  misc_feature (1)..(2643): Ortholog of  Ceres SEQ ID NO 13657677 as cited in SEQ ID NO 66119
atgctgctgatacatatcagaagtactcgaaagatcttagctttggggcgtcatgtttttccttctaatgccttcttctccgtctcttctcgaccttctctgtcttcctcggacgaagtggcggctcatgatgtcgcatctttgctaaaaacccccaattgggagaagaacagttctcttaaatctctagtctctcacatgaatccaaatgtcgcttcacaggtcatttcgcttcaacgcagtgacaacgatatttgcgttcgctttttcatgtgggtctgcaagcattcgtcgtattgtttcgacccaactcagaaaaatcagcttttgaaactgattgtttcttccggattgtatcgagttgcgcatgctgttattgttgcgttgatcaaggaatgtagtagatgcgagaaagagatgttgaaactaatgtattgttttgatgagctgagagaagtttttgggttccggttaaattacccttgttacagctctcttttgatgtccttagctaaacttgatttaggatttttggcttacgtgacttatagaagaatggaagctgacggatttgttgttggtatgattgattacagaaccattgtcaatgctctgtgtaagaatggatacacggaagccgctgagatgttcatgtctaagattcttaaaattgggtttgtgttagattcccatataggcacttctttgttactgggtttttgccgtggattgaatctcagagatgcactcaaggtgtttgatgtaatgtctaaggaggtaacttgtgcaccgaactctgttagttactccattttgattcacgggttgtgtgaagtagggagacttgaagaagcatttggcctaaaagatcaaatgggtgagaaaggttgccaaccaagcacacgtacatatactgtgcttattaaagccttgtgcgatagaggtttgattgataaagcttttaacttgtttgatgagatgattcctagagggtgtaaaccaaacgtccacacttacactgttttgattgatgggttgtgtagagacggaaagattgaagaggctaatggggtttgtcgaaagatggttaaagacaggatatttcctagtgtaataacttacaatgcgttgataaatggctactgcaaagatggacgggttgttcccgcttttgagcttcttactgtaatggagaagagggcttgcaaaccaaatgtaagaacttttaacgagcttatggaagggttgtgtagagtcgggaaaccgtacaaggctgtgcaccttttgaagagaatgctggacaatggcctgtcacctgacattgtgagctataatgttttgatcgatgggctttgtagagaaggccatatgaatacggcttacaagctacttagctcgatgaactgctttgacattgagcctgattgtcttacattcaccgctataataaatgctttctgcaaacaagggaaggctgacgttgctagcgcgtttttaggtttgatgcttagaaaaggaataagcctagatgaagtaacaggtacaactcttatcgatggtgtctgtaaagtcggtaaaacccgtgacgcattgtttatcctggagacattggttaaaatgagaattttgacaactcctcactccctgaatgtgattcttgatatgctcagtaaaggttgtaaagtgaaggaggaattagcaatgcttgggaaaatcaataagcttggtttagttccttctgtggtgacatacacaacattggttgatgggttgattcgatcaggtgatattactggttccttcaggatcctagaactgatgaagttaagtgggtgtttgccgaatgtctatccatacacaatcatcataaatggtctttgtcaatttggaagagtcgaggaagcagagaagcttctttctgctatgcaagattcaggagtttcaccaaaccatgtcacttataccgttatggtgaaaggatatgtcaacaatggaaaactagaccgtgctcttgaaacagtaagagcaatggttgaaagaggatatgaactaaatgaccgtatctattcttcattgttacagggatttgtcttatctcaaaagggtattgataattcagaagagagtacagtttccgatattgctcttagagaaaccgatcctgaatgtatcaacgaactcatatctgtggttgaacaacttggtgggtgtatcagcgggttatgtattttcttggtcacacggttatgcaaagagggaagaacggatgagtccaacgatctagtccaaaatgtactcgagagaggtgtttttcttgagaaggccatggacatcattatggaatcttattgcagcaagaagaaacacaccaagtgtatggagctgataacacttgttctcaaatccggatttgtcccgagtttcaaatccttctgcctagtgattcaaggtttgaagaaggaaggagatgcagagcgggcgcgggagcttgtaatggagcttcttacctcaaatggagttgtagagaaaagtggagtgttgacttatgttgagtgtctcatggaaggagatgaaactggtgattgcagtgaagtcatagatttggttgatcaattgcactgcagagaaagacccaccttctaa

SEQ ID NO: 24007 - protein, 880 aa, Arabidopsis thaliana
  peptide (1)..(880): Ceres Seq. ID no. 13508996
MLLIHIRSTRKILALGRHVFPSNAFFSVSSRPSLSSSDEVAAHDVASLLKTPNWEKNSSLKSLVSHMNPNVASQVISLQRSDNDICVRFFMWVCKHSSYCFDPTQKNQLLKLIVSSGLYRVAHAVIVALIKECSRCEKEMLKLMYCFDELREVFGFRLNYPCYSSLLMSLAKLDLGFLAYVTYRRMEADGFVVGMIDYRTIVNALCKNGYTEAAEMFMSKILKIGFVLDSHIGTSLLLGFCRGLNLRDALKVFDVMSKEVTCAPNSVSYSILIHGLCEVGRLEEAFGLKDQMGEKGCQPSTRTYTVLIKALCDRGLIDKAFNLFDEMIPRGCKPNVHTYTVLIDGLCRDGKIEEANGVCRKMVKDRIFPSVITYNALINGYCKDGRVVPAFELLTVMEKRACKPNVRTFNELMEGLCRVGKPYKAVHLLKRMLDNGLSPDIVSYNVLIDGLCREGHMNTAYKLLSSMNCFDIEPDCLTFTAIINAFCKQGKADVASAFLGLMLRKGISLDEVTGTTLIDGVCKVGKTRDALFILETLVKMRILTTPHSLNVILDMLSKGCKVKEELAMLGKINKLGLVPSVVTYTTLVDGLIRSGDITGSFRILELMKLSGCLPNVYPYTIIINGLCQFGRVEEAEKLLSAMQDSGVSPNHVTYTVMVKGYVNNGKLDRALETVRAMVERGYELNDRIYSSLLQGFVLSQKGIDNSEESTVSDIALRETDPECINELISVVEQLGGCISGLCIFLVTRLCKEGRTDESNDLVQNVLERGVFLEKAMDIIMESYCSKKKHTKCMELITLVLKSGFVPSFKSFCLVIQGLKKEGDAERARELVMELLTSNGVVEKSGVLTYVECLMEGDETGDCSEVIDLVDQLHCRERPTF

SEQ ID NO: 24008 - protein, 814 aa, Arabidopsis thaliana
  peptide (1)..(814): Ceres Seq. ID no. 13508997
MNPNVASQVISLQRSDNDICVRFFMWVCKHSSYCFDPTQKNQLLKLIVSSGLYRVAHAVIVALIKECSRCEKEMLKLMYCFDELREVFGFRLNYPCYSSLLMSLAKLDLGFLAYVTYRRMEADGFVVGMIDYRTIVNALCKNGYTEAAEMFMSKILKIGFVLDSHIGTSLLLGFCRGLNLRDALKVFDVMSKEVTCAPNSVSYSILIHGLCEVGRLEEAFGLKDQMGEKGCQPSTRTYTVLIKALCDRGLIDKAFNLFDEMIPRGCKPNVHTYTVLIDGLCRDGKIEEANGVCRKMVKDRIFPSVITYNALINGYCKDGRVVPAFELLTVMEKRACKPNVRTFNELMEGLCRVGKPYKAVHLLKRMLDNGLSPDIVSYNVLIDGLCREGHMNTAYKLLSSMNCFDIEPDCLTFTAIINAFCKQGKADVASAFLGLMLRKGISLDEVTGTTLIDGVCKVGKTRDALFILETLVKMRILTTPHSLNVILDMLSKGCKVKEELAMLGKINKLGLVPSVVTYTTLVDGLIRSGDITGSFRILELMKLSGCLPNVYPYTIIINGLCQFGRVEEAEKLLSAMQDSGVSPNHVTYTVMVKGYVNNGKLDRALETVRAMVERGYELNDRIYSSLLQGFVLSQKGIDNSEESTVSDIALRETDPECINELISVVEQLGGCISGLCIFLVTRLCKEGRTDESNDLVQNVLERGVFLEKAMDIIMESYCSKKKHTKCMELITLVLKSGFVPSFKSFCLVIQGLKKEGDAERARELVMELLTSNGVVEKSGVLTYVECLMEGDETGDCSEVIDLVDQLHCRERPTF

SEQ ID NO: 24009 - protein, 790 aa, Arabidopsis thaliana
  peptide (1)..(790): Ceres Seq. ID no. 13508998
MWVCKHSSYCFDPTQKNQLLKLIVSSGLYRVAHAVIVALIKECSRCEKEMLKLMYCFDELREVFGFRLNYPCYSSLLMSLAKLDLGFLAYVTYRRMEADGFVVGMIDYRTIVNALCKNGYTEAAEMFMSKILKIGFVLDSHIGTSLLLGFCRGLNLRDALKVFDVMSKEVTCAPNSVSYSILIHGLCEVGRLEEAFGLKDQMGEKGCQPSTRTYTVLIKALCDRGLIDKAFNLFDEMIPRGCKPNVHTYTVLIDGLCRDGKIEEANGVCRKMVKDRIFPSVITYNALINGYCKDGRVVPAFELLTVMEKRACKPNVRTFNELMEGLCRVGKPYKAVHLLKRMLDNGLSPDIVSYNVLIDGLCREGHMNTAYKLLSSMNCFDIEPDCLTFTAIINAFCKQGKADVASAFLGLMLRKGISLDEVTGTTLIDGVCKVGKTRDALFILETLVKMRILTTPHSLNVILDMLSKGCKVKEELAMLGKINKLGLVPSVVTYTTLVDGLIRSGDITGSFRILELMKLSGCLPNVYPYTIIINGLCQFGRVEEAEKLLSAMQDSGVSPNHVTYTVMVKGYVNNGKLDRALETVRAMVERGYELNDRIYSSLLQGFVLSQKGIDNSEESTVSDIALRETDPECINELISVVEQLGGCISGLCIFLVTRLCKEGRTDESNDLVQNVLERGVFLEKAMDIIMESYCSKKKHTKCMELITLVLKSGFVPSFKSFCLVIQGLKKEGDAERARELVMELLTSNGVVEKSGVLTYVECLMEGDETGDCSEVIDLVDQLHCRERPTF

SEQ ID NO: 24010 - DNA, 1685 bp, Arabidopsis thaliana
  misc_feature (1)..(1685): Ceres Seq. ID no. 13497411
  misc_feature (1)..(1685): Ortholog of  Ceres SEQ ID NO 14314220 as cited in SEQ ID NO 57321
ctcctatttctctcttctctctctctttaagtgagcttcgccgttaaactttctccggtaccgggaaattaacgaagaaagcgaaaagtcactgttacactaatatcacaaatctctctctgtctctctctctctctttgtcgaagtcgtgcgtgatgctagttacggtggtgaagcagcggttagtgtactctcgccggagaaattggttatgaccggaatctcacctccgtgatcgaagaaactgttttcgtttttttatcgttacgaagaaatggaaaaacaggcgaagctaacgaggacacagtcgtcgttactccggtcatcgtcgaatctccgttcgtcatatcaaagcttatcttcaatcgtcgaaggcgagcaagatctagaagccggagagaaagaagagaaacagagaagaaaaccacctaaaccattcggttcaccaaatcctaaaaccggtttaaccagaatcaatcccggtttagctttcacaatggtatctctctctttcctaagtctctcatcgttcttcttcttcgtcgtcttctcacaaaccgatgagattctcacatcggagaatcttttactagctttaatcttcgtcgctgtagctctcttcttcgcttccaagaacatctctctactaaaccaaaccgtaatcgcaatcaaaaacttagggttccaaaacagagactcgaaatcaaaaccggtacaatggtacatcggagacgattcaaaaccggagaagaaggtaatcaagagattcgttaaagaaggagttcaattctacagtaatggagatttctacgaaggtgaatttaacaaagggaagtgtaacggaagtggtgtgtattactatttcgtgagaggacgttatgaaggagattggctagatgggagatatgatggtcatgggattgagagttgggctagaggaagtagatataaaggtcaatataggcaaggtcttagacatggttttggtgtttatagattctacactggtgattgttatgctggtgagtggtttaatggtcaaagccatggttttggtgttcaatcttgttctgatggtagctcttaccttggtgagtctagatttggtgttaagcatggtcttggttcttaccatttcagaaatggagataagtatgcaggagagtactttggagacaagattcatgggtttggtgtgtatcgatttgctaatggacactgttatgaaggagcatggcatgaaggtcgtaagcaagggtttggtgcttactcgtttagaaatggtgatgctaaatctggtgaatgggattcaggggttcttgtgacttcacttcctcttacgagtgagccagtttcaagagctgttcaggcggctcgagaaacagcgaataaggcagtgaatcggagacgagtagatgagcaggtgagccgagctgtggctgcagctaataaggctgctacggctgcaagagtggctgctgtgagagccgttcagaatcaaatggatggtaaattttgtcaaagttgaaaaaaggaaaatgtaaaaaatcttttttttaccggtttctctgtaaccctgaatcgaaagtttgtttcagaggtttgtaacagagagttaattttcgatctttttactaatgtaacaaaactgtaaatagttgaagaagaagctttgtttttgttgt

SEQ ID NO: 24011 - protein, 417 aa, Arabidopsis thaliana
  peptide (1)..(417): Ceres Seq. ID no. 13497412
MEKQAKLTRTQSSLLRSSSNLRSSYQSLSSIVEGEQDLEAGEKEEKQRRKPPKPFGSPNPKTGLTRINPGLAFTMVSLSFLSLSSFFFFVVFSQTDEILTSENLLLALIFVAVALFFASKNISLLNQTVIAIKNLGFQNRDSKSKPVQWYIGDDSKPEKKVIKRFVKEGVQFYSNGDFYEGEFNKGKCNGSGVYYYFVRGRYEGDWLDGRYDGHGIESWARGSRYKGQYRQGLRHGFGVYRFYTGDCYAGEWFNGQSHGFGVQSCSDGSSYLGESRFGVKHGLGSYHFRNGDKYAGEYFGDKIHGFGVYRFANGHCYEGAWHEGRKQGFGAYSFRNGDAKSGEWDSGVLVTSLPLTSEPVSRAVQAARETANKAVNRRRVDEQVSRAVAAANKAATAARVAAVRAVQNQMDGKFCQS

SEQ ID NO: 24012 - protein, 343 aa, Arabidopsis thaliana
  peptide (1)..(343): Ceres Seq. ID no. 13497413
MVSLSFLSLSSFFFFVVFSQTDEILTSENLLLALIFVAVALFFASKNISLLNQTVIAIKNLGFQNRDSKSKPVQWYIGDDSKPEKKVIKRFVKEGVQFYSNGDFYEGEFNKGKCNGSGVYYYFVRGRYEGDWLDGRYDGHGIESWARGSRYKGQYRQGLRHGFGVYRFYTGDCYAGEWFNGQSHGFGVQSCSDGSSYLGESRFGVKHGLGSYHFRNGDKYAGEYFGDKIHGFGVYRFANGHCYEGAWHEGRKQGFGAYSFRNGDAKSGEWDSGVLVTSLPLTSEPVSRAVQAARETANKAVNRRRVDEQVSRAVAAANKAATAARVAAVRAVQNQMDGKFCQS

SEQ ID NO: 24013 - DNA, 1211 bp, Arabidopsis thaliana
  misc_feature (1)..(1211): Ceres Seq. ID no. 12335720
  misc_feature (1)..(1211): Ortholog of  Ceres SEQ ID NO 13658153 as cited in SEQ ID NO 66326
aaaaagagaatgggttctaagggagacaacgttgctgtatgtaacatgaagctcgagagacttctcagcatgaaaggtggcaaaggacaagacagctacgccaataactctcaagctcaggcaatgcatgcacggtccatgcttcacctcctagaggaaacacttgaaaatgttcacctcaactcctccgccagtccgccaccgttcacgacggttgatcttggctgttcctccggcgcaaatactgtccacataatcgatttcatagtcaaacatatctctaagaggtttgatgctgccggaatcgaccctccggagttcacagctttcttctccgatctcccaagcaacgacttcaacacgcttttccagcttcttccaccacttgtctctaacacttgcatggaggagtgtcttgctgccgacgggaaccgctcctacttcgtcgctggtgttcccggatcgttttaccggcgactttttccagcgagaaccattgactttttccactctgccttctccttgcattggctctctcaggtgccggaaagtgtgacggataggagatcggcggcgtacaatagagggagagttttcatacacggtgccggagagaagacaacaacggcatacaaacggcagtttcaggccgacttagcggagtttttgagggcaagagcggcagaggttaagagaggtggggccatgttcctggtctgtcttggtcgtacctctgtggatcccaccgaccagggtggtgccggtctactcttcggcactcattttcaggacgcttgggacgaccttgtccgcgagggtttggtagcagcagagaaacgagatggattcaatatcccggtgtacgcaccaagcttgcaagatttcaaggaagtagttgacgccaacggctcatttgcaattgataagctggtagtatacaaaggagggagtccacttgtggtgaatgagccagacgatgcatcagaagttggtcgtgcctttgctagtagttgtcggagtgtggccggagtgctcgtggaagctcacataggcgaagagctaagcaataaactgttctcacgagttgaaagccgagccactagccatgccaaagatgtcttggtgaatttgcagttcttccacattgtcgcttctttgtcttttacttaattagtaccaaataatatgaaaaagaaatatgttcgtgtgcc

SEQ ID NO: 24014 - protein, 389 aa, Arabidopsis thaliana
  peptide (1)..(389): Ceres Seq. ID no. 12335721
KKRMGSKGDNVAVCNMKLERLLSMKGGKGQDSYANNSQAQAMHARSMLHLLEETLENVHLNSSASPPPFTTVDLGCSSGANTVHIIDFIVKHISKRFDAAGIDPPEFTAFFSDLPSNDFNTLFQLLPPLVSNTCMEECLAADGNRSYFVAGVPGSFYRRLFPARTIDFFHSAFSLHWLSQVPESVTDRRSAAYNRGRVFIHGAGEKTTTAYKRQFQADLAEFLRARAAEVKRGGAMFLVCLGRTSVDPTDQGGAGLLFGTHFQDAWDDLVREGLVAAEKRDGFNIPVYAPSLQDFKEVVDANGSFAIDKLVVYKGGSPLVVNEPDDASEVGRAFASSCRSVAGVLVEAHIGEELSNKLFSRVESRATSHAKDVLVNLQFFHIVASLSFT

SEQ ID NO: 24015 - protein, 386 aa, Arabidopsis thaliana
  peptide (1)..(386): Ceres Seq. ID no. 12335722
MGSKGDNVAVCNMKLERLLSMKGGKGQDSYANNSQAQAMHARSMLHLLEETLENVHLNSSASPPPFTTVDLGCSSGANTVHIIDFIVKHISKRFDAAGIDPPEFTAFFSDLPSNDFNTLFQLLPPLVSNTCMEECLAADGNRSYFVAGVPGSFYRRLFPARTIDFFHSAFSLHWLSQVPESVTDRRSAAYNRGRVFIHGAGEKTTTAYKRQFQADLAEFLRARAAEVKRGGAMFLVCLGRTSVDPTDQGGAGLLFGTHFQDAWDDLVREGLVAAEKRDGFNIPVYAPSLQDFKEVVDANGSFAIDKLVVYKGGSPLVVNEPDDASEVGRAFASSCRSVAGVLVEAHIGEELSNKLFSRVESRATSHAKDVLVNLQFFHIVASLSFT

SEQ ID NO: 24016 - protein, 374 aa, Arabidopsis thaliana
  peptide (1)..(374): Ceres Seq. ID no. 12335723
MKLERLLSMKGGKGQDSYANNSQAQAMHARSMLHLLEETLENVHLNSSASPPPFTTVDLGCSSGANTVHIIDFIVKHISKRFDAAGIDPPEFTAFFSDLPSNDFNTLFQLLPPLVSNTCMEECLAADGNRSYFVAGVPGSFYRRLFPARTIDFFHSAFSLHWLSQVPESVTDRRSAAYNRGRVFIHGAGEKTTTAYKRQFQADLAEFLRARAAEVKRGGAMFLVCLGRTSVDPTDQGGAGLLFGTHFQDAWDDLVREGLVAAEKRDGFNIPVYAPSLQDFKEVVDANGSFAIDKLVVYKGGSPLVVNEPDDASEVGRAFASSCRSVAGVLVEAHIGEELSNKLFSRVESRATSHAKDVLVNLQFFHIVASLSFT

SEQ ID NO: 24017 - DNA, 1463 bp, Arabidopsis thaliana
  misc_feature (1)..(1463): Ceres Seq. ID no. 12422532
  misc_feature (1)..(1463): Ortholog of  Ceres SEQ ID NO 14315346 as cited in SEQ ID NO 53970
  misc_feature (1)..(1463): Ortholog of  Ceres SEQ ID NO 13594128 as cited in SEQ ID NO 58608
  misc_feature (1)..(1463): Ortholog of  Ceres SEQ ID NO 14309682 as cited in SEQ ID NO 58908
  misc_feature (1)..(1463): Ortholog of  Ceres SEQ ID NO 15176122 as cited in SEQ ID NO 62462
  misc_feature (1)..(1463): Ortholog of  Ceres SEQ ID NO 12624849 as cited in SEQ ID NO 62773
aagttcctacgcgaagttttcaacagattcgccggagaatcttcgaatcaacggcggagaaatggctctatcacgcctctcatcacgatccaacatcatcactcgtcccttctccgccgccttcagccgattaatctcaacggacacaactccgatcacaatcgagacttcgcttcctttcacagctcacttatgtgatccaccgtcacgctccgtcgaatcatcgagtcaagagcttctcgatttcttcagaaccatggcgttgatgcgacgtatggaaatcgcagccgattcgctttacaaagcgaagctaatccgagggttttgtcatctctacgacggccaagaagctgtagctataggcatggaagctgcgattacaaagaaagacgcgattattactgcttatcgtgatcactgtattttcttaggtcgtggtggttcgcttcatgaggttttctcagagcttatgggaagacaagctggttgttctaaagggaaaggtggatctatgcacttctataagaaggaatcgtcgttttacggtggtcatgggattgttggtgctcaggttccattaggttgtggtattgcttttgctcagaagtataataaggaagaggctgtcacatttgctttgtatggtgatggtgctgcgaatcagggacagttgtttgaagctttgaatatttctgctctttgggatttgcctgcaattttggtctgcgagaacaatcactatggaatgggaactgctgaatggagagccgctaagagtccatcttactacaagcgtggtgattatgttcctggactcaaggtagatggtatggatgcatttgctgtcaaacaagcttgcaaatttgctaagcagcatgcgttggagaaggggccaataattcttgagatggacacatacaggtaccacggtcactccatgtctgatcctgggagcacataccgtacccgagatgagatatctggtgtgaggcaggaacgggatccaattgagagaataaagaagctggtactatctcatgacctagcaaccgagaaagagcttaaggatatggagaaggaaattagaaaagaagtagatgacgccattgccaaagctaaggattgcccaatgccagagccttctgagctctttaccaatgtgtatgtgaagggatttggcaccgagtcatttggacctgacagaaaagaagtcaaagcttcccttccatgatcatggagctcttgttcgttaaactgccacgtgtcatgagaaagttggctgatagagaaatctatgaatatgaataaagatctgattgtatactctctctctcccccccccccccccttctgagttttaatctctctgtatctttgtttacaaacataaggagaaacatgttattcttgtgaagctttagtagtctcgtgtttaatattcaagcaatcgagttgagatctct

SEQ ID NO: 24018 - protein, 409 aa, Arabidopsis thaliana
  peptide (1)..(409): Ceres Seq. ID no. 12422533
SSYAKFSTDSPENLRINGGEMALSRLSSRSNIITRPFSAAFSRLISTDTTPITIETSLPFTAHLCDPPSRSVESSSQELLDFFRTMALMRRMEIAADSLYKAKLIRGFCHLYDGQEAVAIGMEAAITKKDAIITAYRDHCIFLGRGGSLHEVFSELMGRQAGCSKGKGGSMHFYKKESSFYGGHGIVGAQVPLGCGIAFAQKYNKEEAVTFALYGDGAANQGQLFEALNISALWDLPAILVCENNHYGMGTAEWRAAKSPSYYKRGDYVPGLKVDGMDAFAVKQACKFAKQHALEKGPIILEMDTYRYHGHSMSDPGSTYRTRDEISGVRQERDPIERIKKLVLSHDLATEKELKDMEKEIRKEVDDAIAKAKDCPMPEPSELFTNVYVKGFGTESFGPDRKEVKASLP

SEQ ID NO: 24019 - protein, 389 aa, Arabidopsis thaliana
  peptide (1)..(389): Ceres Seq. ID no. 12422534
MALSRLSSRSNIITRPFSAAFSRLISTDTTPITIETSLPFTAHLCDPPSRSVESSSQELLDFFRTMALMRRMEIAADSLYKAKLIRGFCHLYDGQEAVAIGMEAAITKKDAIITAYRDHCIFLGRGGSLHEVFSELMGRQAGCSKGKGGSMHFYKKESSFYGGHGIVGAQVPLGCGIAFAQKYNKEEAVTFALYGDGAANQGQLFEALNISALWDLPAILVCENNHYGMGTAEWRAAKSPSYYKRGDYVPGLKVDGMDAFAVKQACKFAKQHALEKGPIILEMDTYRYHGHSMSDPGSTYRTRDEISGVRQERDPIERIKKLVLSHDLATEKELKDMEKEIRKEVDDAIAKAKDCPMPEPSELFTNVYVKGFGTESFGPDRKEVKASLP

SEQ ID NO: 24020 - protein, 324 aa, Arabidopsis thaliana
  peptide (1)..(324): Ceres Seq. ID no. 12422535
MALMRRMEIAADSLYKAKLIRGFCHLYDGQEAVAIGMEAAITKKDAIITAYRDHCIFLGRGGSLHEVFSELMGRQAGCSKGKGGSMHFYKKESSFYGGHGIVGAQVPLGCGIAFAQKYNKEEAVTFALYGDGAANQGQLFEALNISALWDLPAILVCENNHYGMGTAEWRAAKSPSYYKRGDYVPGLKVDGMDAFAVKQACKFAKQHALEKGPIILEMDTYRYHGHSMSDPGSTYRTRDEISGVRQERDPIERIKKLVLSHDLATEKELKDMEKEIRKEVDDAIAKAKDCPMPEPSELFTNVYVKGFGTESFGPDRKEVKASLP

SEQ ID NO: 24021 - DNA, 1292 bp, Arabidopsis thaliana
  misc_feature (1)..(1292): Ceres Seq. ID no. 13494202
  misc_feature (1)..(1292): Ortholog of  Ceres SEQ ID NO 14316277 as cited in SEQ ID NO 57806
  misc_feature (1)..(1292): Ortholog of  Ceres SEQ ID NO 14309252 as cited in SEQ ID NO 0
ctacacgaattcgattctctcttatctcgacgagaaaaccctactgcgaaaaaactccgatctctctggcgagaagtaaattttttatctctgagcttggtttcaccatttctctatctctatctcctcgctgggttacggtttggtaaggtcagtgttctctaaggctgaaatttgggggtttctcagtctcgatgtggtcgtgctccgttaggattcttcacaatcattagggttatatttcttacaaactgatgctcattttctcttccctgtctatggctttatctgtgatccttcaaaagcttagtgtcttcggccctggtttgaatccttctttcccttactgcatcgccaatcactcctttgcctcccgttaattgagttgctctctttcaacttaattacattagtctgcttcctttgctgtctagtctggatagtgttgcaaatcaagtagtatcttctttagacattcttggctgagagatttacactaaaagcatagaataagaaacccctgtttggttagtatctacccgagtctcgtagtcctacacagatccggatcctagtttcgaagctagttcttgtttagctgaagctcagacccaaaatgctccaagaaccgtcggctgcattctccctccggcgtaactcattcagacgccgatctcccagatcaaatgtcgatgacagaggctggaatccgctccatatcaaagccagaaaaggcgatctgaaatctgtcaagcagcttctcgaccaaggaatggatgtgaatgctctagcatggggacccaaatcaaaaggagtgagtgcacttcaccttgcagcagagggaggtcacattgaagtcatggatttactcctagaacgtggggccaacattgatgctaaaacatggggctcatgcgggtggactcctctccacgctgcagccaaagagcggaagagagaagcagtgaagtttctggtggagaacggcgcattcttggcagatgatataactgataccaggtttaatccgccggtgcattactgtcacggccttgaatgggcgtacgaggaaatgaagaagcttaacagcgagtcttcttcttcatctggtggagacacatcttccagttctgacaactgaacttcttcttggttgtttctcggtgtgttttgttttgttttctagttgagactacttatcagaactattatggttggtgtttgatcttatgggctatgtgaaacattgaaactgcggatacattcatgtaatcttcagtgtgttattttac

SEQ ID NO: 24022 - protein, 174 aa, Arabidopsis thaliana
  peptide (1)..(174): Ceres Seq. ID no. 13494203
MLQEPSAAFSLRRNSFRRRSPRSNVDDRGWNPLHIKARKGDLKSVKQLLDQGMDVNALAWGPKSKGVSALHLAAEGGHIEVMDLLLERGANIDAKTWGSCGWTPLHAAAKERKREAVKFLVENGAFLADDITDTRFNPPVHYCHGLEWAYEEMKKLNSESSSSSGGDTSSSSDN

SEQ ID NO: 24023 - protein, 122 aa, Arabidopsis thaliana
  peptide (1)..(122): Ceres Seq. ID no. 13494204
MDVNALAWGPKSKGVSALHLAAEGGHIEVMDLLLERGANIDAKTWGSCGWTPLHAAAKERKREAVKFLVENGAFLADDITDTRFNPPVHYCHGLEWAYEEMKKLNSESSSSSGGDTSSSSDN

SEQ ID NO: 24024 - protein, 93 aa, Arabidopsis thaliana
  peptide (1)..(93): Ceres Seq. ID no. 13494205
MDLLLERGANIDAKTWGSCGWTPLHAAAKERKREAVKFLVENGAFLADDITDTRFNPPVHYCHGLEWAYEEMKKLNSESSSSSGGDTSSSSDN

SEQ ID NO: 24025 - DNA, 1054 bp, Arabidopsis thaliana
  misc_feature (1)..(1054): Ceres Seq. ID no. 12422566
  misc_feature (1)..(1054): Ortholog of  Ceres SEQ ID NO 15168591 as cited in SEQ ID NO 57836
attctcagaaatcttgaccatgaaggaggatcgtcgtcttcctcacaaacgcgacgccttccaattcttgaaaaccaaggctgcgtacgttatcgtcatagttctaacctacgcctttggttacttctccgcctaccactatcatcaaccgctgcagcagcagctgccaccgtctacgagagccgtggaaacgacaaaacctcaagtttgttcaatcgacaacttccgagttacgactccatgcggcaatcttgttccgccggaattgattcgccagactgttatcgaccggatctttaacggaacttctccgtacatcgatttcccaccaccgcacgccaagaagtttctccggccaaaaagaatcaaaggttggggatcatacggggccgttttcgagaatctaatccgccgagtcaaacctaagacgatcgtcgaagtcgggagttttctcggcgcgtcggcgatacacatggcgaatctcacgcgccgccttgggctcgaggagactcagattctatgcgtcgacgacttccgtggctggcccggttttcgagaccggtttaaggacatggctttggttaacggtgacgttctgcttatttaccagtttatgcaaaacgtggttatctcggatttttccggttcgatattgccggttcctttctcgaccggttcggctttggagaagctgtgtgaatggggagtgacggcggacctggtggagatagacgcgggtcacgatttcaattcggcttgggcggatataaaccgggcggttcggatactccgacccggcggtgttatatttggtcacgattatttcacggcggcggataatagaggagtgaggagagccgtgaatctgttcgcagagattaaccggttaaaggtcaaaaccgatggtcaacattgggttattgattcggtcaaagtaaactgattccctttttcctataaggaatgaaaaaattcgaggtataaataataagaaaatgtgtaatattgcatagtcaattcatttttttgaaaattaatggatttgaggtttttg

SEQ ID NO: 24026 - protein, 313 aa, Arabidopsis thaliana
  peptide (1)..(313): Ceres Seq. ID no. 12422567
FSEILTMKEDRRLPHKRDAFQFLKTKAAYVIVIVLTYAFGYFSAYHYHQPLQQQLPPSTRAVETTKPQVCSIDNFRVTTPCGNLVPPELIRQTVIDRIFNGTSPYIDFPPPHAKKFLRPKRIKGWGSYGAVFENLIRRVKPKTIVEVGSFLGASAIHMANLTRRLGLEETQILCVDDFRGWPGFRDRFKDMALVNGDVLLIYQFMQNVVISDFSGSILPVPFSTGSALEKLCEWGVTADLVEIDAGHDFNSAWADINRAVRILRPGGVIFGHDYFTAADNRGVRRAVNLFAEINRLKVKTDGQHWVIDSVKVN

SEQ ID NO: 24027 - protein, 307 aa, Arabidopsis thaliana
  peptide (1)..(307): Ceres Seq. ID no. 12422568
MKEDRRLPHKRDAFQFLKTKAAYVIVIVLTYAFGYFSAYHYHQPLQQQLPPSTRAVETTKPQVCSIDNFRVTTPCGNLVPPELIRQTVIDRIFNGTSPYIDFPPPHAKKFLRPKRIKGWGSYGAVFENLIRRVKPKTIVEVGSFLGASAIHMANLTRRLGLEETQILCVDDFRGWPGFRDRFKDMALVNGDVLLIYQFMQNVVISDFSGSILPVPFSTGSALEKLCEWGVTADLVEIDAGHDFNSAWADINRAVRILRPGGVIFGHDYFTAADNRGVRRAVNLFAEINRLKVKTDGQHWVIDSVKVN

SEQ ID NO: 24028 - protein, 156 aa, Arabidopsis thaliana
  peptide (1)..(156): Ceres Seq. ID no. 12422569
MANLTRRLGLEETQILCVDDFRGWPGFRDRFKDMALVNGDVLLIYQFMQNVVISDFSGSILPVPFSTGSALEKLCEWGVTADLVEIDAGHDFNSAWADINRAVRILRPGGVIFGHDYFTAADNRGVRRAVNLFAEINRLKVKTDGQHWVIDSVKVN

SEQ ID NO: 24029 - DNA, 1606 bp, Arabidopsis thaliana
  misc_feature (1)..(1606): Ceres Seq. ID no. 12394717
  misc_feature (1)..(1606): Ortholog of  Ceres SEQ ID NO 14304855 as cited in SEQ ID NO 53974
agttttatcctctttttcatttcaagatcaatttcataaaaaagtttccttttttagcgaatcctctgttttagaaatcttaaagttgtctcctttattaaagaccatcatgtcttccacttctttcaccgaccttcttggttcttccggcgttgactgttacgaagatgatgaagacttgagagtttctgggtcgagttttggtgggtactatccagagagaaccgggtctggtttacctaagttcaagacggctcaaccaccacctcttccgatttcacaatcttctcataacttcactttctccgattaccttgattctcctctgcttctcagctcctcacacagtttgatatctccaacaacaggaacgtttccattgcaaggctttaatggaacaacaaacaatcactcagattttccctggcagctacaatctcaaccatcaaacgcttcttctgctttgcaagaaacatatggtgttcaagatcacgagaagaagcaggagatgattcctaatgagattgcaacacaaaacaacaatcaaagttttggaacagaacgtcagataaagataccagcatacatggtgagtaggaactctaatgatggttatggttggagaaaatacggtcagaaacaagtgaagaagagcgaaaaccctaggagttacttcaagtgtacgtatcctgattgtgtttccaagaagattgttgagacggcttctgatggacagatcactgagatcatttataaaggtggtcataatcatcctaagcctgagttcaccaagagaccatctcaatcttcattaccatcatcggttaatgggaggcgcttgtttaatcctgcttctgttgttagtgaacctcatgatcaatcagagaactcttcgatttcgtttgactatagtgatcttgagcagaaaagttttaaatcagagtatggtgagatagatgaagaggaggaacaacctgagatgaagaggatgaaaagagaaggtgaagatgaagggatgtctatagaagtaagcaaaggagttaaagagccaagagttgtggttcagacaataagtgatattgatgttcttatagatggctttagatggaggaaatatggtcaaaaagttgtcaaaggaaatactaatccaaggagctactacaagtgcacattccaaggttgtggagtgaagaagcaagtggaaagatccgcagcagacgagagagcagttctcactacctatgaaggaagacacaatcacgatatcccaaccgcgctacgtcgctcgtgaaattattgggacttagtcactagtaatatgatttaggctttctaaaaacaaaaaatcttactatggcttatcttttgtgctcattcacagtttgtttatttgtttgttacacagtcaatactttgttttgtacagagtggtgcttagtagtgtttttattattatcttggccttatagaataacctctcttctcatctgtgtgactttaaacacttgagagtccattttatagttcttgtgtattggtcttttgtttgatttatgtacatttttaatattcaaatttgataaagcaataataatggtttgtaacc

SEQ ID NO: 24030 - protein, 429 aa, Arabidopsis thaliana
  peptide (1)..(429): Ceres Seq. ID no. 12394718
VLSSFSFQDQFHKKVSFFSESSVLEILKLSPLLKTIMSSTSFTDLLGSSGVDCYEDDEDLRVSGSSFGGYYPERTGSGLPKFKTAQPPPLPISQSSHNFTFSDYLDSPLLLSSSHSLISPTTGTFPLQGFNGTTNNHSDFPWQLQSQPSNASSALQETYGVQDHEKKQEMIPNEIATQNNNQSFGTERQIKIPAYMVSRNSNDGYGWRKYGQKQVKKSENPRSYFKCTYPDCVSKKIVETASDGQITEIIYKGGHNHPKPEFTKRPSQSSLPSSVNGRRLFNPASVVSEPHDQSENSSISFDYSDLEQKSFKSEYGEIDEEEEQPEMKRMKREGEDEGMSIEVSKGVKEPRVVVQTISDIDVLIDGFRWRKYGQKVVKGNTNPRSYYKCTFQGCGVKKQVERSAADERAVLTTYEGRHNHDIPTALRRS

SEQ ID NO: 24031 - protein, 393 aa, Arabidopsis thaliana
  peptide (1)..(393): Ceres Seq. ID no. 12394719
MSSTSFTDLLGSSGVDCYEDDEDLRVSGSSFGGYYPERTGSGLPKFKTAQPPPLPISQSSHNFTFSDYLDSPLLLSSSHSLISPTTGTFPLQGFNGTTNNHSDFPWQLQSQPSNASSALQETYGVQDHEKKQEMIPNEIATQNNNQSFGTERQIKIPAYMVSRNSNDGYGWRKYGQKQVKKSENPRSYFKCTYPDCVSKKIVETASDGQITEIIYKGGHNHPKPEFTKRPSQSSLPSSVNGRRLFNPASVVSEPHDQSENSSISFDYSDLEQKSFKSEYGEIDEEEEQPEMKRMKREGEDEGMSIEVSKGVKEPRVVVQTISDIDVLIDGFRWRKYGQKVVKGNTNPRSYYKCTFQGCGVKKQVERSAADERAVLTTYEGRHNHDIPTALRRS

SEQ ID NO: 24032 - protein, 260 aa, Arabidopsis thaliana
  peptide (1)..(260): Ceres Seq. ID no. 12394720
MIPNEIATQNNNQSFGTERQIKIPAYMVSRNSNDGYGWRKYGQKQVKKSENPRSYFKCTYPDCVSKKIVETASDGQITEIIYKGGHNHPKPEFTKRPSQSSLPSSVNGRRLFNPASVVSEPHDQSENSSISFDYSDLEQKSFKSEYGEIDEEEEQPEMKRMKREGEDEGMSIEVSKGVKEPRVVVQTISDIDVLIDGFRWRKYGQKVVKGNTNPRSYYKCTFQGCGVKKQVERSAADERAVLTTYEGRHNHDIPTALRRS

SEQ ID NO: 24033 - DNA, 1418 bp, Arabidopsis thaliana
  misc_feature (1)..(1418): Ceres Seq. ID no. 12371508
  misc_feature (1)..(1418): Ortholog of  Ceres SEQ ID NO 13598741 as cited in SEQ ID NO 62749
  misc_feature (1)..(1418): Ortholog of  Ceres SEQ ID NO 12587535 as cited in SEQ ID NO 64020
  misc_feature (1)..(1418): Ortholog of  Ceres SEQ ID NO 15176854 as cited in SEQ ID NO 64525
  misc_feature (1)..(1418): Ortholog of  Ceres SEQ ID NO 12586366 as cited in SEQ ID NO 68983
  misc_feature (1)..(1418): Ortholog of  Ceres SEQ ID NO 15178891 as cited in SEQ ID NO 0
attccactcccactaaacattccttctctcgctcactcttctccaatccttattttattttttgaaagtttaaaattttatacaacatatcaatttggggtagaaaaattcgaaagaaatgaaagagatgggagtgatagtgcttcttctccttcactcgttcttctacgttgccttttgcttcaatgatggactactaccaaacggtgacttcgaactcggtccacgacattcggacatgaaaggaacacaagttatcaacataacagcaatcccaaactgggaactctcaggctttgtcgagtacattccctcaggacacaaacaaggcgacatgatccttgtcgtgcctaaaggcgcattcgcagtacgtctaggcaacgaagcctcaatcaaacaaaaaatcagcgttaagaaagggtcgtactattcgataacgttcagtgctgctcgaacatgcgcacaagacgagcggttaaacgtttccgtggctcctcaccatgcagtgatgccgatacaaacagtgtatagtagctcaggttgggatttgtattcgtgggcttttaaggcccaaagtgactatgcagatatagtgatacataatccaggtgttgaggaagatcctgcttgtggacctctcattgatggtgttgctatgcgagcccttttccctcctcgtcccaccaataagaacattctaaagaacggaggattcgaagaaggtccttgggttttaccaaacatatcatctggtgttttgattccaccaaactccatcgacgatcactctccgttacctggttggatggtcgagtctcttaaagctgtcaaatacatagattccgatcatttctccgttcctcaaggccgtcgcgccgtcgaactcgtcgccgggaaagaaagcgccgtcgcacaagttgtccgcactatccctggaaaaacctacgtcctatccttctctgtcggagatgctagcaacgcttgcgccggatcaatgatcgtcgaagctttcgccggaaaagacacgatcaaggtcccgtatgaatcgaaagggaaaggaggattcaagcgatcgtcattgagattcgtcgctgtctcgagtcggactagagttatgttctacagtacgttttacgcgatgagaaacgacgatttctcgagcttatgtggaccggtgatcgacgacgttaagcttctcagtgctcggaggccgtgagcttgcggcgacgagttgattcacgggacaatgaatgatgacagtcactgtgggtttctcgcgtctagtgagaaattgggcttttaggcccagtggcccactgtttttgttgttgttttaaagcttaatgttatttgacaaagaaaaaagaaattactctggtcaatcatatcgaaccgtgaaattttatgatcttgtgatt

SEQ ID NO: 24034 - protein, 365 aa, Arabidopsis thaliana
  peptide (1)..(365): Ceres Seq. ID no. 12371509
MKEMGVIVLLLLHSFFYVAFCFNDGLLPNGDFELGPRHSDMKGTQVINITAIPNWELSGFVEYIPSGHKQGDMILVVPKGAFAVRLGNEASIKQKISVKKGSYYSITFSAARTCAQDERLNVSVAPHHAVMPIQTVYSSSGWDLYSWAFKAQSDYADIVIHNPGVEEDPACGPLIDGVAMRALFPPRPTNKNILKNGGFEEGPWVLPNISSGVLIPPNSIDDHSPLPGWMVESLKAVKYIDSDHFSVPQGRRAVELVAGKESAVAQVVRTIPGKTYVLSFSVGDASNACAGSMIVEAFAGKDTIKVPYESKGKGGFKRSSLRFVAVSSRTRVMFYSTFYAMRNDDFSSLCGPVIDDVKLLSARRP

SEQ ID NO: 24035 - protein, 362 aa, Arabidopsis thaliana
  peptide (1)..(362): Ceres Seq. ID no. 12371510
MGVIVLLLLHSFFYVAFCFNDGLLPNGDFELGPRHSDMKGTQVINITAIPNWELSGFVEYIPSGHKQGDMILVVPKGAFAVRLGNEASIKQKISVKKGSYYSITFSAARTCAQDERLNVSVAPHHAVMPIQTVYSSSGWDLYSWAFKAQSDYADIVIHNPGVEEDPACGPLIDGVAMRALFPPRPTNKNILKNGGFEEGPWVLPNISSGVLIPPNSIDDHSPLPGWMVESLKAVKYIDSDHFSVPQGRRAVELVAGKESAVAQVVRTIPGKTYVLSFSVGDASNACAGSMIVEAFAGKDTIKVPYESKGKGGFKRSSLRFVAVSSRTRVMFYSTFYAMRNDDFSSLCGPVIDDVKLLSARRP

SEQ ID NO: 24036 - protein, 325 aa, Arabidopsis thaliana
  peptide (1)..(325): Ceres Seq. ID no. 12371511
MKGTQVINITAIPNWELSGFVEYIPSGHKQGDMILVVPKGAFAVRLGNEASIKQKISVKKGSYYSITFSAARTCAQDERLNVSVAPHHAVMPIQTVYSSSGWDLYSWAFKAQSDYADIVIHNPGVEEDPACGPLIDGVAMRALFPPRPTNKNILKNGGFEEGPWVLPNISSGVLIPPNSIDDHSPLPGWMVESLKAVKYIDSDHFSVPQGRRAVELVAGKESAVAQVVRTIPGKTYVLSFSVGDASNACAGSMIVEAFAGKDTIKVPYESKGKGGFKRSSLRFVAVSSRTRVMFYSTFYAMRNDDFSSLCGPVIDDVKLLSARRP

SEQ ID NO: 24037 - DNA, 1357 bp, Arabidopsis thaliana
  misc_feature (1)..(1357): Ceres Seq. ID no. 12680035
  misc_feature (1)..(1357): Ortholog of  Ceres SEQ ID NO 15177055 as cited in SEQ ID NO 57450
  misc_feature (1)..(1357): Ortholog of  Ceres SEQ ID NO 12615854 as cited in SEQ ID NO 62880
caatctctctctccgcggttcacgttttttctcaatctgtccggagagagagaaactcaccggggaatcttgaaatcaccatcacatcctctcttccctcgatctccgttatcgactgtaaatcgaattttgttgttgctttgttttcttgggcgaataaaagaggataatttagtggcggggttttcgagaaagagagagaaagaatgagttttcaagatttagaggcgggaagaggaagatcattagcttcttcaaggaacatcaatggtggtggtagtagacaagacacgactcaagatgttgcttctggtatatttcagatcaatacaagtgtttccactttccatcgtcttgtcaatactcttggtactcctaaagatacgcctgagctcagagagaagctgcataagacaagattatatattggacagttagtgaaagatacatcagctaaacttaaagaagctagtgaaactgatcatcaaagaggtgtaaatcaaaagaagaagattgtggatgctaagcttgcaaaggactttcaagctgtgttgaaagagtttcaaaaggctcagcgtcttgctgctgaaagagaaaccgtatatgctcctcttgtccacaagccatctcttccctcaagctacacatccagtgagatagatgtgaatggagataagcatccagagcagcgtgcccttcttgtggaatcaaaaagacaagaacttgtactgttggacaatgagattgcgttcaatgaggctgttattgaggaaagagagcaagggatacaagaaattcagcagcaaattggcgaggtgcacgagatcttcaaagacttggcagtgttggtgcacgatcaaggaaacatgatagatgatattggtactcacatcgataactcttacgctgcaactgcccaaggaaaatcccatctcgtaaggcatcaaagacacaaagatcaaattcttctctgacgtgcttgctcttggtgatttttggtatcgtgctcatgattgttattatagtgctcgcagtttgatttccccaagctcataaaagcatggacaagtgcttcatcatcaatcaagaagcatcaatgagtatatgtttgtcacgactctctttgttcctacaatttagtctgttggactattggtctcttgtttcttgttatcgagtatatagagtagttcactttggtttgatttggcttgtgtttgctgagtcttggttctgaaggagagagtgttactgctttgtctctgtaatataacttggttctgaaggaaaatcctctgtttgtgttcttaaatgtgaaatttctggtttcgattagctaaagctatggcgaatcttc

SEQ ID NO: 24038 - protein, 255 aa, Arabidopsis thaliana
  peptide (1)..(255): Ceres Seq. ID no. 12680036
MSFQDLEAGRGRSLASSRNINGGGSRQDTTQDVASGIFQINTSVSTFHRLVNTLGTPKDTPELREKLHKTRLYIGQLVKDTSAKLKEASETDHQRGVNQKKKIVDAKLAKDFQAVLKEFQKAQRLAAERETVYAPLVHKPSLPSSYTSSEIDVNGDKHPEQRALLVESKRQELVLLDNEIAFNEAVIEEREQGIQEIQQQIGEVHEIFKDLAVLVHDQGNMIDDIGTHIDNSYAATAQGKSHLVRHQRHKDQILL

SEQ ID NO: 24039 - DNA, 1068 bp, Arabidopsis thaliana
  misc_feature (1)..(1068): Ceres Seq. ID no. 12328099
  misc_feature (1)..(1068): Ortholog of  Ceres SEQ ID NO 15170627 as cited in SEQ ID NO 52703
  misc_feature (1)..(1068): Ortholog of  Ceres SEQ ID NO 13655124 as cited in SEQ ID NO 62896
  misc_feature (1)..(1068): Ortholog of  Ceres SEQ ID NO 13597493 as cited in SEQ ID NO 64613
  misc_feature (1)..(1068): Ortholog of  Ceres SEQ ID NO 14313540 as cited in SEQ ID NO 68110
  misc_feature (1)..(1068): Ortholog of  Ceres SEQ ID NO 13596175 as cited in SEQ ID NO 68297
gacttttctctgtcctttcaacaattcaatggcagacccaagagttgcagttgttactggttccaacaaagggattgggtttgagatttgcaggcaactagctaacaatgggataactgtggttttaactgcgagagatgaaaacaagggtcttgctgctgtccaaaagctcaagactgagaatggtttttctgatcaagccatctcctttcaccctcttgatgtctccaacccagacaccatcgcttctcttgctgcttttgtcaagacccgcttcggcaaactcgatattctggttaataatgccggagttggaggggcgaatgttaatgttgatgttctcaaagctcagattgctgaggctggtgcgccaactgatatttccaagataatgagtgatacatatgagatagtcgaggagtgtgttaaaacaaactactacggcgttaagcgaatgtgcgaggccatgattcctctccttcaatcttctgattccccaagaatcgtcagcatcgcttccaccatgggaaagttagagaatgtttcaaatgaatgggcaaaaggagtgctgagtgatgctgagaacctaacagaagagaaaatagatgaagtgatcaatgagtacctcaaggattacaaagaaggtgcattacaagtcaaaggttggccaacagtgatgtctggatacatactatcgaaagctgcagtgatcgcattgacacgagtattggctaagcgacacaaatcgttcatcatcaacagtgtttgtcctggtttcgtaaacacagaaatcaatttcaacactgggatcttgagcgttgaagaaggtgcagcgagtccagtgaaactggctttggtccctaatggagacccatctggtcttttctttgatcgcgccaatgtctccaacttttgattcttcaatcttatgtgttcggttgggtgttggtttgtatattttattatctcatcaatttagcagaaaataaagtgaactccaaactatatatcaaccaaacttggttatattataaagcttcttcaatatttatgtggttttgtattccc

SEQ ID NO: 24040 - protein, 304 aa, Arabidopsis thaliana
  peptide (1)..(304): Ceres Seq. ID no. 12328100
TFLCPFNNSMADPRVAVVTGSNKGIGFEICRQLANNGITVVLTARDENKGLAAVQKLKTENGFSDQAISFHPLDVSNPDTIASLAAFVKTRFGKLDILVNNAGVGGANVNVDVLKAQIAEAGAPTDISKIMSDTYEIVEECVKTNYYGVKRMCEAMIPLLQSSDSPRIVSIASTMGKLENVSNEWAKGVLSDAENLTEEKIDEVINEYLKDYKEGALQVKGWPTVMSGYILSKAAVIALTRVLAKRHKSFIINSVCPGFVNTEINFNTGILSVEEGAASPVKLALVPNGDPSGLFFDRANVSNF

SEQ ID NO: 24041 - protein, 295 aa, Arabidopsis thaliana
  peptide (1)..(295): Ceres Seq. ID no. 12328101
MADPRVAVVTGSNKGIGFEICRQLANNGITVVLTARDENKGLAAVQKLKTENGFSDQAISFHPLDVSNPDTIASLAAFVKTRFGKLDILVNNAGVGGANVNVDVLKAQIAEAGAPTDISKIMSDTYEIVEECVKTNYYGVKRMCEAMIPLLQSSDSPRIVSIASTMGKLENVSNEWAKGVLSDAENLTEEKIDEVINEYLKDYKEGALQVKGWPTVMSGYILSKAAVIALTRVLAKRHKSFIINSVCPGFVNTEINFNTGILSVEEGAASPVKLALVPNGDPSGLFFDRANVSNF

SEQ ID NO: 24042 - protein, 174 aa, Arabidopsis thaliana
  peptide (1)..(174): Ceres Seq. ID no. 12328102
MSDTYEIVEECVKTNYYGVKRMCEAMIPLLQSSDSPRIVSIASTMGKLENVSNEWAKGVLSDAENLTEEKIDEVINEYLKDYKEGALQVKGWPTVMSGYILSKAAVIALTRVLAKRHKSFIINSVCPGFVNTEINFNTGILSVEEGAASPVKLALVPNGDPSGLFFDRANVSNF

SEQ ID NO: 24043 - DNA, 1346 bp, Arabidopsis thaliana
  misc_feature (1)..(1346): Ceres Seq. ID no. 12335245
  misc_feature (1)..(1346): Ortholog of  Ceres SEQ ID NO 15170659 as cited in SEQ ID NO 67270
gaatcgtgtgagaagagagactgaagaagagctagaaaaaatgagagagctcctgtgaagtgacgaagagacgaagaagaaagagaacattaatggcggctactccgtggtactttgtcgcagtacttctcaccattcttaccagctctcaggggattttaacaactctttctcaaagtgatggaggttataagtatgattatgctactgttccctttcttgctgaagtttttaagctgatcatttctggtttatttctctggagagagatgcggacatcttcctcaacaacttcaaggattactacggattggaagagtgtgcgattatttgttattccgtctcttatttatctcatacataacaatgtgcagtttgctacattgacttatgtggatacatccacttatcagataatgggtaatttgaagattgtgaccactggcatactgtttaggttatttttgaaaaggaaactatctaaacttcagtggatggcaattggtcttttagctgttggaacaactaccagccaggttaagggttgtggagaagcttcttgtgattctttattcacggcaccaatacaaggttatttgctgggcatcctctcagctggtttgtccgcgctagctggaatctacacagagtttctgatgaagagaaacaatgacaccttatactggcaaaacttgcagttgtatacgtaggtttggttcacttttcaacgtagctcgacttatagcagatgatttcagacacgggtttgaaaagggtccttggtggcaacgtatctttgatgggtacagcatcaccacttggctggtagttctgaatctcggatccactggcttactggtctcgtggttaatgaagtatgcagacaacatcgtcaaggtttattctacatcaatggcgatgctacttactatggttgcatccatatacctctttagcttcaaaccgacactgcagcttttcttgggtattgtcatatgcatcatgtcactccatatgtactttgctcctccacacacgctcgtggacttgcccgtgacaaacgaagcacatgccaagaccttaaagcaagttgtcgtagaagaaaagacagattcttgaatcgaattggacgaaaaggttagttcaacatagagaaaacaatttgctaagtaaatgaacacaatgatcttcttctagcttcatttctattagagaatgagaaacttggatgtgagttcttttgaagaaatgatatgatagtttgtttattcgcgtacggattctatttctattctttgtaaatgtacatcgaggtgccctgaagtagtaaattcaattgttgaagc

SEQ ID NO: 24044 - protein, 205 aa, Arabidopsis thaliana
  peptide (1)..(205): Ceres Seq. ID no. 12335246
MAATPWYFVAVLLTILTSSQGILTTLSQSDGGYKYDYATVPFLAEVFKLIISGLFLWREMRTSSSTTSRITTDWKSVRLFVIPSLIYLIHNNVQFATLTYVDTSTYQIMGNLKIVTTGILFRLFLKRKLSKLQWMAIGLLAVGTTTSQVKGCGEASCDSLFTAPIQGYLLGILSAGLSALAGIYTEFLMKRNNDTLYWQNLQLYT

SEQ ID NO: 24045 - protein, 149 aa, Arabidopsis thaliana
  peptide (1)..(149): Ceres Seq. ID no. 12335247
MTPYTGKTCSCIRRFGSLFNVARLIADDFRHGFEKGPWWQRIFDGYSITTWLVVLNLGSTGLLVSWLMKYADNIVKVYSTSMAMLLTMVASIYLFSFKPTLQLFLGIVICIMSLHMYFAPPHTLVDLPVTNEAHAKTLKQVVVEEKTDS

SEQ ID NO: 24046 - protein, 146 aa, Arabidopsis thaliana
  peptide (1)..(146): Ceres Seq. ID no. 12335248
MRTSSSTTSRITTDWKSVRLFVIPSLIYLIHNNVQFATLTYVDTSTYQIMGNLKIVTTGILFRLFLKRKLSKLQWMAIGLLAVGTTTSQVKGCGEASCDSLFTAPIQGYLLGILSAGLSALAGIYTEFLMKRNNDTLYWQNLQLYT

SEQ ID NO: 24047 - DNA, 930 bp, Arabidopsis thaliana
  misc_feature (1)..(930): Ceres Seq. ID no. 13499868
  misc_feature (1)..(930): Ortholog of  Ceres SEQ ID NO 12557928 as cited in SEQ ID NO 111
ctgagaaaccccaatctctaatcttcttttcaattcaatacttttttttctcaatctctcctctcaaatcaaacaactttgattgatcttcgcaatcgattccacatgaagcgcagtactaccgactctgatttggccggtgatgctcacaacgagacaaacaagaagatgaagagtacagaggaagaagaaatcggattctccaatttagacgagaatctagtgtacgaggtgttgaaacacgtcgacgcaaagaccttagctatgtcatcttgcgtgagcaagatctggcacaaaacggcacaagacgagcggctttgggagctgatctgtactcgtcactggactaacatcggctgcgggcagaaccagctcagatctgttgtgttggcgcttggtggcttccgaagactccactctctttacctctggcctctctctaaacccaatccgcgtgctaggttcggtaaggacgagcttaaactcactctttctcttctctcaattcgatactacgagaagatgagtttcactaagagacctcttccagaatccaaataattgactacaaattattagagtttggttttggagtttgtgtatttggagtttgttgattggtaagtcagatgtgatgttcaatgctggcaataaaatttgttggtatccataagccagactgttagcaacagttgtgttctgtaataatagagggtgatgagaatttttaattactgtaatcggagctgattaaaagtagatttaatatcaaatgtgattcgattttgttgtaatggttctgtcttgaagttaagttggtccgtagttggacaatgattgtaacaaaatagattcgtgatccagtttggtaagattaagaactgttagtgacgattctgttttattattcaatgaaaaacaatgttcacc

SEQ ID NO: 24048 - protein, 151 aa, Arabidopsis thaliana
  peptide (1)..(151): Ceres Seq. ID no. 13499869
MKRSTTDSDLAGDAHNETNKKMKSTEEEEIGFSNLDENLVYEVLKHVDAKTLAMSSCVSKIWHKTAQDERLWELICTRHWTNIGCGQNQLRSVVLALGGFRRLHSLYLWPLSKPNPRARFGKDELKLTLSLLSIRYYEKMSFTKRPLPESK

SEQ ID NO: 24049 - protein, 130 aa, Arabidopsis thaliana
  peptide (1)..(130): Ceres Seq. ID no. 13499870
MKSTEEEEIGFSNLDENLVYEVLKHVDAKTLAMSSCVSKIWHKTAQDERLWELICTRHWTNIGCGQNQLRSVVLALGGFRRLHSLYLWPLSKPNPRARFGKDELKLTLSLLSIRYYEKMSFTKRPLPESK

SEQ ID NO: 24050 - protein, 98 aa, Arabidopsis thaliana
  peptide (1)..(98): Ceres Seq. ID no. 13499871
MSSCVSKIWHKTAQDERLWELICTRHWTNIGCGQNQLRSVVLALGGFRRLHSLYLWPLSKPNPRARFGKDELKLTLSLLSIRYYEKMSFTKRPLPESK

SEQ ID NO: 24051 - DNA, 1270 bp, Arabidopsis thaliana
  misc_feature (1)..(1270): Ceres Seq. ID no. 13491751
  misc_feature (1)..(1270): Ortholog of  Ceres SEQ ID NO 15179784 as cited in SEQ ID NO 64755
  misc_feature (1)..(1270): Ortholog of  Ceres SEQ ID NO 13596440 as cited in SEQ ID NO 68769
  misc_feature (1)..(1270): Ortholog of  Ceres SEQ ID NO 15180012 as cited in SEQ ID NO 0
ttttctttattggacgaacaaaaaactttatctttccttcctttgaaatctcccggagaaaaactatagagattttccgtttcccgctttaatacagtgccccaattcgcgcgacacatagagtgtagagacgctttcacgagcgtttccgacgtcggactttcagctcatcatctccacatctttaacggtaaagattaatcatgcctgaaattcatttgggtgctcatacaataagatcccatggagtaacagtcgcgaggttccacatgcatgactggctcattcttctgctgctaatagtcattgaaattgttcttaatgtcatcgaaccctttcatcgttttgttggagaagatatgctcactgatctcagataccctctgcaggacaacacaattcctttctgggctgtcccgttgatagctgttgtgctaccttttgctgtcatttgtgtttactacttcattagaaatgatgtttatgacctgcatcatgcaatactagggcttttgttctctgtacttataaccggtgtcataaccgatgctataaaggacgctgttggtcgacctcgtcctgatttcttttggcgttgtttccctgacggtatagggatctttcacaatgtcacgaagaatgttctatgtactggagctaaggatgtggtcaaagagggacacaagagcttccccagcggccacacatcttggtcgtttgctggtctaggatttctatcgttatacttgtctgggaaaatcagggtgtttgaccagagagggcatgttgcaaagctctgcattgtgattttacctctactggttgcagcattggttggtgtatccagagttgatgactattggcatcactggcaagatgtttttggaggagctatcataggattgactgtggccacattttgttatctgcaatttttccctcctccatacgatccagacggttggggacctcatgcctacttccagatgctggcagactcaagaaatgatgtccaagattcagcaggaatgaatcatctaagcgtgaggcaaacagagctagagagcgtacgttgatggagaagagacgtccatggaaatatcaagaagcaacacgcgggacaccacccgtatgcttcagaaccgctaagtgaagtctttgtactcgttatctatcaatcttaggcattgtcgcattgatatgtattggcttaatcacaaggcccaatattggttggaagcccattcgctaaaaatagagccctataaag

SEQ ID NO: 24052 - protein, 290 aa, Arabidopsis thaliana
  peptide (1)..(290): Ceres Seq. ID no. 13491752
MPEIHLGAHTIRSHGVTVARFHMHDWLILLLLIVIEIVLNVIEPFHRFVGEDMLTDLRYPLQDNTIPFWAVPLIAVVLPFAVICVYYFIRNDVYDLHHAILGLLFSVLITGVITDAIKDAVGRPRPDFFWRCFPDGIGIFHNVTKNVLCTGAKDVVKEGHKSFPSGHTSWSFAGLGFLSLYLSGKIRVFDQRGHVAKLCIVILPLLVAALVGVSRVDDYWHHWQDVFGGAIIGLTVATFCYLQFFPPPYDPDGWGPHAYFQMLADSRNDVQDSAGMNHLSVRQTELESVR

SEQ ID NO: 24053 - protein, 268 aa, Arabidopsis thaliana
  peptide (1)..(268): Ceres Seq. ID no. 13491753
MHDWLILLLLIVIEIVLNVIEPFHRFVGEDMLTDLRYPLQDNTIPFWAVPLIAVVLPFAVICVYYFIRNDVYDLHHAILGLLFSVLITGVITDAIKDAVGRPRPDFFWRCFPDGIGIFHNVTKNVLCTGAKDVVKEGHKSFPSGHTSWSFAGLGFLSLYLSGKIRVFDQRGHVAKLCIVILPLLVAALVGVSRVDDYWHHWQDVFGGAIIGLTVATFCYLQFFPPPYDPDGWGPHAYFQMLADSRNDVQDSAGMNHLSVRQTELESVR

SEQ ID NO: 24054 - protein, 238 aa, Arabidopsis thaliana
  peptide (1)..(238): Ceres Seq. ID no. 13491754
MLTDLRYPLQDNTIPFWAVPLIAVVLPFAVICVYYFIRNDVYDLHHAILGLLFSVLITGVITDAIKDAVGRPRPDFFWRCFPDGIGIFHNVTKNVLCTGAKDVVKEGHKSFPSGHTSWSFAGLGFLSLYLSGKIRVFDQRGHVAKLCIVILPLLVAALVGVSRVDDYWHHWQDVFGGAIIGLTVATFCYLQFFPPPYDPDGWGPHAYFQMLADSRNDVQDSAGMNHLSVRQTELESVR

SEQ ID NO: 24055 - DNA, 1255 bp, Arabidopsis thaliana
  misc_feature (1)..(1255): Ceres Seq. ID no. 12377285
  misc_feature (1)..(1255): Ortholog of  Ceres SEQ ID NO 14316124 as cited in SEQ ID NO 50904
  misc_feature (1)..(1255): Ortholog of  Ceres SEQ ID NO 13585382 as cited in SEQ ID NO 63889
aatatccaaaacataatctctctctatctctctctattttgctcaatcttaatcgtccgatcaaaacactccgactaaaaatggctgcatctaacggcgagaaaagcttgatcgtgagcttcggtgaaatgctcatcgatttcgtcccaaccgtctccggtgtatccctcgccgatgctcctggcttcatcaaagcccccggtggtgcacctgccaacgttgccatcgccatttcccgtctaggcggtcgtgccgctttcgttggaaaactcggtgacgacgagttcggtcacatgctcgcgcggaatcttgaaacagaacggtgtctctgctgaaggtatcaatttcgacactggagccaggactgcacttgcgttcgtgacactaagatctgatggagaacgtgagttcatgttctaccggaaccctagtgccgatatgctcctccgtcccgacgagctcaatcttgatgtcatcagatctgctaaggtgttccactacggatccataagcttgatcgttgagccatgtcgatctgctcacttgaaagccatggaggtggctaaggaagctggtgcgttgctttcatatgatccgaacttgaggcttcctttgtggccctcgaaggaggaggctcagaagcagattcttagcatctgggacaaagctgaagtgatcaaagtcagcgatgaagagcttatgttcttgactggatctgataaggttgatgatgagactgctttgtctctgtggcactctaatctgaaacttctcttggtcactctaggtgaaaagggttgtagatactacaccaagagcttccgtggatctgttgatcccttccatgtggatgcagtagatacaactggtgctggtgattcatttgttggtgcattgctttgcaagattgttgatgaccgtgctgtgcttgaggacgaagctcggctgagagaagtgcttaggcttgcgaatgcttgtggagccatcacaacaacaaagaaaggagctattccagctctccctacagagtctgaagttcagagcctcctgaaaggaaactgatttcacaatgtctggatttttaggacttcaagttttaccttttcttggctttgttttttattttcccctgcttttggctctgtgttcttgtagaaccgttctattctgttatgaatctcgttttattccaattgcaaggttttttgtcgtttgagtaactttgatgaataaaaactctttaccaagttcagtg

SEQ ID NO: 24056 - protein, 216 aa, Arabidopsis thaliana
  peptide (1)..(216): Ceres Seq. ID no. 12377286
MFYRNPSADMLLRPDELNLDVIRSAKVFHYGSISLIVEPCRSAHLKAMEVAKEAGALLSYDPNLRLPLWPSKEEAQKQILSIWDKAEVIKVSDEELMFLTGSDKVDDETALSLWHSNLKLLLVTLGEKGCRYYTKSFRGSVDPFHVDAVDTTGAGDSFVGALLCKIVDDRAVLEDEARLREVLRLANACGAITTTKKGAIPALPTESEVQSLLKGN

SEQ ID NO: 24057 - protein, 207 aa, Arabidopsis thaliana
  peptide (1)..(207): Ceres Seq. ID no. 12377287
MLLRPDELNLDVIRSAKVFHYGSISLIVEPCRSAHLKAMEVAKEAGALLSYDPNLRLPLWPSKEEAQKQILSIWDKAEVIKVSDEELMFLTGSDKVDDETALSLWHSNLKLLLVTLGEKGCRYYTKSFRGSVDPFHVDAVDTTGAGDSFVGALLCKIVDDRAVLEDEARLREVLRLANACGAITTTKKGAIPALPTESEVQSLLKGN

SEQ ID NO: 24058 - protein, 169 aa, Arabidopsis thaliana
  peptide (1)..(169): Ceres Seq. ID no. 12377288
MEVAKEAGALLSYDPNLRLPLWPSKEEAQKQILSIWDKAEVIKVSDEELMFLTGSDKVDDETALSLWHSNLKLLLVTLGEKGCRYYTKSFRGSVDPFHVDAVDTTGAGDSFVGALLCKIVDDRAVLEDEARLREVLRLANACGAITTTKKGAIPALPTESEVQSLLKGN

SEQ ID NO: 24059 - DNA, 1294 bp, Arabidopsis thaliana
  misc_feature (1)..(1294): Ceres Seq. ID no. 12323541
  misc_feature (1)..(1294): Ortholog of  Ceres SEQ ID NO 13638746 as cited in SEQ ID NO 59296
  misc_feature (1)..(1294): Ortholog of  Ceres SEQ ID NO 13596474 as cited in SEQ ID NO 62169
  misc_feature (1)..(1294): Ortholog of  Ceres SEQ ID NO 13598714 as cited in SEQ ID NO 62656
  misc_feature (1)..(1294): Ortholog of  Ceres SEQ ID NO 13596969 as cited in SEQ ID NO 63375
  misc_feature (1)..(1294): Ortholog of  Ceres SEQ ID NO 14302434 as cited in SEQ ID NO 63410
  misc_feature (1)..(1294): Ortholog of  Ceres SEQ ID NO 15225685 as cited in SEQ ID NO 63616
  misc_feature (1)..(1294): Ortholog of  Ceres SEQ ID NO 13597519 as cited in SEQ ID NO 64759
  misc_feature (1)..(1294): Ortholog of  Ceres SEQ ID NO 13587054 as cited in SEQ ID NO 0
atgatcagtcaagaaatacgcgtttaatcgactttttctctctctatatacaattctttcaaaatgatcaaacatagtcataagttccgcaccaatcagtggaaataactaatcaaaactctgtatcatcgttttcaaaacctaattaatggctgtaacaaatcttcctacttgtgatggtttgttcattatcagtcttattgtcatcgtttcttcaatatttgggacatcatctgcgcaactaaacgcaacattttactctgggacttgtcccaacgcctctgccatcgtacgcagcactattcagcaagctcttcaatccgatacaagaatcggagccagcctcatccgccttcattttcatgactgttttgttaatggatgtgatgcatcgatcttgcttgacgacactggaagcatccagagcgagaagaacgctggtccgaatgtaaactcagctagaggattcaacgttgttgataatatcaagactgccctcgaaaacgcttgccctggtgttgtctcttgctctgacgttttagcccttgcctctgaggcttctgtgtctttggcaggagggccatcatggactgtattattaggaagaagagatagtctcacggccaacctcgccggtgcaaattcgtccattccttctcccatcgaaagcctaagcaacatcacatttaaattttcggctgtcgggcttaatacaaacgatctggtagccttatctggtgcgcatacgttcgggcgtgctcgatgtggagtattcaacaacagactatttaacttcagcgggacaggaaatcccgatccaactctaaactcaacgcttctgagcactcttcaacagctatgtcctcaaaacggtagcgcatcaacgatcaccaatcttgatttgagcacaccagatgcgttcgataacaattacttcgccaaccttcagagcaacgatggacttcttcagtcagaccaagagctgttctctaccaccggttcatccaccatcgcgattgttacttcgttcgcaagtaaccagactctgttttttcaggcctttgcacagtccatgatcaatatggggaatattagtcccttgactgggagtaatggagagattaggttagactgtaagaaggttaatggaagttgatttccttaaagctcattttctttgaaaaaacattggcaagctttggttgaataatttttgttatcataatcacatcaaatctgtattgcacttaaatcattctaagcaaatttatgataaatgaaattaaatcaaaac

SEQ ID NO: 24060 - protein, 335 aa, Arabidopsis thaliana
  peptide (1)..(335): Ceres Seq. ID no. 12323542
MAVTNLPTCDGLFIISLIVIVSSIFGTSSAQLNATFYSGTCPNASAIVRSTIQQALQSDTRIGASLIRLHFHDCFVNGCDASILLDDTGSIQSEKNAGPNVNSARGFNVVDNIKTALENACPGVVSCSDVLALASEASVSLAGGPSWTVLLGRRDSLTANLAGANSSIPSPIESLSNITFKFSAVGLNTNDLVALSGAHTFGRARCGVFNNRLFNFSGTGNPDPTLNSTLLSTLQQLCPQNGSASTITNLDLSTPDAFDNNYFANLQSNDGLLQSDQELFSTTGSSTIAIVTSFASNQTLFFQAFAQSMINMGNISPLTGSNGEIRLDCKKVNGS

SEQ ID NO: 24061 - DNA, 1339 bp, Arabidopsis thaliana
  misc_feature (1)..(1339): Ceres Seq. ID no. 12371549
  misc_feature (1)..(1339): Ortholog of  Ceres SEQ ID NO 13595164 as cited in SEQ ID NO 56222
  misc_feature (1)..(1339): Ortholog of  Ceres SEQ ID NO 13591068 as cited in SEQ ID NO 69043
  misc_feature (1)..(1339): Ortholog of  Ceres SEQ ID NO 13623041 as cited in SEQ ID NO 0
ctttataaaagcttatcgctaatttgacagaacactagaacagttctctctttttgtcgacagtcttcttcttcttcttcttcttcgattggatctggaactgaactcaaattgggaagaattttgacatggaggaggaccggtgttcgatcaaggatgatgcaactcaattgataggtaacaccccaatggtatatctgaacaacattgtggatggttgtgtagctcgtattgcagctaagcttgaaatgatggagccttgctctagtgtcaaggagcgaattgcttatggtatgattaaagatgcagaagacaagggattgattactcctgggaagagcacactgattgaggctacctctggtaacaccgggattggtttagccttcatcggtgcagctaaaggttacaaagtggtcctcacaatgccctcatcaatgagccttgagagaaaaatcattcttttagcattaggtgcggaggttcacctcacagatcctagtaaaggcgttcaaggaataatcgacaaagctgaagagatatgtagcaaaaatccagatagtatcatgctagaacagttcaaaaatccttcaaacccgcaaactcattatcgaaccacgggtccagagatatggagagactctgcaggggaagtagacatattggttgccggtgttggaactggtggaacgctttccggatcaggaagattcctcaaggagaagaataaagactttaaggtttatggtgtggaacctacagaaagtgcggtaataagtggaggcaaaccgggtacacatttgatccaaggtattggggctggactcatcccagacaatttggatttcaacgttcttgatgaagtcatccaagtgacaagtgtggaagcaattgaaacagccaaacttcttgccctgaaagaaggattactggtgggaatatcttctggagctgctgcagccgctgcgataaaggtggcaaagcggccagaaaacgccggcaaactcatagttgtgattttccctagcggtggggaacgttacctatcgacctcattgttcgaatcagtcagacatgaagcagagaatttgccaattcaatgaggcttttacacgacctgacttggttcgttttggtgaaaaagtaccaagatttcggttcgacatttacactgtcatagtttcatgaactttaagatttcagatgatgtatgatctctaatctctagcctctaaggtggactgtcctttgacattctattggtggtttttttctagctaatatatgtgtaagtctgtaaaacttttgttgacaatgaatctagaactatataatggcc

SEQ ID NO: 24062 - protein, 324 aa, Arabidopsis thaliana
  peptide (1)..(324): Ceres Seq. ID no. 12371550
MEEDRCSIKDDATQLIGNTPMVYLNNIVDGCVARIAAKLEMMEPCSSVKERIAYGMIKDAEDKGLITPGKSTLIEATSGNTGIGLAFIGAAKGYKVVLTMPSSMSLERKIILLALGAEVHLTDPSKGVQGIIDKAEEICSKNPDSIMLEQFKNPSNPQTHYRTTGPEIWRDSAGEVDILVAGVGTGGTLSGSGRFLKEKNKDFKVYGVEPTESAVISGGKPGTHLIQGIGAGLIPDNLDFNVLDEVIQVTSVEAIETAKLLALKEGLLVGISSGAAAAAAIKVAKRPENAGKLIVVIFPSGGERYLSTSLFESVRHEAENLPIQ

SEQ ID NO: 24063 - protein, 304 aa, Arabidopsis thaliana
  peptide (1)..(304): Ceres Seq. ID no. 12371551
MVYLNNIVDGCVARIAAKLEMMEPCSSVKERIAYGMIKDAEDKGLITPGKSTLIEATSGNTGIGLAFIGAAKGYKVVLTMPSSMSLERKIILLALGAEVHLTDPSKGVQGIIDKAEEICSKNPDSIMLEQFKNPSNPQTHYRTTGPEIWRDSAGEVDILVAGVGTGGTLSGSGRFLKEKNKDFKVYGVEPTESAVISGGKPGTHLIQGIGAGLIPDNLDFNVLDEVIQVTSVEAIETAKLLALKEGLLVGISSGAAAAAAIKVAKRPENAGKLIVVIFPSGGERYLSTSLFESVRHEAENLPIQ

SEQ ID NO: 24064 - protein, 284 aa, Arabidopsis thaliana
  peptide (1)..(284): Ceres Seq. ID no. 12371552
MMEPCSSVKERIAYGMIKDAEDKGLITPGKSTLIEATSGNTGIGLAFIGAAKGYKVVLTMPSSMSLERKIILLALGAEVHLTDPSKGVQGIIDKAEEICSKNPDSIMLEQFKNPSNPQTHYRTTGPEIWRDSAGEVDILVAGVGTGGTLSGSGRFLKEKNKDFKVYGVEPTESAVISGGKPGTHLIQGIGAGLIPDNLDFNVLDEVIQVTSVEAIETAKLLALKEGLLVGISSGAAAAAAIKVAKRPENAGKLIVVIFPSGGERYLSTSLFESVRHEAENLPIQ

SEQ ID NO: 24065 - DNA, 1350 bp, Arabidopsis thaliana
  misc_feature (1)..(1350): Ceres Seq. ID no. 12339539
  misc_feature (1)..(1350): Ortholog of  Ceres SEQ ID NO 15225196 as cited in SEQ ID NO 63947
aaaactggatgactggaatatccatttgcttttgagcgagtgatagaagcggaggcgattttctagggtttttgctcggaatcgatttcacgatgggaacgagcagcgatccgattcaagatggttccgatgagcagcagaagcgatcagagatctatacatacgaagcgccatggcacatctacgcaatgaattggagcgttcgtcgcgataagaagtatcgtctcgccatcactagcctcctcgagcaatacccgaaccgtgtcgagattgtgcagctcgatgaatccaatggtgagatccgttccgatcctaacctctcctttgagcatccttatccaccaacgaagaccattttcatacctgacaaggaatgccaaagacctgatcttctcgctacttcaagtgatttccttcgtttatggagaatcgctgatgatcattcccgtgttgagctcaaatcttgtctcaatagcaataagaacagtgagttttgtggtcctcttacttcttttgattggaatgaagctgagccacgtcgaattggaacatctagtactgatacgacttgtactatctgggacattgagcgtgaagctgttgatactcagcttattgctcatgataaggaagtttttgatattgcttggggtggtgttggtgtttttgcatctgtttcagctgatggctccgttagggtgtttgatcttcgtgataaggaacattcgacgattatctatgagagctccgagcctgatactcctttagtgcgtcttggttggaacaaacaggatcctaggtacatggctactattatcatggacagtgctaaagttgtggtgcttgacattcgttttccggctcttcctgtggttgagcttcaacgacatcaagctagtgtcaatgccattgcttgggctcctcatagctcttgtcacatttgtactgctggagatgattctcaagctttgatttgggatatttcatccatgggacagcatgttgaaggtggtcttgaccctattctagcttacactgctggtgctgagattgagcagcttcagtggtcctcttctcagcctgattgggtcgcaattgctttctctactaagctgcaaattctcagggtttgatcttttcaaagaatttctcatctcttgtcagattagattttactcattttctatcgtattaggggtctcgttacccttgttactatcctcaagatgtaaagactgttctcaatcgaattaatgaatctgtttgatcttgttgctatactcaagatgcaaaacttagccctgactcttattgatgtatgattgataagaaaggataatcctttgatct

SEQ ID NO: 24066 - protein, 346 aa, Arabidopsis thaliana
  peptide (1)..(346): Ceres Seq. ID no. 12339541
MGTSSDPIQDGSDEQQKRSEIYTYEAPWHIYAMNWSVRRDKKYRLAITSLLEQYPNRVEIVQLDESNGEIRSDPNLSFEHPYPPTKTIFIPDKECQRPDLLATSSDFLRLWRIADDHSRVELKSCLNSNKNSEFCGPLTSFDWNEAEPRRIGTSSTDTTCTIWDIEREAVDTQLIAHDKEVFDIAWGGVGVFASVSADGSVRVFDLRDKEHSTIIYESSEPDTPLVRLGWNKQDPRYMATIIMDSAKVVVLDIRFPALPVVELQRHQASVNAIAWAPHSSCHICTAGDDSQALIWDISSMGQHVEGGLDPILAYTAGAEIEQLQWSSSQPDWVAIAFSTKLQILRV

SEQ ID NO: 24067 - protein, 314 aa, Arabidopsis thaliana
  peptide (1)..(314): Ceres Seq. ID no. 12339542
MNWSVRRDKKYRLAITSLLEQYPNRVEIVQLDESNGEIRSDPNLSFEHPYPPTKTIFIPDKECQRPDLLATSSDFLRLWRIADDHSRVELKSCLNSNKNSEFCGPLTSFDWNEAEPRRIGTSSTDTTCTIWDIEREAVDTQLIAHDKEVFDIAWGGVGVFASVSADGSVRVFDLRDKEHSTIIYESSEPDTPLVRLGWNKQDPRYMATIIMDSAKVVVLDIRFPALPVVELQRHQASVNAIAWAPHSSCHICTAGDDSQALIWDISSMGQHVEGGLDPILAYTAGAEIEQLQWSSSQPDWVAIAFSTKLQILRV

SEQ ID NO: 24068 - DNA, 1013 bp, Arabidopsis thaliana
  misc_feature (1)..(1013): Ceres Seq. ID no. 13488275
  misc_feature (1)..(1013): Ortholog of  Ceres SEQ ID NO 13595812 as cited in SEQ ID NO 59796
gcgatcacagagtgtcaaagcaatctgctttttctcctctcagattcaaaggttctctttgaagcttcgtaggtggttatactttgatggcggattatcatttcgtgtataaggacattgaaggagcgtcaactcaatgggatgatatccagcggaaattggggaatctaccggagaaggctccggctttcaaacctccggcgtatactccggcggaagacgagtcttcagctcctaaggatcaggcatggtttgataagaagacagaggaggagcttgaggatcttgaggacgacaaagatctcgacgatgatcgctttctcgaagaatacaggaagaagaggttgtctgagctaagagaggctgctaaagttaaaagatatggaacagtgactcccatctcgggctctgatttcgtgagggaggttacgcaagcttctgctgaagattgggttgttgtatgtctctataaagatggtgttgcagaatgtagtttgctattgggttgtctagacgaattgggtagtagatacccagcaacaaagttcgttaagataatatctactgattgtattccgaactaccctgattgcaatcttcctaccttgctggtgtaccaccatggcgccatcaaaggaactcatgtaggcttaaagagctttggccgtaggtgcaccccagagagtgtagccttacttctgtgtcaatcagagccagttcttaacgatggcaaaggaggagacgatgactcctcgagggaagctgtgatggctggagttcgaagacagttcatagaacgagtggtgaaggaccacgaagataaggataacgatgatggtggttacaatagtgattagaacttcaaagcttctctgtttatctctgttggttattgcttgttgagttggtgactggtaaacaaaagtgctgacttcttgtgtgatgtaatgttttttaaacattttgtaacttttgttcttttgaaagagacaggaacttcatgttgttttttg

SEQ ID NO: 24069 - protein, 256 aa, Arabidopsis thaliana
  peptide (1)..(256): Ceres Seq. ID no. 13488276
MADYHFVYKDIEGASTQWDDIQRKLGNLPEKAPAFKPPAYTPAEDESSAPKDQAWFDKKTEEELEDLEDDKDLDDDRFLEEYRKKRLSELREAAKVKRYGTVTPISGSDFVREVTQASAEDWVVVCLYKDGVAECSLLLGCLDELGSRYPATKFVKIISTDCIPNYPDCNLPTLLVYHHGAIKGTHVGLKSFGRRCTPESVALLLCQSEPVLNDGKGGDDDSSREAVMAGVRRQFIERVVKDHEDKDNDDGGYNSD

SEQ ID NO: 24070 - DNA, 1789 bp, Arabidopsis thaliana
  misc_feature (1)..(1789): Ceres Seq. ID no. 13497310
  misc_feature (1)..(1789): Ortholog of  Ceres SEQ ID NO 12582251 as cited in SEQ ID NO 55724
agttatttcatgaaaaaccaatctagggttttgaactctgaattgggggattttgacctttcagttttgtgggatcaaattttgaatttcgagggttatggttcctactgtttcagaccaatggatatggatggttaccacaaacggagcgccggtttaaacccttgtaaacactccggtttctcacattcatcaagacccatggctccaggaatttaccgttacccagaagtgaaatcttcgttgcggagacaagttcatgcgcctgtgcggatactcaatagcggtcgagatcgtagcacacgacaaggttctggtaatgtgttgggaacctttctcacaaggaacaatgacatgtggaaaagaaatgcacttgattcgtctttacgctatagaacggatagagaagtaattgatgttgatgatgagcttggagatgttgaaatgatatctgatgatacaagtagggagggtgtcgaaaacgtggctatggaggtggacgaggtggaagagaaggcggagatgggaaatggattgttttctgaggttgccagtctgaaaaatgggagcttgagggtgggtgaatgttctaaagctaatagtagttcactcgttgtgaatcgccctgtgactgatgtcacaagttttgaagcatacagaaaggttcttgagagtgctgtgaaccggacttctaaactgaaagacagaggctttgttgatttttttaaagagagaggtcgtgctttactacgaagcttgtcttccttttggagacaagatgaagaaccagtagaggttgtacaacgtgaggcatttgtacctctttctagagaggaggagacagcagtcaggcgtgcattctcagctaatgattcaaacatcttggttactcataagaactcaaatattgatattaccgggaaaatcttgaggtgccttaaaccaggcaaatggttgaacgatgaggtcattaatctttatatggtattgctgaaagaaagggaagctagagaaccaaagaagtttcttaaatgtcattttttcaatacatttttcttcactaagttagttaattcggcgactggatacaactatggtgcagtgagaagatggacttcaatgaagaggttgggctaccatctcaaagactgtgacaagatatttatccctatccatatgaacatccactggactttggctgtaattaatataaaggaccagaaattccagtatcttgactctttcaaaggaagggagcctaaaatcctcgatgcactggctagatactttgtcgatgaagtgagggataagagtgaagtagaccttgatgtaagtcgatggagacaagaatttgtccaggaccttccaatgcagagaaatggattcgattgtggaatgtttatggtgaaatacatcgacttctatagcagaggtctggatctttgtttcactcaggaacaaatgccatatttccgggctaggacagcaaaggagattctgcaactgaaagccgagtgatgccagcataataaggaaactcttaaagaatagttttgaagttcttcttcttcttcatgtagatagtatttagcaagttagatgcacactttacgtgtttgataatttgatgtacatagaaaagggtaacaatgtggttctctgatgatcaggcttgatagtgaaattcgaattgttgtttaaagattctagtttcatatcagatactctgattttgaattctggtattatttttgtactttataaatttaaaattaaagaaatttgtgtt

SEQ ID NO: 24071 - protein, 505 aa, Arabidopsis thaliana
  peptide (1)..(505): Ceres Seq. ID no. 13497311
SYFMKNQSRVLNSELGDFDLSVLWDQILNFEGYGSYCFRPMDMDGYHKRSAGLNPCKHSGFSHSSRPMAPGIYRYPEVKSSLRRQVHAPVRILNSGRDRSTRQGSGNVLGTFLTRNNDMWKRNALDSSLRYRTDREVIDVDDELGDVEMISDDTSREGVENVAMEVDEVEEKAEMGNGLFSEVASLKNGSLRVGECSKANSSSLVVNRPVTDVTSFEAYRKVLESAVNRTSKLKDRGFVDFFKERGRALLRSLSSFWRQDEEPVEVVQREAFVPLSREEETAVRRAFSANDSNILVTHKNSNIDITGKILRCLKPGKWLNDEVINLYMVLLKEREAREPKKFLKCHFFNTFFFTKLVNSATGYNYGAVRRWTSMKRLGYHLKDCDKIFIPIHMNIHWTLAVINIKDQKFQYLDSFKGREPKILDALARYFVDEVRDKSEVDLDVSRWRQEFVQDLPMQRNGFDCGMFMVKYIDFYSRGLDLCFTQEQMPYFRARTAKEILQLKAE

SEQ ID NO: 24072 - protein, 502 aa, Arabidopsis thaliana
  peptide (1)..(502): Ceres Seq. ID no. 13497312
MKNQSRVLNSELGDFDLSVLWDQILNFEGYGSYCFRPMDMDGYHKRSAGLNPCKHSGFSHSSRPMAPGIYRYPEVKSSLRRQVHAPVRILNSGRDRSTRQGSGNVLGTFLTRNNDMWKRNALDSSLRYRTDREVIDVDDELGDVEMISDDTSREGVENVAMEVDEVEEKAEMGNGLFSEVASLKNGSLRVGECSKANSSSLVVNRPVTDVTSFEAYRKVLESAVNRTSKLKDRGFVDFFKERGRALLRSLSSFWRQDEEPVEVVQREAFVPLSREEETAVRRAFSANDSNILVTHKNSNIDITGKILRCLKPGKWLNDEVINLYMVLLKEREAREPKKFLKCHFFNTFFFTKLVNSATGYNYGAVRRWTSMKRLGYHLKDCDKIFIPIHMNIHWTLAVINIKDQKFQYLDSFKGREPKILDALARYFVDEVRDKSEVDLDVSRWRQEFVQDLPMQRNGFDCGMFMVKYIDFYSRGLDLCFTQEQMPYFRARTAKEILQLKAE

SEQ ID NO: 24073 - protein, 465 aa, Arabidopsis thaliana
  peptide (1)..(465): Ceres Seq. ID no. 13497313
MDMDGYHKRSAGLNPCKHSGFSHSSRPMAPGIYRYPEVKSSLRRQVHAPVRILNSGRDRSTRQGSGNVLGTFLTRNNDMWKRNALDSSLRYRTDREVIDVDDELGDVEMISDDTSREGVENVAMEVDEVEEKAEMGNGLFSEVASLKNGSLRVGECSKANSSSLVVNRPVTDVTSFEAYRKVLESAVNRTSKLKDRGFVDFFKERGRALLRSLSSFWRQDEEPVEVVQREAFVPLSREEETAVRRAFSANDSNILVTHKNSNIDITGKILRCLKPGKWLNDEVINLYMVLLKEREAREPKKFLKCHFFNTFFFTKLVNSATGYNYGAVRRWTSMKRLGYHLKDCDKIFIPIHMNIHWTLAVINIKDQKFQYLDSFKGREPKILDALARYFVDEVRDKSEVDLDVSRWRQEFVQDLPMQRNGFDCGMFMVKYIDFYSRGLDLCFTQEQMPYFRARTAKEILQLKAE

SEQ ID NO: 24074 - DNA, 1192 bp, Arabidopsis thaliana
  misc_feature (1)..(1192): Ceres Seq. ID no. 12335264
  misc_feature (1)..(1192): Ortholog of  Ceres SEQ ID NO 15175700 as cited in SEQ ID NO 58584
  misc_feature (1)..(1192): Ortholog of  Ceres SEQ ID NO 13596474 as cited in SEQ ID NO 62169
  misc_feature (1)..(1192): Ortholog of  Ceres SEQ ID NO 13598714 as cited in SEQ ID NO 62656
  misc_feature (1)..(1192): Ortholog of  Ceres SEQ ID NO 13596969 as cited in SEQ ID NO 63375
  misc_feature (1)..(1192): Ortholog of  Ceres SEQ ID NO 13597519 as cited in SEQ ID NO 64759
  misc_feature (1)..(1192): Ortholog of  Ceres SEQ ID NO 13597870 as cited in SEQ ID NO 64982
  misc_feature (1)..(1192): Ortholog of  Ceres SEQ ID NO 13656123 as cited in SEQ ID NO 65212
  misc_feature (1)..(1192): Ortholog of  Ceres SEQ ID NO 13595926 as cited in SEQ ID NO 67778
attatcaatcgagcaaaaaacaaaagctaagagcaacaaactaaagattttttaagaaaatggcagcttctaagcgactagttgtctcttgcttgttcttagttttgttgtttgctcaagccaattcgcaaggtttgaaagtaggtttctacagcaaaacatgcccacaactcgagggtatagttaaaaaggtcgtgttcgatgcgatgaacaaagcaccaacacttggtgctcctttgcttagaatgttcttccacgactgcttcgttcggggatgtgacggatcagttttgttagataaaccaaacaatcaaggtgagaagagtgcagttcctaacctaagtcttcgagggtttggcatcatagacgattccaaggcggctctagaaaaagtgtgtccgggaattgtttcttgctctgatatcttggcacttgtcgctagagacgcaatggttgcacttgaaggaccatcatgggaagttgaaacgggaagaagagacggtagggtttctaacatcaacgaagtcaacttgccatcaccttttgataacatcaccaagcttatcagcgattttcgctcaaagggcctcaacgagaaggatctagtcattctctcgggtggtcacacaattggaatgggacattgtcctttattgacaaaccggctttacaacttcaccggaaaaggagacagcgacccaagtttggactcggagtacgccgctaagctcaggaagaaatgcaagcccaccgatacgacgacggctctagagatggatccggggagtttcaaaacatttgacttgagctacttcacgctagtggctaagagaagaggacttttccagtcggatgctgctctactcgacaactccaagactagggcttatgtcttgcaacagataagaactcatgggtcaatgttctttaacgactttggtgtctctatggtgaaaatgggtcggactggagttcttacgggtaaggccggggagatccgtaagacgtgtcggtctgctaattaagagatatagaaatgaaaatatctcaatatatgtgagtttgattattattgtttgcttcttttattttgttgtcatccctatattaaatgtgattgttttcttgggtattgtttcttgggaataagctgtatctaaaatttataaaagtcttgaaagttcagaatgtt

SEQ ID NO: 24075 - protein, 321 aa, Arabidopsis thaliana
  peptide (1)..(321): Ceres Seq. ID no. 12335265
MAASKRLVVSCLFLVLLFAQANSQGLKVGFYSKTCPQLEGIVKKVVFDAMNKAPTLGAPLLRMFFHDCFVRGCDGSVLLDKPNNQGEKSAVPNLSLRGFGIIDDSKAALEKVCPGIVSCSDILALVARDAMVALEGPSWEVETGRRDGRVSNINEVNLPSPFDNITKLISDFRSKGLNEKDLVILSGGHTIGMGHCPLLTNRLYNFTGKGDSDPSLDSEYAAKLRKKCKPTDTTTALEMDPGSFKTFDLSYFTLVAKRRGLFQSDAALLDNSKTRAYVLQQIRTHGSMFFNDFGVSMVKMGRTGVLTGKAGEIRKTCRSAN

SEQ ID NO: 24076 - protein, 272 aa, Arabidopsis thaliana
  peptide (1)..(272): Ceres Seq. ID no. 12335266
MNKAPTLGAPLLRMFFHDCFVRGCDGSVLLDKPNNQGEKSAVPNLSLRGFGIIDDSKAALEKVCPGIVSCSDILALVARDAMVALEGPSWEVETGRRDGRVSNINEVNLPSPFDNITKLISDFRSKGLNEKDLVILSGGHTIGMGHCPLLTNRLYNFTGKGDSDPSLDSEYAAKLRKKCKPTDTTTALEMDPGSFKTFDLSYFTLVAKRRGLFQSDAALLDNSKTRAYVLQQIRTHGSMFFNDFGVSMVKMGRTGVLTGKAGEIRKTCRSAN

SEQ ID NO: 24077 - protein, 259 aa, Arabidopsis thaliana
  peptide (1)..(259): Ceres Seq. ID no. 12335267
MFFHDCFVRGCDGSVLLDKPNNQGEKSAVPNLSLRGFGIIDDSKAALEKVCPGIVSCSDILALVARDAMVALEGPSWEVETGRRDGRVSNINEVNLPSPFDNITKLISDFRSKGLNEKDLVILSGGHTIGMGHCPLLTNRLYNFTGKGDSDPSLDSEYAAKLRKKCKPTDTTTALEMDPGSFKTFDLSYFTLVAKRRGLFQSDAALLDNSKTRAYVLQQIRTHGSMFFNDFGVSMVKMGRTGVLTGKAGEIRKTCRSAN

SEQ ID NO: 24078 - DNA, 1063 bp, Arabidopsis thaliana
  misc_feature (1)..(1063): Ceres Seq. ID no. 12321505
  misc_feature (1)..(1063): Ortholog of  Ceres SEQ ID NO 15176130 as cited in SEQ ID NO 1136
  misc_feature (1)..(1063): Ortholog of  Ceres SEQ ID NO 15171728 as cited in SEQ ID NO 57131
  misc_feature (1)..(1063): Ortholog of  Ceres SEQ ID NO 14308198 as cited in SEQ ID NO 59072
  misc_feature (1)..(1063): Ortholog of  Ceres SEQ ID NO 13654213 as cited in SEQ ID NO 60614
  misc_feature (1)..(1063): Ortholog of  Ceres SEQ ID NO 12617527 as cited in SEQ ID NO 64697
tccgttaagagaaacctccctcactcccactttccgacgaacaaaaacaacatctgaaaaaaatcatgaatccagcagattccgatcatccacagcttccaaacatcaagatccatcaccctccatctccacgtcactctcaccatcaccactcctcatctactccctcctccgccgcaactccaacaccaaccgccggagctcgtcgtaaaatcggagtcgcagttgatctctccgaagaaagctctttcgccgttcgttgggctgtagatcactacatccgtcccggagacgccgttgttcttctccacgtttctccaacctccgtcctcttcggtgccgattggggacctctccctctgaaaactcaaattgaagatccaaacgctcaacctcaacctagtcaagaggattttgatgcttttacttcaacaaaagttgcggatctagctaaaccgttgaaggagttagggtttccttataagatccatatagtgaaagatcatgatatgagagagagattatgtcttgagattgagaggcttggtcttagtgctgtgattatgggaagtagaggttttggtgctgagaaaaaaagaggaagtgatggcaagcttggctctgttagtgattactgtgttcatcactgtgtttgtcctgttgttgtggttagatatcctgatgatcgtgatggacctgtgcctattgttactgtcaagtctggtggagatgatgatggagatgttgttgctgcttctgcttctgctcatcatgaacacatcaaagatgagtgatgattcgtgggatctaagtaatatatcaccctcttctcttctaggtacacaaagcaagtaggggtgttagcggaatgttcagaggagtgttgaatgtgtgttctttctttagctatgacaatgttgatgaatttctttgggttatgtaatatgaatgagtgttgagtggtttctgcattaaacatgaaggagttgtatgattaatgaaccccttttaggaagaagaaggattatacgtttctttaataaagactggtattttagaattt

SEQ ID NO: 24079 - protein, 242 aa, Arabidopsis thaliana
  peptide (1)..(242): Ceres Seq. ID no. 12321506
MNPADSDHPQLPNIKIHHPPSPRHSHHHHSSSTPSSAATPTPTAGARRKIGVAVDLSEESSFAVRWAVDHYIRPGDAVVLLHVSPTSVLFGADWGPLPLKTQIEDPNAQPQPSQEDFDAFTSTKVADLAKPLKELGFPYKIHIVKDHDMRERLCLEIERLGLSAVIMGSRGFGAEKKRGSDGKLGSVSDYCVHHCVCPVVVVRYPDDRDGPVPIVTVKSGGDDDGDVVAASASAHHEHIKDE

SEQ ID NO: 24080 - DNA, 1308 bp, Arabidopsis thaliana
  misc_feature (1)..(1308): Ceres Seq. ID no. 12338611
  misc_feature (1)..(1308): Ortholog of  Ceres SEQ ID NO 13655992 as cited in SEQ ID NO 65504
  misc_feature (1)..(1308): Ortholog of  Ceres SEQ ID NO 13587581 as cited in SEQ ID NO 0
gtatttgcagaagaagaagagaaaaagtttgaaagaaaatgggagcagcgaagaatatctgggcattagccaacgccgaagatgcagctaacgacgccgaacaaatcccttattcttcgttcgtcgtcgacacgtctttgcctcttcctctcatgattcctcgtatcatagagttatgtaaagatctgttcaagaattggggagagcttgatgattcactcttctctgttgagagagtatctggaggcattacaaatcttttgctgaaggtttctgtgaaagaggacactaataaagaagtgtctgttacagtgcgactgtatgggcctaacactgagtatgttattaaccgggagagagagattctggctatcaagtatctctcggctgccggatttggtgccaagttgcttggtggttttggaaatggcatggtgcaatcgttcatcaatgcaagaaccttagagccatcagacatgagagagcaaaagattgctgcacaaattgccagagaacttggaaagtttcataaagttgacataccaggttccaaggaacctcagctgtgggttgatatcttgaagttctatgaaaaagcatctactcttacgtttgaggaacctgataagcagaagctctttgaaactatttcgtttgaagaactccatacagaaattattgagctaagggaattcacaggcttacttaacgcacctgtggtgtttgctcataacgatttactatcaggaaacttcatgctgaatgatgaagaagagaaactatacttgattgatttcgagtatggatcatacaactatagaggctttgacatcggaaatcacttcaatgaatatgcaggatacgactgtgattacagcctgtacccaagtaaagaggaacaatatcacttcatcaagcattacttacagccagacaaaccagacgaggtcagtatcgcagaagtagaatcagtctttgtagagacagatgcgtataaattagcatctcatttgtactgggcaatatgggcgatcatccaggcaaggatgtctcccattgagtttgaatatttgggttacttctttttgcggtacaatgaatacaagaagcagaagccacttactttttcccttgttacatctcacctctctgcatcgatgtagcctttgtttggccaaaatggttaaatctttgtttattttttgttgtgttttatcaattcttgtaaaatttgtttgtgttgttagttaaaccttgtatgatttgtatgaatgaacttgatttgtggaagtagttgcacttgatatt

SEQ ID NO: 24081 - protein, 374 aa, Arabidopsis thaliana
  peptide (1)..(374): Ceres Seq. ID no. 12338612
MGAAKNIWALANAEDAANDAEQIPYSSFVVDTSLPLPLMIPRIIELCKDLFKNWGELDDSLFSVERVSGGITNLLLKVSVKEDTNKEVSVTVRLYGPNTEYVINREREILAIKYLSAAGFGAKLLGGFGNGMVQSFINARTLEPSDMREQKIAAQIARELGKFHKVDIPGSKEPQLWVDILKFYEKASTLTFEEPDKQKLFETISFEELHTEIIELREFTGLLNAPVVFAHNDLLSGNFMLNDEEEKLYLIDFEYGSYNYRGFDIGNHFNEYAGYDCDYSLYPSKEEQYHFIKHYLQPDKPDEVSIAEVESVFVETDAYKLASHLYWAIWAIIQARMSPIEFEYLGYFFLRYNEYKKQKPLTFSLVTSHLSASM

SEQ ID NO: 24082 - protein, 336 aa, Arabidopsis thaliana
  peptide (1)..(336): Ceres Seq. ID no. 12338614
MIPRIIELCKDLFKNWGELDDSLFSVERVSGGITNLLLKVSVKEDTNKEVSVTVRLYGPNTEYVINREREILAIKYLSAAGFGAKLLGGFGNGMVQSFINARTLEPSDMREQKIAAQIARELGKFHKVDIPGSKEPQLWVDILKFYEKASTLTFEEPDKQKLFETISFEELHTEIIELREFTGLLNAPVVFAHNDLLSGNFMLNDEEEKLYLIDFEYGSYNYRGFDIGNHFNEYAGYDCDYSLYPSKEEQYHFIKHYLQPDKPDEVSIAEVESVFVETDAYKLASHLYWAIWAIIQARMSPIEFEYLGYFFLRYNEYKKQKPLTFSLVTSHLSASM

SEQ ID NO: 24083 - protein, 243 aa, Arabidopsis thaliana
  peptide (1)..(243): Ceres Seq. ID no. 12338615
MVQSFINARTLEPSDMREQKIAAQIARELGKFHKVDIPGSKEPQLWVDILKFYEKASTLTFEEPDKQKLFETISFEELHTEIIELREFTGLLNAPVVFAHNDLLSGNFMLNDEEEKLYLIDFEYGSYNYRGFDIGNHFNEYAGYDCDYSLYPSKEEQYHFIKHYLQPDKPDEVSIAEVESVFVETDAYKLASHLYWAIWAIIQARMSPIEFEYLGYFFLRYNEYKKQKPLTFSLVTSHLSASM

SEQ ID NO: 24084 - DNA, 1451 bp, Arabidopsis thaliana
  misc_feature (1)..(1451): Ceres Seq. ID no. 12324378
  misc_feature (1)..(1451): Ortholog of  Ceres SEQ ID NO 14308107 as cited in SEQ ID NO 59030
  misc_feature (1)..(1451): Ortholog of  Ceres SEQ ID NO 15226612 as cited in SEQ ID NO 62700
tctctatttccctatcaaaattcacaccggcgattttgagattgttctctgattggcttaatccgagagaatcaaggaattgaatggccagtgaatcagatgcatcgagcattgctactctttcctgtgctcgctgcgagaagcctgcacatcttcagtgtccgaaatgcatagacttaaagcttcctcgtgaacaagcctctttctgcactcaagaatgtttcaaggcagcttggagctcgcacaaatcagtacatgtgaaagctcagctgtcttcaatcggtgatcagaactctgatcttatttctcaaggctggctctattgcgtcaagaaaggccaggctagaacacctaagcttccacactttgattggactgggcctctaaagcaatatcccatatctaccaagcgtgttgtgcctgctgagattgagaaacctgactgggcaattgatgggactcccaaagttgaaccgaatagtgatctacaacatgttgttgagataaaaacgcctgaacaaatccagagaatgcgtgaaacctgtaaaattgccagagaggtcctggatgcagccgctagggtgattcaccccggtgtgactactgatgagattgatcgagtagttcatgaagcaactattgcagcaggaggatatccatcgcccctcaactactatttctttccgaaatcttgctgcacatctgttaatgaagtaatttgtcatggaattccggatgctaggaaactagaagatggtgatatagtaaatgtggatgtaacagtctgttataaaggttgccatggtgaccttaatgagacatactttgttggaaacgttgacgaagcatcacgtcaactggttaagtgcacatacgagtgcctggagaaagctatagcaattgttaaacctggagtaagatttcgtgaaattggagagatagtcaaccgccatgctacaatgtctgggttatcagtggtgagatcttattgtggtcatggtattggagatctcttccattgtgctccaaacattcctcactatgcaagaaacaaagcagttggagtgatgaaagcaggtcagactttcacaatcgagccaatgatcaacgcaggggggtggagggatcgaacatggcctgatggatggactgcagttaccgcagatggaaaacgcagcgctcagtttgagcataccctattggtaacggagactggtgttgaggttttaacagcgaggcttccttcatcgcctgacgtatatccttggcttaccaagtgattaagtgtttggttcctttttggttgtgattcgtaaacttgggaataatagtgtcatctttttgccattatagaccatttgatgttgttaccttgttgtctttgtttatgtaattttattattactatctgaaactgaatcttaaagacagagtcatactgtttcaaaccc

SEQ ID NO: 24085 - protein, 398 aa, Arabidopsis thaliana
  peptide (1)..(398): Ceres Seq. ID no. 12324379
MASESDASSIATLSCARCEKPAHLQCPKCIDLKLPREQASFCTQECFKAAWSSHKSVHVKAQLSSIGDQNSDLISQGWLYCVKKGQARTPKLPHFDWTGPLKQYPISTKRVVPAEIEKPDWAIDGTPKVEPNSDLQHVVEIKTPEQIQRMRETCKIAREVLDAAARVIHPGVTTDEIDRVVHEATIAAGGYPSPLNYYFFPKSCCTSVNEVICHGIPDARKLEDGDIVNVDVTVCYKGCHGDLNETYFVGNVDEASRQLVKCTYECLEKAIAIVKPGVRFREIGEIVNRHATMSGLSVVRSYCGHGIGDLFHCAPNIPHYARNKAVGVMKAGQTFTIEPMINAGGWRDRTWPDGWTAVTADGKRSAQFEHTLLVTETGVEVLTARLPSSPDVYPWLTK

SEQ ID NO: 24086 - protein, 249 aa, Arabidopsis thaliana
  peptide (1)..(249): Ceres Seq. ID no. 12324380
MRETCKIAREVLDAAARVIHPGVTTDEIDRVVHEATIAAGGYPSPLNYYFFPKSCCTSVNEVICHGIPDARKLEDGDIVNVDVTVCYKGCHGDLNETYFVGNVDEASRQLVKCTYECLEKAIAIVKPGVRFREIGEIVNRHATMSGLSVVRSYCGHGIGDLFHCAPNIPHYARNKAVGVMKAGQTFTIEPMINAGGWRDRTWPDGWTAVTADGKRSAQFEHTLLVTETGVEVLTARLPSSPDVYPWLTK

SEQ ID NO: 24087 - DNA, 1295 bp, Arabidopsis thaliana
  misc_feature (1)..(1295): Ceres Seq. ID no. 12324935
  misc_feature (1)..(1295): Ortholog of  Ceres SEQ ID NO 13662567 as cited in SEQ ID NO 62884
aattcgttttccctcctcttctgcttaccggaaaagtctatatctccgacggaccttcttctctctagttaatcagacctcgcgctcgtgataatggcaacttttggtgcgcctgctaccgccaacagtaaccctaacaaatcctacgaggttactccatcaccggcagattctatttcgagcttaagttttagtccaagagctgatatacttgtggccacttcatgggacaatcaggtgaggtgttgggaaatatcccgtagtggagcctctctagccagtgctcctaaagcatcaatatcacatgatcagccggttttatgttctgcttggaaggatgatggaaccacagtctttagcggtggatgtgataagcaagcaaaaatgtggcccttgttgtctggtggtcaacctgtaactgttgctatgcatgagggtcctatcgcagctatggcttggatcccgggaatgaatctccttgcaactggaagttgggataaaactttgaaatattgggacacaagacagcaaaatcctgtacatacccaacagcttccagacaaatgttatacattgtctgtgaaacatcctctgatggttgtcgggactgccgatagaaatctgatagtcttcaacttgcaaaatcctcagactgagtttaagagaatccaatccccactgaagtaccagacgaggtgtgttactgccttccctgatcagcaaggttttttggttggttcaattgaggggcgggttggtgttcatcatctggatgattctcaacagagcaaaaacttcacattcaaatgccacagagatggaaatgatatatattctgtcaactctctgaatttccacccggtacatggcacttttgcaactgctgggtcagatggtgctttcaatttctgggacaaagatagtaaacaaagactcaaggccatgtcgaggtgcaatcagccaattccatgcagctcgttcaaccacgatggatcgatatatgcatatgcggcttgctatgactggagcaaaggtgcagaaaatcacaacccggcgactgcaaaaagcagcattttcttgcacctgccacaggaaagcgaggttaaggccaagccaagagttggagcaaccggcagaaaatgagcgttgcttagtctgatttcttcgctagtgattttttttttttttttagcttgtggacttcgttgggctttgttatctactttagttcatgacattttgaatatacattaggagtcttgtctaaaagactaaaagtaaatctctaatgtttc

SEQ ID NO: 24088 - protein, 349 aa, Arabidopsis thaliana
  peptide (1)..(349): Ceres Seq. ID no. 12324936
MATFGAPATANSNPNKSYEVTPSPADSISSLSFSPRADILVATSWDNQVRCWEISRSGASLASAPKASISHDQPVLCSAWKDDGTTVFSGGCDKQAKMWPLLSGGQPVTVAMHEGPIAAMAWIPGMNLLATGSWDKTLKYWDTRQQNPVHTQQLPDKCYTLSVKHPLMVVGTADRNLIVFNLQNPQTEFKRIQSPLKYQTRCVTAFPDQQGFLVGSIEGRVGVHHLDDSQQSKNFTFKCHRDGNDIYSVNSLNFHPVHGTFATAGSDGAFNFWDKDSKQRLKAMSRCNQPIPCSSFNHDGSIYAYAACYDWSKGAENHNPATAKSSIFLHLPQESEVKAKPRVGATGRK

SEQ ID NO: 24089 - protein, 252 aa, Arabidopsis thaliana
  peptide (1)..(252): Ceres Seq. ID no. 12324937
MWPLLSGGQPVTVAMHEGPIAAMAWIPGMNLLATGSWDKTLKYWDTRQQNPVHTQQLPDKCYTLSVKHPLMVVGTADRNLIVFNLQNPQTEFKRIQSPLKYQTRCVTAFPDQQGFLVGSIEGRVGVHHLDDSQQSKNFTFKCHRDGNDIYSVNSLNFHPVHGTFATAGSDGAFNFWDKDSKQRLKAMSRCNQPIPCSSFNHDGSIYAYAACYDWSKGAENHNPATAKSSIFLHLPQESEVKAKPRVGATGRK

SEQ ID NO: 24090 - protein, 238 aa, Arabidopsis thaliana
  peptide (1)..(238): Ceres Seq. ID no. 12324938
MHEGPIAAMAWIPGMNLLATGSWDKTLKYWDTRQQNPVHTQQLPDKCYTLSVKHPLMVVGTADRNLIVFNLQNPQTEFKRIQSPLKYQTRCVTAFPDQQGFLVGSIEGRVGVHHLDDSQQSKNFTFKCHRDGNDIYSVNSLNFHPVHGTFATAGSDGAFNFWDKDSKQRLKAMSRCNQPIPCSSFNHDGSIYAYAACYDWSKGAENHNPATAKSSIFLHLPQESEVKAKPRVGATGRK

SEQ ID NO: 24091 - DNA, 665 bp, Arabidopsis thaliana
  misc_feature (1)..(665): Ceres Seq. ID no. 12321507
  misc_feature (1)..(665): Ortholog of  Ceres SEQ ID NO 13661994 as cited in SEQ ID NO 60568
  misc_feature (1)..(665): Ortholog of  Ceres SEQ ID NO 12584790 as cited in SEQ ID NO 62648
atcatctctattaaaaatattggaaaaaccctaattcctggtgttggcgaatcacttttcatttcatctttgaacttcagtctgtgaatttccaacagcaatgacaactccagcaaaaaagagactgatgtgggatttcaagagactgcagaaagatcctcctgtgggaataagtggagctccacaagataacaatatattgcattggaatgctctcatctttggacctgaggacactccatgggatggaggtactttcaagttgactcttcacttcaccgaggattacccgaacaaacccccgattgttcggtttgtttcggatgtttcatccaaacatttatgctgatggaagcatttgcttggatatcttgcaaaaccagtggagccccatctacgacgttgctgcagttctcacatcaattcagtctttgctctgtgacccaaaccctgactcaccagcgaacgcagaggctgcaaggttgttcagtgagaataaaagagaatataacaggaaagtaatcgagatcgtggagcagagctatgtataaatatgattcattttgttgtattgactaatgagtaattggatgttgaatagtatttattatctaccttgagtttattttacatggatgtttaaatttcggaaatgagatttctgc

SEQ ID NO: 24092 - protein, 93 aa, Arabidopsis thaliana
  peptide (1)..(93): Ceres Seq. ID no. 12321508
MGWRYFQVDSSLHRGLPEQTPDCSVCFGCFIQTFMLMEAFAWISCKTSGAPSTTLLQFSHQFSLCSVTQTLTHQRTQRLQGCSVRIKENITGK

SEQ ID NO: 24093 - protein, 82 aa, Arabidopsis thaliana
  peptide (1)..(82): Ceres Seq. ID no. 12321509
MTTPAKKRLMWDFKRLQKDPPVGISGAPQDNNILHWNALIFGPEDTPWDGGTFKLTLHFTEDYPNKPPIVRFVSDVSSKHLC

SEQ ID NO: 24094 - protein, 75 aa, Arabidopsis thaliana
  peptide (1)..(75): Ceres Seq. ID no. 12321510
MFHPNIYADGSICLDILQNQWSPIYDVAAVLTSIQSLLCDPNPDSPANAEAARLFSENKREYNRKVIEIVEQSYV

SEQ ID NO: 24095 - DNA, 1540 bp, Arabidopsis thaliana
  misc_feature (1)..(1540): Ceres Seq. ID no. 12335268
  misc_feature (1)..(1540): Ortholog of  Ceres SEQ ID NO 13597446 as cited in SEQ ID NO 64098
  misc_feature (1)..(1540): Ortholog of  Ceres SEQ ID NO 15226246 as cited in SEQ ID NO 68314
atcctctgcaaagttatggctttgcttgagagtataatattagggctaatcacaggatggttagcttttgttattgggttggttattggatgggcatggaaaccaagatgggtttcttcttctaataatcgacaagtcaaattacaatgttctgctccaagatcttttgatttgtctttaccatcttcttctcctagttctgttgttacttctcctttgaagggttttggatcagctccttgcttaaaggctcttgtttgtgatacatggactatggctttaagacaacagagacaaacagtttctcctgattcttcttcttcttcatatgattcttctgaacaacatttggatttggtttcaagagtgaagaaaacaaaggagagattgcctaatactgtaacagagttagatttgagacatcttgtgcaattggttgagaggaaagatggtggtcaagcttggattcagatgatggatcgttttactcctggtatgagataccaagcttggttgagagaacctaagaatggtcctactgagtatagaagtagaactgtgtttgaagatgcaactcctgtgatgttaagagactttttctgggatgatgagtttagaccaacttgggatacaatgctttctaattccactactgttgaagagtgtcccagtactggaaccatgattgttagatggatacgcaagttcccgttcttctgcagtgatagagagtatgtaatcggtcgcaggatatggaattgtggaaactcttattactgtgttacaaagggagtatcggttccttctataccgcctaacaacaaacaaaaacgcgtggatttgttctactcaagctgtgcattcgaccagtggaatcaagaagagacgatggggtaacaagtgcctgcgaagtacttctattccaccacgaagacatgggaatacctagagaaatcgcaaagcttggagtgaaacgaggaatgtggggagcagtgaagaagatggaacccggtttacgtgcttaccaaacgcatagactctcagatggaggaaccaagctttctcggtctgctttcatggctcaaatgaacaccaagatcacacaagaccatctcatctccctcagcaacggtgcatcgcctgtcactgaaactcccgttacattaaaccaaggaaaccgagctgcgaatctgaagaaactgttgattatcggtggagctgttgcggttgtctgcagtttaagcggaggtgcttttgttcctcctgcgtttcttttaggttttgggaaaaggtttgttaatggtggaagaaaacgtcagctcgaaggaacaacaagaagtgagagtcagactacttcttcatagaatcttgagaccaagaatatagatcaacatataaatttagattcgttttaagtagattaagaataatccattccaaaattagtttatagaattggaataagctgtatgattattaatctttatacaaaggaaggaacattttttttacaagtaatgaataaaatctctttatcatc

SEQ ID NO: 24096 - protein, 298 aa, Arabidopsis thaliana
  peptide (1)..(298): Ceres Seq. ID no. 12335269
ILCKVMALLESIILGLITGWLAFVIGLVIGWAWKPRWVSSSNNRQVKLQCSAPRSFDLSLPSSSPSSVVTSPLKGFGSAPCLKALVCDTWTMALRQQRQTVSPDSSSSSYDSSEQHLDLVSRVKKTKERLPNTVTELDLRHLVQLVERKDGGQAWIQMMDRFTPGMRYQAWLREPKNGPTEYRSRTVFEDATPVMLRDFFWDDEFRPTWDTMLSNSTTVEECPSTGTMIVRWIRKFPFFCSDREYVIGRRIWNCGNSYYCVTKGVSVPSIPPNNKQKRVDLFYSSCAFDQWNQEETMG

SEQ ID NO: 24097 - protein, 293 aa, Arabidopsis thaliana
  peptide (1)..(293): Ceres Seq. ID no. 12335270
MALLESIILGLITGWLAFVIGLVIGWAWKPRWVSSSNNRQVKLQCSAPRSFDLSLPSSSPSSVVTSPLKGFGSAPCLKALVCDTWTMALRQQRQTVSPDSSSSSYDSSEQHLDLVSRVKKTKERLPNTVTELDLRHLVQLVERKDGGQAWIQMMDRFTPGMRYQAWLREPKNGPTEYRSRTVFEDATPVMLRDFFWDDEFRPTWDTMLSNSTTVEECPSTGTMIVRWIRKFPFFCSDREYVIGRRIWNCGNSYYCVTKGVSVPSIPPNNKQKRVDLFYSSCAFDQWNQEETMG

SEQ ID NO: 24098 - protein, 207 aa, Arabidopsis thaliana
  peptide (1)..(207): Ceres Seq. ID no. 12335271
MALRQQRQTVSPDSSSSSYDSSEQHLDLVSRVKKTKERLPNTVTELDLRHLVQLVERKDGGQAWIQMMDRFTPGMRYQAWLREPKNGPTEYRSRTVFEDATPVMLRDFFWDDEFRPTWDTMLSNSTTVEECPSTGTMIVRWIRKFPFFCSDREYVIGRRIWNCGNSYYCVTKGVSVPSIPPNNKQKRVDLFYSSCAFDQWNQEETMG

SEQ ID NO: 24099 - DNA, 1376 bp, Arabidopsis thaliana
  misc_feature (1)..(1376): Ceres Seq. ID no. 13490838
  misc_feature (1)..(1376): Ortholog of  Ceres SEQ ID NO 13596625 as cited in SEQ ID NO 62876
ctcttcttcttcttcttcatcttttttttttaacagatctggtggaaattttatcttttgaccccaccactggatctctctatatacacattcatctgagtaatagagtaaaaacgaaacacaagaagcaattatgaagaattgtgagagatttgctaatctcgctctcgcaggtttgacattggcaccactcgttgtgagagtaaatccaaatttgaatgttattctcacagcatgtatcactgtttatgtgggttgctttcgttcggtcaaggatactcctccaacggagacgatgtcaaaagaacatgccatgcgtttcccattggttgggagtgctatgcttctctcacttttcttattgttcaagtttctctcaaaggacttggttaatgctgtgctaacagcttacttctttgttcttgggattgtcgctctttcagcgacattgttaccagccatcagaagatttttaccaaatccttggaatgacaatcttatcgtctggcgttttccttatttcaagtctttggaggtagagttcacaaagtcccaagttgttgcgggaatccctggaacattcttctgtgcgtggtatgcgtggaaaaaacattggctggctaacaatatcctcggcctttccttctgcattcagggaattgagatgctctctctcggatcattcaagactggtgccatccttttggcaggactatttttctatgatatcttctgggttttctttactccagttatggttagtgttgccaaatccttcgatgctccaattaagctcttattccctacgggtgatgctctaagaccctattctatgcttggtcttggtgacattgtcattccgggtattttcgttgcactagctctaagatttgatgtgtcaagacgtagacaaccacaatacttcacaagtgcatttatcggatacgctgttggtgtgatcctcacgattgtagtcatgaactggtttcaagcagcacagcctgctttgttatacattgtcccagccgtaattgggttcttggcttctcactgcatttggaacggtgacatcaaaccgttgttggcgtttgatgaatcaaagacagaggaagcaacgactgatgaatcaaagactagtgaggaggttaataaagctcatgatgaatgaggaaaaatcgagaaagaagggcagaggagaaatatatacacataaatgtgtcttaatatatggaacaagaaggaaaacaattttgtttccaaatgatcatcaatcagtcccttctaaccccttttttgtttttttagattttcaaactttcttttggccaagacttgtgtaagttactataagttacaacaaattttctttgactaat

SEQ ID NO: 24100 - protein, 344 aa, Arabidopsis thaliana
  peptide (1)..(344): Ceres Seq. ID no. 13490839
MKNCERFANLALAGLTLAPLVVRVNPNLNVILTACITVYVGCFRSVKDTPPTETMSKEHAMRFPLVGSAMLLSLFLLFKFLSKDLVNAVLTAYFFVLGIVALSATLLPAIRRFLPNPWNDNLIVWRFPYFKSLEVEFTKSQVVAGIPGTFFCAWYAWKKHWLANNILGLSFCIQGIEMLSLGSFKTGAILLAGLFFYDIFWVFFTPVMVSVAKSFDAPIKLLFPTGDALRPYSMLGLGDIVIPGIFVALALRFDVSRRRQPQYFTSAFIGYAVGVILTIVVMNWFQAAQPALLYIVPAVIGFLASHCIWNGDIKPLLAFDESKTEEATTDESKTSEEVNKAHDE

SEQ ID NO: 24101 - protein, 290 aa, Arabidopsis thaliana
  peptide (1)..(290): Ceres Seq. ID no. 13490840
MSKEHAMRFPLVGSAMLLSLFLLFKFLSKDLVNAVLTAYFFVLGIVALSATLLPAIRRFLPNPWNDNLIVWRFPYFKSLEVEFTKSQVVAGIPGTFFCAWYAWKKHWLANNILGLSFCIQGIEMLSLGSFKTGAILLAGLFFYDIFWVFFTPVMVSVAKSFDAPIKLLFPTGDALRPYSMLGLGDIVIPGIFVALALRFDVSRRRQPQYFTSAFIGYAVGVILTIVVMNWFQAAQPALLYIVPAVIGFLASHCIWNGDIKPLLAFDESKTEEATTDESKTSEEVNKAHDE

SEQ ID NO: 24102 - protein, 284 aa, Arabidopsis thaliana
  peptide (1)..(284): Ceres Seq. ID no. 13490841
MRFPLVGSAMLLSLFLLFKFLSKDLVNAVLTAYFFVLGIVALSATLLPAIRRFLPNPWNDNLIVWRFPYFKSLEVEFTKSQVVAGIPGTFFCAWYAWKKHWLANNILGLSFCIQGIEMLSLGSFKTGAILLAGLFFYDIFWVFFTPVMVSVAKSFDAPIKLLFPTGDALRPYSMLGLGDIVIPGIFVALALRFDVSRRRQPQYFTSAFIGYAVGVILTIVVMNWFQAAQPALLYIVPAVIGFLASHCIWNGDIKPLLAFDESKTEEATTDESKTSEEVNKAHDE

SEQ ID NO: 24103 - DNA, 1551 bp, Arabidopsis thaliana
  misc_feature (1)..(1551): Ceres Seq. ID no. 12339154
  misc_feature (1)..(1551): Ortholog of  Ceres SEQ ID NO 13594128 as cited in SEQ ID NO 58608
  misc_feature (1)..(1551): Ortholog of  Ceres SEQ ID NO 15176122 as cited in SEQ ID NO 62462
  misc_feature (1)..(1551): Ortholog of  Ceres SEQ ID NO 12624849 as cited in SEQ ID NO 62773
ctcctctgcctctcatctcttgttctctccgcccatctctgctctcttttattttcccagaaagtttttttttttcccgaattccgttaatctcattggggtttccattgatagcaatggcgacggctttcgctcccactaagctcactgccacggttcctctgcatggatcccatgagaatcgtctcttgctcccgatccgattggctcctccttcttctttcctcggatccacccgttccctctcccttcgcagactcaatcactccaacgccacccgtcgatctcccgtcgtctctgtccaggaagttgtcaaggagaagcaatccaccaataataccagcctgttgataaccaaagaggaaggattggatttgtatgaagatatgatactaggtagatctttcgaagacatgtgtgctcaaatgtattaccgaggcaagatgtttggttttgttcacttgtacaatggccaagaggctgtttctactggctttatcaagctccttaccaagtctgactctgtcgttagtacctaccgtgaccatgtccatgccctcagcaaaggtgtctctgctcgtgctgttatgagcgagctcttcggcaaggttactggatgctgcagaggccaaggtggatccatgcacatgttctccaaagaacacaacatgcttggtggctttgcttttattggtgaaggcattcctgtcgccactggtgctgcctttagctccaagtacaggagggaagtcttgaaacaggattgtgatgatgtcactgtcgcctttttcggagatggaacttgtaacaacggacagttcttcgagtgtctcaacatggctgctctctataaactgcctattatctttgttgtcgagaataacttgtgggccattgggatgtctcacttgagagccacttctgaccccgagatttggaagaaaggtcctgcatttgggatgcctggtgttcatgttgacggtatggatgtcttgaaggtcagggaagtcgctaaagaggctgtcactagagctagaagaggagaaggtccaaccttggttgaatgtgagacttatagatttagaggacactccttggctgatcccgatgagctccgtgatgctgctgagaaagccaaatacgcggctagagacccaatcgcagcattgaagaagtatttgatagagaacaagcttgcaaaggaagcagagctaaagtcaatagagaaaaagatagacgagttggtggaggaagcggttgagtttgcagacgctagtccacagcccggtcgcagtcagttgctagagaatgtgtttgctgatccaaaaggatttggaattggacctgatggacggtacagatgtgaggaccccaagtttaccgaaggcacagctcaagtctgagaagacaagtttaaccataagctgtctactgtctcttcgatgtttctatatatcttattaagttaaatgctacagagaatcagtttgaatcatttgcactttttgctttttgtttggtgttactaaattatcacaaggttcttcttgt

SEQ ID NO: 24104 - protein, 466 aa, Arabidopsis thaliana
  peptide (1)..(466): Ceres Seq. ID no. 12339155
PLPLISCSLRPSLLSFIFPESFFFSRIPLISLGFPLIAMATAFAPTKLTATVPLHGSHENRLLLPIRLAPPSSFLGSTRSLSLRRLNHSNATRRSPVVSVQEVVKEKQSTNNTSLLITKEEGLDLYEDMILGRSFEDMCAQMYYRGKMFGFVHLYNGQEAVSTGFIKLLTKSDSVVSTYRDHVHALSKGVSARAVMSELFGKVTGCCRGQGGSMHMFSKEHNMLGGFAFIGEGIPVATGAAFSSKYRREVLKQDCDDVTVAFFGDGTCNNGQFFECLNMAALYKLPIIFVVENNLWAIGMSHLRATSDPEIWKKGPAFGMPGVHVDGMDVLKVREVAKEAVTRARRGEGPTLVECETYRFRGHSLADPDELRDAAEKAKYAARDPIAALKKYLIENKLAKEAELKSIEKKIDELVEEAVEFADASPQPGRSQLLENVFADPKGFGIGPDGRYRCEDPKFTEGTAQV

SEQ ID NO: 24105 - protein, 428 aa, Arabidopsis thaliana
  peptide (1)..(428): Ceres Seq. ID no. 12339157
MATAFAPTKLTATVPLHGSHENRLLLPIRLAPPSSFLGSTRSLSLRRLNHSNATRRSPVVSVQEVVKEKQSTNNTSLLITKEEGLDLYEDMILGRSFEDMCAQMYYRGKMFGFVHLYNGQEAVSTGFIKLLTKSDSVVSTYRDHVHALSKGVSARAVMSELFGKVTGCCRGQGGSMHMFSKEHNMLGGFAFIGEGIPVATGAAFSSKYRREVLKQDCDDVTVAFFGDGTCNNGQFFECLNMAALYKLPIIFVVENNLWAIGMSHLRATSDPEIWKKGPAFGMPGVHVDGMDVLKVREVAKEAVTRARRGEGPTLVECETYRFRGHSLADPDELRDAAEKAKYAARDPIAALKKYLIENKLAKEAELKSIEKKIDELVEEAVEFADASPQPGRSQLLENVFADPKGFGIGPDGRYRCEDPKFTEGTAQV

SEQ ID NO: 24106 - protein, 338 aa, Arabidopsis thaliana
  peptide (1)..(338): Ceres Seq. ID no. 12339158
MILGRSFEDMCAQMYYRGKMFGFVHLYNGQEAVSTGFIKLLTKSDSVVSTYRDHVHALSKGVSARAVMSELFGKVTGCCRGQGGSMHMFSKEHNMLGGFAFIGEGIPVATGAAFSSKYRREVLKQDCDDVTVAFFGDGTCNNGQFFECLNMAALYKLPIIFVVENNLWAIGMSHLRATSDPEIWKKGPAFGMPGVHVDGMDVLKVREVAKEAVTRARRGEGPTLVECETYRFRGHSLADPDELRDAAEKAKYAARDPIAALKKYLIENKLAKEAELKSIEKKIDELVEEAVEFADASPQPGRSQLLENVFADPKGFGIGPDGRYRCEDPKFTEGTAQV

SEQ ID NO: 24107 - DNA, 1275 bp, Arabidopsis thaliana
  misc_feature (1)..(1275): Ceres Seq. ID no. 12394481
  misc_feature (1)..(1275): Ortholog of  Ceres SEQ ID NO 14308095 as cited in SEQ ID NO 55286
aaagaagttcctcattcaaaaaagatttctcagccatcaaaattctctttctcttcatccaacaaaaaaaaagcatacctctttttcttccatatagataagttaattaagaaaacgaattatcaggttttgtttcggctgatctgaggaagttcatctatggatacggctcagtggccacaggagattgtagtgaagcccttggaagaaatagtaacaaacacatgcccaaagccacaaccgcaaccgcttcaaacgcagcagccaccgtcggtgggtggagagaggaaggcaagaccagaaaaggatcaagctgtaaactgtccgagatgtaactcaaccaacacaaagttttgttactacaacaattatagtttgacgcagccaagatacttctgcaaaggttgtagaaggtattggaccgaaggcggttcgcttaggaacattcctgttggcggtggctcaagaaagaacaagagatctcactctttttcttctgatattagtaacaatcactcggattctacacaaccagctacaaagaagcatctctctgatcatcaccaccacctcatgagcatgtctcaacaaggtttgaccggtcaaaaccctaaattccttgagacgacccaacaagatctcaatttaggtttttcaccacatgggatgattaggaccaacttcactgacctcatccacaacattggcaacaacaccaacaagagcaacaacaataacaatccattgattgtttcttcatgttctaccatggctacttcttctctggatctcataagaaacaatagtaacaatgggaattcttcaaattcttccttcatgggatttccagttcataatgaagatccagcatcaggagggttttcaatgcaagatcattacaagccttgcaacacaaacaccacactgctagggttttcattagatcatcatcataataatggatttcatggagggtttcaaggaggagaagaaggtggagaaggtggtgatgatgtgaatggaaggcacttgtttccttttgaggatttgaaattgccagtttcttcttcatcagcaacaattaatgtcgacattaatgaacatcagaagcgaggaagcggtagtgatgcagctgctacgtctggtgggtattggactgggatgttgagtggaggatcatggtgctaattaatttctcggtttggttgatgaagatagtactattagtggttaattattgctatttatttaattaatcaatatgttcttaatttc

SEQ ID NO: 24108 - protein, 342 aa, Arabidopsis thaliana
  peptide (1)..(342): Ceres Seq. ID no. 12394482
MDTAQWPQEIVVKPLEEIVTNTCPKPQPQPLQTQQPPSVGGERKARPEKDQAVNCPRCNSTNTKFCYYNNYSLTQPRYFCKGCRRYWTEGGSLRNIPVGGGSRKNKRSHSFSSDISNNHSDSTQPATKKHLSDHHHHLMSMSQQGLTGQNPKFLETTQQDLNLGFSPHGMIRTNFTDLIHNIGNNTNKSNNNNNPLIVSSCSTMATSSLDLIRNNSNNGNSSNSSFMGFPVHNEDPASGGFSMQDHYKPCNTNTTLLGFSLDHHHNNGFHGGFQGGEEGGEGGDDVNGRHLFPFEDLKLPVSSSSATINVDINEHQKRGSGSDAAATSGGYWTGMLSGGSWC

SEQ ID NO: 24109 - protein, 204 aa, Arabidopsis thaliana
  peptide (1)..(204): Ceres Seq. ID no. 12394483
MSMSQQGLTGQNPKFLETTQQDLNLGFSPHGMIRTNFTDLIHNIGNNTNKSNNNNNPLIVSSCSTMATSSLDLIRNNSNNGNSSNSSFMGFPVHNEDPASGGFSMQDHYKPCNTNTTLLGFSLDHHHNNGFHGGFQGGEEGGEGGDDVNGRHLFPFEDLKLPVSSSSATINVDINEHQKRGSGSDAAATSGGYWTGMLSGGSWC

SEQ ID NO: 24110 - protein, 202 aa, Arabidopsis thaliana
  peptide (1)..(202): Ceres Seq. ID no. 12394484
MSQQGLTGQNPKFLETTQQDLNLGFSPHGMIRTNFTDLIHNIGNNTNKSNNNNNPLIVSSCSTMATSSLDLIRNNSNNGNSSNSSFMGFPVHNEDPASGGFSMQDHYKPCNTNTTLLGFSLDHHHNNGFHGGFQGGEEGGEGGDDVNGRHLFPFEDLKLPVSSSSATINVDINEHQKRGSGSDAAATSGGYWTGMLSGGSWC

SEQ ID NO: 24111 - DNA, 1201 bp, Arabidopsis thaliana
  misc_feature (1)..(1201): Ceres Seq. ID no. 12371528
  misc_feature (1)..(1201): Ortholog of  Ceres SEQ ID NO 14304170 as cited in SEQ ID NO 53453
  misc_feature (1)..(1201): Ortholog of  Ceres SEQ ID NO 14315911 as cited in SEQ ID NO 56998
  misc_feature (1)..(1201): Ortholog of  Ceres SEQ ID NO 13656028 as cited in SEQ ID NO 64728
aaaaacaaattagaagaagaaaaatcgatggcggggatactagtgaacaatatcctccctcaacctccgattctccgatcgctttcttcttcttcgcgaagaagttcaattcgaaccctagttatggtcaaagcttcttcctctgaaccttccgagtctgtttcagtctccacgaagaccagtgacgacactggagctgttgttgtgttcactgctcctcctggtttcaagccaccggagccaaaacggttcgccgtcaaatccggaaaactcttcgatgtcttgggtgcagcaattggattgtttttccgattcggcactggtgttttcgtttctgggtactctgcatcttttgtgtctaaggaagagattccagctgatcagtatgcgttgcgtttaggcgggatcacggtaaaggaaactgctaaggtcgggcctcgtcctgagaaacccattgagatatatgagtttgaaggctgtcccttctgccggaaggtcagggaaatggttgcagtgttggatcttgatattctctactatccttgtccaagagggagtccaaatttccgcccgaaggttaaacagatgggcgggaaacaacagtttccgtacatggttgatcccaataccggagtgtccatgtatgaatcagatggaatcatcaaatatctatccgagaaatatggagatggaacagttcctttaagtctgtcacttggtgctttaacggctataacagcaggctttgcaatgattggtcgtatgggaaagggtaacttgtacacaccagcgaaactaccacctaagccactcgaattctgggcatatgagggttctccgttttgtaagcttgtacgcgaagttcttgtagaactggagttaccacacattcagcgcagttgtgctcgtggtagccccaaacggcaggtattgcttgagaaagctggtcactttcaggtgccttacctggaagatccaaacactggagtcgcgatgtttgagagtgcagaaattgttgagtatctcaagcaaacttatgctgcctaagtgttcgtcttcctcactttataccgtatagatatatgttaattgttgtgtgtatgttcagcctactttctgttccaacaataaactgaacgcagttatctgtagaggttttaaatgaagacatgtacttatatataagtaaaggaattgtgac

SEQ ID NO: 24112 - protein, 348 aa, Arabidopsis thaliana
  peptide (1)..(348): Ceres Seq. ID no. 12371529
KNKLEEEKSMAGILVNNILPQPPILRSLSSSSRRSSIRTLVMVKASSSEPSESVSVSTKTSDDTGAVVVFTAPPGFKPPEPKRFAVKSGKLFDVLGAAIGLFFRFGTGVFVSGYSASFVSKEEIPADQYALRLGGITVKETAKVGPRPEKPIEIYEFEGCPFCRKVREMVAVLDLDILYYPCPRGSPNFRPKVKQMGGKQQFPYMVDPNTGVSMYESDGIIKYLSEKYGDGTVPLSLSLGALTAITAGFAMIGRMGKGNLYTPAKLPPKPLEFWAYEGSPFCKLVREVLVELELPHIQRSCARGSPKRQVLLEKAGHFQVPYLEDPNTGVAMFESAEIVEYLKQTYAA

SEQ ID NO: 24113 - protein, 339 aa, Arabidopsis thaliana
  peptide (1)..(339): Ceres Seq. ID no. 12371530
MAGILVNNILPQPPILRSLSSSSRRSSIRTLVMVKASSSEPSESVSVSTKTSDDTGAVVVFTAPPGFKPPEPKRFAVKSGKLFDVLGAAIGLFFRFGTGVFVSGYSASFVSKEEIPADQYALRLGGITVKETAKVGPRPEKPIEIYEFEGCPFCRKVREMVAVLDLDILYYPCPRGSPNFRPKVKQMGGKQQFPYMVDPNTGVSMYESDGIIKYLSEKYGDGTVPLSLSLGALTAITAGFAMIGRMGKGNLYTPAKLPPKPLEFWAYEGSPFCKLVREVLVELELPHIQRSCARGSPKRQVLLEKAGHFQVPYLEDPNTGVAMFESAEIVEYLKQTYAA

SEQ ID NO: 24114 - protein, 307 aa, Arabidopsis thaliana
  peptide (1)..(307): Ceres Seq. ID no. 12371531
MVKASSSEPSESVSVSTKTSDDTGAVVVFTAPPGFKPPEPKRFAVKSGKLFDVLGAAIGLFFRFGTGVFVSGYSASFVSKEEIPADQYALRLGGITVKETAKVGPRPEKPIEIYEFEGCPFCRKVREMVAVLDLDILYYPCPRGSPNFRPKVKQMGGKQQFPYMVDPNTGVSMYESDGIIKYLSEKYGDGTVPLSLSLGALTAITAGFAMIGRMGKGNLYTPAKLPPKPLEFWAYEGSPFCKLVREVLVELELPHIQRSCARGSPKRQVLLEKAGHFQVPYLEDPNTGVAMFESAEIVEYLKQTYAA

SEQ ID NO: 24115 - DNA, 1467 bp, Arabidopsis thaliana
  misc_feature (1)..(1467): Ceres Seq. ID no. 13492141
  misc_feature (1)..(1467): Ortholog of  Ceres SEQ ID NO 14312324 as cited in SEQ ID NO 60453
  misc_feature (1)..(1467): Ortholog of  Ceres SEQ ID NO 12624791 as cited in SEQ ID NO 63574
  misc_feature (1)..(1467): Ortholog of  Ceres SEQ ID NO 12780574 as cited in SEQ ID NO 65624
gataagccacatttcttctctctttctctcctacacaacacagctttttaaacccaacagagcaaaaaagcaaaagattcaacaaaaatctcctcaaattctattcatggtctctagaaattctgacggatatttcttggatccgaccggtatgactgttcctggtctcggaccttcctttacagccgccgtttcttcttcttcttcaccaacgacttcttctacggccgtggctgtggcggatgtgacggcgatggtttcttcttcggaggaggatttgagtaagaagattaggaagccttatactattactaagtctagagagagctggacggagcctgagcatgataaattccttgaagctcttcaattgtttgatagagactggaagaagattgaagcttttattggttcaaagacagtgattcagatacgaagtcatgctcagaagtattttcttaaggtacaaaagagtgggaccggtgaacatctccctcctcctcgacctaaaaggaaagccgctcatccatatcctcagaaggctcacaagaatgtgcaactgcaagtaccagggtcattcaagtcaacatctgaaccaaatgacccaagttttatgtttaggcctgagtcttcttcaatgctgatgacttcgccaaccactgctgctgcggctccatggacaaataatgcgcaaacaattagcttcactcccctcccaaaagcaggagcaggagctaataacaattgttctagtagttctgaaaatactccaagaccacgatccaacagggacgcaagagaccatggaaatgttggccattcattaagagttttaccggactttgcccaagtatacggcttcattggaagtgtgtttgacccatatgcaagtaatcatctacaaaagctgaagaagatggaccccatagatgttgaaacagtgttactattgatgagaaatctatccatcaacttgtctagtcctgactttgaggatcatagacggcttctttcgtcttatgatatcggatctgagacagcaactgatcatggtggagtgaataaaaccttaaacaaagacccacctgaaatctctacttaatgtttaatagaagaggagaactgtgaaaagtgtctcaggtgagccagccaacaaccagatggctacaaaatacagagattctgttgtggttttttgtttgtacataggaagaagatgaagctgatgttactcggtttagttgttgttactgttataaatagtctgttgggttaaggatggtatatgtacagtgtattatcataagttagatctcaagtttaaacatatgtatcagtctctttgatgggagaccaaaatctcttaatagagttgtctttgctttcgttttcattcgtttatagaggaagaaataaggtgactgtgaccatttgtataacaatatggataaactatttttagtggcc

SEQ ID NO: 24116 - protein, 366 aa, Arabidopsis thaliana
  peptide (1)..(366): Ceres Seq. ID no. 13492142
ISHISSLFLSYTTQLFKPNRAKKQKIQQKSPQILFMVSRNSDGYFLDPTGMTVPGLGPSFTAAVSSSSSPTTSSTAVAVADVTAMVSSSEEDLSKKIRKPYTITKSRESWTEPEHDKFLEALQLFDRDWKKIEAFIGSKTVIQIRSHAQKYFLKVQKSGTGEHLPPPRPKRKAAHPYPQKAHKNVQLQVPGSFKSTSEPNDPSFMFRPESSSMLMTSPTTAAAAPWTNNAQTISFTPLPKAGAGANNNCSSSSENTPRPRSNRDARDHGNVGHSLRVLPDFAQVYGFIGSVFDPYASNHLQKLKKMDPIDVETVLLLMRNLSINLSSPDFEDHRRLLSSYDIGSETATDHGGVNKTLNKDPPEIST

SEQ ID NO: 24117 - protein, 331 aa, Arabidopsis thaliana
  peptide (1)..(331): Ceres Seq. ID no. 13492143
MVSRNSDGYFLDPTGMTVPGLGPSFTAAVSSSSSPTTSSTAVAVADVTAMVSSSEEDLSKKIRKPYTITKSRESWTEPEHDKFLEALQLFDRDWKKIEAFIGSKTVIQIRSHAQKYFLKVQKSGTGEHLPPPRPKRKAAHPYPQKAHKNVQLQVPGSFKSTSEPNDPSFMFRPESSSMLMTSPTTAAAAPWTNNAQTISFTPLPKAGAGANNNCSSSSENTPRPRSNRDARDHGNVGHSLRVLPDFAQVYGFIGSVFDPYASNHLQKLKKMDPIDVETVLLLMRNLSINLSSPDFEDHRRLLSSYDIGSETATDHGGVNKTLNKDPPEIST

SEQ ID NO: 24118 - protein, 316 aa, Arabidopsis thaliana
  peptide (1)..(316): Ceres Seq. ID no. 13492144
MTVPGLGPSFTAAVSSSSSPTTSSTAVAVADVTAMVSSSEEDLSKKIRKPYTITKSRESWTEPEHDKFLEALQLFDRDWKKIEAFIGSKTVIQIRSHAQKYFLKVQKSGTGEHLPPPRPKRKAAHPYPQKAHKNVQLQVPGSFKSTSEPNDPSFMFRPESSSMLMTSPTTAAAAPWTNNAQTISFTPLPKAGAGANNNCSSSSENTPRPRSNRDARDHGNVGHSLRVLPDFAQVYGFIGSVFDPYASNHLQKLKKMDPIDVETVLLLMRNLSINLSSPDFEDHRRLLSSYDIGSETATDHGGVNKTLNKDPPEIST

SEQ ID NO: 24119 - DNA, 1712 bp, Arabidopsis thaliana
  misc_feature (1)..(1712): Ceres Seq. ID no. 12337203
  misc_feature (1)..(1712): Ortholog of  Ceres SEQ ID NO 15174513 as cited in SEQ ID NO 58979
  misc_feature (1)..(1712): Ortholog of  Ceres SEQ ID NO 13584616 as cited in SEQ ID NO 65234
  misc_feature (1)..(1712): Ortholog of  Ceres SEQ ID NO 15178939 as cited in SEQ ID NO 0
atcttctacggacagcttctttctctttcctctctgatttttcttttctctttctacctttttcttttttttattttctttcttttttttgttagtttttttttttctttcttcatctcgttaacgatatagtacctgaaccctagcgaaaatcaaaaattgtctaggagaaacaaacagagatatctttctttctttttatcagtggggaaaaaaaatgcagaatccgagactgaagcaacatcagcagcaacaacaacaacaagctatgatgcagcaacaagctctgatgcagcaacactctctttaccatcctggtgttttggctcctcctcagttagagcctgttccaagtggaaaccttcctcctggttttgatcccagtacttgccgtagcgtgtatgttggaaacatccatacacaggtcacagagcctttgcttcaagagatttttacaagcactggccctgttgaaagcagtaaactcatcagaaaggataagtcatcatatggatttgttcactactttgatcgaagatccgctgctctggctatactgtctctgaacggaaggcatctgtttggacagcctatcaaagtcaattgggcgtatgccactggtcagagggaagatacatcaagtcatttcaacatttttgttggagatctcagtccagaggtcactgatgcaacattatatcaaagcttttctgtcttttccagttgttcggatgcgagagttatgtgggaccaaaaaactgggcgctcgagaggctttgggtttgtttccttccgcaatcaacaggatgctcaaactgccattaatgagatgaatggtaagtggttaagtagcagacaaatcagatgcaactgggccacgaagggcgctacttctggtgatgataagctcagttctgatggaaaaagtgttgtggaacttacaactggctcatcagaggatggtaaagagacattaaatgaggaaacacctgaaaataattctcagtttaccactgtttatgtgggaaaccttgctccagaggtaactcagcttgatctacaccgttacttccatgctcttggcgctggagttattgaggaggtccgtgtccaacgagacaaaggctttggtttcgtgagatataacactcatcccgaagctgctcttgctattcagatgggtaacactcagccttacctctttaacagacagataaagtgctcatggggaaacaagccaactccaccaggtacagcctcaaacccacttcccccacctgccccagctccagttcctggtctatctgcagctgatctcctaaactatgagaggcaattggcacttagcaagatggcaagtgtgaatgcgttaatgcatcaacagggtcaacaccctctaaggcaggctcatggaataaatgccgctggagcaactgcagccatgtatgatggtggctttcagaatgtagccgccgcacagcaactcatgtactatcagtaataaacctcagttcgtggcgccgatctcaagtttcaatctctttgctttttctcttttttttttgtttgtctagaacttgtttgtgtgtgtctgtttgtctctcacttaagttatctatataaagttttatctgcagttgtatgattagttatgtattcccatggattgtaagacaagcgaattacattcaataaaagggatttggatatcg

SEQ ID NO: 24120 - protein, 427 aa, Arabidopsis thaliana
  peptide (1)..(427): Ceres Seq. ID no. 12337204
MQNPRLKQHQQQQQQQAMMQQQALMQQHSLYHPGVLAPPQLEPVPSGNLPPGFDPSTCRSVYVGNIHTQVTEPLLQEIFTSTGPVESSKLIRKDKSSYGFVHYFDRRSAALAILSLNGRHLFGQPIKVNWAYATGQREDTSSHFNIFVGDLSPEVTDATLYQSFSVFSSCSDARVMWDQKTGRSRGFGFVSFRNQQDAQTAINEMNGKWLSSRQIRCNWATKGATSGDDKLSSDGKSVVELTTGSSEDGKETLNEETPENNSQFTTVYVGNLAPEVTQLDLHRYFHALGAGVIEEVRVQRDKGFGFVRYNTHPEAALAIQMGNTQPYLFNRQIKCSWGNKPTPPGTASNPLPPPAPAPVPGLSAADLLNYERQLALSKMASVNALMHQQGQHPLRQAHGINAAGATAAMYDGGFQNVAAAQQLMYYQ

SEQ ID NO: 24121 - protein, 410 aa, Arabidopsis thaliana
  peptide (1)..(410): Ceres Seq. ID no. 12337205
MMQQQALMQQHSLYHPGVLAPPQLEPVPSGNLPPGFDPSTCRSVYVGNIHTQVTEPLLQEIFTSTGPVESSKLIRKDKSSYGFVHYFDRRSAALAILSLNGRHLFGQPIKVNWAYATGQREDTSSHFNIFVGDLSPEVTDATLYQSFSVFSSCSDARVMWDQKTGRSRGFGFVSFRNQQDAQTAINEMNGKWLSSRQIRCNWATKGATSGDDKLSSDGKSVVELTTGSSEDGKETLNEETPENNSQFTTVYVGNLAPEVTQLDLHRYFHALGAGVIEEVRVQRDKGFGFVRYNTHPEAALAIQMGNTQPYLFNRQIKCSWGNKPTPPGTASNPLPPPAPAPVPGLSAADLLNYERQLALSKMASVNALMHQQGQHPLRQAHGINAAGATAAMYDGGFQNVAAAQQLMYYQ

SEQ ID NO: 24122 - protein, 409 aa, Arabidopsis thaliana
  peptide (1)..(409): Ceres Seq. ID no. 12337206
MQQQALMQQHSLYHPGVLAPPQLEPVPSGNLPPGFDPSTCRSVYVGNIHTQVTEPLLQEIFTSTGPVESSKLIRKDKSSYGFVHYFDRRSAALAILSLNGRHLFGQPIKVNWAYATGQREDTSSHFNIFVGDLSPEVTDATLYQSFSVFSSCSDARVMWDQKTGRSRGFGFVSFRNQQDAQTAINEMNGKWLSSRQIRCNWATKGATSGDDKLSSDGKSVVELTTGSSEDGKETLNEETPENNSQFTTVYVGNLAPEVTQLDLHRYFHALGAGVIEEVRVQRDKGFGFVRYNTHPEAALAIQMGNTQPYLFNRQIKCSWGNKPTPPGTASNPLPPPAPAPVPGLSAADLLNYERQLALSKMASVNALMHQQGQHPLRQAHGINAAGATAAMYDGGFQNVAAAQQLMYYQ

SEQ ID NO: 24123 - DNA, 1247 bp, Arabidopsis thaliana
  misc_feature (1)..(1247): Ceres Seq. ID no. 12335798
  misc_feature (1)..(1247): Ortholog of  Ceres SEQ ID NO 15179926 as cited in SEQ ID NO 57010
  misc_feature (1)..(1247): Ortholog of  Ceres SEQ ID NO 14316075 as cited in SEQ ID NO 60059
ttgaaactcttgactggttctaaacacagctcattatatgtctatttagtattttacacattggtttcagacggctcttaaaggtctctctagcttcatgtcaaccatctaaaccaaccaccattaatgttcctctgcccattttcaagaaattagaaatcatttttctctaagttcttgatcgtcgccatgaacgatcttatctcaagctcattcaagagatacacagacttaaaccaccaggtccaactcgatgacatcgagtctcaaaatgtttctcttgattcaggcaacctcgatgagttctttggatatgtcgagagtgttaaagaagacatgaaagctgtcgacgagattcataagcgtctccaagatgctaatgaagagtccaagaccgtacatgattccaaggccgtgaagaagcttcgtgctcgtatggattcgagtgttacagaggtcttgaaacgtgtcaagatgataaagactaagcttgtagctttggagaaatcaaatgctgcgcagaggaaagtcgctggttgtggtcctggctcgtctgctgatcggaccagaacatcggtcgttagtggattggggaagaagcttaaagacatgatggatgattttcagagactacgaaccaaaatggctactgaatacaaagaaacggtcgagagaaggtacttcactgtaacggggcaaaaagcggacgaagagacggtcgagaagctcatatcgagcggagagagcgaacgttttctccaaaaagcaatacaagagcaaggtcgcggacaggtcatggacacattatcagagattcaagaacgacacgacacggtcaaggagatagaacggagtctgttagagctgcaccaagtgttcctcgacatggctgctcttgtcgaagctcaagggaatatgctcaatgacattgaatcaaatgtctcaaaggcgagctctttcgtcatgagagggactgatcaattgcatggggctaaagtacttcagaggaacaacaggaaatgggcttgtatcgccactatcctcgctattgtagttgttattgtgattcttttcccaatcctctttaacactctacttcgaccttgatttcaaaatgtaacttattgttttctccaaactccttttgttagagccctttcgatttcttgtattgaatccagagctgaagcgagagtttaatttgaagctctctctaaccattcttgctactgtgattgctttatatc

SEQ ID NO: 24124 - protein, 305 aa, Arabidopsis thaliana
  peptide (1)..(305): Ceres Seq. ID no. 12335799
MNDLISSSFKRYTDLNHQVQLDDIESQNVSLDSGNLDEFFGYVESVKEDMKAVDEIHKRLQDANEESKTVHDSKAVKKLRARMDSSVTEVLKRVKMIKTKLVALEKSNAAQRKVAGCGPGSSADRTRTSVVSGLGKKLKDMMDDFQRLRTKMATEYKETVERRYFTVTGQKADEETVEKLISSGESERFLQKAIQEQGRGQVMDTLSEIQERHDTVKEIERSLLELHQVFLDMAALVEAQGNMLNDIESNVSKASSFVMRGTDQLHGAKVLQRNNRKWACIATILAIVVVIVILFPILFNTLLRP

SEQ ID NO: 24125 - protein, 256 aa, Arabidopsis thaliana
  peptide (1)..(256): Ceres Seq. ID no. 12335800
MKAVDEIHKRLQDANEESKTVHDSKAVKKLRARMDSSVTEVLKRVKMIKTKLVALEKSNAAQRKVAGCGPGSSADRTRTSVVSGLGKKLKDMMDDFQRLRTKMATEYKETVERRYFTVTGQKADEETVEKLISSGESERFLQKAIQEQGRGQVMDTLSEIQERHDTVKEIERSLLELHQVFLDMAALVEAQGNMLNDIESNVSKASSFVMRGTDQLHGAKVLQRNNRKWACIATILAIVVVIVILFPILFNTLLRP

SEQ ID NO: 24126 - protein, 223 aa, Arabidopsis thaliana
  peptide (1)..(223): Ceres Seq. ID no. 12335801
MDSSVTEVLKRVKMIKTKLVALEKSNAAQRKVAGCGPGSSADRTRTSVVSGLGKKLKDMMDDFQRLRTKMATEYKETVERRYFTVTGQKADEETVEKLISSGESERFLQKAIQEQGRGQVMDTLSEIQERHDTVKEIERSLLELHQVFLDMAALVEAQGNMLNDIESNVSKASSFVMRGTDQLHGAKVLQRNNRKWACIATILAIVVVIVILFPILFNTLLRP

SEQ ID NO: 24127 - DNA, 946 bp, Arabidopsis thaliana
  misc_feature (1)..(946): Ceres Seq. ID no. 13499698
  misc_feature (1)..(946): Ortholog of  Ceres SEQ ID NO 15176514 as cited in SEQ ID NO 1114
  misc_feature (1)..(946): Ortholog of  Ceres SEQ ID NO 15173688 as cited in SEQ ID NO 61918
  misc_feature (1)..(946): Ortholog of  Ceres SEQ ID NO 12778345 as cited in SEQ ID NO 62792
  misc_feature (1)..(946): Ortholog of  Ceres SEQ ID NO 13662513 as cited in SEQ ID NO 63303
  misc_feature (1)..(946): Ortholog of  Ceres SEQ ID NO 12616929 as cited in SEQ ID NO 63962
  misc_feature (1)..(946): Ortholog of  Ceres SEQ ID NO 15225803 as cited in SEQ ID NO 67623
  misc_feature (1)..(946): Ortholog of  Ceres SEQ ID NO 15174088 as cited in SEQ ID NO 0
gaagaagaacagaagccgaaaccctcaccggcgatggctcttatcagcacacggcgaacattatcgacactcctaaacaaaaccctctcttcctctacttcatattcttcttcatttcctacgctctcttctcgttctcgattcgccatgcctctaattgaaaaggtttcctcttcccgaaccagcctgggcccgtgttacatctcgacccgacccaagacatccgggtccggatactcgccgctgaatgatccttcgccgaattggagcaaccgtccgccgaaggagacgattcttcttgatgggtgcgattatgagcactggctcatcgtcatggagttcactgatcctaaacctactgaagaagagatgatcaattcttatgtcaaaaccttaacttccgtccttggctgtgaggaagaggccaagaagaagatttactctgtttgtacttcgacctacactggctttggtgctttgatctctgaagagctctcttgcaaagtcaaagcattgcctggtgttctctgggtgctgccggattcctatctcgatgtaccaaacaaagactacggaggtgacttgtacgttgaaggaaaggtcatacccagaccacagtacaggttcacggaacagcgtcatactagaccccgtcctaggccaaggtatgataggcgccgtgagacaatgcaggttgagaggagagagccatccatgggtcttcattctccagtaaatccgggagagttcaacaagcccagtgcttaatattaaacatgaacaatgcattatgtaatggatggagtttattaggattatggtatttacatgcttgtcttaaacactcatgtgagagacttttcagtttttatccacttaatcaaacaaatcaatcatcattcatgtctctaatgatgactaaacactactctaaacagaacaaatt

SEQ ID NO: 24128 - protein, 255 aa, Arabidopsis thaliana
  peptide (1)..(255): Ceres Seq. ID no. 13499699
EEEQKPKPSPAMALISTRRTLSTLLNKTLSSSTSYSSSFPTLSSRSRFAMPLIEKVSSSRTSLGPCYISTRPKTSGSGYSPLNDPSPNWSNRPPKETILLDGCDYEHWLIVMEFTDPKPTEEEMINSYVKTLTSVLGCEEEAKKKIYSVCTSTYTGFGALISEELSCKVKALPGVLWVLPDSYLDVPNKDYGGDLYVEGKVIPRPQYRFTEQRHTRPRPRPRYDRRRETMQVERREPSMGLHSPVNPGEFNKPSA

SEQ ID NO: 24129 - protein, 244 aa, Arabidopsis thaliana
  peptide (1)..(244): Ceres Seq. ID no. 13499700
MALISTRRTLSTLLNKTLSSSTSYSSSFPTLSSRSRFAMPLIEKVSSSRTSLGPCYISTRPKTSGSGYSPLNDPSPNWSNRPPKETILLDGCDYEHWLIVMEFTDPKPTEEEMINSYVKTLTSVLGCEEEAKKKIYSVCTSTYTGFGALISEELSCKVKALPGVLWVLPDSYLDVPNKDYGGDLYVEGKVIPRPQYRFTEQRHTRPRPRPRYDRRRETMQVERREPSMGLHSPVNPGEFNKPSA

SEQ ID NO: 24130 - protein, 206 aa, Arabidopsis thaliana
  peptide (1)..(206): Ceres Seq. ID no. 13499701
MPLIEKVSSSRTSLGPCYISTRPKTSGSGYSPLNDPSPNWSNRPPKETILLDGCDYEHWLIVMEFTDPKPTEEEMINSYVKTLTSVLGCEEEAKKKIYSVCTSTYTGFGALISEELSCKVKALPGVLWVLPDSYLDVPNKDYGGDLYVEGKVIPRPQYRFTEQRHTRPRPRPRYDRRRETMQVERREPSMGLHSPVNPGEFNKPSA

SEQ ID NO: 24131 - DNA, 1342 bp, Arabidopsis thaliana
  misc_feature (1)..(1342): Ceres Seq. ID no. 12466367
  misc_feature (1)..(1342): Ortholog of  Ceres SEQ ID NO 12617887 as cited in SEQ ID NO 65526
acacttagctttctgttattcaattcttcacaaagtttctaaaagcttttctcttgttattcaacaacttggcaccgagcttcgtaacgccgtgtgtgtgttctacttgattctccgagctcttgatactgttgaggatgacacaagcgtaccagtggacatcaaagttccaattctgatagctttccaccgtcatatatacgatggtgactggcatttttcatgtggtacaaaagagtataaacttctaatggaccaatttcaccatgtttctgcagcttttctgaaacttgaaaaagggtatcaagaggctattgaagatataactaaaagaatgggtgcaggaatggccaagttcatttgcaaggaggtagaaacaattgatgactatgatgaatactgccattatgctgcaggacttgttggtttaggtttgtcaaaaatcttcattgcttcggaattagaaatactgactccagattggaagcagatttcaaattctacaggtttatttctgcagaaaacaaacattatcaaagattatcttgaagacattaatgagagaccaaagtcgcgcatgttttggcctcgtgagatttggggaaaatatgttgacaaacttgaggacttcaaaaatgaggagaaagctacaaaagcagtgcagtgtttgaatgaaatggtcactaatgcattgaatcatgttgaagattgtttgaaatccttggcttcactgcgtgatcctgcaatatttcagtcttgcgccatccctcagatcgtggcgattggaacacttacattatgctataacaatgtacaagtgtttagaggcgtcgtgagaatgagacgaggtctaatagctaaagtcattgatcgcacaaagacaatggatgatgtctatggtgcgttctatgatttttcttgcatgctacaaacaaaggttgacaataacgatccaaatgctatgaaaacattaaatcgactcgaaaccatcaagaaagtttgcagagaaaatggagtacttcacaaaagaaaatcttatgttaacgatgaaacacaatccaaggctatctttgttgtaatgtttgtgcttctactggctatagtcgttgtatatctcaaagcaaaccaacgtaagtgactctgattgtgaagtcatcatgaacataatttctagcttttttgaaatgtttgatcaaatcttgaattgattgtctattcaagattgtctacgacttcaaccgtcaaaatgttctgttctttctctcttccttttcagttgttctgttttatcatttttatgaagttataaattcaaccatcatgctcataatgttggttttcc

SEQ ID NO: 24132 - protein, 378 aa, Arabidopsis thaliana
  peptide (1)..(378): Ceres Seq. ID no. 12466368
HLAFCYSILHKVSKSFSLVIQQLGTELRNAVCVFYLILRALDTVEDDTSVPVDIKVPILIAFHRHIYDGDWHFSCGTKEYKLLMDQFHHVSAAFLKLEKGYQEAIEDITKRMGAGMAKFICKEVETIDDYDEYCHYAAGLVGLGLSKIFIASELEILTPDWKQISNSTGLFLQKTNIIKDYLEDINERPKSRMFWPREIWGKYVDKLEDFKNEEKATKAVQCLNEMVTNALNHVEDCLKSLASLRDPAIFQSCAIPQIVAIGTLTLCYNNVQVFRGVVRMRRGLIAKVIDRTKTMDDVYGAFYDFSCMLQTKVDNNDPNAMKTLNRLETIKKVCRENGVLHKRKSYVNDETQSKAIFVVMFVLLLAIVVVYLKANQRK

SEQ ID NO: 24133 - protein, 295 aa, Arabidopsis thaliana
  peptide (1)..(295): Ceres Seq. ID no. 12466369
MDQFHHVSAAFLKLEKGYQEAIEDITKRMGAGMAKFICKEVETIDDYDEYCHYAAGLVGLGLSKIFIASELEILTPDWKQISNSTGLFLQKTNIIKDYLEDINERPKSRMFWPREIWGKYVDKLEDFKNEEKATKAVQCLNEMVTNALNHVEDCLKSLASLRDPAIFQSCAIPQIVAIGTLTLCYNNVQVFRGVVRMRRGLIAKVIDRTKTMDDVYGAFYDFSCMLQTKVDNNDPNAMKTLNRLETIKKVCRENGVLHKRKSYVNDETQSKAIFVVMFVLLLAIVVVYLKANQRK

SEQ ID NO: 24134 - protein, 267 aa, Arabidopsis thaliana
  peptide (1)..(267): Ceres Seq. ID no. 12466370
MGAGMAKFICKEVETIDDYDEYCHYAAGLVGLGLSKIFIASELEILTPDWKQISNSTGLFLQKTNIIKDYLEDINERPKSRMFWPREIWGKYVDKLEDFKNEEKATKAVQCLNEMVTNALNHVEDCLKSLASLRDPAIFQSCAIPQIVAIGTLTLCYNNVQVFRGVVRMRRGLIAKVIDRTKTMDDVYGAFYDFSCMLQTKVDNNDPNAMKTLNRLETIKKVCRENGVLHKRKSYVNDETQSKAIFVVMFVLLLAIVVVYLKANQRK

SEQ ID NO: 24135 - DNA, 1341 bp, Arabidopsis thaliana
  misc_feature (1)..(1341): Ceres Seq. ID no. 13497127
  misc_feature (1)..(1341): Ortholog of  Ceres SEQ ID NO 14311505 as cited in SEQ ID NO 51412
  misc_feature (1)..(1341): Ortholog of  Ceres SEQ ID NO 13597462 as cited in SEQ ID NO 65069
gttagcggggtcggttacgaagaaaggaagctcttttacattctcgtggcaacgatctcatctacgtgtcacgaaaactcaaatctcttactccggcgaacgatgtaccgaacggcggcgaagcgtcttctcgccggtggtggaatcactaccacccgtctcctccgattaccgaagctcaggtctacaatcatcccttcctcttacacttccggtctctgcacttcgtcgattggtggtaatactgaatcaccaatgggtaagcagtctgtgaaccctaatcaatcgggtccaacggcgtcgtcttctacgggtacaggggaaggacaacgccgacatgagagcagaaagccgagagctgagttccaagaagagcaggctcgtgttctctctgcgtctctccgtcacgtgccgaggttaggttggacggaagaagcgatgatggctggttcaagggatgttggtgtgtctccttcgattgttgggtctttctccaggaaagaagctgctcttgttgagttcttcatggatgaatgccttcaattgcttatggatagaatagactctggattggatttgcaaaatctgattccaagtgaacgtatctccaagctcattagaattcgtctagaatgcaagtcccttacatgtcaaaatggccccaagctcttagcattcaggcgcatcctctgaatgtcccaacgagttttaagcaacgggcaatgttagttgatgagatatggcatgctgttggagatggagcctcggatttagattggtatgtcaagcgtactattcttggaggcgtttactcaactaccgagatttacatgctcaccgatgactccttagaacatcgcgatacatgggcattcttggatgacagagtcaaagatgcttttgatcttaagaagagcatacaagaggccaagtattttgcagaagacataggagctggagttgggaagtcggttcaaggactgatgaatggagttatgcagacaatgtccagaagaagtggtggctctgcgttttgaaaagatcacacctttacacatgattctgcttcacactccttacggattctccaatattttgagttgggatttactataataatgagattagacttatatgagttgaagtgaaggcatatgaactaatatattatcttctacgtttgaataaaccattgagtttgaaatctttaatttgtaaataaggatgaaacctgttctgtgtttggttgttctgtgcgtaaacagagttggaaacttgtaattttggtctacttcaatttggtagggtgtttattgttcgaaaacaaacatatgggcactt

SEQ ID NO: 24136 - protein, 230 aa, Arabidopsis thaliana
  peptide (1)..(230): Ceres Seq. ID no. 13497128
VSGVGYEERKLFYILVATISSTCHENSNLLLRRTMYRTAAKRLLAGGGITTTRLLRLPKLRSTIIPSSYTSGLCTSSIGGNTESPMGKQSVNPNQSGPTASSSTGTGEGQRRHESRKPRAEFQEEQARVLSASLRHVPRLGWTEEAMMAGSRDVGVSPSIVGSFSRKEAALVEFFMDECLQLLMDRIDSGLDLQNLIPSERISKLIRIRLECKSLTCQNGPKLLAFRRIL

SEQ ID NO: 24137 - protein, 196 aa, Arabidopsis thaliana
  peptide (1)..(196): Ceres Seq. ID no. 13497129
MYRTAAKRLLAGGGITTTRLLRLPKLRSTIIPSSYTSGLCTSSIGGNTESPMGKQSVNPNQSGPTASSSTGTGEGQRRHESRKPRAEFQEEQARVLSASLRHVPRLGWTEEAMMAGSRDVGVSPSIVGSFSRKEAALVEFFMDECLQLLMDRIDSGLDLQNLIPSERISKLIRIRLECKSLTCQNGPKLLAFRRIL

SEQ ID NO: 24138 - protein, 145 aa, Arabidopsis thaliana
  peptide (1)..(145): Ceres Seq. ID no. 13497130
MGKQSVNPNQSGPTASSSTGTGEGQRRHESRKPRAEFQEEQARVLSASLRHVPRLGWTEEAMMAGSRDVGVSPSIVGSFSRKEAALVEFFMDECLQLLMDRIDSGLDLQNLIPSERISKLIRIRLECKSLTCQNGPKLLAFRRIL

SEQ ID NO: 24139 - DNA, 1522 bp, Arabidopsis thaliana
  misc_feature (1)..(1522): Ceres Seq. ID no. 12371439
  misc_feature (1)..(1522): Ortholog of  Ceres SEQ ID NO 13502943 as cited in SEQ ID NO 65097
acaaaacatttccataaccaaaaaacctcaaaataaaaaaatgagaactctcttaccttcccatactccggcaacggtaacaacggcggcgagaagaagacacgtcatacattgcgccggtaagagatctgactctttctccattaattccagtagctccgattggcaaagctcctgcgccattctctcaagcaaagttaactcacaagaacaatctgaatccttatcttccaattccaatggatcatcatcctaccacgtttccgccgtcaacggtcacaacaacggcgccggagtctcagatttgaatctagttccattcaacaacaaccaatcgattcaatcgaagaagcctttaagtatttcagatctatctccagctccgatgcatggatctaacctccgtgtagcttatcaaggtgttcccggagcttactccgaagccgccgctggtaaagcttatcctaactgtcaagcgattccttgcgatcaattcgaagttgcgtttcaagcggttgagctttggatcgccgatcgcgctgttttacccgtcgaaaactcactcggcggttcgattcatcgtaattacgatcttctcctccgtcaccgtcttcacatcgtcggcgaagttcagcttccggttcatcattgtctcatggctcttcccggtgtacggaaagagtttctcactcgtgtgatctctcatcctcaaggactagctcaatgcgaacacacgttgactaaactcggtctcaacgtagctcgtgaagctgttgatgataccgccggtgcggcggagtttatcgctgcgaataatatccgtgacaccgccgcgattgcgagtgcacgcgcggcggagatctacggattggagattttggaagatgggatacaagatgacgcgagtaacgtcacgcgctttgtgatgttggcgcgtgaaccgattataccgagaactgatcggccgtttaagacgagtatagtgtttgctcacgagaaaggcacgtgcgttttgtttaaggttctctctgcttttgcgtttaggaacattagtttgactaagattgagtctaggccgaaccataatgttcctattaggctagtcgatgaggctaatgtgggcacggctaagcattttgagtatatgttttatatcgacttcgaggcttccatggccgagtcacgtgctcagaatgcgctttctgaggttcaagagtttacgtcgtttttacgggttttggggagttatccgatggatatgacttcttggtcaccatcgtcttcgtcctcttcgtcatcaacattttcattgtgacaacactaagatcataaccaacgtgtgaagtcaattgtgtatgtaaattggagaagaaagttgtaaacataattttggtgaaaataaattacttatttctccaaagatcaatcttttgtattttgctgtttacattattatactttggagtttcgtttgatcgtagttttattatgaaattgcaagttttgagttgatttattctcc

SEQ ID NO: 24140 - protein, 437 aa, Arabidopsis thaliana
  peptide (1)..(437): Ceres Seq. ID no. 12371440
QNISITKKPQNKKMRTLLPSHTPATVTTAARRRHVIHCAGKRSDSFSINSSSSDWQSSCAILSSKVNSQEQSESLSSNSNGSSSYHVSAVNGHNNGAGVSDLNLVPFNNNQSIQSKKPLSISDLSPAPMHGSNLRVAYQGVPGAYSEAAAGKAYPNCQAIPCDQFEVAFQAVELWIADRAVLPVENSLGGSIHRNYDLLLRHRLHIVGEVQLPVHHCLMALPGVRKEFLTRVISHPQGLAQCEHTLTKLGLNVAREAVDDTAGAAEFIAANNIRDTAAIASARAAEIYGLEILEDGIQDDASNVTRFVMLAREPIIPRTDRPFKTSIVFAHEKGTCVLFKVLSAFAFRNISLTKIESRPNHNVPIRLVDEANVGTAKHFEYMFYIDFEASMAESRAQNALSEVQEFTSFLRVLGSYPMDMTSWSPSSSSSSSSTFSL

SEQ ID NO: 24141 - protein, 424 aa, Arabidopsis thaliana
  peptide (1)..(424): Ceres Seq. ID no. 12371441
MRTLLPSHTPATVTTAARRRHVIHCAGKRSDSFSINSSSSDWQSSCAILSSKVNSQEQSESLSSNSNGSSSYHVSAVNGHNNGAGVSDLNLVPFNNNQSIQSKKPLSISDLSPAPMHGSNLRVAYQGVPGAYSEAAAGKAYPNCQAIPCDQFEVAFQAVELWIADRAVLPVENSLGGSIHRNYDLLLRHRLHIVGEVQLPVHHCLMALPGVRKEFLTRVISHPQGLAQCEHTLTKLGLNVAREAVDDTAGAAEFIAANNIRDTAAIASARAAEIYGLEILEDGIQDDASNVTRFVMLAREPIIPRTDRPFKTSIVFAHEKGTCVLFKVLSAFAFRNISLTKIESRPNHNVPIRLVDEANVGTAKHFEYMFYIDFEASMAESRAQNALSEVQEFTSFLRVLGSYPMDMTSWSPSSSSSSSSTFSL

SEQ ID NO: 24142 - protein, 309 aa, Arabidopsis thaliana
  peptide (1)..(309): Ceres Seq. ID no. 12371442
MHGSNLRVAYQGVPGAYSEAAAGKAYPNCQAIPCDQFEVAFQAVELWIADRAVLPVENSLGGSIHRNYDLLLRHRLHIVGEVQLPVHHCLMALPGVRKEFLTRVISHPQGLAQCEHTLTKLGLNVAREAVDDTAGAAEFIAANNIRDTAAIASARAAEIYGLEILEDGIQDDASNVTRFVMLAREPIIPRTDRPFKTSIVFAHEKGTCVLFKVLSAFAFRNISLTKIESRPNHNVPIRLVDEANVGTAKHFEYMFYIDFEASMAESRAQNALSEVQEFTSFLRVLGSYPMDMTSWSPSSSSSSSSTFSL

SEQ ID NO: 24143 - DNA, 1264 bp, Arabidopsis thaliana
  misc_feature (1)..(1264): Ceres Seq. ID no. 12357785
  misc_feature (1)..(1264): Ortholog of  Ceres SEQ ID NO 13595509 as cited in SEQ ID NO 59833
aataataaaattcaattccataaatatttttttttttttgttctttcctctgactggaaaaagcttcctcagatcgtttcatcgtccaagcggaagaagcgtctccttcaatcaccgtggacacctccgagactgtctccgattgaatgggaattgaagacatgcattcaaaatctgacagtggtgggaacaaggttgattcagaggttcatggtacagtatcgtcgtcgataaatagtttaaacccttggcatcgtgctgctgctgcttgcaatgcaaattctagtgtggaagctggagataaatcttctaagtcaatagcattagcattggaatcaaacggttccaaatcaccatccaatagagataatactgttaacaaggaatcacaagtcacaacgtctccacaatcagctggagattatagtgataaaaaccaagaatctctgcatcatggcatcacacaacctcctcctcaccctcaacttgttggccacacagttggatgggcatcctcaaatccataccaggatccatattatgcaggagtgatgggagcctatggacatcatcccctggggtttgttccatatggtgggatgcctcattcaagaatgccactgccgcctgagatggcacaagaaccagttttcgtgaatgctaaacagtaccaggcgattctgaggcgaaggcaggcacgcgccaaggcagagctagagaagaagctaataaaatccagaaagccttatctacatgaatctcggcatcaacatgctatgaggaggccaaggggtactggaggacggtttgcaaagaaaaccaacaccgaagcttcaaagcgtaaagctgaagaaaagagcaatggtcatgttactcagtccccgtcatcatctaattctgatcaaggtgaagcttggaatggtgactatagaacacctcagggagatgagatgcagagctcagcttataagagaagggaagaaggagagtgttcagggcagcaatggaacagcctttcctcaaaccatccttctcaagctcgtctagccattaaatgacctcacaaggcggcaattcattcttggctttctctttgttggcttattcggtagcagccatgaaagagtattttctctcgtttttttttcttctgattttgtacaaatactttttgtagctttttgtgactttttccctttcagtttggaatacttcagatgttgccacttttctttttcaattctatcttaactaaacatttctc

SEQ ID NO: 24144 - protein, 303 aa, Arabidopsis thaliana [sequence omitted]

SEQ ID NO: 24145 - protein, 298 aa, Arabidopsis thaliana
  peptide (1)..(298): Ceres Seq. ID no. 12357787
MHSKSDSGGNKVDSEVHGTVSSSINSLNPWHRAAAACNANSSVEAGDKSSKSIALALESNGSKSPSNRDNTVNKESQVTTSPQSAGDYSDKNQESLHHGITQPPPHPQLVGHTVGWASSNPYQDPYYAGVMGAYGHHPLGFVPYGGMPHSRMPLPPEMAQEPVFVNAKQYQAILRRRQARAKAELEKKLIKSRKPYLHESRHQHAMRRPRGTGGRFAKKTNTEASKRKAEEKSNGHVTQSPSSSNSDQGEAWNGDYRTPQGDEMQSSAYKRREEGECSGQQWNSLSSNHPSQARLAIK

SEQ ID NO: 24146 - protein, 168 aa, Arabidopsis thaliana
  peptide (1)..(168): Ceres Seq. ID no. 12357788
MGAYGHHPLGFVPYGGMPHSRMPLPPEMAQEPVFVNAKQYQAILRRRQARAKAELEKKLIKSRKPYLHESRHQHAMRRPRGTGGRFAKKTNTEASKRKAEEKSNGHVTQSPSSSNSDQGEAWNGDYRTPQGDEMQSSAYKRREEGECSGQQWNSLSSNHPSQARLAIK

SEQ ID NO: 24147 - DNA, 585 bp, Arabidopsis thaliana
  misc_feature (1)..(585): Ceres Seq. ID no. 12322344
  misc_feature (1)..(585): Ortholog of  Ceres SEQ ID NO 12557027 as cited in SEQ ID NO 140
gttattgaaaaaaaattcccagattctataaaaaagagaaatgcaaacatttgctcctggaacaagagtctaccacctcatcatcatcgtcttcttcttcttcttcttcttctgcttatcatcgttcttcgcttcaatcgtcatggctgatgaatataccggagaagcaacgggatcgtcggaagcaaaggttcacatcatctacaccgagaaacctaccgatgaagaacctaaaacctatcatctccgtaccctttcctctgctctcggcagtgaggaagctgcaaaagatgctttgatttacagttacaaggaagctgcttctggtttttcagctaagctcactcctgagcaagtcgctgagatatcaaaacaaccaggtgtgattcaagttgtgccaagccagacttatcagctgcacaaacctggtggtggtggtggtttcaagttgacctaacttgactttgtgtattctctacttctcaactaaacctgttgctttacagaaactagtctgttgttgtattgttgtgactttgaaccaagtatctaactaaaataatgttatgaagttgctttgattcc

SEQ ID NO: 24148 - protein, 138 aa, Arabidopsis thaliana
  peptide (1)..(138): Ceres Seq. ID no. 12322345
MQTFAPGTRVYHLIIIVFFFFFFFCLSSFFASIVMADEYTGEATGSSEAKVHIIYTEKPTDEEPKTYHLRTLSSALGSEEAAKDALIYSYKEAASGFSAKLTPEQVAEISKQPGVIQVVPSQTYQLHKPGGGGGFKLT

SEQ ID NO: 24149 - protein, 104 aa, Arabidopsis thaliana
  peptide (1)..(104): Ceres Seq. ID no. 12322346
MADEYTGEATGSSEAKVHIIYTEKPTDEEPKTYHLRTLSSALGSEEAAKDALIYSYKEAASGFSAKLTPEQVAEISKQPGVIQVVPSQTYQLHKPGGGGGFKLT

SEQ ID NO: 24150 - DNA, 1724 bp, Arabidopsis thaliana
  misc_feature (1)..(1724): Ceres Seq. ID no. 13486737
  misc_feature (1)..(1724): Ortholog of  Ceres SEQ ID NO 14306781 as cited in SEQ ID NO 53019
  misc_feature (1)..(1724): Ortholog of  Ceres SEQ ID NO 15177237 as cited in SEQ ID NO 53825
  misc_feature (1)..(1724): Ortholog of  Ceres SEQ ID NO 15176012 as cited in SEQ ID NO 60374
  misc_feature (1)..(1724): Ortholog of  Ceres SEQ ID NO 13598643 as cited in SEQ ID NO 64307
gtcctttttttcttggtttctgaaacataatttcttagaggcggtctgctgcgaaagatccttcctctcacaaccatctctgttcgatagatccaaccaaaaaccgcatcgattttccattcacacggcactgaatgatgatgacttggaggagagcttctcaagtttgtagctgtcgattgttaaatattttcttgtttcttcttgtccagatttcacatataactcaaggaaacaatgttccctctccaataccagttggtgcaaggcatgtgatttgattttttttcaatttcatttaacttatcgaaatttttttaaaaagtatctaaccaaatgcaatagaaaacaaaatatgtgacgacaaatataaaaagtgtttttattaaagataacattaaagaaaacaaaaaggtatttaaagctaactaaaacacgtcattaagagtcatgtagataattgtgaaattgcatgccgttgacataaatttcgtaacaaaagaaaaaacagaacacagaatcttgttctcccaccgatcaccaccggagatatggaatcgccgattactcaaccccaaatgtttagattgcagtttcttcgtcttcttcatagtcgacgatcaccccaagttccattaatagccgattcttcaaatcctatcgagaatcctctctttcaagctgatgttccttctaccagcaatagagtcttgtccaaaagaaaacattggtaagttaaaagatatgcttaaagaagaaaacattcatttgcacactgaggattcagagcaagggaaattacctttgcttattttaagcttgaaagagagaagtgaagaaaaaaggccagcgattgtgtttatgcatggcacaaacacaaacaaagaatggttaaggccatggcttgaagcatatgcttcgcggggatatgtagccatcggtttagactctcgttaccacggtgaacgtgctgattgcaaaactgcatatcgagatgctcttatatcatcttggagaaatggaaacactatgccttttatctttgatactgtatgggatttgatcaaactagctgaatatcttactcagagggatgatatagacccgaaaaagataggaatcaccggtatttcgctaggagggatgcatgcttggtttgctgctgcagctgacactcgctattccgtggttgtcccattaatcggtgttcagggttttagatgggcaatagagaatgatgagtgggaagcaagagtcaacagtatcaaacctttatttgaagaagcaaggattgatctcggaaagaacataatcgacaaagaactagtcgagaaggtgtggaacagaatagctcctggcctagcttcgaagtttgattcaccgtactcattaccagtgattgctccacggcctctttacatccttaacggcgcaaatgatcctcgatgtcctcttggcggactagaacttgcgttaaagagagctgaaaaggcgtataaggaaacagcttctcctggaaacttcaagttcaaagcagaagatggagttggacacgaagcgacgagtttcatgatcaaagaatcatcagactggtttgacaaattccttaaacaagaagatatgacaacttgacagattgtaatattgtgaactaataaagaagaatcatcttcttctcgttaataatgtattcactctcgcaaatcaatatcattacaaatttc

SEQ ID NO: 24151 - protein, 315 aa, Arabidopsis thaliana
  peptide (1)..(315): Ceres Seq. ID no. 13486738
MFLLPAIESCPKENIGKLKDMLKEENIHLHTEDSEQGKLPLLILSLKERSEEKRPAIVFMHGTNTNKEWLRPWLEAYASRGYVAIGLDSRYHGERADCKTAYRDALISSWRNGNTMPFIFDTVWDLIKLAEYLTQRDDIDPKKIGITGISLGGMHAWFAAAADTRYSVVVPLIGVQGFRWAIENDEWEARVNSIKPLFEEARIDLGKNIIDKELVEKVWNRIAPGLASKFDSPYSLPVIAPRPLYILNGANDPRCPLGGLELALKRAEKAYKETASPGNFKFKAEDGVGHEATSFMIKESSDWFDKFLKQEDMTT

SEQ ID NO: 24152 - protein, 295 aa, Arabidopsis thaliana
  peptide (1)..(295): Ceres Seq. ID no. 13486739
MLKEENIHLHTEDSEQGKLPLLILSLKERSEEKRPAIVFMHGTNTNKEWLRPWLEAYASRGYVAIGLDSRYHGERADCKTAYRDALISSWRNGNTMPFIFDTVWDLIKLAEYLTQRDDIDPKKIGITGISLGGMHAWFAAAADTRYSVVVPLIGVQGFRWAIENDEWEARVNSIKPLFEEARIDLGKNIIDKELVEKVWNRIAPGLASKFDSPYSLPVIAPRPLYILNGANDPRCPLGGLELALKRAEKAYKETASPGNFKFKAEDGVGHEATSFMIKESSDWFDKFLKQEDMTT

SEQ ID NO: 24153 - protein, 256 aa, Arabidopsis thaliana
  peptide (1)..(256): Ceres Seq. ID no. 13486740
MHGTNTNKEWLRPWLEAYASRGYVAIGLDSRYHGERADCKTAYRDALISSWRNGNTMPFIFDTVWDLIKLAEYLTQRDDIDPKKIGITGISLGGMHAWFAAAADTRYSVVVPLIGVQGFRWAIENDEWEARVNSIKPLFEEARIDLGKNIIDKELVEKVWNRIAPGLASKFDSPYSLPVIAPRPLYILNGANDPRCPLGGLELALKRAEKAYKETASPGNFKFKAEDGVGHEATSFMIKESSDWFDKFLKQEDMTT

SEQ ID NO: 24154 - DNA, 1490 bp, Arabidopsis thaliana
  misc_feature (1)..(1490): Ceres Seq. ID no. 12324904
  misc_feature (1)..(1490): Ortholog of  Ceres SEQ ID NO 13659033 as cited in SEQ ID NO 66372
  misc_feature (1)..(1490): Ortholog of  Ceres SEQ ID NO 13655724 as cited in SEQ ID NO 68973
  misc_feature (1)..(1490): Ortholog of  Ceres SEQ ID NO 12625899 as cited in SEQ ID NO 69079
aaaaaagagagaaagaagataagtagttctatgctcctgaaatgggattaaacgagcaacaaaatgttccaagtcagaggaagatcatagtttttatagtcttagcttttataccaatagctctgtttcgactctgttttaataatccattctcctccattaaagacacctctcttcaagactctgcagctaacgttgtgatcactagcttctcttcatcttctcaagaagaagaaagccaagagagttttgatcatatacaagatgaacctttatgcgattatacgcaagggaactgggtcagagacgagattggtccactctacaatggttcaacatgtggaacaatcaaggatggtcagaattgtttccgccatggtagacctgattccggttatctttactggaaatggaaaccaaacgaatgcgatataccgagattcgactcgaaccggtttcttgatcttatgagagataagcatctagcttttatcggtgattccatggctagaaatcagcttgagtctcttttatgcttgctctctaccgtctctagccctgatctcgtctatagaaacggagaagacaataaattcagaagatggcgtttcgagtcacacaacgtcactgtctcggtttactggtccccgtttttggtggccggtttagagaaatcgggaaacttggaccacaatgtattgcacatagaccgcgtggatgagagatggggcaatgatttagaacgttttgatacggtcgtagtctctgtgggacattggtttctgcatccagcggtttactacgagtctggttcggttttgggatgtcattcttgtgaaacaagtaactgtaccgaggtagggttttatgatgtatttagaaaagcgataagaacaacgttgagagcggttgctggaagtggtcgtgaggtgatcttgacgacattttcgccatcacattttgaaggacggccttgggacagtctcggcgcatgtaacatgaccaagccgtacgaagggaaggttttagaaggtctggacttggacatgcgcaaaatagaaattgaggaatatacggcggctgcggctgaggtgaggttagaggtgttggacgtgacggctatgtcggtactgagaccagacggacatcctggtccgtacatgtacgcggacccgttcaagaacggtgtaccggagagaattcctaatgattgtttgcattggtgtctacctggtcctgtcgacacgtggaacgagatcatgatcgagatgttgcggcgatggaaggtttaaatgatgaacattgattgttgaagatcctatgatatcattcatttacacgcatatgacaaaaggtgtaataattttttgggatttcaaaaagtagctaggtagtttattttcttggattatatacgaaaaaaaaaccacatggatgatactcttttttgttggttatttcttccgttcttcaaacgatggaggagtacg

SEQ ID NO: 24155 - protein, 416 aa, Arabidopsis thaliana
  peptide (1)..(416): Ceres Seq. ID no. 12324905
MGLNEQQNVPSQRKIIVFIVLAFIPIALFRLCFNNPFSSIKDTSLQDSAANVVITSFSSSSQEEESQESFDHIQDEPLCDYTQGNWVRDEIGPLYNGSTCGTIKDGQNCFRHGRPDSGYLYWKWKPNECDIPRFDSNRFLDLMRDKHLAFIGDSMARNQLESLLCLLSTVSSPDLVYRNGEDNKFRRWRFESHNVTVSVYWSPFLVAGLEKSGNLDHNVLHIDRVDERWGNDLERFDTVVVSVGHWFLHPAVYYESGSVLGCHSCETSNCTEVGFYDVFRKAIRTTLRAVAGSGREVILTTFSPSHFEGRPWDSLGACNMTKPYEGKVLEGLDLDMRKIEIEEYTAAAAEVRLEVLDVTAMSVLRPDGHPGPYMYADPFKNGVPERIPNDCLHWCLPGPVDTWNEIMIEMLRRWKV

SEQ ID NO: 24156 - protein, 274 aa, Arabidopsis thaliana
  peptide (1)..(274): Ceres Seq. ID no. 12324906
MRDKHLAFIGDSMARNQLESLLCLLSTVSSPDLVYRNGEDNKFRRWRFESHNVTVSVYWSPFLVAGLEKSGNLDHNVLHIDRVDERWGNDLERFDTVVVSVGHWFLHPAVYYESGSVLGCHSCETSNCTEVGFYDVFRKAIRTTLRAVAGSGREVILTTFSPSHFEGRPWDSLGACNMTKPYEGKVLEGLDLDMRKIEIEEYTAAAAEVRLEVLDVTAMSVLRPDGHPGPYMYADPFKNGVPERIPNDCLHWCLPGPVDTWNEIMIEMLRRWKV

SEQ ID NO: 24157 - protein, 262 aa, Arabidopsis thaliana
  peptide (1)..(262): Ceres Seq. ID no. 12324907
MARNQLESLLCLLSTVSSPDLVYRNGEDNKFRRWRFESHNVTVSVYWSPFLVAGLEKSGNLDHNVLHIDRVDERWGNDLERFDTVVVSVGHWFLHPAVYYESGSVLGCHSCETSNCTEVGFYDVFRKAIRTTLRAVAGSGREVILTTFSPSHFEGRPWDSLGACNMTKPYEGKVLEGLDLDMRKIEIEEYTAAAAEVRLEVLDVTAMSVLRPDGHPGPYMYADPFKNGVPERIPNDCLHWCLPGPVDTWNEIMIEMLRRWKV

SEQ ID NO: 24158 - DNA, 1469 bp, Arabidopsis thaliana
  misc_feature (1)..(1469): Ceres Seq. ID no. 12338082
  misc_feature (1)..(1469): Ortholog of  Ceres SEQ ID NO 13639243 as cited in SEQ ID NO 56820
  misc_feature (1)..(1469): Ortholog of  Ceres SEQ ID NO 13496409 as cited in SEQ ID NO 65697
aggaagggtttatagattaggtttttaagtcgcacctctctctctcactgccgcatcttttcttagggttcttgtttcgctatctcttaaacacaaacagctctgtccgaataatctctcttcaagtacctctttttcctgattctgtatatcgccatgaattactgatttccctctctataaacccatcaaagtaaaccaatttctcctgtgacttgtacctaactcgatcttaccagactggtgatggcgtctttgaaccctttcgatcttctaggagatgatgctgaggatccaagccggctcgctgtggctttgtctcagaaagtcgagaaagctgctgctgctgttcagcctcctaaggccgctaagttcccaaccaagccggctcctccttctcaagcagtgagggagtcgaggaatgctcctcaaggaggtcgtggtgggactggtggacgtggtggattttcccgtggcaggggtaatggtggatacaaccgggacaacaggaacaatgatgctcctggaaatgagaatggattttctggaggatacaggagaccttctgaagatgctgatggagcaagccgtggtgggtctgttggtggataccgtgttggcggtggtcgtgaaggacctcgccgtggtggagttgccaacggggaatctggtgatgttgaacgcccaccgaggaattatgaccgccatagcaggacaggtcatggtactggcatgaaacgtaatggtggaggtcgtggaaactggggcactactgaagatgatatccctccaacgtctgaggaacctaccacagaggttgagaagagccctgttgctgagaagcaaggaggtgaggatgaaacccctgaagcaaagaaagaactcactgcggaagagaaagcacagaaagaagctgaagaagctgaagccagggagatgactctagaagagtatgagaaaattctggaggagaagaagaaggctctgcaagccacaaaggttgaggaaaggaaagttgacaccaaagtgtttgagtccatgcaacagctctctaacaagaagaacaccgatgaggaaatcttcatcaagctgggatctgacaaggaaaaacgcaaagatgctactgagaaggccaaaaagtcgttgagcattaatgagttcttgaagccggctgatggaaagaggtacaacgggagaggtggaggctcccgcggaagaggaggtcgcggtggtcgtggtgaaggaggaaaccaaaggtatgcaaaagaagctgcagctccggcgattggagacacagctcagttcccttcgttgggctagtaaagacccctggtccttcagcctcgctatctctgtctttcgtttctctttggttgaattttgttagttttataattttttgttacactttctgaaggtcttttctgcgaaactattacgttttttaagttatgaaaaaaattattaag

SEQ ID NO: 24159 - protein, 357 aa, Arabidopsis thaliana
  peptide (1)..(357): Ceres Seq. ID no. 12338083
MASLNPFDLLGDDAEDPSRLAVALSQKVEKAAAAVQPPKAAKFPTKPAPPSQAVRESRNAPQGGRGGTGGRGGFSRGRGNGGYNRDNRNNDAPGNENGFSGGYRRPSEDADGASRGGSVGGYRVGGGREGPRRGGVANGESGDVERPPRNYDRHSRTGHGTGMKRNGGGRGNWGTTEDDIPPTSEEPTTEVEKSPVAEKQGGEDETPEAKKELTAEEKAQKEAEEAEAREMTLEEYEKILEEKKKALQATKVEERKVDTKVFESMQQLSNKKNTDEEIFIKLGSDKEKRKDATEKAKKSLSINEFLKPADGKRYNGRGGGSRGRGGRGGRGEGGNQRYAKEAAAPAIGDTAQFPSLG

SEQ ID NO: 24160 - protein, 195 aa, Arabidopsis thaliana
  peptide (1)..(195): Ceres Seq. ID no. 12338084
MKRNGGGRGNWGTTEDDIPPTSEEPTTEVEKSPVAEKQGGEDETPEAKKELTAEEKAQKEAEEAEAREMTLEEYEKILEEKKKALQATKVEERKVDTKVFESMQQLSNKKNTDEEIFIKLGSDKEKRKDATEKAKKSLSINEFLKPADGKRYNGRGGGSRGRGGRGGRGEGGNQRYAKEAAAPAIGDTAQFPSLG

SEQ ID NO: 24161 - DNA, 1482 bp, Arabidopsis thaliana
  misc_feature (1)..(1482): Ceres Seq. ID no. 12396139
  misc_feature (1)..(1482): Ortholog of  Ceres SEQ ID NO 15170447 as cited in SEQ ID NO 52849
  misc_feature (1)..(1482): Ortholog of  Ceres SEQ ID NO 13589042 as cited in SEQ ID NO 60626
  misc_feature (1)..(1482): Ortholog of  Ceres SEQ ID NO 14302887 as cited in SEQ ID NO 66146
gcctatcattttgccaacgaacgttctttcttcttaatcacagctcagcctgacgcaaccgctcaggctgatctcttccaatttacagccatttcccagctcagatctctgatccggtgagatctctctcaaggaaaaggagttagagcatcatcaagatgaaggcactcattcttgttggaggcttcggcactcgcttgagaccattgactctcagtttcccaaagccccttgttgattttgctaataaacccatgatccttcatcagatagaggctcttaaggcagttggagttgatgaagtggttttggccatcaattatcagccagaggtgatgctgaacttcttgaaggactttgagaccaagctggaaatcaaaatcacttgctcacaagagaccgagccactaggtaccgctggtcctctggctctagcgagagacaaattgcttgatggatctggagagcccttctttgttcttaacagtgatgtgattagtgagtaccctcttaaagaaatgcttgagtttcacaaatctcacggtggggaagcctccataatggtaacaaaggtggatgaaccgtcgaaatatggagtggttgttatggaagaaagcactggaagagtggagaagtttgtggaaaagccaaaactgtatgtaggtaacaagatcaacgctgggatttatcttctgaacccatctgttcttgataagattgagctaagaccgacttcaatcgaaaaagagactttccctaagattgcagcagcgcaagggctctatgctatggtgctaccagggttttggatggacattgggcaaccccgtgactacataacgggtttgagactctacttagactcccttaggaagaaatctcctgccaaattaaccagtgggccacacatagttgggaatgttcttgttgacgaaaccgctacaattggggaaggatgtttgattggaccagacgttgccattggtccaggctgcattgttgagtcaggagtcagactctcccgatgcacggtcatgcgtggagtccgcatcaagaagcatgcgtgtatctcgagcagtatcatcgggtggcactcaacggttggtcaatgggccaggatcgagaacatgacgatcctcggtgaggatgttcatgtgagcgatgagatctatagcaatggaggagttgttttgccacacaaggagatcaaatcaaacatcttgaagccagagatagtgatgtgaaaatgagatattatatgtgcaacttttttttttttttttgtgtcctttcttcaactttgaaatcgctttcgtaattcttaatggcttttgaataagcatcaatcaaaacgctgtatatcttgttagggtcgtttgctgttttgtctctttttttgttttgtaatttataaaaaaatttattctcattttatgtgagatacttttgaatattcattaattataaagctttttttttgtg

SEQ ID NO: 24162 - protein, 361 aa, Arabidopsis thaliana
  peptide (1)..(361): Ceres Seq. ID no. 12396140
MKALILVGGFGTRLRPLTLSFPKPLVDFANKPMILHQIEALKAVGVDEVVLAINYQPEVMLNFLKDFETKLEIKITCSQETEPLGTAGPLALARDKLLDGSGEPFFVLNSDVISEYPLKEMLEFHKSHGGEASIMVTKVDEPSKYGVVVMEESTGRVEKFVEKPKLYVGNKINAGIYLLNPSVLDKIELRPTSIEKETFPKIAAAQGLYAMVLPGFWMDIGQPRDYITGLRLYLDSLRKKSPAKLTSGPHIVGNVLVDETATIGEGCLIGPDVAIGPGCIVESGVRLSRCTVMRGVRIKKHACISSSIIGWHSTVGQWARIENMTILGEDVHVSDEIYSNGGVVLPHKEIKSNILKPEIVM

SEQ ID NO: 24163 - protein, 329 aa, Arabidopsis thaliana
  peptide (1)..(329): Ceres Seq. ID no. 12396141
MILHQIEALKAVGVDEVVLAINYQPEVMLNFLKDFETKLEIKITCSQETEPLGTAGPLALARDKLLDGSGEPFFVLNSDVISEYPLKEMLEFHKSHGGEASIMVTKVDEPSKYGVVVMEESTGRVEKFVEKPKLYVGNKINAGIYLLNPSVLDKIELRPTSIEKETFPKIAAAQGLYAMVLPGFWMDIGQPRDYITGLRLYLDSLRKKSPAKLTSGPHIVGNVLVDETATIGEGCLIGPDVAIGPGCIVESGVRLSRCTVMRGVRIKKHACISSSIIGWHSTVGQWARIENMTILGEDVHVSDEIYSNGGVVLPHKEIKSNILKPEIVM

SEQ ID NO: 24164 - protein, 302 aa, Arabidopsis thaliana
  peptide (1)..(302): Ceres Seq. ID no. 12396142
MLNFLKDFETKLEIKITCSQETEPLGTAGPLALARDKLLDGSGEPFFVLNSDVISEYPLKEMLEFHKSHGGEASIMVTKVDEPSKYGVVVMEESTGRVEKFVEKPKLYVGNKINAGIYLLNPSVLDKIELRPTSIEKETFPKIAAAQGLYAMVLPGFWMDIGQPRDYITGLRLYLDSLRKKSPAKLTSGPHIVGNVLVDETATIGEGCLIGPDVAIGPGCIVESGVRLSRCTVMRGVRIKKHACISSSIIGWHSTVGQWARIENMTILGEDVHVSDEIYSNGGVVLPHKEIKSNILKPEIVM

SEQ ID NO: 24165 - DNA, 1192 bp, Arabidopsis thaliana
  misc_feature (1)..(1192): Ceres Seq. ID no. 12325978
  misc_feature (1)..(1192): Ortholog of  Ceres SEQ ID NO 13582619 as cited in SEQ ID NO 56520
  misc_feature (1)..(1192): Ortholog of  Ceres SEQ ID NO 14314632 as cited in SEQ ID NO 59923
  misc_feature (1)..(1192): Ortholog of  Ceres SEQ ID NO 13660872 as cited in SEQ ID NO 60830
  misc_feature (1)..(1192): Ortholog of  Ceres SEQ ID NO 12616221 as cited in SEQ ID NO 63291
aaagaaaaactatttaagaaacatatgttttggatcaagtaagggtttgatcttgtaccggaatcagatggatttgcctcctggttttaggtttcatccaacagacgaagaactcataacccactatctccacaagaaggttcttgaccttggtttctcggctaaagctattggtgaggttgatttgaacaaagctgagccatgggagttgccatataaagcaaaaattggtgagaaagaatggtactttttctgtgtgagggatagaaagtatccgactggtctgaggactaaccgagcaactcaagccggttattggaaggcgacagggaaggataaagaaatcttccgaggtaaatcgcttgttggtatgaagaaaacacttgttttctacagaggaagagctcctaaaggccagaaaacaaattgggtgatgcatgagtataggctagatggaaaactctctgctcacaacttgcctaaaaccgctaagaatgaatgggtgatctgcagggtatttcataaaactgctggaggtaagaagatcccgatttcgacgttaatccgaatcggttcttacggaaccgggtctagtttaccacctttaactgattcttcaccatacaacgacaaaaccaagaccgaaccagtttacgtgccctgcttctccaaccaagctgaaactagaggaacaatactcaattgcttcagcaacccttcccttagctccatccaaccagattttctccagatgattccactctaccaacctcaatctctcaacatttccgagagttccaatccggttcttacgcaagaacaatcagttttacaagcgatgatggaaaacaacagaaggcagaacttcaaaacattgagcatctcgcaagaaaccggggtttcgaacaccgataactcatcggtttttgaatttgggaggaagcgatttgatcatcaagaagttccatctccctcttccggtccggttgatcttgaacctttctggaattactgaagattcagaacctgaaaagtctattaatttaggtcacaagtaagaaaatctttgcaaagttttatccttttagcgtggtgtgctaagcttgtatagattattgacactacttcctgtattagtgttttatattattatattcaactaaagttaatattagagaggataaaatgaagc

SEQ ID NO: 24166 - protein, 337 aa, Arabidopsis thaliana
  peptide (1)..(337): Ceres Seq. ID no. 12325979
KKNYLRNICFGSSKGLILYRNQMDLPPGFRFHPTDEELITHYLHKKVLDLGFSAKAIGEVDLNKAEPWELPYKAKIGEKEWYFFCVRDRKYPTGLRTNRATQAGYWKATGKDKEIFRGKSLVGMKKTLVFYRGRAPKGQKTNWVMHEYRLDGKLSAHNLPKTAKNEWVICRVFHKTAGGKKIPISTLIRIGSYGTGSSLPPLTDSSPYNDKTKTEPVYVPCFSNQAETRGTILNCFSNPSLSSIQPDFLQMIPLYQPQSLNISESSNPVLTQEQSVLQAMMENNRRQNFKTLSISQETGVSNTDNSSVFEFGRKRFDHQEVPSPSSGPVDLEPFWNY

SEQ ID NO: 24167 - protein, 315 aa, Arabidopsis thaliana; identical to SEQ ID NO: 23928
  peptide (1)..(315): Ceres Seq. ID no. 12325980

SEQ ID NO: 24168 - protein, 214 aa, Arabidopsis thaliana; identical to SEQ ID NO: 23929
  peptide (1)..(214): Ceres Seq. ID no. 12325981

SEQ ID NO: 24169 - DNA, 1529 bp, Arabidopsis thaliana
  misc_feature (1)..(1529): Ceres Seq. ID no. 12328202
  misc_feature (1)..(1529): Ortholog of  Ceres SEQ ID NO 14314559 as cited in SEQ ID NO 52317
  misc_feature (1)..(1529): Ortholog of  Ceres SEQ ID NO 15174571 as cited in SEQ ID NO 53570
  misc_feature (1)..(1529): Ortholog of  Ceres SEQ ID NO 14314367 as cited in SEQ ID NO 57446
ctcgtctcaaaccgttccttctcttttaacacttgttcttttaaggcaaaaaggctcgagccacagagatctgagtttctcttcttcgagatctgatcgccgaatctcataatctcccatcgaagcagaatggagacttttctattcacatctgagtctgtaaacgagggacacccagacaagctctgtgaccagatctctgatgcagtcctcgatgcctgccttgaacaagaccctgacagcaaagttgcttgtgagacatgcaccaagaccaacatggtcatggtctttggtgagatcactaccaaggctactgttgactacgagaagattgtccgtgacacctgtcgcgccattggatttgtctctgatgatgttggtcttgatgctgacaaatgcaaagtcctagtcaacattgagcaacagagcccagacattgctcaaggagttcacggtcacttcaccaaatgtcctgaagaaattggagccggtgaccaagggcacatgtttggttatgccactgatgaaacccctgagttaatgcccctgagccatgttcttgccaccaagctcggtgctcgcctaacagaagtcagaaagaatggtacttgcgcctggctaagacctgacggcaaaacccaagtcactgttgagtactacaatgacaagggtgccatggtcccaatccgtgtccacacagtcctcatctccacccaacacgatgaaactgtgaccaacgacgaaattgcccgtgaccttaaggagcatgtcatcaagccagtcatcccagagaagtacctagacgagaaaaccatcttccacttgaacccttcaggccgattcgtcatcggtggaccccatggagacgctggtctcaccgggcgtaagatcatcatcgacacttacggtggatggggagctcacggaggcggtgcattctcaggtaaagacccaaccaaggtcgacagaagcggagcctacattgtgagacaagcagctaagagcgttgtggctaacgggatggctcgtagggctcttgttcaggtctcatacgccattggagtccctgagccattgtctgtctttgtggacacttatgagactggattgattccagacaaggagatactaaagattgtgaaggagagcttcgacttcagaccaggaatgatgacaattaaccttgacctaaagagaggaggaaacggaaggttcttgaaaactgcggcttacggacactttggaagagacgaccctgacttcacctgggaagtcgtcaagccactcaagtgggacaaacctcaagcttaaattttacctactctgtttctgtcttcattccacaaaccaattatctgctcacttttttatttctctgtttttgtggtttattgtgtttatgtatcattgtacttgagctatttcaattgggtgtttgtttttatggcgacttttacacggcttggagtaagtttcatgttgttcttatataattataaccatgaaaaattaatataaactaaagtgtc

SEQ ID NO: 24170 - protein, 393 aa, Arabidopsis thaliana
  peptide (1)..(393): Ceres Seq. ID no. 12328203
METFLFTSESVNEGHPDKLCDQISDAVLDACLEQDPDSKVACETCTKTNMVMVFGEITTKATVDYEKIVRDTCRAIGFVSDDVGLDADKCKVLVNIEQQSPDIAQGVHGHFTKCPEEIGAGDQGHMFGYATDETPELMPLSHVLATKLGARLTEVRKNGTCAWLRPDGKTQVTVEYYNDKGAMVPIRVHTVLISTQHDETVTNDEIARDLKEHVIKPVIPEKYLDEKTIFHLNPSGRFVIGGPHGDAGLTGRKIIIDTYGGWGAHGGGAFSGKDPTKVDRSGAYIVRQAAKSVVANGMARRALVQVSYAIGVPEPLSVFVDTYETGLIPDKEILKIVKESFDFRPGMMTINLDLKRGGNGRFLKTAAYGHFGRDDPDFTWEVVKPLKWDKPQA

SEQ ID NO: 24171 - protein, 344 aa, Arabidopsis thaliana
  peptide (1)..(344): Ceres Seq. ID no. 12328204
MVMVFGEITTKATVDYEKIVRDTCRAIGFVSDDVGLDADKCKVLVNIEQQSPDIAQGVHGHFTKCPEEIGAGDQGHMFGYATDETPELMPLSHVLATKLGARLTEVRKNGTCAWLRPDGKTQVTVEYYNDKGAMVPIRVHTVLISTQHDETVTNDEIARDLKEHVIKPVIPEKYLDEKTIFHLNPSGRFVIGGPHGDAGLTGRKIIIDTYGGWGAHGGGAFSGKDPTKVDRSGAYIVRQAAKSVVANGMARRALVQVSYAIGVPEPLSVFVDTYETGLIPDKEILKIVKESFDFRPGMMTINLDLKRGGNGRFLKTAAYGHFGRDDPDFTWEVVKPLKWDKPQA

SEQ ID NO: 24172 - protein, 342 aa, Arabidopsis thaliana
  peptide (1)..(342): Ceres Seq. ID no. 12328205
MVFGEITTKATVDYEKIVRDTCRAIGFVSDDVGLDADKCKVLVNIEQQSPDIAQGVHGHFTKCPEEIGAGDQGHMFGYATDETPELMPLSHVLATKLGARLTEVRKNGTCAWLRPDGKTQVTVEYYNDKGAMVPIRVHTVLISTQHDETVTNDEIARDLKEHVIKPVIPEKYLDEKTIFHLNPSGRFVIGGPHGDAGLTGRKIIIDTYGGWGAHGGGAFSGKDPTKVDRSGAYIVRQAAKSVVANGMARRALVQVSYAIGVPEPLSVFVDTYETGLIPDKEILKIVKESFDFRPGMMTINLDLKRGGNGRFLKTAAYGHFGRDDPDFTWEVVKPLKWDKPQA

SEQ ID NO: 24173 - DNA, 1501 bp, Arabidopsis thaliana
  misc_feature (1)..(1501): Ceres Seq. ID no. 13490946
  misc_feature (1)..(1501): Ortholog of  Ceres SEQ ID NO 14313049 as cited in SEQ ID NO 54099
  misc_feature (1)..(1501): Ortholog of  Ceres SEQ ID NO 14314054 as cited in SEQ ID NO 56939
  misc_feature (1)..(1501): Ortholog of  Ceres SEQ ID NO 14303592 as cited in SEQ ID NO 68603
accacaagattgttggagaaatggtttcatcacttaacatcatcgaagtggcacgagtcaccccttcaaactctgactcggccgagtcactcagtctcccactcacttatttcgaccttatctattataaacttcgcgccgtcgaacgagtcatcttctaccgaatcaccaacgtaactcgccctttctttgactcagtcatcgtcccaaatctcaaaacctctctatcctcatgcctctctcactatctcccactcgctggcaaacttatatgggaaccacttgatcacaaaccaaccattgtctactcccaaaacgacgacgtttcattcagcgtcgccgaaacaaacgctgatttctctagtttatccggcaatgaaccattcccctccaccgagttgtacccgttagtccccgcgttacaaagctccgacgactcggcctccattgtgtcgttccaagtcacgttatttccaaaccaaggattttgcatcggcgtaagtgcacatcatgccgttttagatggaaaaacgacaaccatgtttctcaaatcctgggctcacatatgtaaacatcaagatttttctctaccgcaggatttaatcccaacttacgatcgtacggtcattaaaagtccaacggatagtgaaaacaaagttttgaatgagtggcgctctttcaccaaaatattagctggtggtaaagaacctgccaaccccaagagtttaaagcttaatccatcatttgagattggtcctgacgttgtccgatacactctccagctcacgcgtgaagatatccaaacgcttcgcgagagacttaagagagaagtttcctcctcctcctcctcaacctcatcctcaaaagagcttcgcttgtctacatttgttattgtttactcgtatgtattagtatgcataataagagctcgaggcggggaaccacatagaccggttggatatgcgttttcggtggattgtcgaagcctcatgaatccgccgactccaaattattttggaaattgcatcgctggttgctctagaatgatgctgacggcaaaaatgtttatgggtgaagaaggacttttggctgctgcgacaatggtcagcgattcgatcgaagaatgggacgagagttttgcgtggaagattccggattttgtagcatatgcaactcttccaccagagacacaacttattttagtttcagggtctaaccgatttggagtatacgagttggattttgggtggggtagacctgataaagtgatggttgtgtcgatcagtccaggcaatgggatttccatggcggaaagtagagaccaaaacggcagtgtggagattggcttctcactcaagaagcacgaaatggacacattgattgatttgcttcattgtgaactaactatttaaataaacttttctttacatgaaaaaattgattctctaaacaatatctttaaaacgataacgccaatttatctaatcaatttatttttagc

SEQ ID NO: 24174 - protein, 469 aa, Arabidopsis thaliana
  peptide (1)..(469): Ceres Seq. ID no. 13490947
HKIVGEMVSSLNIIEVARVTPSNSDSAESLSLPLTYFDLIYYKLRAVERVIFYRITNVTRPFFDSVIVPNLKTSLSSCLSHYLPLAGKLIWEPLDHKPTIVYSQNDDVSFSVAETNADFSSLSGNEPFPSTELYPLVPALQSSDDSASIVSFQVTLFPNQGFCIGVSAHHAVLDGKTTTMFLKSWAHICKHQDFSLPQDLIPTYDRTVIKSPTDSENKVLNEWRSFTKILAGGKEPANPKSLKLNPSFEIGPDVVRYTLQLTREDIQTLRERLKREVSSSSSSTSSSKELRLSTFVIVYSYVLVCIIRARGGEPHRPVGYAFSVDCRSLMNPPTPNYFGNCIAGCSRMMLTAKMFMGEEGLLAAATMVSDSIEEWDESFAWKIPDFVAYATLPPETQLILVSGSNRFGVYELDFGWGRPDKVMVVSISPGNGISMAESRDQNGSVEIGFSLKKHEMDTLIDLLHCELTI

SEQ ID NO: 24175 - protein, 463 aa, Arabidopsis thaliana
  peptide (1)..(463): Ceres Seq. ID no. 13490948
MVSSLNIIEVARVTPSNSDSAESLSLPLTYFDLIYYKLRAVERVIFYRITNVTRPFFDSVIVPNLKTSLSSCLSHYLPLAGKLIWEPLDHKPTIVYSQNDDVSFSVAETNADFSSLSGNEPFPSTELYPLVPALQSSDDSASIVSFQVTLFPNQGFCIGVSAHHAVLDGKTTTMFLKSWAHICKHQDFSLPQDLIPTYDRTVIKSPTDSENKVLNEWRSFTKILAGGKEPANPKSLKLNPSFEIGPDVVRYTLQLTREDIQTLRERLKREVSSSSSSTSSSKELRLSTFVIVYSYVLVCIIRARGGEPHRPVGYAFSVDCRSLMNPPTPNYFGNCIAGCSRMMLTAKMFMGEEGLLAAATMVSDSIEEWDESFAWKIPDFVAYATLPPETQLILVSGSNRFGVYELDFGWGRPDKVMVVSISPGNGISMAESRDQNGSVEIGFSLKKHEMDTLIDLLHCELTI

SEQ ID NO: 24176 - protein, 290 aa, Arabidopsis thaliana
  peptide (1)..(290): Ceres Seq. ID no. 13490949
MFLKSWAHICKHQDFSLPQDLIPTYDRTVIKSPTDSENKVLNEWRSFTKILAGGKEPANPKSLKLNPSFEIGPDVVRYTLQLTREDIQTLRERLKREVSSSSSSTSSSKELRLSTFVIVYSYVLVCIIRARGGEPHRPVGYAFSVDCRSLMNPPTPNYFGNCIAGCSRMMLTAKMFMGEEGLLAAATMVSDSIEEWDESFAWKIPDFVAYATLPPETQLILVSGSNRFGVYELDFGWGRPDKVMVVSISPGNGISMAESRDQNGSVEIGFSLKKHEMDTLIDLLHCELTI

SEQ ID NO: 24177 - DNA, 1793 bp, Arabidopsis thaliana
  misc_feature (1)..(1793): Ceres Seq. ID no. 13499642
  misc_feature (1)..(1793): Ortholog of  Ceres SEQ ID NO 13597334 as cited in SEQ ID NO 64244
  misc_feature (1)..(1793): Ortholog of  Ceres SEQ ID NO 14303165 as cited in SEQ ID NO 65181
gagacagagacagattgagagaaagtttggattttgatatgtgtggttggatttttgttacaaggcaaaaccagacccaccttcaaacttgtccccacgaactacattatcattgttttgttcgaacttcttcttcttctcgttagggttttctttcattggctctgagctactctttattgcttaggccttagtgtgtgtgtgtgaatcttctcagcgaaagccaagttcttttctttgttggtgtttctgggtttattgcgacaatgggagctgagcattttagcctggtgaagttcaatagaggtttctttgtgtgtttatgggtgatgctctcgctatcttgcgcagcagcgagctatggctcttcaaggcaaaagtttgaggtgaagaagcatttgaataggctcaacaaacctcctgttaagactattcagagtccagatggagatataatcgactgtattcctatttcaaagcagccagcttttgaccaccccttcctcaaagaccacaagattcagatgaggcctagttaccacccagaagggctctttgatgacaataaggtatctgctgaaccaaaggggaaagaaactcatatccctcagttgtggcaccggtatggcaaatgtactgaaggaaccattcccatgaggaggacaagggaggatgatgtgttgagagcaagttcagttaaaagatatggcaagaagaagcataggtctgttcctattcctaaatctgcggaacccgacctcatcaaccaaaatggtcatcaacacgccatagcttatgtggaaggagataagtactacggagctaaggcgactttgaatgtgtgggagccaaagatacagaacacaaacgaattcagcttgtcgcagatatggcttttggggggttcctttggacaagatcttaacagtattgaagctggctggcaggtgagtccggatctatatggagacaataacacaagactcttcacttactggactagtgatgcctatcaagctaccggttgctacaatcttctttgctcaggtttcattcaaatcaacagtgacatagcaatgggagcaagcatctcaccagtctctggataccgcaattcccagtatgatatcagtattctaatctggaaggatccaaaggagggacattggtggatgcaatttgggaatgggtatgttttggggtactggccatcatttctgttctcctacctaacagaaagtgcatcgatgatcgaatggggaggagaagttgtgaactcacagtcagaaggccaccacacttggacacagatgggaagtggtcactttccagaagaaggtttcagtaaagcaagttactttcggaacattcaagtcgtagatggatccaacaacctcaaagcaccaaaaggacttggtacattcaccgagaagtccaactgttatgatgttcaaacgggaagcaatgatgactggggacattacttctactacggtggtcccggtaagaacaagaactgcccataaacccgggcatgtgtagtgtttactcagcttgtatctctctttcagtcttgtgaatttcctccttcttgggtagtattaggctgtagtaagaaagtgaagtagtgatatgtatgtgtaagctctctcagtgatgggaagttttgtaggtttgtgtggttttaacttaatgataaggtgtttgtttgtagtagtagtctccatgtaactagatgggggaaaagtaggtgtgactttaagtttcttaaaagctcaaagaaactttagccc

SEQ ID NO: 24178 - protein, 419 aa, Arabidopsis thaliana
  peptide (1)..(419): Ceres Seq. ID no. 13499643
MGAEHFSLVKFNRGFFVCLWVMLSLSCAAASYGSSRQKFEVKKHLNRLNKPPVKTIQSPDGDIIDCIPISKQPAFDHPFLKDHKIQMRPSYHPEGLFDDNKVSAEPKGKETHIPQLWHRYGKCTEGTIPMRRTREDDVLRASSVKRYGKKKHRSVPIPKSAEPDLINQNGHQHAIAYVEGDKYYGAKATLNVWEPKIQNTNEFSLSQIWLLGGSFGQDLNSIEAGWQVSPDLYGDNNTRLFTYWTSDAYQATGCYNLLCSGFIQINSDIAMGASISPVSGYRNSQYDISILIWKDPKEGHWWMQFGNGYVLGYWPSFLFSYLTESASMIEWGGEVVNSQSEGHHTWTQMGSGHFPEEGFSKASYFRNIQVVDGSNNLKAPKGLGTFTEKSNCYDVQTGSNDDWGHYFYYGGPGKNKNCP

SEQ ID NO: 24179 - protein, 398 aa, Arabidopsis thaliana
  peptide (1)..(398): Ceres Seq. ID no. 13499644
MLSLSCAAASYGSSRQKFEVKKHLNRLNKPPVKTIQSPDGDIIDCIPISKQPAFDHPFLKDHKIQMRPSYHPEGLFDDNKVSAEPKGKETHIPQLWHRYGKCTEGTIPMRRTREDDVLRASSVKRYGKKKHRSVPIPKSAEPDLINQNGHQHAIAYVEGDKYYGAKATLNVWEPKIQNTNEFSLSQIWLLGGSFGQDLNSIEAGWQVSPDLYGDNNTRLFTYWTSDAYQATGCYNLLCSGFIQINSDIAMGASISPVSGYRNSQYDISILIWKDPKEGHWWMQFGNGYVLGYWPSFLFSYLTESASMIEWGGEVVNSQSEGHHTWTQMGSGHFPEEGFSKASYFRNIQVVDGSNNLKAPKGLGTFTEKSNCYDVQTGSNDDWGHYFYYGGPGKNKNCP

SEQ ID NO: 24180 - protein, 333 aa, Arabidopsis thaliana
  peptide (1)..(333): Ceres Seq. ID no. 13499645
MRPSYHPEGLFDDNKVSAEPKGKETHIPQLWHRYGKCTEGTIPMRRTREDDVLRASSVKRYGKKKHRSVPIPKSAEPDLINQNGHQHAIAYVEGDKYYGAKATLNVWEPKIQNTNEFSLSQIWLLGGSFGQDLNSIEAGWQVSPDLYGDNNTRLFTYWTSDAYQATGCYNLLCSGFIQINSDIAMGASISPVSGYRNSQYDISILIWKDPKEGHWWMQFGNGYVLGYWPSFLFSYLTESASMIEWGGEVVNSQSEGHHTWTQMGSGHFPEEGFSKASYFRNIQVVDGSNNLKAPKGLGTFTEKSNCYDVQTGSNDDWGHYFYYGGPGKNKNCP

SEQ ID NO: 24181 - DNA, 1258 bp, Arabidopsis thaliana
  misc_feature (1)..(1258): Ceres Seq. ID no. 12577595
  misc_feature (1)..(1258): Ortholog of  Ceres SEQ ID NO 13598387 as cited in SEQ ID NO 62757
  misc_feature (1)..(1258): Ortholog of  Ceres SEQ ID NO 13662984 as cited in SEQ ID NO 64419
cctgtttttaggctcactcgtggactttttttaatttctttcctttgccatatttataaaataaaagagagagaaagaattttcaataattttcaacaagcaaagttcatgatggggaataagcgaaatctcggatttgtgatcttcttctgggctctggtggttgcagtagtagccacggccatcgagcatcgtcgcaatgagaggactaaaggcgtcaatggtcttgacaagatcatcatccgcgaccgtcgtggccgatctgctgaggtttacttgtatggaggtcaagtcagttcttggaaaaatgagaatggagaggagttacttgttatgagtagcaaggctatattccagcctccaacaccgattcgtggaggaattccagtattgtttccgcaatacagtaacaccggtccacttccctcacatggatttgtaagacagaggttctgggaggttgagactaaaccacctcctttgccatcactttctactgctcatgttgacctgatcgtaagatcatccaatgaggatttgaagatctggccgcataagtttgagtatagactgagagtagcattgggacatgatggagatttgacgttaacatctcgtgttaagaatactgatacaaaaccatttaacttcacatttgctcttcacccctacttcgctgtttccaatatcagtgaaatccatgtcgaaggattacacaacttggattaccttgaccaacaaaagaacagaacacgtttcactgatcatgagaaggttataactttcaatgctcaacttgacaggttgtacctaagcactccagatcaactaagaatcgtggaccataagaaaaagaagactattgttgtacacaaggagggacaagttgatgccgtggtgtggaatccatgggacaagaaagtatccgatttgggagttgaagattataagcattttgtaacggtggaaagcgcggctgtcgctaaaccaatcacagtgaaccccggcaaagaatggaaaggaatactccatgtgtctgtggttccttcaaatcggaaagcttgaccctataaaagtcttgcattcatcatcctcatcctttaaaaaaaaacttaaaactgtctttattaaagtatacttaatgttcccgagagacatcacatggtgaacacaaagttagttgggttccaaactggactcttggccagttttattgttttgtaactttagcattcatgaataaaaaagtgcgttaatc

SEQ ID NO: 24182 - protein, 354 aa, Arabidopsis thaliana
  peptide (1)..(354): Ceres Seq. ID no. 12577596
PVFRLTRGLFLISFLCHIYKIKERERIFNNFQQAKFMMGNKRNLGFVIFFWALVVAVVATAIEHRRNERTKGVNGLDKIIIRDRRGRSAEVYLYGGQVSSWKNENGEELLVMSSKAIFQPPTPIRGGIPVLFPQYSNTGPLPSHGFVRQRFWEVETKPPPLPSLSTAHVDLIVRSSNEDLKIWPHKFEYRLRVALGHDGDLTLTSRVKNTDTKPFNFTFALHPYFAVSNISEIHVEGLHNLDYLDQQKNRTRFTDHEKVITFNAQLDRLYLSTPDQLRIVDHKKKKTIVVHKEGQVDAVVWNPWDKKVSDLGVEDYKHFVTVESAAVAKPITVNPGKEWKGILHVSVVPSNRKA

SEQ ID NO: 24183 - protein, 318 aa, Arabidopsis thaliana
  peptide (1)..(318): Ceres Seq. ID no. 12577597
MMGNKRNLGFVIFFWALVVAVVATAIEHRRNERTKGVNGLDKIIIRDRRGRSAEVYLYGGQVSSWKNENGEELLVMSSKAIFQPPTPIRGGIPVLFPQYSNTGPLPSHGFVRQRFWEVETKPPPLPSLSTAHVDLIVRSSNEDLKIWPHKFEYRLRVALGHDGDLTLTSRVKNTDTKPFNFTFALHPYFAVSNISEIHVEGLHNLDYLDQQKNRTRFTDHEKVITFNAQLDRLYLSTPDQLRIVDHKKKKTIVVHKEGQVDAVVWNPWDKKVSDLGVEDYKHFVTVESAAVAKPITVNPGKEWKGILHVSVVPSNRKA

SEQ ID NO: 24184 - protein, 317 aa, Arabidopsis thaliana
  peptide (1)..(317): Ceres Seq. ID no. 12577598
MGNKRNLGFVIFFWALVVAVVATAIEHRRNERTKGVNGLDKIIIRDRRGRSAEVYLYGGQVSSWKNENGEELLVMSSKAIFQPPTPIRGGIPVLFPQYSNTGPLPSHGFVRQRFWEVETKPPPLPSLSTAHVDLIVRSSNEDLKIWPHKFEYRLRVALGHDGDLTLTSRVKNTDTKPFNFTFALHPYFAVSNISEIHVEGLHNLDYLDQQKNRTRFTDHEKVITFNAQLDRLYLSTPDQLRIVDHKKKKTIVVHKEGQVDAVVWNPWDKKVSDLGVEDYKHFVTVESAAVAKPITVNPGKEWKGILHVSVVPSNRKA

SEQ ID NO: 24185 - DNA, 1187 bp, Arabidopsis thaliana
  misc_feature (1)..(1187): Ceres Seq. ID no. 12324987
  misc_feature (1)..(1187): Ortholog of  Ceres SEQ ID NO 12583421 as cited in SEQ ID NO 56410
  misc_feature (1)..(1187): Ortholog of  Ceres SEQ ID NO 15176407 as cited in SEQ ID NO 59620
  misc_feature (1)..(1187): Ortholog of  Ceres SEQ ID NO 13596876 as cited in SEQ ID NO 62696
  misc_feature (1)..(1187): Ortholog of  Ceres SEQ ID NO 13655442 as cited in SEQ ID NO 64359
accgttgaacactttcccgagaaaagcttctctcatcttttattttcccggaaaaaaataatcaaacttttactctcttccgatctcctttccttgtacatctagatccaagcggtatcgatggctcgacgtggattattgatttcgttcttcgctatcttctccgtcctgcttcaatcttccacttctctgatcagttcttctagcgtcttcgtcaatccttccaaagtcaagcaggtttcatcgaaacccagggcgtttgtgtatgaagggtttctcacggaattggaatgtgatcatatggtctcccttgcaaaagcgagcctgaagagatctgctgttgctgataatgatagtggagagagcaaattcagcgaggttcgaaccagctctggcacctttatctccaaaggaaaggatcccattgtttctggtatagaagataagatctccacttggacatttcttccaaaagaaaacggggaagacattcaggtattgagatacgagcacggccaaaaatacgatgctcactttgattactttcatgacaaagtcaacattgtccgtggtggacatcgcatggcaacaattcttatgtatctatccaatgtgacgaaaggtggagaaactgtattccctgatgcagagataccttctcgccgagtactatctgaaaataaagaagacctttctgattgtgccaagagaggaattgctgtgaaaccaaggaaaggggatgctttgttgttcttcaacctccacccagacgcaatcccggacccattgagccttcacggtggatgtcctgtgatagaaggagagaaatggtcggcaaccaagtggatccacgtagactcatttgataggatcgtgacaccaagcggaaactgcacggatatgaacgagagctgtgagagatgggcagttcttggggaatgcacaaagaatccagagtacatggttggaactacagagcttcctggctattgcaggcgaagctgtaaggcttgctagactttattttacctcttctttgtcttattatgtgcctttactctcaaagttttctgtttttttccgagtttctcttagagttgttgtcgttgatgaaatttgttctaaggggagttctgtaaaactatactgttcctgaaaagaatataatgtaaacacatagattcagt

SEQ ID NO: 24186 - protein, 298 aa, Arabidopsis thaliana
  peptide (1)..(298): Ceres Seq. ID no. 12324988
MARRGLLISFFAIFSVLLQSSTSLISSSSVFVNPSKVKQVSSKPRAFVYEGFLTELECDHMVSLAKASLKRSAVADNDSGESKFSEVRTSSGTFISKGKDPIVSGIEDKISTWTFLPKENGEDIQVLRYEHGQKYDAHFDYFHDKVNIVRGGHRMATILMYLSNVTKGGETVFPDAEIPSRRVLSENKEDLSDCAKRGIAVKPRKGDALLFFNLHPDAIPDPLSLHGGCPVIEGEKWSATKWIHVDSFDRIVTPSGNCTDMNESCERWAVLGECTKNPEYMVGTTELPGYCRRSCKAC

SEQ ID NO: 24187 - protein, 238 aa, Arabidopsis thaliana
  peptide (1)..(238): Ceres Seq. ID no. 12324989
MVSLAKASLKRSAVADNDSGESKFSEVRTSSGTFISKGKDPIVSGIEDKISTWTFLPKENGEDIQVLRYEHGQKYDAHFDYFHDKVNIVRGGHRMATILMYLSNVTKGGETVFPDAEIPSRRVLSENKEDLSDCAKRGIAVKPRKGDALLFFNLHPDAIPDPLSLHGGCPVIEGEKWSATKWIHVDSFDRIVTPSGNCTDMNESCERWAVLGECTKNPEYMVGTTELPGYCRRSCKAC

SEQ ID NO: 24188 - DNA, 1322 bp, Arabidopsis thaliana
  misc_feature (1)..(1322): Ceres Seq. ID no. 13486960
  misc_feature (1)..(1322): Ortholog of  Ceres SEQ ID NO 14304838 as cited in SEQ ID NO 59750
ctctctcgatcttactcaattttgcgtttctgcttttcattttctctcaagaagcgtaaatggcgaacaatggacctaactgggacggattactcaaatggagcctctcacattccgatggagcttcctcttctagccgtataagtgaggaagatcgacaatggtttgtggaagctatgcaagcacatacaatcgattcaatctctcgtatgaaagtaatatctcaaatcatgaagatgcctgaacaagtcttggaggctcaaggagttacacctgatgatcttgaaggaatgttggctgagctgcaggaacacgtcgagtcgatagatttggccaatgatcttcactccattggaggtttggttcctctccttagctatctcaagaactctaatgcgaaaattcgagcaaagtctgccgatgttttgactacggttgtccaaaacaatccaagaagccagcaacttgttatggaagcaaatgggttcgaaccattattaactaactttattgctgatcctgacattagagtccggaccaaggcactcggggctatatcttctcttatccgtaacaaccaacccgggattacagcattccgtctggcaaatggttatgctggcctgcgagacgctttggtctctgataccgttagattccaaagaaaagcgttgaacttgcttcactatcttctccaagaaagcaactcagactgtaaaatcgttagagatcttggattccctcgcataatgatccacctagcatccaaccaagattttgaagttcgggaattcgctcttcgtggtctcctagagcttgcccgtgaagaatctgtgagaaaccttgatagaggggatgtgaatctaagacagcttcttgaggagagaacaagacgaataattgtgatgtcggacgaagatctttgtgcagctagagaagaaagacagctagtggatagtctttggaccgtgtgttatgatgaaccgtcccttctaagagaaagaggtctggtctacctcccttctgacgacgagctggctcctgatgtggttagggaccgctttgaacctcctctaagggcttgggctgcaagacgacatgatgaaacgagtgaatccccggttccacttcttcttggtcctgcaccgtgatctcgttcaaccaaattattagattttgcagttatcaacaaatcagctttgctttagaatttctctagctcttgtttatgtatatctgagcgacaacaagacgctattaaagagattatctgtgttctgtttctgtaatacaaatctacactcatggacttcaagttctac

SEQ ID NO: 24189 - protein, 363 aa, Arabidopsis thaliana
  peptide (1)..(363): Ceres Seq. ID no. 13486961
MANNGPNWDGLLKWSLSHSDGASSSSRISEEDRQWFVEAMQAHTIDSISRMKVISQIMKMPEQVLEAQGVTPDDLEGMLAELQEHVESIDLANDLHSIGGLVPLLSYLKNSNAKIRAKSADVLTTVVQNNPRSQQLVMEANGFEPLLTNFIADPDIRVRTKALGAISSLIRNNQPGITAFRLANGYAGLRDALVSDTVRFQRKALNLLHYLLQESNSDCKIVRDLGFPRIMIHLASNQDFEVREFALRGLLELAREESVRNLDRGDVNLRQLLEERTRRIIVMSDEDLCAAREERQLVDSLWTVCYDEPSLLRERGLVYLPSDDELAPDVVRDRFEPPLRAWAARRHDETSESPVPLLLGPAP

SEQ ID NO: 24190 - protein, 324 aa, Arabidopsis thaliana
  peptide (1)..(324): Ceres Seq. ID no. 13486962
MQAHTIDSISRMKVISQIMKMPEQVLEAQGVTPDDLEGMLAELQEHVESIDLANDLHSIGGLVPLLSYLKNSNAKIRAKSADVLTTVVQNNPRSQQLVMEANGFEPLLTNFIADPDIRVRTKALGAISSLIRNNQPGITAFRLANGYAGLRDALVSDTVRFQRKALNLLHYLLQESNSDCKIVRDLGFPRIMIHLASNQDFEVREFALRGLLELAREESVRNLDRGDVNLRQLLEERTRRIIVMSDEDLCAAREERQLVDSLWTVCYDEPSLLRERGLVYLPSDDELAPDVVRDRFEPPLRAWAARRHDETSESPVPLLLGPAP

SEQ ID NO: 24191 - protein, 313 aa, Arabidopsis thaliana
  peptide (1)..(313): Ceres Seq. ID no. 13486963
MKVISQIMKMPEQVLEAQGVTPDDLEGMLAELQEHVESIDLANDLHSIGGLVPLLSYLKNSNAKIRAKSADVLTTVVQNNPRSQQLVMEANGFEPLLTNFIADPDIRVRTKALGAISSLIRNNQPGITAFRLANGYAGLRDALVSDTVRFQRKALNLLHYLLQESNSDCKIVRDLGFPRIMIHLASNQDFEVREFALRGLLELAREESVRNLDRGDVNLRQLLEERTRRIIVMSDEDLCAAREERQLVDSLWTVCYDEPSLLRERGLVYLPSDDELAPDVVRDRFEPPLRAWAARRHDETSESPVPLLLGPAP

SEQ ID NO: 24192 - DNA, 947 bp, Arabidopsis thaliana
  misc_feature (1)..(947): Ceres Seq. ID no. 12321529
  misc_feature (1)..(947): Ortholog of  Ceres SEQ ID NO 14313060 as cited in SEQ ID NO 59447
  misc_feature (1)..(947): Ortholog of  Ceres SEQ ID NO 12624676 as cited in SEQ ID NO 61197
acctaacgcagattcttcttctctaccatattcgttgaaaccagagaagatggtgggtgtgtcgccgaagatcgctccgtcgatgttgtcatcggactttgcaaatcttgccgcggaggctaagcggatgatcgatttgggcgccaattggcttcacatggacattatggacgggcattttgtttctaacctaacgattggtgctcctgtcatcgagagtttgaggaagcacacaaatgcatatcttgattgccacttaatggtgacgaaccccatggattatgtggatcagatggctaaagctggggcgtctggtttcacattccacgttgaggtggcccaagagaattggcaagaacttgtgaagaagattaaggctgctgggatgaggccaggtgtggctctaaagcctggaacacctgttgaacaagtctatcctctggtcgaaggtacaaatccggtcgaaatggttcttgtgatgactgtggagcctggatttggaggccagaagttcatgcccagcatgatggacaaggtcagggcattgaggaacaagtacccaacacttgatattgaggtggacggcggcttaggcccttccacaatcgatgcagcagctgcagctggagccaactgtatcgtcgcaggaagttcagtgtttggagctccgaagcctggggacgtcatatcccttttgcgggctagtgttgagaaagcacaaccctccacttaaggaagttggtgccctaactctatgagccaaggtcttaagctaatacttttttatttctttgaaatggaataaaccttagatcttagttacttgttatacaattaaaatgtgtctgagagcttttgccctagcgatgaaattccacaagaaaatcaccggagatagaattttttgttaagaaattgtttattatgtagcagttacattttagtct

SEQ ID NO: 24193 - protein, 243 aa, Arabidopsis thaliana
  peptide (1)..(243): Ceres Seq. ID no. 12321530
PNADSSSLPYSLKPEKMVGVSPKIAPSMLSSDFANLAAEAKRMIDLGANWLHMDIMDGHFVSNLTIGAPVIESLRKHTNAYLDCHLMVTNPMDYVDQMAKAGASGFTFHVEVAQENWQELVKKIKAAGMRPGVALKPGTPVEQVYPLVEGTNPVEMVLVMTVEPGFGGQKFMPSMMDKVRALRNKYPTLDIEVDGGLGPSTIDAAAAAGANCIVAGSSVFGAPKPGDVISLLRASVEKAQPST

SEQ ID NO: 24194 - protein, 227 aa, Arabidopsis thaliana
  peptide (1)..(227): Ceres Seq. ID no. 12321531
MVGVSPKIAPSMLSSDFANLAAEAKRMIDLGANWLHMDIMDGHFVSNLTIGAPVIESLRKHTNAYLDCHLMVTNPMDYVDQMAKAGASGFTFHVEVAQENWQELVKKIKAAGMRPGVALKPGTPVEQVYPLVEGTNPVEMVLVMTVEPGFGGQKFMPSMMDKVRALRNKYPTLDIEVDGGLGPSTIDAAAAAGANCIVAGSSVFGAPKPGDVISLLRASVEKAQPST

SEQ ID NO: 24195 - protein, 216 aa, Arabidopsis thaliana
  peptide (1)..(216): Ceres Seq. ID no. 12321532
MLSSDFANLAAEAKRMIDLGANWLHMDIMDGHFVSNLTIGAPVIESLRKHTNAYLDCHLMVTNPMDYVDQMAKAGASGFTFHVEVAQENWQELVKKIKAAGMRPGVALKPGTPVEQVYPLVEGTNPVEMVLVMTVEPGFGGQKFMPSMMDKVRALRNKYPTLDIEVDGGLGPSTIDAAAAAGANCIVAGSSVFGAPKPGDVISLLRASVEKAQPST

SEQ ID NO: 24196 - DNA, 643 bp, Arabidopsis thaliana
  misc_feature (1)..(643): Ceres Seq. ID no. 13645876
  misc_feature (1)..(643): Ortholog of  Ceres SEQ ID NO 13584968 as cited in SEQ ID NO 64327
tgattctcttatccatcaatcgttacttcgtttcttctctatcaccaggaaaaaagaagaagatagctcctgaagacaaaaatggcggtttctctcccgaactcgtttcttcagattagcccatgtgttccttctctgcaattaagaaagccggtgatggcggcagtgaaaggaggaaaacaatcggtgagaagaagcagcaatacggtggttcagataacgtgtcgtaagaaggaattgcatcctgaattccacgaagacgcaaaggtttactgcaatggagagctggtgatgactacaggaggaacaaagaaagagtatgtggttgatgtatggtcaggtaaccatccgttttacctcgggaatcgttcggctttgatggttgatgctgatcaagttgagaagtttcgtaagaggttcgctgggctttctgagattatggagattcctgtgcttaaaggagaaatcattatgcctactaagaaaagtaaaggtcccaaagggaagaagaaatgatgagtcttttctggtaaagcttatgtctttgaatttgttgtcttttcaattgaagtcgagatactgcttaggctgttaaaaattgtatgtgaattttcttctgaatgctattggttatgctttctct

SEQ ID NO: 24197 - protein, 144 aa, Arabidopsis thaliana
  peptide (1)..(144): Ceres Seq. ID no. 13645877
MAVSLPNSFLQISPCVPSLQLRKPVMAAVKGGKQSVRRSSNTVVQITCRKKELHPEFHEDAKVYCNGELVMTTGGTKKEYVVDVWSGNHPFYLGNRSALMVDADQVEKFRKRFAGLSEIMEIPVLKGEIIMPTKKSKGPKGKKK

SEQ ID NO: 24198 - protein, 119 aa, Arabidopsis thaliana
  peptide (1)..(119): Ceres Seq. ID no. 13645878
MAAVKGGKQSVRRSSNTVVQITCRKKELHPEFHEDAKVYCNGELVMTTGGTKKEYVVDVWSGNHPFYLGNRSALMVDADQVEKFRKRFAGLSEIMEIPVLKGEIIMPTKKSKGPKGKKK

SEQ ID NO: 24199 - protein, 74 aa, Arabidopsis thaliana
  peptide (1)..(74): Ceres Seq. ID no. 13645879
MTTGGTKKEYVVDVWSGNHPFYLGNRSALMVDADQVEKFRKRFAGLSEIMEIPVLKGEIIMPTKKSKGPKGKKK

SEQ ID NO: 24200 - DNA, 1537 bp, Arabidopsis thaliana
  misc_feature (1)..(1537): Ceres Seq. ID no. 13490783
  misc_feature (1)..(1537): Ortholog of  Ceres SEQ ID NO 14307831 as cited in SEQ ID NO 54732
  misc_feature (1)..(1537): Ortholog of  Ceres SEQ ID NO 13598326 as cited in SEQ ID NO 68812
ggccacgttttttttttttttgaaagtcgaaatcaaatcacattaccccaaatctctcttctttgaactttaatcctcttctctattgcatgctttaagctccaaacccaaaacgcaggaaaatctctttgacagtttttggttttagatgggaccaatcaaaacgataaagaagaagaagagagcagagaagaaggttgatcggaacgtattgcttgctgctactgctgctgctacttccgcatccgccgccgctgctcttaataacaacgacgacgacgacgactcatcatctcagtctttggattggtgggatggattctctcgccgtatttatggagggtcaacggatccaaagacatttgagtcagttttcaaaatatcaaggaagacatttgactacatttgctctcttgtgaaagccgatttcacagcaaagcctgcaaatttcagcgactcaaatgggaaccctttatctctcaatgaccgtgtagctgtggcgcttaggaggcttggctctggtgaatctctctctgtcattggagagacctttgggatgaaccagtcaacagtctcccaaatcacttggcgctttgttgaatcaatggaagagagagcaatacaccatctctcatggccttcgaaactcgatgaaataaaatcaaagtttgagaaaatctcaggtcttcctaactgctgtggcgctatcgacattacacatattgttatgaaccttcctgctgtggaaccgtcaaacaaagtttggttggacggagaaaagaacttcagcatgactttgcaggccgtagtagacccggacatgagattcctcgatgtaatagctggttggcctgggagtttaaatgatgatgttgtcctcaagaactcaggattctacaaactagttgagaaagggaagagactgaacggggaaaagttaccgctctcagaaagaaccgagctaagagaatacatagtaggtgattcaggttttcctcttcttccatggcttctcactccataccaaggcaaacccacgtcgcttcctcaaaccgagttcaacaaaagacactccgaggcaacaaaagccgcgcagatggcactatcgaagcttaaagacaggtggaggataataaacggggtaatgtggatgcctgatagaaaccggttaccaaggataatctttgtctgttgcttgctgcacaacattattatcgatatggaggatcaaactttggatgaccaacctttgtctcagcaacatgacatgaactacagacaacgaagctgcaagcttgccgatgaggcttcatcggtcttgagagatgaactctctgaccaactgtgtggaaaaaattcatcagcttgattactctctcccggttcttgtggtctttctatgaaagcttcatttgcttctttttccttctggtaattttgtttagcataacattttatcgtttgatttgatctattgacatattcttttatgggacaaacaaaaatgtgtatcttatgaatgttatttttaatttat

SEQ ID NO: 24201 - protein, 406 aa, Arabidopsis thaliana
  peptide (1)..(406): Ceres Seq. ID no. 13490784
MGPIKTIKKKKRAEKKVDRNVLLAATAAATSASAAAALNNNDDDDDSSSQSLDWWDGFSRRIYGGSTDPKTFESVFKISRKTFDYICSLVKADFTAKPANFSDSNGNPLSLNDRVAVALRRLGSGESLSVIGETFGMNQSTVSQITWRFVESMEERAIHHLSWPSKLDEIKSKFEKISGLPNCCGAIDITHIVMNLPAVEPSNKVWLDGEKNFSMTLQAVVDPDMRFLDVIAGWPGSLNDDVVLKNSGFYKLVEKGKRLNGEKLPLSERTELREYIVGDSGFPLLPWLLTPYQGKPTSLPQTEFNKRHSEATKAAQMALSKLKDRWRIINGVMWMPDRNRLPRIIFVCCLLHNIIIDMEDQTLDDQPLSQQHDMNYRQRSCKLADEASSVLRDELSDQLCGKNSSA

SEQ ID NO: 24202 - protein, 270 aa, Arabidopsis thaliana
  peptide (1)..(270): Ceres Seq. ID no. 13490785
MNQSTVSQITWRFVESMEERAIHHLSWPSKLDEIKSKFEKISGLPNCCGAIDITHIVMNLPAVEPSNKVWLDGEKNFSMTLQAVVDPDMRFLDVIAGWPGSLNDDVVLKNSGFYKLVEKGKRLNGEKLPLSERTELREYIVGDSGFPLLPWLLTPYQGKPTSLPQTEFNKRHSEATKAAQMALSKLKDRWRIINGVMWMPDRNRLPRIIFVCCLLHNIIIDMEDQTLDDQPLSQQHDMNYRQRSCKLADEASSVLRDELSDQLCGKNSSA

SEQ ID NO: 24203 - protein, 254 aa, Arabidopsis thaliana
  peptide (1)..(254): Ceres Seq. ID no. 13490786
MEERAIHHLSWPSKLDEIKSKFEKISGLPNCCGAIDITHIVMNLPAVEPSNKVWLDGEKNFSMTLQAVVDPDMRFLDVIAGWPGSLNDDVVLKNSGFYKLVEKGKRLNGEKLPLSERTELREYIVGDSGFPLLPWLLTPYQGKPTSLPQTEFNKRHSEATKAAQMALSKLKDRWRIINGVMWMPDRNRLPRIIFVCCLLHNIIIDMEDQTLDDQPLSQQHDMNYRQRSCKLADEASSVLRDELSDQLCGKNSSA

SEQ ID NO: 24204 - DNA, 1250 bp, Arabidopsis thaliana
  misc_feature (1)..(1250): Ceres Seq. ID no. 12385312
  misc_feature (1)..(1250): Ortholog of  Ceres SEQ ID NO 13594604 as cited in SEQ ID NO 52106
atgttcaaaaccgtttaacaataacaacaacaaaaagcttccttttttgttttttgagttttcgtcgatcgattggtttaaatcctgtcgtatcaatttgttctcgattctccgcgaccatgcaaatttagggtcttcgttttgtttgatgggcgcgaatatctcgggaggttcaccggagtttgaccggaacgatgacgtttactcgaggaaactcagattggtggatttacctgagaattgtgtagcgttgattatgacacggcttgatccacctgagatttgccggcttgctcgtctcaacaggatgttccgtcgcgcttcctcagctgatttcatttgggaatcaaagttgcctgcgaattatcgtgttattgcacacaaggtgttcgatgaaattactctgacgaaattaataaagaaagatctttatgcaaagcttagccagcctaatctcttcgacgatggcacaaaggaattgtggatagataagaacacgggtcgtctttgtttatctatttcttcaaaggcactaaggattactggaattgatgatcggagatactggagtcatatcccaactgatgaatccaggttccagtcagctgcttatgttcaacagatatggtggtttgaagtaggaggagagtttgagatccagtttccatctggaacatatagtctcttcttccgtatccagctcggtaaaacatcaaagaggcttggaaggaggatctgcaactctgaacacattcatggatgggacataaaacctgtaaggttccagctcgccacttcggacaaccaacaagctgtatcattgtgttatctgaacaacaaccctgggagctggagtcactatcacgttggagatttcaaagtgacaaatccagatgtatcaacaggaatcaaattctccatgactcaaatcgattgcactcacacgaaaggtgggctatgcatagactctgttcttatattacctaaagaatgtgcaaaagaagtcattggatcacaatagttttgtagatatagagtgagattgtttgtaaagggtgagagattatttttcagtgaaacattcactatactgtttttttttcttgatctgggctgcattctcaagatgaatctcagatctggaactgtgtacacatggttgggttgtctctagttttgtctgtagttacaaggtggtcgtgattgtaaatactacttctccattcagagattattacacttgcttgctt

SEQ ID NO: 24205 - protein, 339 aa, Arabidopsis thaliana
  peptide (1)..(339): Ceres Seq. ID no. 12385313
CSKPFNNNNNKKLPFLFFEFSSIDWFKSCRINLFSILRDHANLGSSFCLMGANISGGSPEFDRNDDVYSRKLRLVDLPENCVALIMTRLDPPEICRLARLNRMFRRASSADFIWESKLPANYRVIAHKVFDEITLTKLIKKDLYAKLSQPNLFDDGTKELWIDKNTGRLCLSISSKALRITGIDDRRYWSHIPTDESRFQSAAYVQQIWWFEVGGEFEIQFPSGTYSLFFRIQLGKTSKRLGRRICNSEHIHGWDIKPVRFQLATSDNQQAVSLCYLNNNPGSWSHYHVGDFKVTNPDVSTGIKFSMTQIDCTHTKGGLCIDSVLILPKECAKEVIGSQ

SEQ ID NO: 24206 - protein, 290 aa, Arabidopsis thaliana
  peptide (1)..(290): Ceres Seq. ID no. 12385314
MGANISGGSPEFDRNDDVYSRKLRLVDLPENCVALIMTRLDPPEICRLARLNRMFRRASSADFIWESKLPANYRVIAHKVFDEITLTKLIKKDLYAKLSQPNLFDDGTKELWIDKNTGRLCLSISSKALRITGIDDRRYWSHIPTDESRFQSAAYVQQIWWFEVGGEFEIQFPSGTYSLFFRIQLGKTSKRLGRRICNSEHIHGWDIKPVRFQLATSDNQQAVSLCYLNNNPGSWSHYHVGDFKVTNPDVSTGIKFSMTQIDCTHTKGGLCIDSVLILPKECAKEVIGSQ

SEQ ID NO: 24207 - protein, 254 aa, Arabidopsis thaliana
  peptide (1)..(254): Ceres Seq. ID no. 12385315
MTRLDPPEICRLARLNRMFRRASSADFIWESKLPANYRVIAHKVFDEITLTKLIKKDLYAKLSQPNLFDDGTKELWIDKNTGRLCLSISSKALRITGIDDRRYWSHIPTDESRFQSAAYVQQIWWFEVGGEFEIQFPSGTYSLFFRIQLGKTSKRLGRRICNSEHIHGWDIKPVRFQLATSDNQQAVSLCYLNNNPGSWSHYHVGDFKVTNPDVSTGIKFSMTQIDCTHTKGGLCIDSVLILPKECAKEVIGSQ

SEQ ID NO: 24208 - DNA, 1394 bp, Arabidopsis thaliana
  misc_feature (1)..(1394): Ceres Seq. ID no. 12394405
  misc_feature (1)..(1394): Ortholog of  Ceres SEQ ID NO 13654928 as cited in SEQ ID NO 62546
aaagatgaaaagtaatacccttcctctcttgccctttttgctggtctgggtgaaacatagaaaagtttctcttgctcaagttaatgataaaaggttgttgtaggatttgttgctctggctctggtggtaggtctatgaaatcaacccatatcgtgaatggactgcaacatggtatcttcgtcccagtgggattgggagcatttgatcatgtccaatccgtcaaggactgaagatgacagcaaacagctacctactgagtgggaaattgaaaaaggtgaaggaattgaatctatagttccacatttctcaggccttgagagagtcagtagtggctctgccaccagcttctggcacactgctgtatcgaaaagctcacagtcgacctctatcaactcatcatctcccgaagccaaacgatgcaagcttgcatcagaaagttcccctggagattcttgcagcaacatagactttgtccaggtgaaggctcccacagctctcgaggtatccgttgcctcagctgaatcagatctttgtttaaaactaggaaagcggacatactctgaagaatactggggtagaaacaataatgaaatttcagcggtttctatgaagttgttaactccatctgttgtcgctgggaaatccaaattgtgtggtcagagcatgccagtcccgcgttgccaaattgatggctgtgaactggatctctcatctgctaagggttatcatcgtaagcacaaagtctgcgaaaagcattcaaagtgcccaaaagttagcgtgagtggcctggaacgtcggttctgccaacagtgtagcaggttccatgctgtctctgaatttgatgagaagaaacgaagctgccgaaaacgtctttctcatcataatgcgaggcgtcgtaagccacaaggagtattttcaatgaatcccgagagggtgtatgatcgaagacagcatacaaatatgttgtggaatggggtgtcccttaacgcgagatctgaagaaatgtatgaatggggtaataacacttatgatacaaagcctagacaaacggaaaaaagctttactctgagcttccagagaggtaatggctctgaggaccagctggttgctagtagcagccgtatgttctctacatctcaaacctcaggtgggttcccagcaggaaagtccaagtttcaacttcatggcgaagatgtgggagaatactcaggagtcctccatgaatctcaagatatccaccgtgctctctctcttctgtcaacctcttcggatcccctggcccaaccacatgtgcagccattttctctactctgttcatatgatgttgtaccaaaatagatgagtaagtaatgtgtaatttgtaaacctgttactcagttggtggatacttttcc

SEQ ID NO: 24209 - protein, 393 aa, Arabidopsis thaliana
  peptide (1)..(393): Ceres Seq. ID no. 12394406
MDCNMVSSSQWDWEHLIMSNPSRTEDDSKQLPTEWEIEKGEGIESIVPHFSGLERVSSGSATSFWHTAVSKSSQSTSINSSSPEAKRCKLASESSPGDSCSNIDFVQVKAPTALEVSVASAESDLCLKLGKRTYSEEYWGRNNNEISAVSMKLLTPSVVAGKSKLCGQSMPVPRCQIDGCELDLSSAKGYHRKHKVCEKHSKCPKVSVSGLERRFCQQCSRFHAVSEFDEKKRSCRKRLSHHNARRRKPQGVFSMNPERVYDRRQHTNMLWNGVSLNARSEEMYEWGNNTYDTKPRQTEKSFTLSFQRGNGSEDQLVASSSRMFSTSQTSGGFPAGKSKFQLHGEDVGEYSGVLHESQDIHRALSLLSTSSDPLAQPHVQPFSLLCSYDVVPK

SEQ ID NO: 24210 - protein, 389 aa, Arabidopsis thaliana
  peptide (1)..(389): Ceres Seq. ID no. 12394407
MVSSSQWDWEHLIMSNPSRTEDDSKQLPTEWEIEKGEGIESIVPHFSGLERVSSGSATSFWHTAVSKSSQSTSINSSSPEAKRCKLASESSPGDSCSNIDFVQVKAPTALEVSVASAESDLCLKLGKRTYSEEYWGRNNNEISAVSMKLLTPSVVAGKSKLCGQSMPVPRCQIDGCELDLSSAKGYHRKHKVCEKHSKCPKVSVSGLERRFCQQCSRFHAVSEFDEKKRSCRKRLSHHNARRRKPQGVFSMNPERVYDRRQHTNMLWNGVSLNARSEEMYEWGNNTYDTKPRQTEKSFTLSFQRGNGSEDQLVASSSRMFSTSQTSGGFPAGKSKFQLHGEDVGEYSGVLHESQDIHRALSLLSTSSDPLAQPHVQPFSLLCSYDVVPK

SEQ ID NO: 24211 - protein, 376 aa, Arabidopsis thaliana
  peptide (1)..(376): Ceres Seq. ID no. 12394408
MSNPSRTEDDSKQLPTEWEIEKGEGIESIVPHFSGLERVSSGSATSFWHTAVSKSSQSTSINSSSPEAKRCKLASESSPGDSCSNIDFVQVKAPTALEVSVASAESDLCLKLGKRTYSEEYWGRNNNEISAVSMKLLTPSVVAGKSKLCGQSMPVPRCQIDGCELDLSSAKGYHRKHKVCEKHSKCPKVSVSGLERRFCQQCSRFHAVSEFDEKKRSCRKRLSHHNARRRKPQGVFSMNPERVYDRRQHTNMLWNGVSLNARSEEMYEWGNNTYDTKPRQTEKSFTLSFQRGNGSEDQLVASSSRMFSTSQTSGGFPAGKSKFQLHGEDVGEYSGVLHESQDIHRALSLLSTSSDPLAQPHVQPFSLLCSYDVVPK

SEQ ID NO: 24212 - DNA, 1218 bp, Arabidopsis thaliana
  misc_feature (1)..(1218): Ceres Seq. ID no. 12370378
  misc_feature (1)..(1218): Ortholog of  Ceres SEQ ID NO 12608945 as cited in SEQ ID NO 51209
  misc_feature (1)..(1218): Ortholog of  Ceres SEQ ID NO 12619999 as cited in SEQ ID NO 66123
  misc_feature (1)..(1218): Ortholog of  Ceres SEQ ID NO 13656436 as cited in SEQ ID NO 69154
gtataaaaaagttgtttctttcttctctgtttttttttgctttcgtcttcaagagagagagagagagagatacaaagagagaaatttggttgtttgttgacggaagcttcttcggtctctcttctccgtcttacgattgtcaacgcgtggttccatcttcaattttgtttctattttagcagaagtttctcgagcttcaaatactgtttcagatcaatcaatcagtcaatcatggctagctctggaaacaagaacatcaacgccaaattggtattactaggagatgttggagctggaaaatcaagtcttgtgctacggtttgtgaaagatcagtttgttgaatttcaggaatcaaccattggtgcagcttttttctctcaaacattggctgtgaatgatgcgactgtgaagtttgagatatgggatacagctggtcaggaacgataccacagtttggctccaatgtactacaggggtgcagctgctgctattattgtctttgacattactaatcaagcctcatttgagagggcgaagaaatgggttcaggaactgcaggcacaaggtaaccctaatatggtgatggctcttgctggaaacaaagctgatttattagacgcaaggaaggtgtctgcagaggaggcagagatatatgctcaagagaacagccttttctttatggaaacctcagcgaagaccgcaacaaatgtcaaagacatattctacgaaatagcgaaaaggctaccacgtgtacagccagctgaaaacccgacaggaatggttctcccaaacgggccaggggctacggcagtgagttcatcgtgttgtgcttagattcgtacctgaagagagatctcatttggttagtcacatagtagagaacatctgaactttcatgtgtttgcttcttcttcgtctttgttactttactttgcttgcattgacaacaacaacagtgtatatcatgatgatacttattctgcctttgtgaaatctgaagatatttgtatttggagagatttatatatatatatctcttttgtaattagaaaacaaaacttagtccgaaaaaaatgtgcttatctttcgtttatgttttaagtgaatgctcagatttataggcttattatcttttgtattacttaaatctccaaaatgttttttccattgttggaatgctgtaatatgaaagtatatatcaataaaagaagcaccttc

SEQ ID NO: 24213 - protein, 200 aa, Arabidopsis thaliana
  peptide (1)..(200): Ceres Seq. ID no. 12370379
MASSGNKNINAKLVLLGDVGAGKSSLVLRFVKDQFVEFQESTIGAAFFSQTLAVNDATVKFEIWDTAGQERYHSLAPMYYRGAAAAIIVFDITNQASFERAKKWVQELQAQGNPNMVMALAGNKADLLDARKVSAEEAEIYAQENSLFFMETSAKTATNVKDIFYEIAKRLPRVQPAENPTGMVLPNGPGATAVSSSCCA

SEQ ID NO: 24214 - protein, 123 aa, Arabidopsis thaliana
  peptide (1)..(123): Ceres Seq. ID no. 12370380
MYYRGAAAAIIVFDITNQASFERAKKWVQELQAQGNPNMVMALAGNKADLLDARKVSAEEAEIYAQENSLFFMETSAKTATNVKDIFYEIAKRLPRVQPAENPTGMVLPNGPGATAVSSSCCA

SEQ ID NO: 24215 - DNA, 1344 bp, Arabidopsis thaliana
  misc_feature (1)..(1344): Ceres Seq. ID no. 12482514
  misc_feature (1)..(1344): Ortholog of  Ceres SEQ ID NO 15171442 as cited in SEQ ID NO 51520
aatttttttgaccaaaagcaaaaacttaaaactggtttcagatctgaagtaaaagggttttgcttcggattctccggcgtcgtttaaatgatctctgacccatcttccttggcttaataattctggtccctccttttatctctttttactgttgatttatctgaatatgccacgctctttcttccacatgtttattctctcttcctttcttcaacacaagcgtctggactaaggaaagccaacaacaaaatctggtttcaagacggttggcaggagtttgtcaaccgtttctccattcggattggtttcagatacaaagttacagtctacattttcaatttatcctccacactctgagatcaaccaccattctagtagtgaagctcttatgcaaatggattccgcacagaatcagttcaacaaacgtgctcgattgtttgaagatcctgaactcaaagatgctaaggtcatttatccatcgaaccctgaatttactgaaccagtgaataaaggttatggcggttctacagccatccaaagctttttcaaagaatctaaagctgaagaaacgcccaaggtacttaagaagagaggaaggaagaagaagaatcctaatcccgaggaagtaaactcttcaactcccggtggagatgactcagagaaccgctcaaagttctacgagagtgcttctgctagaaagagaactgtaactgcagaggaaagagagagagccgtcaatgcagccaaaacattcgaaccaacaaatccttactttagagttgttctgcgaccatcatatctatacagaggttgcatcatgtacttgccatctgggtttgctgagaaatacctaagtgggatatctggtttcatcaagctccagctcggtgagaaacaatggccagtgaggtgcctctacaaagcagggagagctaagtttagccaaggatggtatgagttcacactcgagaacaatataggcgaaggagatgtatgtgtgtttgagctactcagaactcgggatttcgttctcgaagtcaccgcctttcgtgtcaatgagtatgtgtgaccaaaaaagatttccctttcatcagcgatcttgcaggtagctttccaaagttaaaattttatgtaggggtctcttaaccattctctctcttgcattggttgtctctgttctagtagtgttttgagtgaaatttcaggttcctatgtttggatgtggataagtatttgacgattataataacctctgagtgggaaactctttgtttgagtggtagctaggttcaaaagtagagttgtatatacttttatcttcatcaggataattatgtttatttg

SEQ ID NO: 24216 - protein, 226 aa, Arabidopsis thaliana
  peptide (1)..(226): Ceres Seq. ID no. 12482515
MQMDSAQNQFNKRARLFEDPELKDAKVIYPSNPEFTEPVNKGYGGSTAIQSFFKESKAEETPKVLKKRGRKKKNPNPEEVNSSTPGGDDSENRSKFYESASARKRTVTAEERERAVNAAKTFEPTNPYFRVVLRPSYLYRGCIMYLPSGFAEKYLSGISGFIKLQLGEKQWPVRCLYKAGRAKFSQGWYEFTLENNIGEGDVCVFELLRTRDFVLEVTAFRVNEYV

SEQ ID NO: 24217 - protein, 224 aa, Arabidopsis thaliana
  peptide (1)..(224): Ceres Seq. ID no. 12482516
MDSAQNQFNKRARLFEDPELKDAKVIYPSNPEFTEPVNKGYGGSTAIQSFFKESKAEETPKVLKKRGRKKKNPNPEEVNSSTPGGDDSENRSKFYESASARKRTVTAEERERAVNAAKTFEPTNPYFRVVLRPSYLYRGCIMYLPSGFAEKYLSGISGFIKLQLGEKQWPVRCLYKAGRAKFSQGWYEFTLENNIGEGDVCVFELLRTRDFVLEVTAFRVNEYV

SEQ ID NO: 24218 - DNA, 1833 bp, Arabidopsis thaliana
  misc_feature (1)..(1833): Ceres Seq. ID no. 13580705
  misc_feature (1)..(1833): Ortholog of  Ceres SEQ ID NO 15171040 as cited in SEQ ID NO 55332
acaatcatttgattatttcctcctctccgtatctgtgtctctcttctcttgatcttttagtgttcttgctttgtcgcttcaacgcttaagtttggatttgtgtgagtctgcataatcatggcgaggaagatgcttgttgatggtgagattgataaggtggcggctgatgaagccaacgcgacgcactatgattttgatttgtttgtcatcggtgccgggagtggcggtgttcgtgctgctaggttttcggctaatcatggcgctaaggttggtatttgtgagcttccatttcaccctattagctctgaggagattggaggcgttggtggaacctgtgttatccgtggttgtgttcctaaaaagattctcgtctatggagctacttacggtggtgaacttgaggatgctaaaaattatgggtgggaaataaatgagaaagtcgacttcacatggaagaagcttttgcaaaagaagactgatgagatactaagactgaataatatctacaagcggttattggcaaatgctgcggtgaaattgtatgaaggtgaaggaagagtagttggtcccaacgaagtggaggtgagacaaatagatggcacaaaaataagttataccgcaaagcacatattgattgccactggcagtcgggcgcaaaagcctaatattcctggacatgagctggctattacatctgatgaagctttgagcttggaagaatttcccaagcgtgctatagtgcttggaggagggtatattgctgtggagtttgcatcaatatggcgtggaatgggtgctactgtagatttattcttcaggaaggaacttccgctaaggggttttgatgacgaaatgagggcactagttgctagaaatcttgaaggaaggggcgttaatctgcatccacaaacaagtttgactcagttgacaaaaacagaccaggggatcaaagtcatatcgtcccatggggaggaattcgtggcagatgtcgtcctatttgctactggcagaagtcctaataccaaaagattgaatttagaagctgttggtgttgaacttgatcaggctggagctgtgaaggttgacgagtattcacgaactaatatacctagcatatgggctgtaggagatgccacaaaccgaattaaccttacacctgttgcgttaatggaggccacctgttttgcgaacactgcttttggtggaaagcctactaaagcagaatacagcaatgtcgcctgtgctgtattttgcataccaccactagctgtagtgggtctcagcgaagaagaagcagtagaacaagcaaccggtgatattctggtcttcacctcaggctttaatccaatgaagaacaccatttctggacgccaggaaaagacattgatgaagctaatagttgatgagaagagtgataaggttattggagcatccatgtgcggtcctgatgcagctgagatcatgcaggggattgcaattgcgctcaagtgtggagcaaccaaagcacaatttgatagcacggttgggatacatccatcttctgcagaggaatttgtgacaatgcgcagtgtgaccagacgcattgcccacaaacccaaacctaagacaaatctatgaaccgcaaaatataaagagctatatagcatgaaaactcggtacacttaatttgatcaaagagtcagacaacgatgagtttaatcatactcgtgtcccaataaaggatttgtaatttttgtttgtttgtatgatgcttctcttcttacttacttgagaaaacatcaaggtttcttctcttattgcttagtggaactttattacaaagaattattctct

SEQ ID NO: 24219 - protein, 499 aa, Arabidopsis thaliana
  peptide (1)..(499): Ceres Seq. ID no. 13580706
MARKMLVDGEIDKVAADEANATHYDFDLFVIGAGSGGVRAARFSANHGAKVGICELPFHPISSEEIGGVGGTCVIRGCVPKKILVYGATYGGELEDAKNYGWEINEKVDFTWKKLLQKKTDEILRLNNIYKRLLANAAVKLYEGEGRVVGPNEVEVRQIDGTKISYTAKHILIATGSRAQKPNIPGHELAITSDEALSLEEFPKRAIVLGGGYIAVEFASIWRGMGATVDLFFRKELPLRGFDDEMRALVARNLEGRGVNLHPQTSLTQLTKTDQGIKVISSHGEEFVADVVLFATGRSPNTKRLNLEAVGVELDQAGAVKVDEYSRTNIPSIWAVGDATNRINLTPVALMEATCFANTAFGGKPTKAEYSNVACAVFCIPPLAVVGLSEEEAVEQATGDILVFTSGFNPMKNTISGRQEKTLMKLIVDEKSDKVIGASMCGPDAAEIMQGIAIALKCGATKAQFDSTVGIHPSSAEEFVTMRSVTRRIAHKPKPKTNL

SEQ ID NO: 24220 - protein, 495 aa, Arabidopsis thaliana
  peptide (1)..(495): Ceres Seq. ID no. 13580707
MLVDGEIDKVAADEANATHYDFDLFVIGAGSGGVRAARFSANHGAKVGICELPFHPISSEEIGGVGGTCVIRGCVPKKILVYGATYGGELEDAKNYGWEINEKVDFTWKKLLQKKTDEILRLNNIYKRLLANAAVKLYEGEGRVVGPNEVEVRQIDGTKISYTAKHILIATGSRAQKPNIPGHELAITSDEALSLEEFPKRAIVLGGGYIAVEFASIWRGMGATVDLFFRKELPLRGFDDEMRALVARNLEGRGVNLHPQTSLTQLTKTDQGIKVISSHGEEFVADVVLFATGRSPNTKRLNLEAVGVELDQAGAVKVDEYSRTNIPSIWAVGDATNRINLTPVALMEATCFANTAFGGKPTKAEYSNVACAVFCIPPLAVVGLSEEEAVEQATGDILVFTSGFNPMKNTISGRQEKTLMKLIVDEKSDKVIGASMCGPDAAEIMQGIAIALKCGATKAQFDSTVGIHPSSAEEFVTMRSVTRRIAHKPKPKTNL

SEQ ID NO: 24221 - protein, 275 aa, Arabidopsis thaliana
  peptide (1)..(275): Ceres Seq. ID no. 13580708
MGATVDLFFRKELPLRGFDDEMRALVARNLEGRGVNLHPQTSLTQLTKTDQGIKVISSHGEEFVADVVLFATGRSPNTKRLNLEAVGVELDQAGAVKVDEYSRTNIPSIWAVGDATNRINLTPVALMEATCFANTAFGGKPTKAEYSNVACAVFCIPPLAVVGLSEEEAVEQATGDILVFTSGFNPMKNTISGRQEKTLMKLIVDEKSDKVIGASMCGPDAAEIMQGIAIALKCGATKAQFDSTVGIHPSSAEEFVTMRSVTRRIAHKPKPKTNL

SEQ ID NO: 24222 - DNA, 1198 bp, Arabidopsis thaliana
  misc_feature (1)..(1198): Ceres Seq. ID no. 12728802
  misc_feature (1)..(1198): Ortholog of  Ceres SEQ ID NO 15173907 as cited in SEQ ID NO 62356
  misc_feature (1)..(1198): Ortholog of  Ceres SEQ ID NO 13596519 as cited in SEQ ID NO 62572
  misc_feature (1)..(1198): Ortholog of  Ceres SEQ ID NO 12625108 as cited in SEQ ID NO 68102
ataagtaattgattttatatcacccatgtgcaggttgttaacacaagacgtaaacatgggtcatcttgggttcttagttatgattatggtaggagtcatggcttcttctgtgagcggctacggtggcggttggatcaacgctcacgccactttttacggtggtggtgatgcttccggcacaatgggtggtgcttgtggatatggtaatctatatagccaaggctacgggacgagcacggcggctctaagcacagctctcttcaacaatggacttagctgtggttcttgctttgagataagatgtgaaaacgatggtaaatggtgtttacctggctcaatcgttgtaaccgctacaaacttctgcccgccaaataacgcgttagcgaacaataatggcggttggtgtaatcctcctcttgaacactttgaccttgctcagcctgtttttcaacgcattgctcagtacagagctggaatcgtccctgtttcctacagaagggttccttgcaggagaagaggaggaataagattcacgataaacggccactcatacttcaaccttgtgctgatcacaaacgtcggtggtgccggagacgttcactcggcggcgatcaagggttcaagaacagtgtggcaagctatgtcaaggaactgggggcaaaattggcaaagcaactcttacctcaacggtcaagcactttcctttaaggtcaccaccagcgacggccgcacagttgtctccttcaacgccgctcctgccggctggtcttatggccagacttttgccggtggacagttccgttaaaaagggcaagttggttaatctctcttccatttatctaaagtaaactcatttgtgtggttatattggtctcttgaaaaaactcggttattgagagagtgatgcgtcgagggctcggttttgcagaaggccttgatgacgtctaatctttttttggacctctttatttttctttcttgaaactagtttttgttaagaaagaaaaaacaagttatagtagttaatgtattactgatgcagaggtggagttttaactaccacccgctagtagtagttatgagttttttattttaaggtgtgagagagagatggattatcaagatttgtcaattttattatgtttgtttgtaataatacaattctttactccagttaatgaaaattgggggattgatc

SEQ ID NO: 24223 - protein, 259 aa, Arabidopsis thaliana
  peptide (1)..(259): Ceres Seq. ID no. 12728803
MCRLLTQDVNMGHLGFLVMIMVGVMASSVSGYGGGWINAHATFYGGGDASGTMGGACGYGNLYSQGYGTSTAALSTALFNNGLSCGSCFEIRCENDGKWCLPGSIVVTATNFCPPNNALANNNGGWCNPPLEHFDLAQPVFQRIAQYRAGIVPVSYRRVPCRRRGGIRFTINGHSYFNLVLITNVGGAGDVHSAAIKGSRTVWQAMSRNWGQNWQSNSYLNGQALSFKVTTSDGRTVVSFNAAPAGWSYGQTFAGGQFR

SEQ ID NO: 24224 - protein, 249 aa, Arabidopsis thaliana
  peptide (1)..(249): Ceres Seq. ID no. 12728804
MGHLGFLVMIMVGVMASSVSGYGGGWINAHATFYGGGDASGTMGGACGYGNLYSQGYGTSTAALSTALFNNGLSCGSCFEIRCENDGKWCLPGSIVVTATNFCPPNNALANNNGGWCNPPLEHFDLAQPVFQRIAQYRAGIVPVSYRRVPCRRRGGIRFTINGHSYFNLVLITNVGGAGDVHSAAIKGSRTVWQAMSRNWGQNWQSNSYLNGQALSFKVTTSDGRTVVSFNAAPAGWSYGQTFAGGQFR

SEQ ID NO: 24225 - protein, 241 aa, Arabidopsis thaliana
  peptide (1)..(241): Ceres Seq. ID no. 12728805
MIMVGVMASSVSGYGGGWINAHATFYGGGDASGTMGGACGYGNLYSQGYGTSTAALSTALFNNGLSCGSCFEIRCENDGKWCLPGSIVVTATNFCPPNNALANNNGGWCNPPLEHFDLAQPVFQRIAQYRAGIVPVSYRRVPCRRRGGIRFTINGHSYFNLVLITNVGGAGDVHSAAIKGSRTVWQAMSRNWGQNWQSNSYLNGQALSFKVTTSDGRTVVSFNAAPAGWSYGQTFAGGQFR

SEQ ID NO: 24226 - DNA, 1161 bp, Arabidopsis thaliana
  misc_feature (1)..(1161): Ceres Seq. ID no. 13491884
  misc_feature (1)..(1161): Ortholog of  Ceres SEQ ID NO 12598859 as cited in SEQ ID NO 62872
  misc_feature (1)..(1161): Ortholog of  Ceres SEQ ID NO 12617350 as cited in SEQ ID NO 63777
  misc_feature (1)..(1161): Ortholog of  Ceres SEQ ID NO 13598749 as cited in SEQ ID NO 64341
  misc_feature (1)..(1161): Ortholog of  Ceres SEQ ID NO 15179157 as cited in SEQ ID NO 0
atcataaacccaccgagacgatgtctctcatcatcgtcttcttcttcttctcactcttgctcacatccaatggacagttcttcgacgagagcaagaactatgaaggctcctccgatctcgttgaccttcaataccacttgggtccggtcatatcctcgccggtgacgagtctctacatcatttggtacggccgatggaacccaactcaccaatctataatccgagactttctctactctgtctctgcaccggcaccggctcagtacccgtcagtatccaactggtggaagacagtgaggctatacagagaccagacaggttccaacatcaccgacactcttgtcttatccggagagttccacgactcaacgtactctcatggatctcatctcactcgcttctctgttcagtctgtgatcagaactgccttgacttccaagttaccactaaacgctgtaaacggcttgtacttagtcttgacctcggatgatgtagagatgcaagagttctgcagagcgatttgcgggtttcattacttcactttcccaagcgttgtgggtgcaaccgtaccgtatgcttgggtgggcaacagtgagagacagtgtccagaaatgtgtgcgtacccatttgcacagcctaagccatttccggggagcgggtttgtagccagagagaagatgaaaccgccaaatggagaggtaggaatcgatgggatgatcagtgtgatagctcatgagctggcagaagtgtcgagtaacccgatgttaaacggatggtatggaggagaggacgcgacagcaccgacagagatagcggatttatgtttgggagtgtatgggtcaggaggaggaggaggctatatgggaagtgtgtataaggataggtggaggaatgtgtataatgtgaagggcgttaaaggaagaaagtatctaattcaatgggtttgggatcttaataggaacagatgctttggaccaaacgctatgaattagagactatcatgtttgttacctcttttcaccaaagccttgagcttgaagcttggggaaacctgtatatggtttatcttttccttgcctagtcgattctatgcatttgattgtttaagactacgaaatctaggtattactagctgtcaagattcacttgacaaagtttctg

SEQ ID NO: 24227 - protein, 329 aa, Arabidopsis thaliana
  peptide (1)..(329): Ceres Seq. ID no. 13491885
HKPTETMSLIIVFFFFSLLLTSNGQFFDESKNYEGSSDLVDLQYHLGPVISSPVTSLYIIWYGRWNPTHQSIIRDFLYSVSAPAPAQYPSVSNWWKTVRLYRDQTGSNITDTLVLSGEFHDSTYSHGSHLTRFSVQSVIRTALTSKLPLNAVNGLYLVLTSDDVEMQEFCRAICGFHYFTFPSVVGATVPYAWVGNSERQCPEMCAYPFAQPKPFPGSGFVAREKMKPPNGEVGIDGMISVIAHELAEVSSNPMLNGWYGGEDATAPTEIADLCLGVYGSGGGGGYMGSVYKDRWRNVYNVKGVKGRKYLIQWVWDLNRNRCFGPNAMN

SEQ ID NO: 24228 - protein, 323 aa, Arabidopsis thaliana
  peptide (1)..(323): Ceres Seq. ID no. 13491886
MSLIIVFFFFSLLLTSNGQFFDESKNYEGSSDLVDLQYHLGPVISSPVTSLYIIWYGRWNPTHQSIIRDFLYSVSAPAPAQYPSVSNWWKTVRLYRDQTGSNITDTLVLSGEFHDSTYSHGSHLTRFSVQSVIRTALTSKLPLNAVNGLYLVLTSDDVEMQEFCRAICGFHYFTFPSVVGATVPYAWVGNSERQCPEMCAYPFAQPKPFPGSGFVAREKMKPPNGEVGIDGMISVIAHELAEVSSNPMLNGWYGGEDATAPTEIADLCLGVYGSGGGGGYMGSVYKDRWRNVYNVKGVKGRKYLIQWVWDLNRNRCFGPNAMN

SEQ ID NO: 24229 - protein, 164 aa, Arabidopsis thaliana
  peptide (1)..(164): Ceres Seq. ID no. 13491887
MQEFCRAICGFHYFTFPSVVGATVPYAWVGNSERQCPEMCAYPFAQPKPFPGSGFVAREKMKPPNGEVGIDGMISVIAHELAEVSSNPMLNGWYGGEDATAPTEIADLCLGVYGSGGGGGYMGSVYKDRWRNVYNVKGVKGRKYLIQWVWDLNRNRCFGPNAMN

SEQ ID NO: 24230 - DNA, 1208 bp, Arabidopsis thaliana
  misc_feature (1)..(1208): Ceres Seq. ID no. 12422761
  misc_feature (1)..(1208): Ortholog of  Ceres SEQ ID NO 15175048 as cited in SEQ ID NO 59975
  misc_feature (1)..(1208): Ortholog of  Ceres SEQ ID NO 13597333 as cited in SEQ ID NO 63974
  misc_feature (1)..(1208): Ortholog of  Ceres SEQ ID NO 13599307 as cited in SEQ ID NO 0
  misc_feature (1)..(1208): Ortholog of  Ceres SEQ ID NO 15179517 as cited in SEQ ID NO 0
atcaaatccacatttccccaaatttctttcttcttcttcgcttcagccatgggaaccctatctctctcatcttctctcaaaccttcactcgtttcatcaagactcaattcatcttcctccgcatcttcttcttcgtttcctaaaccaaacaatctctacctcaaacccaccaaactcatttcaccacctctcagaacaacttcaccatcgccattgagattcgccaatgcttcaatcgagatgtcgcagacacaggaatcagctattcgcggagctgaatctgacgtcatgggtcttctccttagggaacgaatcgtctttctcggtagtagtatcgacgatttcgtcgctgatgctattatgagtcagttgcttctcttagatgctaaagatccaaagaaagatatcaaactctttatcaattctcctggtggttctctcagtgcaaccatggctatatacgatgtggttcagcttgtgagagctgatgtttcgacgattgctcttggcattgctgcatcaacagcttcgattattcttggtgcgggaactaaaggcaagcgctttgctatgcccaacacgaggataatgattcatcaacctcttggaggtgcaagcggtcaagctatagatgttgagattcaagctaaggaagttatgcataacaagaacaatgtcaccagcattatcgcgggatgtactagtcgatcgtttgagcaggttctgaaagatattgatagggaccggtacatgtctccaattgaagcagttgagtatggtttaattgatggagttattgatggagacagcattattcctcttgaacctgttcctgatagagtgaaaccgagagtaaactacgaggagattagcaaggatccgatgaaattcttgactcccgagatacctgatgatgagatctactaaagccaagctcgtctagaagcagggatcttcaaatgtgactaagactagcagtttcgaggaaaagctcaatttcttctgcggttactggtattggctttgcgaaaccgaagctggtagtacttggcttttgtatctcatatttcagttgttcagaaaataattgttctttaaatcactctgttttgaggaaaatgacttaaagaagctgtagttatctcgtttatgacaatcccttcaagtgtttaatggattcaagaagtatcagtcagtatttttgtggt

SEQ ID NO: 24231 - protein, 308 aa, Arabidopsis thaliana
  peptide (1)..(308): Ceres Seq. ID no. 12422762
IKSTFPQISFFFFASAMGTLSLSSSLKPSLVSSRLNSSSSASSSSFPKPNNLYLKPTKLISPPLRTTSPSPLRFANASIEMSQTQESAIRGAESDVMGLLLRERIVFLGSSIDDFVADAIMSQLLLLDAKDPKKDIKLFINSPGGSLSATMAIYDVVQLVRADVSTIALGIAASTASIILGAGTKGKRFAMPNTRIMIHQPLGGASGQAIDVEIQAKEVMHNKNNVTSIIAGCTSRSFEQVLKDIDRDRYMSPIEAVEYGLIDGVIDGDSIIPLEPVPDRVKPRVNYEEISKDPMKFLTPEIPDDEIY

SEQ ID NO: 24232 - protein, 292 aa, Arabidopsis thaliana
  peptide (1)..(292): Ceres Seq. ID no. 12422763
MGTLSLSSSLKPSLVSSRLNSSSSASSSSFPKPNNLYLKPTKLISPPLRTTSPSPLRFANASIEMSQTQESAIRGAESDVMGLLLRERIVFLGSSIDDFVADAIMSQLLLLDAKDPKKDIKLFINSPGGSLSATMAIYDVVQLVRADVSTIALGIAASTASIILGAGTKGKRFAMPNTRIMIHQPLGGASGQAIDVEIQAKEVMHNKNNVTSIIAGCTSRSFEQVLKDIDRDRYMSPIEAVEYGLIDGVIDGDSIIPLEPVPDRVKPRVNYEEISKDPMKFLTPEIPDDEIY

SEQ ID NO: 24233 - protein, 228 aa, Arabidopsis thaliana
  peptide (1)..(228): Ceres Seq. ID no. 12422764
MSQTQESAIRGAESDVMGLLLRERIVFLGSSIDDFVADAIMSQLLLLDAKDPKKDIKLFINSPGGSLSATMAIYDVVQLVRADVSTIALGIAASTASIILGAGTKGKRFAMPNTRIMIHQPLGGASGQAIDVEIQAKEVMHNKNNVTSIIAGCTSRSFEQVLKDIDRDRYMSPIEAVEYGLIDGVIDGDSIIPLEPVPDRVKPRVNYEEISKDPMKFLTPEIPDDEIY

SEQ ID NO: 24234 - DNA, 1475 bp, Arabidopsis thaliana
  misc_feature (1)..(1475): Ceres Seq. ID no. 12396427
  misc_feature (1)..(1475): Ortholog of  Ceres SEQ ID NO 14311721 as cited in SEQ ID NO 51363
atctttacaaaaccgattacttttgtcggaatctgacgtcagcatacctgctaccacttccagagttcaatcgatcttcgcctcgttgaaacgttttccctcttcgattatcaacagtgtctccactcgtatcatcaccgcctccaactaattttgccatctctctcgttgttccaatttgattctactagtgagctccgatttaatttagggttttgaaagatgtcagctttgaaaaattacggcttgatctccattgattctgccctccattttcctcgatcaaatcaattgcagagctataagagaaggaatgcaaaatgggtctctccaatagcagctgttgtacctaacttccatcttcctatgcgcagtctcgaggataaaaacaggacaaacacagacgacataaggtcccttagagtgatcacagccattaagacaccgtatttacctgatggaagattcgacctccaagcatacgatgacttagtcaacacgcagatagaaaacggtgctgaaggtgtgattgttggtggtacaactggtgaaggccaattgatgagctgggatgagcacataatgcttatcggccatactgtaaattgttttgggggaaggatcaaagtcattggaaacactggaagtaactcgactagggaagctattcatgccactgagcaaggattcgccatgggaatgcacggggcactgcacattaacccttactatggaaaaacatccattgaaggcatgaatgcgcattttcaaaccgttcttcatatgggaccgactattatatacaacgtgccaggtcgaacgtgccaggatatacctccccaggttatctttaaactctctcagaaccctaatatggctggggttaaggaatgcgttggtaataaccgagttgaagagtatactgagaagggaattgtcgtttggagtggaaatgatgatcagtgccatgattctagatgggatcacggtgccactggagtgatatcggttactagcaatttagttccgggtttgatgaggaagttgatgtttgaaggtagaaactcagcgttgaacgcaaagcttcttcctttaatggattggctattccaagaaccgaatcccattggtgtaaacactgctttggctcagttaggagttgcgaggccggtttttcggttaccttatgtgccattgcctctgtccaaaaggattgagttcgttaaactggtgaaggaaatcggaagggagcattttgtaggagacagagatgttcaggtacttgatgatgatgacttcatcttaatcggtcgatattagagtctcttccctgaagattggttgtgtttatactttcttcgttcagttgttagttatttagctgatgagaaactcacagatggatcaagacttctacttgttgtaatgtttggtctgttacttttggtgatgaatctaatggcttttgcttactc

SEQ ID NO: 24235 - protein, 365 aa, Arabidopsis thaliana
  peptide (1)..(365): Ceres Seq. ID no. 12396428
MSALKNYGLISIDSALHFPRSNQLQSYKRRNAKWVSPIAAVVPNFHLPMRSLEDKNRTNTDDIRSLRVITAIKTPYLPDGRFDLQAYDDLVNTQIENGAEGVIVGGTTGEGQLMSWDEHIMLIGHTVNCFGGRIKVIGNTGSNSTREAIHATEQGFAMGMHGALHINPYYGKTSIEGMNAHFQTVLHMGPTIIYNVPGRTCQDIPPQVIFKLSQNPNMAGVKECVGNNRVEEYTEKGIVVWSGNDDQCHDSRWDHGATGVISVTSNLVPGLMRKLMFEGRNSALNAKLLPLMDWLFQEPNPIGVNTALAQLGVARPVFRLPYVPLPLSKRIEFVKLVKEIGREHFVGDRDVQVLDDDDFILIGRY

SEQ ID NO: 24236 - protein, 317 aa, Arabidopsis thaliana
  peptide (1)..(317): Ceres Seq. ID no. 12396429
MRSLEDKNRTNTDDIRSLRVITAIKTPYLPDGRFDLQAYDDLVNTQIENGAEGVIVGGTTGEGQLMSWDEHIMLIGHTVNCFGGRIKVIGNTGSNSTREAIHATEQGFAMGMHGALHINPYYGKTSIEGMNAHFQTVLHMGPTIIYNVPGRTCQDIPPQVIFKLSQNPNMAGVKECVGNNRVEEYTEKGIVVWSGNDDQCHDSRWDHGATGVISVTSNLVPGLMRKLMFEGRNSALNAKLLPLMDWLFQEPNPIGVNTALAQLGVARPVFRLPYVPLPLSKRIEFVKLVKEIGREHFVGDRDVQVLDDDDFILIGRY

SEQ ID NO: 24237 - protein, 252 aa, Arabidopsis thaliana
  peptide (1)..(252): Ceres Seq. ID no. 12396430
MSWDEHIMLIGHTVNCFGGRIKVIGNTGSNSTREAIHATEQGFAMGMHGALHINPYYGKTSIEGMNAHFQTVLHMGPTIIYNVPGRTCQDIPPQVIFKLSQNPNMAGVKECVGNNRVEEYTEKGIVVWSGNDDQCHDSRWDHGATGVISVTSNLVPGLMRKLMFEGRNSALNAKLLPLMDWLFQEPNPIGVNTALAQLGVARPVFRLPYVPLPLSKRIEFVKLVKEIGREHFVGDRDVQVLDDDDFILIGRY

SEQ ID NO: 24238 - DNA, 960 bp, Arabidopsis thaliana
  misc_feature (1)..(960): Ceres Seq. ID no. 12466073
  misc_feature (1)..(960): Ortholog of  Ceres SEQ ID NO 13594549 as cited in SEQ ID NO 51707
  misc_feature (1)..(960): Ortholog of  Ceres SEQ ID NO 13595294 as cited in SEQ ID NO 55998
  misc_feature (1)..(960): Ortholog of  Ceres SEQ ID NO 14302012 as cited in SEQ ID NO 56618
  misc_feature (1)..(960): Ortholog of  Ceres SEQ ID NO 12598102 as cited in SEQ ID NO 61029
  misc_feature (1)..(960): Ortholog of  Ceres SEQ ID NO 12625361 as cited in SEQ ID NO 62928
  misc_feature (1)..(960): Ortholog of  Ceres SEQ ID NO 13599424 as cited in SEQ ID NO 0
atctaactctctctctactgcaatttttagggttttatcctccgaaagtctcaacctttttcttatcctcaacaaggagaaatggcggcgactcaacttacagcgtcaccagtgactatgtcagcaaggagcttagcctcgctggatggtctcagagcttcgagtgtcaagttttcatctttgaaaccagggacccttagacagagccagttccgtcgtttggttgtcaaagctgcttctgttgttgcccctaagtatacttcaattaagccattgggagatcgagttttggtgaagatcaaggaggcagaggagaagactttaggtggtatcttacttccatccactgctcaatcaaaacctcaaggaggtgaagtcgttgccgtgggtgaaggaagaactattgggaagaacaaaattgatatcactgtccctactggagcacaaattatctactccaaatacgcaggaactgaggtggagttcaatgatgtgaagcatcttatcctcaaggaagatgatattgttggcattcttgagacagaggacatcaaagatctcaaacctttgaatgaccgagtctttattaaggttgctgaggcggaggagaaaacagctggagggttgttgttaaccgagactaccaaagagaagccttctattggcacggtgatagcagttggaccgggttccctagacgaggaaggtaaaattacgcctctaccagtatcaaccggaagcacagtactttactccaagtatgctggtaacgacttcaagggcaaagatggttccaactacattgccctcagagcttcagatgtgatggctatactttcttagttatgttatatctttgtaatctgcaacttgtatcccaattgtggaaattttttccgtaaacgggcctgagcataatctggaataaagacttgagtttgaaaatgtgattttattgcc

SEQ ID NO: 24239 - protein, 253 aa, Arabidopsis thaliana
  peptide (1)..(253): Ceres Seq. ID no. 12466074
MAATQLTASPVTMSARSLASLDGLRASSVKFSSLKPGTLRQSQFRRLVVKAASVVAPKYTSIKPLGDRVLVKIKEAEEKTLGGILLPSTAQSKPQGGEVVAVGEGRTIGKNKIDITVPTGAQIIYSKYAGTEVEFNDVKHLILKEDDIVGILETEDIKDLKPLNDRVFIKVAEAEEKTAGGLLLTETTKEKPSIGTVIAVGPGSLDEEGKITPLPVSTGSTVLYSKYAGNDFKGKDGSNYIALRASDVMAILS

SEQ ID NO: 24240 - protein, 241 aa, Arabidopsis thaliana
  peptide (1)..(241): Ceres Seq. ID no. 12466075
MSARSLASLDGLRASSVKFSSLKPGTLRQSQFRRLVVKAASVVAPKYTSIKPLGDRVLVKIKEAEEKTLGGILLPSTAQSKPQGGEVVAVGEGRTIGKNKIDITVPTGAQIIYSKYAGTEVEFNDVKHLILKEDDIVGILETEDIKDLKPLNDRVFIKVAEAEEKTAGGLLLTETTKEKPSIGTVIAVGPGSLDEEGKITPLPVSTGSTVLYSKYAGNDFKGKDGSNYIALRASDVMAILS

SEQ ID NO: 24241 - DNA, 1085 bp, Arabidopsis thaliana
  misc_feature (1)..(1085): Ceres Seq. ID no. 13500142
  misc_feature (1)..(1085): Ortholog of  Ceres SEQ ID NO 13597338 as cited in SEQ ID NO 64272
atatgtcaggaccggtccgcaggacaagcatgtaataaaactgtgtgttttctacattttctatgaaatgggtgtaattgaaagatactaaatgttagggcttttcagaaacttccgttacgttttaggcgtttaacacaattattattttctaaaacgagagccgtttaacgagaaagagaaatttctaactccagagagcgaagaacacaatcccagagtagcagaatctgatccatcccacctttttcaattctcaggcaaagataagtcaaagttgaaaatggaagggactgtgttcacgccttgtttggaaggaatgaagcatgtcaaatctgatcaaggcgagatgcttactaagccatttttagagctttgcaagaccatcttgcctgttatagataaatttggagctgctatgactctcgtcaaatctgacattggtggcaacataacgaggttggagaagaactacttgtctgatcccgacaagttcaagtacttgtacacctttgttcaagtcgaaattgagtctaagatagcaaaaggatcgtctagctgtacaaacggtcttctctggttaaccagagcaatggatttcttagtggagctgttccgaaacttggtagcacatcaagactggtcaatgccacaagcttgtgctgactcataccaaaaaacactcaagaaatggcacggatggctcgccagctctaccttctctatggctttaaagctagctccggacaggaagaagttcatggatgtcatatctggttctggtaacatccaagccgacatggaaaggttttgtgctgagtttggtccgtttcttcatgataatcataagtttctggctagcgtcggtatggatgacatgaaagcttcttaagtcatcatatgattatcgccggtatcaaatcttctttgccggaatctttgtctgttttaacttttctccttccaattatagaacctccaaaaagaaacagaataatgtgttggtttctatctgaatgttcactttatattacaagttataacatacgaatcaatcttatcaactcttcttgttaatgtttgtt

SEQ ID NO: 24242 - protein, 202 aa, Arabidopsis thaliana
  peptide (1)..(202): Ceres Seq. ID no. 13500143
MEGTVFTPCLEGMKHVKSDQGEMLTKPFLELCKTILPVIDKFGAAMTLVKSDIGGNITRLEKNYLSDPDKFKYLYTFVQVEIESKIAKGSSSCTNGLLWLTRAMDFLVELFRNLVAHQDWSMPQACADSYQKTLKKWHGWLASSTFSMALKLAPDRKKFMDVISGSGNIQADMERFCAEFGPFLHDNHKFLASVGMDDMKAS

SEQ ID NO: 24243 - protein, 190 aa, Arabidopsis thaliana
  peptide (1)..(190): Ceres Seq. ID no. 13500144
MKHVKSDQGEMLTKPFLELCKTILPVIDKFGAAMTLVKSDIGGNITRLEKNYLSDPDKFKYLYTFVQVEIESKIAKGSSSCTNGLLWLTRAMDFLVELFRNLVAHQDWSMPQACADSYQKTLKKWHGWLASSTFSMALKLAPDRKKFMDVISGSGNIQADMERFCAEFGPFLHDNHKFLASVGMDDMKAS

SEQ ID NO: 24244 - protein, 180 aa, Arabidopsis thaliana
  peptide (1)..(180): Ceres Seq. ID no. 13500145
MLTKPFLELCKTILPVIDKFGAAMTLVKSDIGGNITRLEKNYLSDPDKFKYLYTFVQVEIESKIAKGSSSCTNGLLWLTRAMDFLVELFRNLVAHQDWSMPQACADSYQKTLKKWHGWLASSTFSMALKLAPDRKKFMDVISGSGNIQADMERFCAEFGPFLHDNHKFLASVGMDDMKAS

SEQ ID NO: 24245 - DNA, 1466 bp, Arabidopsis thaliana
  misc_feature (1)..(1466): Ceres Seq. ID no. 12321835
  misc_feature (1)..(1466): Ortholog of  Ceres SEQ ID NO 15227026 as cited in SEQ ID NO 52193
  misc_feature (1)..(1466): Ortholog of  Ceres SEQ ID NO 13595454 as cited in SEQ ID NO 56502
acgataagtgaaaaaagagagaaagagccagaggagagagagaagcttttggtcgtgttcgtttttctttctttctttcttgcaataataaatagaagcaaatcatactccaaaaaccttcattcaaaccttgctaccactttcttcccctaaaagatttcatctaaattcagtaaactcatctacgagttcttgtttttctttaaattttctaagagagagcctaagctgtttaatatagtcatctaatatttagagagatggtgggagagagaatgtggtggtggtcatcatcgtcgacgaaactccgatcaaaccttgaaagatttctcagaggaatcactccaaaacctccttctttctctttatcacagagctgcaagaatgatttgaacagtttgtggatccatgagaacaaagatgagattgaatatttcaggcttagtgatctttgggactgttttgatgagccaagcgcgtatggacttggatcaaaggtcgacttaaacaatggtgaatccgttatgcagtactatgtcccgtatctatccgccattcaaatctatactaacaaatctacagccatttctaggattcatagtgatgtggttgattgtgagagtgaatgttggagtgatgatagtgagattgagaagttgtcaaggtcaatgagcagtggttctagcaaaatatgggattctgtttctgatgattcgggttatgagatcgatggtacttcttcattgatgcgagataagctcggttctattgattttcagtactttgagtccgttaaaccgcacttgcgtgttcctcttaccgctaaggtaaatgaattggctgagaagtatccgggactttcgactctaaggagtgttgatttgtctccagcaagttggttggccattgcttggtatccaatttaccacattccctctcggaagacccataaagatttatcgacatgtttcttgagttatcatactttatcttcggctttccaaggtaacttgatagagggagacgatgagattaacgaaaccatgaaagaagaaacattgtgttttgatgaaggaccggtgaccaagagtatacctttggctccttttggtttagttagttacaaattgcaaggagatttgtggaggaatcaagaatgtggtgaccaaggacgtatagtttatcttcgcagtgcagctgattcgtggctgaaacagcttaatgttcatgatcaccatgaccatagcttcttctccatgaacatgagcttgtagatccaaaaaaagagagccaagactctgtttttttgctctgtttttagttgttttcttagccaagactctgtttttttgctctgtttttagttgttttaagaatcttaggtatatagactcgaaatgtagaggtttcgtttccttctgcttgaacccgtggaaaataaagagaattaggcttgtttttggctc

SEQ ID NO: 24246 - protein, 337 aa, Arabidopsis thaliana
  peptide (1)..(337): Ceres Seq. ID no. 12321836
MVGERMWWWSSSSTKLRSNLERFLRGITPKPPSFSLSQSCKNDLNSLWIHENKDEIEYFRLSDLWDCFDEPSAYGLGSKVDLNNGESVMQYYVPYLSAIQIYTNKSTAISRIHSDVVDCESECWSDDSEIEKLSRSMSSGSSKIWDSVSDDSGYEIDGTSSLMRDKLGSIDFQYFESVKPHLRVPLTAKVNELAEKYPGLSTLRSVDLSPASWLAIAWYPIYHIPSRKTHKDLSTCFLSYHTLSSAFQGNLIEGDDEINETMKEETLCFDEGPVTKSIPLAPFGLVSYKLQGDLWRNQECGDQGRIVYLRSAADSWLKQLNVHDHHDHSFFSMNMSL

SEQ ID NO: 24247 - protein, 332 aa, Arabidopsis thaliana
  peptide (1)..(332): Ceres Seq. ID no. 12321837
MWWWSSSSTKLRSNLERFLRGITPKPPSFSLSQSCKNDLNSLWIHENKDEIEYFRLSDLWDCFDEPSAYGLGSKVDLNNGESVMQYYVPYLSAIQIYTNKSTAISRIHSDVVDCESECWSDDSEIEKLSRSMSSGSSKIWDSVSDDSGYEIDGTSSLMRDKLGSIDFQYFESVKPHLRVPLTAKVNELAEKYPGLSTLRSVDLSPASWLAIAWYPIYHIPSRKTHKDLSTCFLSYHTLSSAFQGNLIEGDDEINETMKEETLCFDEGPVTKSIPLAPFGLVSYKLQGDLWRNQECGDQGRIVYLRSAADSWLKQLNVHDHHDHSFFSMNMSL

SEQ ID NO: 24248 - protein, 249 aa, Arabidopsis thaliana
  peptide (1)..(249): Ceres Seq. ID no. 12321838
MQYYVPYLSAIQIYTNKSTAISRIHSDVVDCESECWSDDSEIEKLSRSMSSGSSKIWDSVSDDSGYEIDGTSSLMRDKLGSIDFQYFESVKPHLRVPLTAKVNELAEKYPGLSTLRSVDLSPASWLAIAWYPIYHIPSRKTHKDLSTCFLSYHTLSSAFQGNLIEGDDEINETMKEETLCFDEGPVTKSIPLAPFGLVSYKLQGDLWRNQECGDQGRIVYLRSAADSWLKQLNVHDHHDHSFFSMNMSL

SEQ ID NO: 24249 - DNA, 1076 bp, Arabidopsis thaliana
  misc_feature (1)..(1076): Ceres Seq. ID no. 12321537
  misc_feature (1)..(1076): Ortholog of  Ceres SEQ ID NO 13596609 as cited in SEQ ID NO 63070
  misc_feature (1)..(1076): Ortholog of  Ceres SEQ ID NO 12616895 as cited in SEQ ID NO 63909
  misc_feature (1)..(1076): Ortholog of  Ceres SEQ ID NO 13598574 as cited in SEQ ID NO 69083
acgaaacataattgtcaaattcaaacaacaaaaaaaaacactctctccctctccgtatctatttaaaatccgatcaggttaatcgagtttatcatttggagaaagcaaatttccaaaaatgtttcgagttagcaatttcgtggttggtctagcaaacacattggtgatgttagtgggcgcttcggccattggttattcgatttacatgttcgttcaccaaggcgtcactgattgtgaatctgccattcggataccacttctcacgaccggactcatcctcttcttggtgtctttgctcggagtgattggatcttgtttcaaggagaatttggcaatggtttcctacttgatcatattgtttgggggcattgttgcattgatgattttctccatatttctcttctttgtgaccaacaaaggagccggtcgtgtggtgtccggtcgagggtataaagagtaccggacggtggatttctcgacgtggcttaatgggttcgttggtgggaagagatgggttgggataaggtcttgtttggctgaggctaacgtttgtgatgatttgagtgatggtcgtgttagtcagatcgctgatgcgttttatcacaagaacttgtctcccatccagtcaggttgttgtaagccaccatcggattgcaacttcgagttcagaaacgcgacgttctggataccgccgagcaaaaacgaaacggcagttgcggccgaaaacggggactgtggtacgtggagcaacgtgcaaacagagttatgtttcaactgcaacgcatgcaaagcgggtgtgttaacgaacataagagagaagtggaggaatcttcttgttttcaacatttgtctcctcattctcctcataaccgtctattcctgcggttgctgtgctcgtcgaaacaatcggacggctaggaaaagtgattctgtctgatcaacaactcaatttcagtttcttgtgtttttctgttttcttagtttgtttggttttttaagttaattatcttttgttttctttggacaatgtcatgttctgtttctcaacaattatcatgaatttatcacatttcacc

SEQ ID NO: 24250 - protein, 272 aa, Arabidopsis thaliana
  peptide (1)..(272): Ceres Seq. ID no. 12321538
MFRVSNFVVGLANTLVMLVGASAIGYSIYMFVHQGVTDCESAIRIPLLTTGLILFLVSLLGVIGSCFKENLAMVSYLIILFGGIVALMIFSIFLFFVTNKGAGRVVSGRGYKEYRTVDFSTWLNGFVGGKRWVGIRSCLAEANVCDDLSDGRVSQIADAFYHKNLSPIQSGCCKPPSDCNFEFRNATFWIPPSKNETAVAAENGDCGTWSNVQTELCFNCNACKAGVLTNIREKWRNLLVFNICLLILLITVYSCGCCARRNNRTARKSDSV

SEQ ID NO: 24251 - protein, 256 aa, Arabidopsis thaliana
  peptide (1)..(256): Ceres Seq. ID no. 12321539
MLVGASAIGYSIYMFVHQGVTDCESAIRIPLLTTGLILFLVSLLGVIGSCFKENLAMVSYLIILFGGIVALMIFSIFLFFVTNKGAGRVVSGRGYKEYRTVDFSTWLNGFVGGKRWVGIRSCLAEANVCDDLSDGRVSQIADAFYHKNLSPIQSGCCKPPSDCNFEFRNATFWIPPSKNETAVAAENGDCGTWSNVQTELCFNCNACKAGVLTNIREKWRNLLVFNICLLILLITVYSCGCCARRNNRTARKSDSV

SEQ ID NO: 24252 - protein, 243 aa, Arabidopsis thaliana
  peptide (1)..(243): Ceres Seq. ID no. 12321540
MFVHQGVTDCESAIRIPLLTTGLILFLVSLLGVIGSCFKENLAMVSYLIILFGGIVALMIFSIFLFFVTNKGAGRVVSGRGYKEYRTVDFSTWLNGFVGGKRWVGIRSCLAEANVCDDLSDGRVSQIADAFYHKNLSPIQSGCCKPPSDCNFEFRNATFWIPPSKNETAVAAENGDCGTWSNVQTELCFNCNACKAGVLTNIREKWRNLLVFNICLLILLITVYSCGCCARRNNRTARKSDSV

SEQ ID NO: 24253 - DNA, 1166 bp, Arabidopsis thaliana
  misc_feature (1)..(1166): Ceres Seq. ID no. 13486826
  misc_feature (1)..(1166): Ortholog of  Ceres SEQ ID NO 14311969 as cited in SEQ ID NO 58929
  misc_feature (1)..(1166): Ortholog of  Ceres SEQ ID NO 15173523 as cited in SEQ ID NO 61797
  misc_feature (1)..(1166): Ortholog of  Ceres SEQ ID NO 14309357 as cited in SEQ ID NO 0
attttcatttcgcgtctcgaccttcgaattcgacaaatccctaattccaaaatcctctcggatctaaaagagtgtgtgataacataagatgtcgtcttctcgggaagagaatgtgtacttagccaagttagctgagcaagctgaacgttatgaggaaatggttgagttcatggagaaagttgcaaagactgttgacaccgatgagcttactgtcgaagagagaaacctcttgtctgttgcttacaagaacgtcattggtgctaggagagcttcctggaggatcatatcttccattgaacagaaggaagaaagcagaggaaacgatgatcatgtttccattatcaaggactacagaggaaagatcgaaactgaactcagcaaaatctgtgatggaatactcaatcttctggattctcaccttgttcccactgcatctttggccgagtccaaagtcttttacctcaaaatgaaaggagattaccacaggtaccttgctgagtttaagactggagctgagaggaaagaagctgctgagagcactctggttgcttacaagtcagctcaggatattgcacttgctgatttagctcctactcatccgattagactgggacttgctcttaacttctctgtcttctactacgagattctcaactcacctgatcgtgcctgcagtctcgcaaaacaggcttttgatgaggccatttctgagctggatacattaggagaagaatcatacaaagacagtacgttgataatgcaacttctccgtgacaatctgaccctttggaactctgacatcaatgatgaggcgggcggtgatgagatcaaggaggcgtcaaaacatgagccggaagaggggaaaccagctgagacagggcagtgaccagagagagagggagagacatttctaagtatgtatggtatggattttccaaaaacatatgatatgattaggggatttgtagaagcagagagaaagatctttatttgattttctccaaaaatctctgttcccttttttttttttattgggttattaaagctgtttgagtctttggttcctgcttcgttgcttgttagtatttaggaagtgaagaaacaaaactttgaattattgctttccattcaactcgtcataaattatcataatcagtgtattattt

SEQ ID NO: 24254 - protein, 265 aa, Arabidopsis thaliana
  peptide (1)..(265): Ceres Seq. ID no. 13486827
MSSSREENVYLAKLAEQAERYEEMVEFMEKVAKTVDTDELTVEERNLLSVAYKNVIGARRASWRIISSIEQKEESRGNDDHVSIIKDYRGKIETELSKICDGILNLLDSHLVPTASLAESKVFYLKMKGDYHRYLAEFKTGAERKEAAESTLVAYKSAQDIALADLAPTHPIRLGLALNFSVFYYEILNSPDRACSLAKQAFDEAISELDTLGEESYKDSTLIMQLLRDNLTLWNSDINDEAGGDEIKEASKHEPEEGKPAETGQ

SEQ ID NO: 24255 - protein, 242 aa, Arabidopsis thaliana
  peptide (1)..(242): Ceres Seq. ID no. 13486828
MVEFMEKVAKTVDTDELTVEERNLLSVAYKNVIGARRASWRIISSIEQKEESRGNDDHVSIIKDYRGKIETELSKICDGILNLLDSHLVPTASLAESKVFYLKMKGDYHRYLAEFKTGAERKEAAESTLVAYKSAQDIALADLAPTHPIRLGLALNFSVFYYEILNSPDRACSLAKQAFDEAISELDTLGEESYKDSTLIMQLLRDNLTLWNSDINDEAGGDEIKEASKHEPEEGKPAETGQ

SEQ ID NO: 24256 - protein, 238 aa, Arabidopsis thaliana
  peptide (1)..(238): Ceres Seq. ID no. 13486829
MEKVAKTVDTDELTVEERNLLSVAYKNVIGARRASWRIISSIEQKEESRGNDDHVSIIKDYRGKIETELSKICDGILNLLDSHLVPTASLAESKVFYLKMKGDYHRYLAEFKTGAERKEAAESTLVAYKSAQDIALADLAPTHPIRLGLALNFSVFYYEILNSPDRACSLAKQAFDEAISELDTLGEESYKDSTLIMQLLRDNLTLWNSDINDEAGGDEIKEASKHEPEEGKPAETGQ

SEQ ID NO: 24257 - DNA, 1050 bp, Arabidopsis thaliana
  misc_feature (1)..(1050): Ceres Seq. ID no. 13591665
  misc_feature (1)..(1050): Ortholog of  Ceres SEQ ID NO 15176208 as cited in SEQ ID NO 55594
  misc_feature (1)..(1050): Ortholog of  Ceres SEQ ID NO 14312330 as cited in SEQ ID NO 58581
ggtattcgtcttccgcctcctctcccatcggttttgaacagcttggcagaagaagtgaaacttgagagagtaatggagaacttggaagatctgaaaattctggctgagcagtggtcgcatcaaggaattgaatatcttcagaagataccaccgaatcagctgtatgccgccattggtgttttgttgtttacaaccatcttgctcttcctatccattcgcctggtcagacgtaccaaatccaacactgtactcctttctgggctgaccggaagtggaaagactgtgctcttttaccaactccgagatggatcgtcgcatcagggcactgtaacatcaatggaaccaaatgaaggcacttttgttcttcacagtgaaaatactaagaaaggaaaaatcaagcctgttcatcttgttgatgttcctgggcactctcggcttcgacccaagctagaagaattcttgccccaagcagctgccattgtgttcgtagtggatgccttggagttcctcccaaactgtcgtgcagcttcagagtacctatacgagattctgaccaatgcgaatgttgtcaagaagaagattccagtcctcctttgctgtaacaagaccgataaactcactgcacacaccaaggagtttatccggaagcaaatggagaaagaaattgagaaactgagggcttcaaggagtgcagtctctactgctgatatagcgaatgacttcaccattggaattgagggagaagtgttctccttcacgcattgctccaacaaagtcactgtcgctgaggcatctggacttaccggagaaaccatccagattgaagacttcattcgagaatacatcaagccatgagctccaacatgccttcatagattgaatctaccacaagtttcttatgctttgggctgtgactttgatttgagtttagagatccttttgtatatgagatctttggatgatttagggtgttcaaaactgagtagctgtattttcgagttagataatctgttttaaatcggaatgattttaaggaaatgttaaatgact

SEQ ID NO: 24258 - protein, 284 aa, Arabidopsis thaliana
  peptide (1)..(284): Ceres Seq. ID no. 13591666
GIRLPPPLPSVLNSLAEEVKLERVMENLEDLKILAEQWSHQGIEYLQKIPPNQLYAAIGVLLFTTILLFLSIRLVRRTKSNTVLLSGLTGSGKTVLFYQLRDGSSHQGTVTSMEPNEGTFVLHSENTKKGKIKPVHLVDVPGHSRLRPKLEEFLPQAAAIVFVVDALEFLPNCRAASEYLYEILTNANVVKKKIPVLLCCNKTDKLTAHTKEFIRKQMEKEIEKLRASRSAVSTADIANDFTIGIEGEVFSFTHCSNKVTVAEASGLTGETIQIEDFIREYIKP

SEQ ID NO: 24259 - protein, 260 aa, Arabidopsis thaliana
  peptide (1)..(260): Ceres Seq. ID no. 13591667
MENLEDLKILAEQWSHQGIEYLQKIPPNQLYAAIGVLLFTTILLFLSIRLVRRTKSNTVLLSGLTGSGKTVLFYQLRDGSSHQGTVTSMEPNEGTFVLHSENTKKGKIKPVHLVDVPGHSRLRPKLEEFLPQAAAIVFVVDALEFLPNCRAASEYLYEILTNANVVKKKIPVLLCCNKTDKLTAHTKEFIRKQMEKEIEKLRASRSAVSTADIANDFTIGIEGEVFSFTHCSNKVTVAEASGLTGETIQIEDFIREYIKP

SEQ ID NO: 24260 - protein, 172 aa, Arabidopsis thaliana
  peptide (1)..(172): Ceres Seq. ID no. 13591668
MEPNEGTFVLHSENTKKGKIKPVHLVDVPGHSRLRPKLEEFLPQAAAIVFVVDALEFLPNCRAASEYLYEILTNANVVKKKIPVLLCCNKTDKLTAHTKEFIRKQMEKEIEKLRASRSAVSTADIANDFTIGIEGEVFSFTHCSNKVTVAEASGLTGETIQIEDFIREYIKP

SEQ ID NO: 24261 - DNA, 904 bp, Arabidopsis thaliana
  misc_feature (1)..(904): Ceres Seq. ID no. 12321843
  misc_feature (1)..(904): Ortholog of  Ceres SEQ ID NO 13594390 as cited in SEQ ID NO 51060
  misc_feature (1)..(904): Ortholog of  Ceres SEQ ID NO 14309565 as cited in SEQ ID NO 52731
aatcatcaaacatccaaactctatcctttcgttttcttgttagagaaaaattaatactagatgggtaacagtttaggcggcaagaaaacgaccaaagtcatgaagatagacggcgagacttttaaactgaaaactccggtgacggctgaggaggtcttaaaagactttcccggccacgtcttgttagacttcgaatccgtcaagcactacggtgcccgagccaaaccacttgaggcgaagcagaggttggaggcgaagcggctttattttgtggtggagccggtgaaagagtgtccaccgagaagggtaagatcaggaattcacgtgagtgcaaaggagaggcttgagagtctcatgctggcccggagatcgtcttccgatctctccatactcaaaccaccaggaggatggacgacggaggaagaagaaggagcggtgaggagggtgaaggtgaggattcccaaagctgagcttgaaaagctcgttaaagaaggagccaccgaagccgaagctacgcagaagatcgctgctctctttatggccaaacagaggcaagaggaggcatatcagaacacacgacaggatgagcccgccaccacggccaccgccaccgccaccaccaccgccacaagaggagtcaaatcccgtttgaaacgagtgagtttcatggcggaaagaggagggagcgagatcactgtagcttgaaccaataaacatatgtattagagaatgcttcccaacgtttctgcaaattctatgtacataaaaaacgcagaaagtttgagagaaagcttattcagatattcatccatgtctccactctattgtactcaagagttttactattattacattgtagaagaaacagtcattttataggcagattcattcgtttgcctctcgc

SEQ ID NO: 24262 - protein, 214 aa, Arabidopsis thaliana
  peptide (1)..(214): Ceres Seq. ID no. 12321844
MGNSLGGKKTTKVMKIDGETFKLKTPVTAEEVLKDFPGHVLLDFESVKHYGARAKPLEAKQRLEAKRLYFVVEPVKECPPRRVRSGIHVSAKERLESLMLARRSSSDLSILKPPGGWTTEEEEGAVRRVKVRIPKAELEKLVKEGATEAEATQKIAALFMAKQRQEEAYQNTRQDEPATTATATATTTATRGVKSRLKRVSFMAERGGSEITVA

SEQ ID NO: 24263 - protein, 201 aa, Arabidopsis thaliana
  peptide (1)..(201): Ceres Seq. ID no. 12321845
MKIDGETFKLKTPVTAEEVLKDFPGHVLLDFESVKHYGARAKPLEAKQRLEAKRLYFVVEPVKECPPRRVRSGIHVSAKERLESLMLARRSSSDLSILKPPGGWTTEEEEGAVRRVKVRIPKAELEKLVKEGATEAEATQKIAALFMAKQRQEEAYQNTRQDEPATTATATATTTATRGVKSRLKRVSFMAERGGSEITVA

SEQ ID NO: 24264 - protein, 116 aa, Arabidopsis thaliana
  peptide (1)..(116): Ceres Seq. ID no. 12321846
MLARRSSSDLSILKPPGGWTTEEEEGAVRRVKVRIPKAELEKLVKEGATEAEATQKIAALFMAKQRQEEAYQNTRQDEPATTATATATTTATRGVKSRLKRVSFMAERGGSEITVA

SEQ ID NO: 24265 - DNA, 1777 bp, Arabidopsis thaliana
  misc_feature (1)..(1777): Ceres Seq. ID no. 13610497
  misc_feature (1)..(1777): Ortholog of  Ceres SEQ ID NO 13638331 as cited in SEQ ID NO 58047
  misc_feature (1)..(1777): Ortholog of  Ceres SEQ ID NO 15170135 as cited in SEQ ID NO 67647
aagctttttttacaaaagacgtacacgtctctctctctcactccctctttaagatcagaagctcatttcttcgatacgatcaaccattagagatgggttcggcgaacaacgagtacgagtttctgagtgagattgggctgacttctcacaacttgggatcttacgttgctggcaaatggcaagccaacggacctcttgtttcaactctcaatcctgctaacaatcagccaattgctcaagttgtggaagcttctctagaggattacgagcaaggtttgaaagcttgcgaggaagcagctaaaatatggatgcaggttacggctcctaagagaggtgatatcgtcagacagattggggatgcactaagatccaaacttgactatcttggtcgtcttctttctcttgaaatgggaaagatccttgctgaaggtattggagaagttcaggaagtaattgacatgtgtgattttgctgttggtttgagccgacaactcaatggatcggttataccttcagaacgccctaaccacatgatgttggagatgtggaatcctcttggcattgttggtgttatcacagcgtttaattttccctgtgcagttcttggttggaatgcttgtattgctcttgtctgtggaaactgtgtagtctggaaaggtgctccaactacaccgttaataactatcgcaatgaccaagctagtagctgaagttttagagaaaaacaacttacccggtgccatttttacggccatgtgtggtggtgctgaaattggtgaagcaatagccaaagacacacgcattcccttagtatcctttactggaagctccagggtgggctcaatggtacaacaaacagtgaatgcgagatctgggaaaactttgcttgagttgagtggaaacaatgcaatcatagtcatggacgatgctgatatacagttagcggctcgatctgttctattcgctgcggttggaactgctggtcaacgttgcacaacttgccgtaggctgcttttgcatgagagtgtctatgacaaagtactcgagcaactgcttacctcatacaaacaagtcaaaatcggcaatcctcttgagaaagggacattgttaggaccattacatactcctgaatcaaaaaagaactttgagaaaggaattgaagtcatcaaatcccagggtggtaaaatactaacgggaggtaaagcagtcgaaggtgaaggaaactttgtggagcctacgataatcgagatatcagcagatgctgctgtcgtcaaagaagagctatttgctccggttctatatgttctaaagtttaagtcatttggagaggctgttgcgataaacaactcggttcctcaaggtctaagcagctcgatattcactcggaaccctgaaaacatcttcaggtggatcggaccactgggaagtgactgtggcattgtgaatgtgaacataccgacgaatggagctgagattggtggagcttttggaggcgagaaagcgactggtggtggtcgtgaagctggaagcgactcatggaaacagtacatgcgtcgatcgacttgtaccatcaactatggaaacgagttacctctagcgcaaggaattaacttcggttagatttttcagagatttactcgttaattaataatgttatgttggttcgatttcgatacttgtattgtatgccttgttctctccaagcctttgacttaagatgattacgcttttaatatatataaaaaaatattgaatatattttgattgttaatttgaag

SEQ ID NO: 24266 - protein, 538 aa, Arabidopsis thaliana
  peptide (1)..(538): Ceres Seq. ID no. 13610498
AFFTKDVHVSLSHSLFKIRSSFLRYDQPLEMGSANNEYEFLSEIGLTSHNLGSYVAGKWQANGPLVSTLNPANNQPIAQVVEASLEDYEQGLKACEEAAKIWMQVTAPKRGDIVRQIGDALRSKLDYLGRLLSLEMGKILAEGIGEVQEVIDMCDFAVGLSRQLNGSVIPSERPNHMMLEMWNPLGIVGVITAFNFPCAVLGWNACIALVCGNCVVWKGAPTTPLITIAMTKLVAEVLEKNNLPGAIFTAMCGGAEIGEAIAKDTRIPLVSFTGSSRVGSMVQQTVNARSGKTLLELSGNNAIIVMDDADIQLAARSVLFAAVGTAGQRCTTCRRLLLHESVYDKVLEQLLTSYKQVKIGNPLEKGTLLGPLHTPESKKNFEKGIEVIKSQGGKILTGGKAVEGEGNFVEPTIIEISADAAVVKEELFAPVLYVLKFKSFGEAVAINNSVPQGLSSSIFTRNPENIFRWIGPLGSDCGIVNVNIPTNGAEIGGAFGGEKATGGGREAGSDSWKQYMRRSTCTINYGNELPLAQGINFG

SEQ ID NO: 24267 - protein, 508 aa, Arabidopsis thaliana
  peptide (1)..(508): Ceres Seq. ID no. 13610499
MGSANNEYEFLSEIGLTSHNLGSYVAGKWQANGPLVSTLNPANNQPIAQVVEASLEDYEQGLKACEEAAKIWMQVTAPKRGDIVRQIGDALRSKLDYLGRLLSLEMGKILAEGIGEVQEVIDMCDFAVGLSRQLNGSVIPSERPNHMMLEMWNPLGIVGVITAFNFPCAVLGWNACIALVCGNCVVWKGAPTTPLITIAMTKLVAEVLEKNNLPGAIFTAMCGGAEIGEAIAKDTRIPLVSFTGSSRVGSMVQQTVNARSGKTLLELSGNNAIIVMDDADIQLAARSVLFAAVGTAGQRCTTCRRLLLHESVYDKVLEQLLTSYKQVKIGNPLEKGTLLGPLHTPESKKNFEKGIEVIKSQGGKILTGGKAVEGEGNFVEPTIIEISADAAVVKEELFAPVLYVLKFKSFGEAVAINNSVPQGLSSSIFTRNPENIFRWIGPLGSDCGIVNVNIPTNGAEIGGAFGGEKATGGGREAGSDSWKQYMRRSTCTINYGNELPLAQGINFG

SEQ ID NO: 24268 - protein, 436 aa, Arabidopsis thaliana
  peptide (1)..(436): Ceres Seq. ID no. 13610500
MQVTAPKRGDIVRQIGDALRSKLDYLGRLLSLEMGKILAEGIGEVQEVIDMCDFAVGLSRQLNGSVIPSERPNHMMLEMWNPLGIVGVITAFNFPCAVLGWNACIALVCGNCVVWKGAPTTPLITIAMTKLVAEVLEKNNLPGAIFTAMCGGAEIGEAIAKDTRIPLVSFTGSSRVGSMVQQTVNARSGKTLLELSGNNAIIVMDDADIQLAARSVLFAAVGTAGQRCTTCRRLLLHESVYDKVLEQLLTSYKQVKIGNPLEKGTLLGPLHTPESKKNFEKGIEVIKSQGGKILTGGKAVEGEGNFVEPTIIEISADAAVVKEELFAPVLYVLKFKSFGEAVAINNSVPQGLSSSIFTRNPENIFRWIGPLGSDCGIVNVNIPTNGAEIGGAFGGEKATGGGREAGSDSWKQYMRRSTCTINYGNELPLAQGINFG

SEQ ID NO: 24269 - DNA, 1267 bp, Arabidopsis thaliana
  misc_feature (1)..(1267): Ceres Seq. ID no. 12322044
  misc_feature (1)..(1267): Ortholog of  Ceres SEQ ID NO 15171257 as cited in SEQ ID NO 52268
aaacttgtttctcccgagagatatctatcatcacaatctccttccttcgtgttcatcaatctcccgccgcgcttcagacaagaaacaatgtctgggctgctggatggaatccccgaagcagtggctctgagatgcctggctcatgtgcctttacaccttcatcccaatttagaactcgtctctcgctcctggcgagctgctatccgcagtcatgagctcttcagagtccgtaaagagctccgatcttctgagcatctcctctgcgtctgtgctttcgatcctgagaacatctggcaagtctacagtcccaactgtgatcgctggctcaccctccctctccttccttctcgtatccgccaccttgcccatttcggtgctgtcactactgccggcatgctctttgtcttaggcggtggcagcgacgctgtcagccctgttaccggggatcacgacggtacctttgctactgaccaggtctggtcttacgactttgtacagagacagtggactcctcgcgcttcaatgctcgtgcctcgtgctatgttcgcctgctgcgttcttcaagggaagattgttgttgctggcggattcaccacttgcaggaaatccatatctggagcggagatgtatgatcctgagaatgacgtctggacatccatcccagatctccaccagactcataactctgcctgctcgggtctagtggtaaacgggaaagtccacgtcttgcacaaaggcttgtccacggtgcaggttcttgagagcgttaaactcgggtgggatgtcaaagactatggctggccgcaaggtccaatggtggtcgttgaggacgtgctttacgtgatgagccatgggctggtgttcaagcaagaaggtgacacgtggaagatggttgcatcggcctcagagtttaagcggaggatcggaatggcgatgacgagtttgagtgatgaggttttgatcgtaggaggagtgatcggacctgataggctcaattgggacatcaagcccttgtcagacgtcgacgctttgacagttgggaatgatcgtccggcctggaggagtgtggcgccgatgacaaggtgtcgtgggacgatccttggctgcacgcagttgacaatctgatggatgggaatgtggcttcattatgacgtctttcagttcttttttgttttgtattttcttcctgtttgttaactgttgtgagcattattgtttttaaatcttctttgagaaatgaaaataaacgaatagcagctatgtcttg

SEQ ID NO: 24270 - protein, 374 aa, Arabidopsis thaliana
  peptide (1)..(374): Ceres Seq. ID no. 12322045
KLVSPERYLSSQSPSFVFINLPPRFRQETMSGLLDGIPEAVALRCLAHVPLHLHPNLELVSRSWRAAIRSHELFRVRKELRSSEHLLCVCAFDPENIWQVYSPNCDRWLTLPLLPSRIRHLAHFGAVTTAGMLFVLGGGSDAVSPVTGDHDGTFATDQVWSYDFVQRQWTPRASMLVPRAMFACCVLQGKIVVAGGFTTCRKSISGAEMYDPENDVWTSIPDLHQTHNSACSGLVVNGKVHVLHKGLSTVQVLESVKLGWDVKDYGWPQGPMVVVEDVLYVMSHGLVFKQEGDTWKMVASASEFKRRIGMAMTSLSDEVLIVGGVIGPDRLNWDIKPLSDVDALTVGNDRPAWRSVAPMTRCRGTILGCTQLTI

SEQ ID NO: 24271 - protein, 345 aa, Arabidopsis thaliana
  peptide (1)..(345): Ceres Seq. ID no. 12322046
MSGLLDGIPEAVALRCLAHVPLHLHPNLELVSRSWRAAIRSHELFRVRKELRSSEHLLCVCAFDPENIWQVYSPNCDRWLTLPLLPSRIRHLAHFGAVTTAGMLFVLGGGSDAVSPVTGDHDGTFATDQVWSYDFVQRQWTPRASMLVPRAMFACCVLQGKIVVAGGFTTCRKSISGAEMYDPENDVWTSIPDLHQTHNSACSGLVVNGKVHVLHKGLSTVQVLESVKLGWDVKDYGWPQGPMVVVEDVLYVMSHGLVFKQEGDTWKMVASASEFKRRIGMAMTSLSDEVLIVGGVIGPDRLNWDIKPLSDVDALTVGNDRPAWRSVAPMTRCRGTILGCTQLTI

SEQ ID NO: 24272 - protein, 243 aa, Arabidopsis thaliana
  peptide (1)..(243): Ceres Seq. ID no. 12322047
MLFVLGGGSDAVSPVTGDHDGTFATDQVWSYDFVQRQWTPRASMLVPRAMFACCVLQGKIVVAGGFTTCRKSISGAEMYDPENDVWTSIPDLHQTHNSACSGLVVNGKVHVLHKGLSTVQVLESVKLGWDVKDYGWPQGPMVVVEDVLYVMSHGLVFKQEGDTWKMVASASEFKRRIGMAMTSLSDEVLIVGGVIGPDRLNWDIKPLSDVDALTVGNDRPAWRSVAPMTRCRGTILGCTQLTI

SEQ ID NO: 24273 - DNA, 1091 bp, Arabidopsis thaliana
  misc_feature (1)..(1091): Ceres Seq. ID no. 12335534
  misc_feature (1)..(1091): Ortholog of  Ceres SEQ ID NO 13656486 as cited in SEQ ID NO 69202
aacttttgccgagaaaatcagagacagaagaagaagaaaagcgaaaaaaagcaaaacatgaaggcgacgacgaagactccgatccacgtggtgtggtcatgggttaggagacaacctccgaaggtgaaggcttttctcgccgtggtcactggcatggcggctttggttcttctcagattcattgttcacgatcacgacaatctcttcgttgccgctgaggctgttcattccatcgggatctgtgtgctcatctacaaactcatgaaggagaagacctgtgccggattgtcactgaaatctcaggagcttacggcgatatttttagctgttaggctgtattgtagcattgtaatggaatatgatatacataccattcttgacttggctactttgggaacaactctctgggttatatttatgattcgtttcaagttaagagctagttacatggaggacaaagacaactttcctctctattatgtgcttgcgccctgtgttgcattagctgtgttcatccatccatcgacctctcataacataataaacagaatttcatgggctttatgtgtataccttgaagctgtttcagtactacctcagctacgagtgatgcagaacacaaagattgttgaaccgttcacggctcattatgtttttgcacttggagtagcaaggttcctcagctgtgcccactgggttttacaggttgtggacacgcggggacggttgcttgtagcattgggttatggattgtggccatcaatggttctgatctcagaaattgttcaaactttcatcttggcagatttctgttactactacgtcaaaagcgttttcggaggccagcttgttctccggctaccgtctggagtagtataagttcaaaagatagaaatactccaacgatgtcctgcgatgagcttgacggaaattctaattgggaaagatagctcaatttttctttacctctgatttcatcgtttatgtgtcttgaggtttcaccaagtgtctcggttacgaattaattttacagtgttgtatattttgcctatcaagggatttaacgtctttcaggtcgataagttatcttt

SEQ ID NO: 24274 - protein, 292 aa, Arabidopsis thaliana
  peptide (1)..(292): Ceres Seq. ID no. 12335535
NFCRENQRQKKKKSEKKQNMKATTKTPIHVVWSWVRRQPPKVKAFLAVVTGMAALVLLRFIVHDHDNLFVAAEAVHSIGICVLIYKLMKEKTCAGLSLKSQELTAIFLAVRLYCSIVMEYDIHTILDLATLGTTLWVIFMIRFKLRASYMEDKDNFPLYYVLAPCVALAVFIHPSTSHNIINRISWALCVYLEAVSVLPQLRVMQNTKIVEPFTAHYVFALGVARFLSCAHWVLQVVDTRGRLLVALGYGLWPSMVLISEIVQTFILADFCYYYVKSVFGGQLVLRLPSGVV

SEQ ID NO: 24275 - protein, 273 aa, Arabidopsis thaliana
  peptide (1)..(273): Ceres Seq. ID no. 12335536
MKATTKTPIHVVWSWVRRQPPKVKAFLAVVTGMAALVLLRFIVHDHDNLFVAAEAVHSIGICVLIYKLMKEKTCAGLSLKSQELTAIFLAVRLYCSIVMEYDIHTILDLATLGTTLWVIFMIRFKLRASYMEDKDNFPLYYVLAPCVALAVFIHPSTSHNIINRISWALCVYLEAVSVLPQLRVMQNTKIVEPFTAHYVFALGVARFLSCAHWVLQVVDTRGRLLVALGYGLWPSMVLISEIVQTFILADFCYYYVKSVFGGQLVLRLPSGVV

SEQ ID NO: 24276 - protein, 241 aa, Arabidopsis thaliana
  peptide (1)..(241): Ceres Seq. ID no. 12335537
MAALVLLRFIVHDHDNLFVAAEAVHSIGICVLIYKLMKEKTCAGLSLKSQELTAIFLAVRLYCSIVMEYDIHTILDLATLGTTLWVIFMIRFKLRASYMEDKDNFPLYYVLAPCVALAVFIHPSTSHNIINRISWALCVYLEAVSVLPQLRVMQNTKIVEPFTAHYVFALGVARFLSCAHWVLQVVDTRGRLLVALGYGLWPSMVLISEIVQTFILADFCYYYVKSVFGGQLVLRLPSGVV

SEQ ID NO: 24277 - DNA, 994 bp, Arabidopsis thaliana
  misc_feature (1)..(994): Ceres Seq. ID no. 13486834
  misc_feature (1)..(994): Ortholog of  Ceres SEQ ID NO 14313959 as cited in SEQ ID NO 57842
tgactgctctatttctcaatctctctcctaaatcaatcaatctttgtattttcatttagccagaacaaaaaaaatggtggagcaaaagagatacgctctgtttctagcgactttggactcagagttcgtgaagaaaacttacggaggataccacaacgtgttcgtgacgacgttcggagacgaaggagagcattgggactcctttagagtcgtcagcggagagtttcctgacgagaaagatctggagaaatacgatggcttcgttatcagcggaagctctcacgatgcctttgagaatgatgattggatccttaagctctgtgatattgtcaagaaaattgatgagatgaagaagaaaattcttggcatctgctttggtcatcagatcatagccagggtaaggggaggaacagtcggaagagcaaagaagggaccagaacttaaacttggagacataaccatcgtcaaggatgcgattacgcctggaagttacttcggaaacgagattcctgatagcatagcgatcatcaaatgtcaccaggacgaagtgttggtgctgcccgaaactgctaaagtgcttgcgtattccaagaactacgaggtggagatgtattcgattgaggatcatttgttctgtatccaaggacatcctgagtataacaaagagattctcttcgagattgttgatcgtgttcttgctctaggctacgtcaagcaagaatttgctgatgcggctaaggcaacgatggagaataggggagcagacaggaagctttgggagacgatttgcaagaacttcctcaaaggcagagttccaactaactagtttcactcccaaattatctatttggctcttgtcatattgaaacaatttgtggatttatgatcttgctttatttttattcaatgtataacgacatattaatctcggcgtgacttatttgtgttataccagttgataaatgaataagaagaacctaagctatttaaagcc

SEQ ID NO: 24278 - protein, 250 aa, Arabidopsis thaliana
  peptide (1)..(250): Ceres Seq. ID no. 13486835
MVEQKRYALFLATLDSEFVKKTYGGYHNVFVTTFGDEGEHWDSFRVVSGEFPDEKDLEKYDGFVISGSSHDAFENDDWILKLCDIVKKIDEMKKKILGICFGHQIIARVRGGTVGRAKKGPELKLGDITIVKDAITPGSYFGNEIPDSIAIIKCHQDEVLVLPETAKVLAYSKNYEVEMYSIEDHLFCIQGHPEYNKEILFEIVDRVLALGYVKQEFADAAKATMENRGADRKLWETICKNFLKGRVPTN

SEQ ID NO: 24279 - protein, 159 aa, Arabidopsis thaliana
  peptide (1)..(159): Ceres Seq. ID no. 13486836
MKKKILGICFGHQIIARVRGGTVGRAKKGPELKLGDITIVKDAITPGSYFGNEIPDSIAIIKCHQDEVLVLPETAKVLAYSKNYEVEMYSIEDHLFCIQGHPEYNKEILFEIVDRVLALGYVKQEFADAAKATMENRGADRKLWETICKNFLKGRVPTN

SEQ ID NO: 24280 - DNA, 1345 bp, Arabidopsis thaliana
  misc_feature (1)..(1345): Ceres Seq. ID no. 12327396
  misc_feature (1)..(1345): Ortholog of  Ceres SEQ ID NO 13654989 as cited in SEQ ID NO 63117
  misc_feature (1)..(1345): Ortholog of  Ceres SEQ ID NO 13657138 as cited in SEQ ID NO 65923
  misc_feature (1)..(1345): Ortholog of  Ceres SEQ ID NO 13584744 as cited in SEQ ID NO 69137
attttggtttttactgataactactctgtgagaagtttagttagctcgtgtgagagaagggtgtaatgagctgttttggttggtgtgggagtgaggattttcgcaacgctactgacactggcccaaggccagcgcataacccagcaggttacaatggaggccactatcaaagagctgatccacccatgaaccagcctgttattcccatgcagcctatttctgtaccagccattccagtggatgaattgagagatataactgataactatggttcaaagaccttgatcggcgagggttcttatggaagagtgttttatggtgttcttaaaagcggtggtgcagctgccatcaagaaacttgactctagtaagcagccagatcaagaatttctttcccagatatcaatggtttcgagattgcgacacgacaatgttactgcacttatgggctattgtgttgatggccctctccgtgttcttgcttatgaatttgctcctaaaggatctcttcatgatactcttcatggcaaaaaaggtgccaaaggagcacttagaggtcctgttatgacgtggcaacaaagagtcaaaatcgctgttggtgcagccagaggacttgagtatttgcatgagaaggtgagccctcaggttatccaccgagacatcaaatccagcaacgtacttctgtttgatgatgatgttgccaaaattggtgattttgatctgtctgatcaagcccctgacatggctgctcgccttcactcaactcgtgtgctaggaacctttggctaccacgctccagaatatgcaatgacaggaacgttgagctcaaagagcgatgtgtacagttttggcgttgttctgctggagctcctaactggtcgtaaaccagtcgatcataccttaccgcgtggacaacaaagtctagtgacatgggcaactcctaaactaagtgaagacaaagtgaagcaatgcgttgatgcaagactactcggagagtaccctcccaaagctgttggcaagctagctgcagtggctgcactctgtgtgcaatatgaggcaaattttagaccaaacatgagcattgtggtgaaggcacttcaacctcttttaaaccctcctcgttctgctcctcagactccacataggaacccctactgatcaaatattcaatcccctatatctcatcttctgatcatgatgattcatcaaatgtgtattattcattttggttgtgtattgtgtaaatttatgggaccttatctcattaactcttcattctcaagtcccacttttcaagacatgtgtatgtctctcctctatatcaatatattttatgtttccctgtg

SEQ ID NO: 24281 - protein, 363 aa, Arabidopsis thaliana
  peptide (1)..(363): Ceres Seq. ID no. 12327397
MSCFGWCGSEDFRNATDTGPRPAHNPAGYNGGHYQRADPPMNQPVIPMQPISVPAIPVDELRDITDNYGSKTLIGEGSYGRVFYGVLKSGGAAAIKKLDSSKQPDQEFLSQISMVSRLRHDNVTALMGYCVDGPLRVLAYEFAPKGSLHDTLHGKKGAKGALRGPVMTWQQRVKIAVGAARGLEYLHEKVSPQVIHRDIKSSNVLLFDDDVAKIGDFDLSDQAPDMAARLHSTRVLGTFGYHAPEYAMTGTLSSKSDVYSFGVVLLELLTGRKPVDHTLPRGQQSLVTWATPKLSEDKVKQCVDARLLGEYPPKAVGKLAAVAALCVQYEANFRPNMSIVVKALQPLLNPPRSAPQTPHRNPY

SEQ ID NO: 24282 - protein, 323 aa, Arabidopsis thaliana
  peptide (1)..(323): Ceres Seq. ID no. 12327398
MNQPVIPMQPISVPAIPVDELRDITDNYGSKTLIGEGSYGRVFYGVLKSGGAAAIKKLDSSKQPDQEFLSQISMVSRLRHDNVTALMGYCVDGPLRVLAYEFAPKGSLHDTLHGKKGAKGALRGPVMTWQQRVKIAVGAARGLEYLHEKVSPQVIHRDIKSSNVLLFDDDVAKIGDFDLSDQAPDMAARLHSTRVLGTFGYHAPEYAMTGTLSSKSDVYSFGVVLLELLTGRKPVDHTLPRGQQSLVTWATPKLSEDKVKQCVDARLLGEYPPKAVGKLAAVAALCVQYEANFRPNMSIVVKALQPLLNPPRSAPQTPHRNPY

SEQ ID NO: 24283 - protein, 316 aa, Arabidopsis thaliana
  peptide (1)..(316): Ceres Seq. ID no. 12327399
MQPISVPAIPVDELRDITDNYGSKTLIGEGSYGRVFYGVLKSGGAAAIKKLDSSKQPDQEFLSQISMVSRLRHDNVTALMGYCVDGPLRVLAYEFAPKGSLHDTLHGKKGAKGALRGPVMTWQQRVKIAVGAARGLEYLHEKVSPQVIHRDIKSSNVLLFDDDVAKIGDFDLSDQAPDMAARLHSTRVLGTFGYHAPEYAMTGTLSSKSDVYSFGVVLLELLTGRKPVDHTLPRGQQSLVTWATPKLSEDKVKQCVDARLLGEYPPKAVGKLAAVAALCVQYEANFRPNMSIVVKALQPLLNPPRSAPQTPHRNPY

SEQ ID NO: 24284 - DNA, 1303 bp, Arabidopsis thaliana
  misc_feature (1)..(1303): Ceres Seq. ID no. 12579851
  misc_feature (1)..(1303): Ortholog of  Ceres SEQ ID NO 14315189 as cited in SEQ ID NO 57702
aaactcaagtttcttgcaattacctacttacaacaaagcaactcgactcgaacaaacacatccatggctccttctgcgcaacctcttcctgtgagtgtttcggatgaaaaatatgcgaatgtcaagtgggaagagttggcattcaagtttgttcgtacggattatatgtatgttgcgaagtgcaatcatggagagagttttcaagaggggaagattcttccttttgctgatttgcaacttaacccttgcgctgctgttcttcagtatggccagggtttatatgaaggactgaaagcttacaggacagaagatggtcggattctgctattccgaccagaccaaaacggtctccgccttcaagccggagctgacagactctatatgccttatccttcggtcgatcaattcgtctccgccatcaaacaagttgctcttgccaacaagaaatggattcctcctccggggaaaggaacattgtatattaggcctatcttgtttgggagtggtccgattcttggttcatttcccattcctgagaccaccttcacagcttttgcctgtcctgttggacgttatcataaggataactctggtttgaatctgaaaatcgaagatcagtttcgtcgagcttttcctagtggaactggtggtgtgaagagcatcacaaactattgtcctgtttggataccattggcagaggcgaaaaaacaaggtttctctgatattttgtttttggatgctgcaactggcaaaaacattgaagaacttttcgcagctaatgtttttatgctcaagggcaatgttgtatcgacaccaacaattgcaggaactattttgcccggagtcactcgaaactgcgtaatggaattgtgtcgtgatttcggctaccaggtcgaggaacgtacgattcctctagtggactttctcgatgcggacgaagctttctgtactggcactgcttccattgtgactagtattgcatccgtaacctttaaagacaaaaagaccggattcaaaacaggggaagaaacattggctgcgaagctatacgagacgttaagtgatatccagacgggtcgggtcgaggataccaagggatggacggtggagattgaccgccagggctgaaagttgaaactgtaacttgatgctaaatatgtgtgtgtgtgtatacaaaacttatgtaagaaacatctgaagatgtctctgatctttgtgattgtgatgatcatgcatgtcctatcgttgcgatgtattttataaatgttcgtctgtaagttatttaataactatggctttttgc

SEQ ID NO: 24285 - protein, 375 aa, Arabidopsis thaliana
  peptide (1)..(375): Ceres Seq. ID no. 12579852
KLKFLAITYLQQSNSTRTNTSMAPSAQPLPVSVSDEKYANVKWEELAFKFVRTDYMYVAKCNHGESFQEGKILPFADLQLNPCAAVLQYGQGLYEGLKAYRTEDGRILLFRPDQNGLRLQAGADRLYMPYPSVDQFVSAIKQVALANKKWIPPPGKGTLYIRPILFGSGPILGSFPIPETTFTAFACPVGRYHKDNSGLNLKIEDQFRRAFPSGTGGVKSITNYCPVWIPLAEAKKQGFSDILFLDAATGKNIEELFAANVFMLKGNVVSTPTIAGTILPGVTRNCVMELCRDFGYQVEERTIPLVDFLDADEAFCTGTASIVTSIASVTFKDKKTGFKTGEETLAAKLYETLSDIQTGRVEDTKGWTVEIDRQG

SEQ ID NO: 24286 - protein, 354 aa, Arabidopsis thaliana
  peptide (1)..(354): Ceres Seq. ID no. 12579853
MAPSAQPLPVSVSDEKYANVKWEELAFKFVRTDYMYVAKCNHGESFQEGKILPFADLQLNPCAAVLQYGQGLYEGLKAYRTEDGRILLFRPDQNGLRLQAGADRLYMPYPSVDQFVSAIKQVALANKKWIPPPGKGTLYIRPILFGSGPILGSFPIPETTFTAFACPVGRYHKDNSGLNLKIEDQFRRAFPSGTGGVKSITNYCPVWIPLAEAKKQGFSDILFLDAATGKNIEELFAANVFMLKGNVVSTPTIAGTILPGVTRNCVMELCRDFGYQVEERTIPLVDFLDADEAFCTGTASIVTSIASVTFKDKKTGFKTGEETLAAKLYETLSDIQTGRVEDTKGWTVEIDRQG

SEQ ID NO: 24287 - protein, 320 aa, Arabidopsis thaliana
  peptide (1)..(320): Ceres Seq. ID no. 12579854
MYVAKCNHGESFQEGKILPFADLQLNPCAAVLQYGQGLYEGLKAYRTEDGRILLFRPDQNGLRLQAGADRLYMPYPSVDQFVSAIKQVALANKKWIPPPGKGTLYIRPILFGSGPILGSFPIPETTFTAFACPVGRYHKDNSGLNLKIEDQFRRAFPSGTGGVKSITNYCPVWIPLAEAKKQGFSDILFLDAATGKNIEELFAANVFMLKGNVVSTPTIAGTILPGVTRNCVMELCRDFGYQVEERTIPLVDFLDADEAFCTGTASIVTSIASVTFKDKKTGFKTGEETLAAKLYETLSDIQTGRVEDTKGWTVEIDRQG

SEQ ID NO: 24288 - DNA, 1847 bp, Arabidopsis thaliana
  misc_feature (1)..(1847): Ceres Seq. ID no. 13497503
  misc_feature (1)..(1847): Ortholog of  Ceres SEQ ID NO 14314108 as cited in SEQ ID NO 63184
  misc_feature (1)..(1847): Ortholog of  Ceres SEQ ID NO 13658253 as cited in SEQ ID NO 66650
aaagaacaacaaaacagaggaagaagaagaagaagatgaagcttctggctctgtttccatttctagcgatcgtgatccaactcagctgttgggagctaggaacagatgcattaccgagcggtgggttcgtgaggacgaaaggtgttcagtttagtctcaatggctatccatattacgctaatggcttcaatgcctactggctcatgtacgtagcctccgatccatcccaacggtctaagatctccaccgctttccaagatgcttctcgccatggattgaccgttgctcgaacctgggctttcagcgatggcggttacagggctcttcagtattcccctggctcctacaacgaggatatgtttcagggtttggattttgcgttagctgaggcaagaaggcatggtataaagataatactcagctttgccaataactacgagagcttcggagggaggaagcaatatgtggattgggctcgaagcagaggccgtcccgtttcttctgaagacgacttcttcactgactctcttgttaaagatttctacaagaaccatatcaaggctgtgctgaacagattcaatacctttaccaaagttcattacaaagatgacccaaccattatggcttgggagctcatgaacgagccccgttgcccctctgatccttccggaagagccattcaggcttggattactgaaatggctgctcatgtgaaatcactagacagaaaccatctgcttgaagctggcctcgaaggtttctatggtcagtcttcacctcaaagcaagactcttaacccacctggccagtttggaaccgatttcatcgccaataaccgcattcccggcattgatttcgtcacggttcactcttaccctgatgaatggtttccagactcaagcgagcaatcccaaatggatttcttgaacaaatggctagacgcacacatccaagacgcacagaacgttcttcacaaaccaataatattagcagagtttggtaaatcaatgaagaaaccaggttataccccagcgcagagagacatcgtcttcaacaccgtgtacagcaagatttacgggtctgcaaaacgaggaggtgcagcagcaggaggattgttctggcaacttctggtaaacggaattgataattttcaagatgggtatgggatcatacttagccaaagctcgtcgaccgttaacgtcatttcacagcaatcgcggaagttgactttgattaggaaaatcttcgctaggatgatcaatgtggagaaatggaagagagcgagaggtcagggacaagttgggaaacgaggtcacaaaatcaataactgaaatgatactaattaaaccacttttttatagcgaatggaacgatctcagctcgtccacgaaagttatagtgatagatttcataatatatagttttttggccggaatgaatgaactttattagtgcgacgaaaattattagtaataacccgtcaaaactcaaaaggttggttatttagtaatgggctttacttattaggcccactatgaaatacaagggcctagaatttctccagccacatgtgagttataacatgggcaaaaccattcaacaatgtttgttttggattctgtgaaagagatgactatcgttgataatttgaaggatgaagaagattcagaacaataaaacgtcgtcggcgtttgatttcagacatcgccggagagaacaagactctccatttgttacttccatggcttatgtgggtaggtcttggcgtaaacttgtattttatattctcgatttgtacggtttaatgattaaagaagaaaatagacaaaaaaaaattatttagctcc

SEQ ID NO: 24289 - protein, 442 aa, Arabidopsis thaliana
  peptide (1)..(442): Ceres Seq. ID no. 13497504
RTTKQRKKKKKMKLLALFPFLAIVIQLSCWELGTDALPSGGFVRTKGVQFSLNGYPYYANGFNAYWLMYVASDPSQRSKISTAFQDASRHGLTVARTWAFSDGGYRALQYSPGSYNEDMFQGLDFALAEARRHGIKIILSFANNYESFGGRKQYVDWARSRGRPVSSEDDFFTDSLVKDFYKNHIKAVLNRFNTFTKVHYKDDPTIMAWELMNEPRCPSDPSGRAIQAWITEMAAHVKSLDRNHLLEAGLEGFYGQSSPQSKTLNPPGQFGTDFIANNRIPGIDFVTVHSYPDEWFPDSSEQSQMDFLNKWLDAHIQDAQNVLHKPIILAEFGKSMKKPGYTPAQRDIVFNTVYSKIYGSAKRGGAAAGGLFWQLLVNGIDNFQDGYGIILSQSSSTVNVISQQSRKLTLIRKIFARMINVEKWKRARGQGQVGKRGHKINN

SEQ ID NO: 24290 - protein, 431 aa, Arabidopsis thaliana
  peptide (1)..(431): Ceres Seq. ID no. 13497505
MKLLALFPFLAIVIQLSCWELGTDALPSGGFVRTKGVQFSLNGYPYYANGFNAYWLMYVASDPSQRSKISTAFQDASRHGLTVARTWAFSDGGYRALQYSPGSYNEDMFQGLDFALAEARRHGIKIILSFANNYESFGGRKQYVDWARSRGRPVSSEDDFFTDSLVKDFYKNHIKAVLNRFNTFTKVHYKDDPTIMAWELMNEPRCPSDPSGRAIQAWITEMAAHVKSLDRNHLLEAGLEGFYGQSSPQSKTLNPPGQFGTDFIANNRIPGIDFVTVHSYPDEWFPDSSEQSQMDFLNKWLDAHIQDAQNVLHKPIILAEFGKSMKKPGYTPAQRDIVFNTVYSKIYGSAKRGGAAAGGLFWQLLVNGIDNFQDGYGIILSQSSSTVNVISQQSRKLTLIRKIFARMINVEKWKRARGQGQVGKRGHKINN

SEQ ID NO: 24291 - protein, 375 aa, Arabidopsis thaliana
  peptide (1)..(375): Ceres Seq. ID no. 13497506
MYVASDPSQRSKISTAFQDASRHGLTVARTWAFSDGGYRALQYSPGSYNEDMFQGLDFALAEARRHGIKIILSFANNYESFGGRKQYVDWARSRGRPVSSEDDFFTDSLVKDFYKNHIKAVLNRFNTFTKVHYKDDPTIMAWELMNEPRCPSDPSGRAIQAWITEMAAHVKSLDRNHLLEAGLEGFYGQSSPQSKTLNPPGQFGTDFIANNRIPGIDFVTVHSYPDEWFPDSSEQSQMDFLNKWLDAHIQDAQNVLHKPIILAEFGKSMKKPGYTPAQRDIVFNTVYSKIYGSAKRGGAAAGGLFWQLLVNGIDNFQDGYGIILSQSSSTVNVISQQSRKLTLIRKIFARMINVEKWKRARGQGQVGKRGHKINN

SEQ ID NO: 24292 - DNA, 1209 bp, Arabidopsis thaliana
  misc_feature (1)..(1209): Ceres Seq. ID no. 13490874
  misc_feature (1)..(1209): Ortholog of  Ceres SEQ ID NO 15180043 as cited in SEQ ID NO 0
aaacactctccgaaacagagaacattttgagtttttatctaaagctaaatcctttgagcaacaatggtgaaggcaacaaaagcagagaagaagatagcgtatgacacaaaactatgtcagcttatcgacgaatacactcagatcttagtcgttgcggcggacaacgtcggatcgactcagcttcagaacatcaggaaaggtcttcgtggagactcagtggttctcatgggtaagaacactatgatgaaacgttccgttagaatccactccgagaactctggaaacactgcaattttgaatctgcttcccctccttcagggaaacgttggtttgatcttcactaaaggtgatctcaaggaagtgagcgaggaggttgccaaatacaaggttggtgctcctgctcgtgtgggtttagttgctcctattgatgtggttgttcaacctggcaacactggtcttgacccatctcaaacatcgttcttccaggtgcttaacattcccactaagattaacaagggtactgttgaaattatcacccctgtggagcttatcaagcaaggtgacaaggttgggtcttctgaggctgcccttctagctaagcttggcattaggcctttctcgtatggtctagttgttcagtcggtttatgataatggatcagtcttcagtccagaggttcttgatcttactgaagatcaacttgttgaaaagtttgcttctggtatctctatggtcacttccttggctctagctgtttcttaccctacccttgcggctgcaccgcatatgttcatcaatgcctacaagaatgctttagctattgctgttgctactgactacactttccctcaagcagagaaggtcaaggaattcttaaaggatcccagcaagtttgttgttgctgcagcggcagtgtctgcggatgcaggtggtggtagtgctcaagctggagctgcagctaaggtagaggagaagaaagaagaatcagacgaagaagactatgagggtggtttcggtttgtttgacgaagagtaggttttgtctataaggttttacctttttttgtggtggcttatagttataatctaagtgttgcttcgtttgtagtaaggctgatctcaaatgtttttggtttcaagacaattcagattttatgtttggaaagacttttatctaccaacttcaaaagaaatgttagtttttttcttt

SEQ ID NO: 24293 - protein, 323 aa, Arabidopsis thaliana
  peptide (1)..(323): Ceres Seq. ID no. 13490875
MVKATKAEKKIAYDTKLCQLIDEYTQILVVAADNVGSTQLQNIRKGLRGDSVVLMGKNTMMKRSVRIHSENSGNTAILNLLPLLQGNVGLIFTKGDLKEVSEEVAKYKVGAPARVGLVAPIDVVVQPGNTGLDPSQTSFFQVLNIPTKINKGTVEIITPVELIKQGDKVGSSEAALLAKLGIRPFSYGLVVQSVYDNGSVFSPEVLDLTEDQLVEKFASGISMVTSLALAVSYPTLAAAPHMFINAYKNALAIAVATDYTFPQAEKVKEFLKDPSKFVVAAAAVSADAGGGSAQAGAAAKVEEKKEESDEEDYEGGFGLFDEE

SEQ ID NO: 24294 - protein, 269 aa, Arabidopsis thaliana
  peptide (1)..(269): Ceres Seq. ID no. 13490876
MGKNTMMKRSVRIHSENSGNTAILNLLPLLQGNVGLIFTKGDLKEVSEEVAKYKVGAPARVGLVAPIDVVVQPGNTGLDPSQTSFFQVLNIPTKINKGTVEIITPVELIKQGDKVGSSEAALLAKLGIRPFSYGLVVQSVYDNGSVFSPEVLDLTEDQLVEKFASGISMVTSLALAVSYPTLAAAPHMFINAYKNALAIAVATDYTFPQAEKVKEFLKDPSKFVVAAAAVSADAGGGSAQAGAAAKVEEKKEESDEEDYEGGFGLFDEE

SEQ ID NO: 24295 - protein, 264 aa, Arabidopsis thaliana
  peptide (1)..(264): Ceres Seq. ID no. 13490877
MMKRSVRIHSENSGNTAILNLLPLLQGNVGLIFTKGDLKEVSEEVAKYKVGAPARVGLVAPIDVVVQPGNTGLDPSQTSFFQVLNIPTKINKGTVEIITPVELIKQGDKVGSSEAALLAKLGIRPFSYGLVVQSVYDNGSVFSPEVLDLTEDQLVEKFASGISMVTSLALAVSYPTLAAAPHMFINAYKNALAIAVATDYTFPQAEKVKEFLKDPSKFVVAAAAVSADAGGGSAQAGAAAKVEEKKEESDEEDYEGGFGLFDEE

SEQ ID NO: 24296 - DNA, 1290 bp, Arabidopsis thaliana
  misc_feature (1)..(1290): Ceres Seq. ID no. 12321823
  misc_feature (1)..(1290): Ortholog of  Ceres SEQ ID NO 14303884 as cited in SEQ ID NO 53685
  misc_feature (1)..(1290): Ortholog of  Ceres SEQ ID NO 14316111 as cited in SEQ ID NO 60001
  misc_feature (1)..(1290): Ortholog of  Ceres SEQ ID NO 12614713 as cited in SEQ ID NO 60887
  misc_feature (1)..(1290): Ortholog of  Ceres SEQ ID NO 14309256 as cited in SEQ ID NO 0
gattttttcaaatggtaagttcataacttcccaaattactataaataagtgttaaagttagtcattatcaaattaagccactccactaattacaagctccaaaagctttctccttctttttctctctaatctctatttcgtacggatttctctaaccggagcgatggagattgacggtggagatcgtatttccggtgaacgaccgatcattatggtcaccaacgacgacggaatagacgcgcctggccttcgttctcttgttcgtgtcctcgtctccactaacctctacgatgttcgcgtttgcgctcctgattcggagaaatctgctgttagtcacagtataatatggagtagaccactcactgcaaaacgagtagagatcgatggagctactgcttattctgttgatggaactcctgcggattgcactggtttgggcttatcggaagcactctttccttctcgtcctgacctggttctgagtggtataaacgtgggtagcaactgcggttataacatcgtctattctggaactgttgctggcgctcgtgaagccttcctttatgatgtgccttctgcctccatatcatatgattttgattggaaacgtggagagatgaatgctaatgattttgccctttctgcccaagcctgcttgcccattatcaacggcatactcggtgcaatcaagaacaaaactcaccctatgcaatgctttctgaatatcgatttgccgactgatattgctaaccacaagggatacaaactaactagacaaggtaaaagcatgggtaaaatgggatggagacaagtggaagaggaagcacaagggccgaagatgttatcaacaatgacaatggatacagagtcaggagtagtctcatcagagaacgacacatctgctcatgcgggaaaagatagccgtttattcaaaagagagttaagggcaagcatcagtgaagaagggagtgattctcattacctaaaagaaggatttattacggtgacgccgcttggagctctatctcagactgatgtggattgccaaaactactacaaagaatggcttcccaagattacaaaccagtcatgctcctcctcatccctttgatgctacaacatgagagaaaataaaaactctattaggaaattacccattgtggaccacaatttgtggtagacctattattatatcagtaccagttctttagttttcttaagtcttgacttactattgttgtgagcagcaaaatagttgttgttacaagtccattaattatcgtgagcagc

SEQ ID NO: 24297 - protein, 315 aa, Arabidopsis thaliana
  peptide (1)..(315): Ceres Seq. ID no. 12321824
MEIDGGDRISGERPIIMVTNDDGIDAPGLRSLVRVLVSTNLYDVRVCAPDSEKSAVSHSIIWSRPLTAKRVEIDGATAYSVDGTPADCTGLGLSEALFPSRPDLVLSGINVGSNCGYNIVYSGTVAGAREAFLYDVPSASISYDFDWKRGEMNANDFALSAQACLPIINGILGAIKNKTHPMQCFLNIDLPTDIANHKGYKLTRQGKSMGKMGWRQVEEEAQGPKMLSTMTMDTESGVVSSENDTSAHAGKDSRLFKRELRASISEEGSDSHYLKEGFITVTPLGALSQTDVDCQNYYKEWLPKITNQSCSSSSL

SEQ ID NO: 24298 - protein, 299 aa, Arabidopsis thaliana
  peptide (1)..(299): Ceres Seq. ID no. 12321825
MVTNDDGIDAPGLRSLVRVLVSTNLYDVRVCAPDSEKSAVSHSIIWSRPLTAKRVEIDGATAYSVDGTPADCTGLGLSEALFPSRPDLVLSGINVGSNCGYNIVYSGTVAGAREAFLYDVPSASISYDFDWKRGEMNANDFALSAQACLPIINGILGAIKNKTHPMQCFLNIDLPTDIANHKGYKLTRQGKSMGKMGWRQVEEEAQGPKMLSTMTMDTESGVVSSENDTSAHAGKDSRLFKRELRASISEEGSDSHYLKEGFITVTPLGALSQTDVDCQNYYKEWLPKITNQSCSSSSL

SEQ ID NO: 24299 - protein, 164 aa, Arabidopsis thaliana
  peptide (1)..(164): Ceres Seq. ID no. 12321826
MNANDFALSAQACLPIINGILGAIKNKTHPMQCFLNIDLPTDIANHKGYKLTRQGKSMGKMGWRQVEEEAQGPKMLSTMTMDTESGVVSSENDTSAHAGKDSRLFKRELRASISEEGSDSHYLKEGFITVTPLGALSQTDVDCQNYYKEWLPKITNQSCSSSSL

SEQ ID NO: 24300 - DNA, 1973 bp, Arabidopsis thaliana
  misc_feature (1)..(1973): Ceres Seq. ID no. 13580459
  misc_feature (1)..(1973): Ortholog of  Ceres SEQ ID NO 12626078 as cited in SEQ ID NO 69113
aaaaaaagaaaaaagtttcactctttggaggttggaacttaattccttgattaagaaaccccagaaaaaccctaaacccttgaagcgtctccttctctagttctttgcaagcggaaatgtatcgagtgctatcaaagttatcttcttcaattggctcgtctacttccaggaaactggtttctgggcggattataagtagcagaaactatgcggccaaggatatcagtttcgggatcggagctcgggcagctatggtgcagggtgtatccgaggttgcagaagctgtgaaagtcactatgggaccaaagggaagaaatgtgataattgagagcagttatggtggaccaaagatcacaaaggatggtgtcaccgtggcaaaaagcatatcatttcaagctaaagctaagaacattggtgccgaactcgtcaaacaggttgcaagtgccactaacaaggttgctggagatggtaccacttgtgccactgttttgactcaggcgatactcatcgaaggctgcaagtcggtggctgcaggtgtaaatgtgatggatttgcgtgttggaattaatatggcaattgctgcagttgtctctgatttgaaaagcagagctgttatgattagcaccccagaagagatcacacaggttgccactatatctgcaaatggggagcgtgaaataggggaactaattgcaagagccatggagaaagttggaaaggaaggggttatcactgttgctgatggtaacactttagataacgagctggaagtagtggaaggaatgaagctagccagaggttacatttctccttattttatcacggatgagaagacccagaaatgcgagcttgaaaatcccatcatcctcattcatgagaagaagatttcagacattaactctttgttgaaagttttagaagcggctgtgaaaagtagtagaccacttcttattgtagcagaagatgttgagagtgatgcattagctatgcttattctcaataagcatcatggtgggcttaaggtatgtgctatcaaggctccggggtttggtgacaacaggaaagcaagcttggatgatcttgcagttcttactggtgcagaggttatctctgaggagcgtgggctatctctagaaaaaattcgccctgaattgcttggaactgcgaagaaggttaccgttacccgtgatgacactattatcctacatggtggtggtgataaaaagctaattgaagaaagatgtgaagagttaagatcagccaatgaaaagagtacatccacttttgataaagagaaaacgcaagaaagactctcaaagctatcaggtggtgttgcagtcttcaaggtgggaggggcaagtgaatctgaagttggagagagaaaagacagagtcactgatgctttaaacgccacaagagcagctgtagaagaaggcatcataccgggtggtggtgtggctctattatatgcgacaaaggctttagacaaccttcaaactgaaaacgaggatcaaagaagaggtgttcagattgttcagaatgctctcaaggctcctgcatttacaatagctgcaaatgccggttacgatggttctttagtggttggcaagttattagagcaagacgattgcaattttggtttcgatgcagccaaaggtaaatatgtggatatggtgaaagctggaatcatagacccagtcaaggtgatcagaaccgccttaacatgctgctagcgtttctttgcttttgacaacaacagaggcctcagtgcttgtgaaggcagacgagaacactccaaaccatgtccctgatatggccagcatgggcatgtgatcttgtaacctctacaaaaaaagaaacattcaaatttttatttttctctactaaagttagaaacttttctcgattttaatttggttgtctggttctatatatattgttacagtgaatttttaatgaattttgttgaatcc

SEQ ID NO: 24301 - protein, 538 aa, Arabidopsis thaliana
  peptide (1)..(538): Ceres Seq. ID no. 13580460
MYRVLSKLSSSIGSSTSRKLVSGRIISSRNYAAKDISFGIGARAAMVQGVSEVAEAVKVTMGPKGRNVIIESSYGGPKITKDGVTVAKSISFQAKAKNIGAELVKQVASATNKVAGDGTTCATVLTQAILIEGCKSVAAGVNVMDLRVGINMAIAAVVSDLKSRAVMISTPEEITQVATISANGEREIGELIARAMEKVGKEGVITVADGNTLDNELEVVEGMKLARGYISPYFITDEKTQKCELENPIILIHEKKISDINSLLKVLEAAVKSSRPLLIVAEDVESDALAMLILNKHHGGLKVCAIKAPGFGDNRKASLDDLAVLTGAEVISEERGLSLEKIRPELLGTAKKVTVTRDDTIILHGGGDKKLIEERCEELRSANEKSTSTFDKEKTQERLSKLSGGVAVFKVGGASESEVGERKDRVTDALNATRAAVEEGIIPGGGVALLYATKALDNLQTENEDQRRGVQIVQNALKAPAFTIAANAGYDGSLVVGKLLEQDDCNFGFDAAKGKYVDMVKAGIIDPVKVIRTALTCC

SEQ ID NO: 24302 - protein, 493 aa, Arabidopsis thaliana
  peptide (1)..(493): Ceres Seq. ID no. 13580461
MVQGVSEVAEAVKVTMGPKGRNVIIESSYGGPKITKDGVTVAKSISFQAKAKNIGAELVKQVASATNKVAGDGTTCATVLTQAILIEGCKSVAAGVNVMDLRVGINMAIAAVVSDLKSRAVMISTPEEITQVATISANGEREIGELIARAMEKVGKEGVITVADGNTLDNELEVVEGMKLARGYISPYFITDEKTQKCELENPIILIHEKKISDINSLLKVLEAAVKSSRPLLIVAEDVESDALAMLILNKHHGGLKVCAIKAPGFGDNRKASLDDLAVLTGAEVISEERGLSLEKIRPELLGTAKKVTVTRDDTIILHGGGDKKLIEERCEELRSANEKSTSTFDKEKTQERLSKLSGGVAVFKVGGASESEVGERKDRVTDALNATRAAVEEGIIPGGGVALLYATKALDNLQTENEDQRRGVQIVQNALKAPAFTIAANAGYDGSLVVGKLLEQDDCNFGFDAAKGKYVDMVKAGIIDPVKVIRTALTCC

SEQ ID NO: 24303 - protein, 478 aa, Arabidopsis thaliana
  peptide (1)..(478): Ceres Seq. ID no. 13580462
MGPKGRNVIIESSYGGPKITKDGVTVAKSISFQAKAKNIGAELVKQVASATNKVAGDGTTCATVLTQAILIEGCKSVAAGVNVMDLRVGINMAIAAVVSDLKSRAVMISTPEEITQVATISANGEREIGELIARAMEKVGKEGVITVADGNTLDNELEVVEGMKLARGYISPYFITDEKTQKCELENPIILIHEKKISDINSLLKVLEAAVKSSRPLLIVAEDVESDALAMLILNKHHGGLKVCAIKAPGFGDNRKASLDDLAVLTGAEVISEERGLSLEKIRPELLGTAKKVTVTRDDTIILHGGGDKKLIEERCEELRSANEKSTSTFDKEKTQERLSKLSGGVAVFKVGGASESEVGERKDRVTDALNATRAAVEEGIIPGGGVALLYATKALDNLQTENEDQRRGVQIVQNALKAPAFTIAANAGYDGSLVVGKLLEQDDCNFGFDAAKGKYVDMVKAGIIDPVKVIRTALTCC

SEQ ID NO: 24304 - DNA, 1565 bp, Arabidopsis thaliana
  misc_feature (1)..(1565): Ceres Seq. ID no. 13490743
  misc_feature (1)..(1565): Ortholog of  Ceres SEQ ID NO 15169655 as cited in SEQ ID NO 64922
  misc_feature (1)..(1565): Ortholog of  Ceres SEQ ID NO 13596004 as cited in SEQ ID NO 68212
aatttaattcgatttcgacaatttcatttaattcttcgatttctccgcttgtcactgtttcgtatcgccattttctgtttgcatacacttgtatatatttatattaacagtccaaaattcttcgaaattgtcccgagctttgagcatataaaaaatgtcttcgataatccatggagctggagctgctacgacgacgttatcgacgtttaattccgtcgattccaagaaactcttcgttgctccttctcgcacaaatctttcagtgaggagccagagatatatagtggctggatctgatgcgagtaagaagagctttggttctggacttagagttcgtcactctcagaaattgattccaaatgctgttgcgacgaaggaggcggatacgtctgcgagcactggacatgaactattgcttttcgaggctcttcaggaaggtctggaagaagagatggacagagatccacatgtatgtgttatgggtgaagatgttggccattacggaggttcctacaaggtaaccaaaggccttgctgataaatttggtgacctcagggttctcgacactcctatttgtgaaaatgcattcaccggtatgggcattggagctgccatgactggtctaagacccgttattgaaggtatgaacatgggtttcctcctcctcgccttcaaccaaatctccaacaactgtggaatgcttcactacacatccggtggtcagtttacgatcccggttgtcatccgtggacctggtggagtgggacgccagcttggtgctgagcattcacagaggttagaatcttactttcagtccatccctgggatccagatggttgcttgctcaactccttacaacgccaaagggttgatgaaagccgcaataagaagcgagaaccctgtgattctgttcgaacacgtgctgctttacaatctcaaggagaaaatcccggatgaagattacatctgtaaccttgaagaagctgagatggtcagacctggcgagcacattaccatcctcacttactcgcgaatgaggtaccatgtgatgcaggcagcaaaaactctggtgaacaaagggtatgaccccgaggttatcgacatcaggtcactgaaaccgttcgaccttcacacaattggaaactcggtgaagaaaacacatcgggttttgatcgtggaggagtgtatgagaaccggtgggattggggcaagtcttacagctgccatcaacgagaactttcatgactacttagatgctccggtgatgtgtttatcttctcaagacgttcctacaccttacgctggtacactggaggagtggaccgtggttcaaccggctcagatcgtgaccgctgtcgagcagctttgccagtaaattcatatttatccgatgaaccattatttatcatttacctctccatttcctttctctgtagcttagttcttaaagaatttgtctaagatggtttgtttttgttaaagtttgtctcctttgttgtgtcttttaatatggtttgtaactcagaatgtttgtttgttaattttatctcccactttcttttaag

SEQ ID NO: 24305 - protein, 406 aa, Arabidopsis thaliana
  peptide (1)..(406): Ceres Seq. ID no. 13490744
MSSIIHGAGAATTTLSTFNSVDSKKLFVAPSRTNLSVRSQRYIVAGSDASKKSFGSGLRVRHSQKLIPNAVATKEADTSASTGHELLLFEALQEGLEEEMDRDPHVCVMGEDVGHYGGSYKVTKGLADKFGDLRVLDTPICENAFTGMGIGAAMTGLRPVIEGMNMGFLLLAFNQISNNCGMLHYTSGGQFTIPVVIRGPGGVGRQLGAEHSQRLESYFQSIPGIQMVACSTPYNAKGLMKAAIRSENPVILFEHVLLYNLKEKIPDEDYICNLEEAEMVRPGEHITILTYSRMRYHVMQAAKTLVNKGYDPEVIDIRSLKPFDLHTIGNSVKKTHRVLIVEECMRTGGIGASLTAAINENFHDYLDAPVMCLSSQDVPTPYAGTLEEWTVVQPAQIVTAVEQLCQ

SEQ ID NO: 24306 - protein, 307 aa, Arabidopsis thaliana
  peptide (1)..(307): Ceres Seq. ID no. 13490745
MDRDPHVCVMGEDVGHYGGSYKVTKGLADKFGDLRVLDTPICENAFTGMGIGAAMTGLRPVIEGMNMGFLLLAFNQISNNCGMLHYTSGGQFTIPVVIRGPGGVGRQLGAEHSQRLESYFQSIPGIQMVACSTPYNAKGLMKAAIRSENPVILFEHVLLYNLKEKIPDEDYICNLEEAEMVRPGEHITILTYSRMRYHVMQAAKTLVNKGYDPEVIDIRSLKPFDLHTIGNSVKKTHRVLIVEECMRTGGIGASLTAAINENFHDYLDAPVMCLSSQDVPTPYAGTLEEWTVVQPAQIVTAVEQLCQ

SEQ ID NO: 24307 - protein, 298 aa, Arabidopsis thaliana
  peptide (1)..(298): Ceres Seq. ID no. 13490746
MGEDVGHYGGSYKVTKGLADKFGDLRVLDTPICENAFTGMGIGAAMTGLRPVIEGMNMGFLLLAFNQISNNCGMLHYTSGGQFTIPVVIRGPGGVGRQLGAEHSQRLESYFQSIPGIQMVACSTPYNAKGLMKAAIRSENPVILFEHVLLYNLKEKIPDEDYICNLEEAEMVRPGEHITILTYSRMRYHVMQAAKTLVNKGYDPEVIDIRSLKPFDLHTIGNSVKKTHRVLIVEECMRTGGIGASLTAAINENFHDYLDAPVMCLSSQDVPTPYAGTLEEWTVVQPAQIVTAVEQLCQ

SEQ ID NO: 24308 - DNA, 1449 bp, Arabidopsis thaliana
  misc_feature (1)..(1449): Ceres Seq. ID no. 13487671
  misc_feature (1)..(1449): Ortholog of  Ceres SEQ ID NO 15172321 as cited in SEQ ID NO 55415
aagggttctttttggtaattttcccgaatcacacaagtgagctagctcatcagagtccacgagcttcccactaaaaaattgaaaattgttgcttctgtcatctgaaattaaacaaagcgagaaaaggcgatacaaacgatttcgaatgcttcatcttctcctttgaaaatccttcttctgcttaatgctgctagatatggatctcggtgttcttcttccatcattgcaatctgtttatgtgctggtgttttacttcgtttacttggccgttgccggagaaattctccccgggaaagttattcgcggcgtccttttatcagatggctctcaacttcgttaccgatgcaatggtctattggcactaatattgttggtagctattttgggaatctgtgcaaaacttggcattgtatcacctcttgtggttgcggatagaggacttgagttactctcagctacttttattttctgtgttttggtgacattagcattgtatgttactgggcgaagttcctcgaataagggttcttccctaaagcctcatgtctcaggaaatcttgtacatgactggtggtttggaatacagctgaatcctcagtttatgagcattgatctcaagtttttctttgtcagagccgggatgatgggatggctgcttatcaatctctctattctggcaaaaagtgtgcaggatggttccttgagtcagtcgatgattctttaccagatcttctgtgcgttatatatattggactactttgttcatgaagaatacatgacctctacgtgggacataattgcagagagactaggcttcatgctagtgtttggagatctcctgtggattcctttcacttttagcattcagggctggtggcttttgcacaacaaagtagaactaacagttcctgcgattgtagtcaattgccttgtcttcttgatagggtacatggtttttcgaggagctaacaaacaaaaacatatctttaagaagaacccaaaaacaccaatatggggcaagcctccagtggtagttggtggaaagttactggtttcaggctattggggaattgcaaggcactgtaattaccttggcgacttgatgcttgctctgtccttcagtttgccatgtggaataagttctccggttccatatttctacccgatataccttctgatactattgatatggagagaacgaagagacgaggttcgatgtgcagagaagtacaaggagatatgggcagagtatcttagacttgtcccctggagaatacttccttatgtttattagatgtgccaagagccaagtcatgaatcctttcagattcatcctcttgtgtcttattttttcataatcttgttttattttagcaatgctcgagtgaaactttgtagtacacgtttgagaataacttcagtccttattattattttagcattgatagc

SEQ ID NO: 24309 - protein, 369 aa, Arabidopsis thaliana
  peptide (1)..(369): Ceres Seq. ID no. 13487672
MLLDMDLGVLLPSLQSVYVLVFYFVYLAVAGEILPGKVIRGVLLSDGSQLRYRCNGLLALILLVAILGICAKLGIVSPLVVADRGLELLSATFIFCVLVTLALYVTGRSSSNKGSSLKPHVSGNLVHDWWFGIQLNPQFMSIDLKFFFVRAGMMGWLLINLSILAKSVQDGSLSQSMILYQIFCALYILDYFVHEEYMTSTWDIIAERLGFMLVFGDLLWIPFTFSIQGWWLLHNKVELTVPAIVVNCLVFLIGYMVFRGANKQKHIFKKNPKTPIWGKPPVVVGGKLLVSGYWGIARHCNYLGDLMLALSFSLPCGISSPVPYFYPIYLLILLIWRERRDEVRCAEKYKEIWAEYLRLVPWRILPYVY

SEQ ID NO: 24310 - protein, 365 aa, Arabidopsis thaliana
  peptide (1)..(365): Ceres Seq. ID no. 13487673
MDLGVLLPSLQSVYVLVFYFVYLAVAGEILPGKVIRGVLLSDGSQLRYRCNGLLALILLVAILGICAKLGIVSPLVVADRGLELLSATFIFCVLVTLALYVTGRSSSNKGSSLKPHVSGNLVHDWWFGIQLNPQFMSIDLKFFFVRAGMMGWLLINLSILAKSVQDGSLSQSMILYQIFCALYILDYFVHEEYMTSTWDIIAERLGFMLVFGDLLWIPFTFSIQGWWLLHNKVELTVPAIVVNCLVFLIGYMVFRGANKQKHIFKKNPKTPIWGKPPVVVGGKLLVSGYWGIARHCNYLGDLMLALSFSLPCGISSPVPYFYPIYLLILLIWRERRDEVRCAEKYKEIWAEYLRLVPWRILPYVY

SEQ ID NO: 24311 - protein, 230 aa, Arabidopsis thaliana
  peptide (1)..(230): Ceres Seq. ID no. 13487674
MSIDLKFFFVRAGMMGWLLINLSILAKSVQDGSLSQSMILYQIFCALYILDYFVHEEYMTSTWDIIAERLGFMLVFGDLLWIPFTFSIQGWWLLHNKVELTVPAIVVNCLVFLIGYMVFRGANKQKHIFKKNPKTPIWGKPPVVVGGKLLVSGYWGIARHCNYLGDLMLALSFSLPCGISSPVPYFYPIYLLILLIWRERRDEVRCAEKYKEIWAEYLRLVPWRILPYVY

SEQ ID NO: 24312 - DNA, 1303 bp, Arabidopsis thaliana
  misc_feature (1)..(1303): Ceres Seq. ID no. 13488993
  misc_feature (1)..(1303): Ortholog of  Ceres SEQ ID NO 13598532 as cited in SEQ ID NO 65204
  misc_feature (1)..(1303): Ortholog of  Ceres SEQ ID NO 13656849 as cited in SEQ ID NO 65764
  misc_feature (1)..(1303): Ortholog of  Ceres SEQ ID NO 13655298 as cited in SEQ ID NO 68914
acaacgcacttcttctgttgtcatcatcatcgtccacttgaaacaaacctgacgatcaaagagaagattgcgatcgcaaatttctccattttttcagatcgaaattgatgtcgaaagctagggtttatacagatgttaacgttgttcgtcctaaagagtattgggactacgagtctctcgttgttcaatggggtcatcaagatgattatgaggttgtgagaaaagttggtagaggaaaatacagtgaagttttcgaaggtaaaaacgtcaatacgaatgagcgttgcgttatcaagatcctcaaacccgtaaaaaagaagaagataaagagagagatcaaaatacttcagaacctatgtggtggaccaaatattgttaagctgtatgatattgttagagatgagcactccaaaacacctagcttggtatttgagtttgtcaacagtgtggactttaaagtattgtatccaacattgactgattacgatatccggtactatatttatgagcttctgaaggcattggatttctgtcactctcaaggaataatgcatagggatgttaagcctcataatgtcatgatagatcatcagctgcgtaaacttcgtctgatagattggggccttgctgagttttaccatcccggaaaagagtataatgttcgcgtggcctcgagatacttcaagggtcccgagcttttagttgatctacaggattatgactattctttagacatgtggagtcttggttgcatgtttgctggcatgatattccgtaaggaaccgttcttttatggccatgataatcatgatcaacttgtcaaaattgccaaggtgttgggaaccaatgagttagatcattacctaaacaaatatcagctagatcttgaccctcaactggaagcacttgttggaagacatgtccccaaaccatggtccaagtttatcaacgcggacaaccaacatttggtctcacctgaggcaattgattttctcgataagcttcttcagtatgatcatcaagacagattaaccgcaagagaagccatggatcatccatacttcgctcaagttaaagccgcagagagcagcagactacgaactcagtaaaaccgaagcttgattgatgatgcttactactatttttcaaccaaaaactttgtaatgattttgttgtatcaaaattgtggtaatctttactttcatagaaacataatcaacagcgaaaagaagccaacttatattaaaaaaaaaggttccacacaaagcttcattatataatcatagcaagagacttattgttg

SEQ ID NO: 24313 - protein, 333 aa, Arabidopsis thaliana
  peptide (1)..(333): Ceres Seq. ID no. 13488994
MSKARVYTDVNVVRPKEYWDYESLVVQWGHQDDYEVVRKVGRGKYSEVFEGKNVNTNERCVIKILKPVKKKKIKREIKILQNLCGGPNIVKLYDIVRDEHSKTPSLVFEFVNSVDFKVLYPTLTDYDIRYYIYELLKALDFCHSQGIMHRDVKPHNVMIDHQLRKLRLIDWGLAEFYHPGKEYNVRVASRYFKGPELLVDLQDYDYSLDMWSLGCMFAGMIFRKEPFFYGHDNHDQLVKIAKVLGTNELDHYLNKYQLDLDPQLEALVGRHVPKPWSKFINADNQHLVSPEAIDFLDKLLQYDHQDRLTAREAMDHPYFAQVKAAESSRLRTQ

SEQ ID NO: 24314 - protein, 186 aa, Arabidopsis thaliana
  peptide (1)..(186): Ceres Seq. ID no. 13488995
MHRDVKPHNVMIDHQLRKLRLIDWGLAEFYHPGKEYNVRVASRYFKGPELLVDLQDYDYSLDMWSLGCMFAGMIFRKEPFFYGHDNHDQLVKIAKVLGTNELDHYLNKYQLDLDPQLEALVGRHVPKPWSKFINADNQHLVSPEAIDFLDKLLQYDHQDRLTAREAMDHPYFAQVKAAESSRLRTQ

SEQ ID NO: 24315 - protein, 176 aa, Arabidopsis thaliana
  peptide (1)..(176): Ceres Seq. ID no. 13488996
MIDHQLRKLRLIDWGLAEFYHPGKEYNVRVASRYFKGPELLVDLQDYDYSLDMWSLGCMFAGMIFRKEPFFYGHDNHDQLVKIAKVLGTNELDHYLNKYQLDLDPQLEALVGRHVPKPWSKFINADNQHLVSPEAIDFLDKLLQYDHQDRLTAREAMDHPYFAQVKAAESSRLRTQ

SEQ ID NO: 24316 - DNA, 1414 bp, Arabidopsis thaliana
  misc_feature (1)..(1414): Ceres Seq. ID no. 13494229
  misc_feature (1)..(1414): Ortholog of  Ceres SEQ ID NO 14308851 as cited in SEQ ID NO 55618
atttgctccgtttctctctcaaaaactacacacccgtaccacaccaccaccctcctcgtttcctcagagatcccctctctaacttctaaggatatagaaaatggcagatggtgaagacattcagcctctcgtctgtgacaatggaaccggaatggttaaggctggatttgctggagatgatgcaccaagagctgtattccctagcatcgttggtcgtcctcgacacactggtgtcatggttggtatgggacaaaaagatgcttacgttggtgatgaggctcagtctaagagaggtattttgacattgaaatatcctattgagcatggtattgttagcaactgggatgatatggagaagatttggcatcacactttctacaatgagctccgtgttgcacctgaagaacaccctgttcttctcactgaggctcctctcaaccccaaggccaatcgtgagaaaatgactcagattatgtttgaaactttcaacactcctgccatgtatgtcgctatccaagctgttctttccctctacgctagtggtcgtactactggtattgtgttggactctggagatggtgtgagtcacactgttccaatttatgaaggatatgctcttccacatgctattctgcgtttggaccttgcaggccgtgaccttactgattacctcatgaagatcttaaccgagcgtggttactcattcactacctcagcagagcgtgaaatcgtaagggatgtgaaagagaaacttgcttacatagcacttgactacgagcaagagatggaaacagcaaacacaagctcatccgttgagaagagctatgagttgcctgatggacaggtgatcaccattggaggagagagattccgctgcccggaggttctgttccaaccgtctttggtgggaatggaagctgctggtattcacgagaccacttacaattccatcatgaagtgtgatgtggatatcaggaaggatctgtatggaaacattgtgctcagtggtggaaccaccatgttccctggaattgctgataggatgagcaaagagatcactgctttggctccaagcagcatgaagattaaggtggttgctccaccagagaggaagtacagtgtctggattggaggctccattctagcatcactcagtaccttccaacagatgtggatagcaaaggccgagtatgatgagtcagggccatcaatagtccacaggaagtgcttctaagattaagctcaaatcaaagtgatgaatgattgttctgtattggtaaagccttttgttcatcgactttgttgcaaaatattcttttgttttctatgtttcttcaccactacattacatttctttcttgttgttatcctcttttggtgtttctgctattaatcgaaaaagaaattttctttt

SEQ ID NO: 24317 - protein, 377 aa, Arabidopsis thaliana
  peptide (1)..(377): Ceres Seq. ID no. 13494230
MADGEDIQPLVCDNGTGMVKAGFAGDDAPRAVFPSIVGRPRHTGVMVGMGQKDAYVGDEAQSKRGILTLKYPIEHGIVSNWDDMEKIWHHTFYNELRVAPEEHPVLLTEAPLNPKANREKMTQIMFETFNTPAMYVAIQAVLSLYASGRTTGIVLDSGDGVSHTVPIYEGYALPHAILRLDLAGRDLTDYLMKILTERGYSFTTSAEREIVRDVKEKLAYIALDYEQEMETANTSSSVEKSYELPDGQVITIGGERFRCPEVLFQPSLVGMEAAGIHETTYNSIMKCDVDIRKDLYGNIVLSGGTTMFPGIADRMSKEITALAPSSMKIKVVAPPERKYSVWIGGSILASLSTFQQMWIAKAEYDESGPSIVHRKCF

SEQ ID NO: 24318 - protein, 360 aa, Arabidopsis thaliana
  peptide (1)..(360): Ceres Seq. ID no. 13494231
MVKAGFAGDDAPRAVFPSIVGRPRHTGVMVGMGQKDAYVGDEAQSKRGILTLKYPIEHGIVSNWDDMEKIWHHTFYNELRVAPEEHPVLLTEAPLNPKANREKMTQIMFETFNTPAMYVAIQAVLSLYASGRTTGIVLDSGDGVSHTVPIYEGYALPHAILRLDLAGRDLTDYLMKILTERGYSFTTSAEREIVRDVKEKLAYIALDYEQEMETANTSSSVEKSYELPDGQVITIGGERFRCPEVLFQPSLVGMEAAGIHETTYNSIMKCDVDIRKDLYGNIVLSGGTTMFPGIADRMSKEITALAPSSMKIKVVAPPERKYSVWIGGSILASLSTFQQMWIAKAEYDESGPSIVHRKCF

SEQ ID NO: 24319 - protein, 332 aa, Arabidopsis thaliana
  peptide (1)..(332): Ceres Seq. ID no. 13494232
MVGMGQKDAYVGDEAQSKRGILTLKYPIEHGIVSNWDDMEKIWHHTFYNELRVAPEEHPVLLTEAPLNPKANREKMTQIMFETFNTPAMYVAIQAVLSLYASGRTTGIVLDSGDGVSHTVPIYEGYALPHAILRLDLAGRDLTDYLMKILTERGYSFTTSAEREIVRDVKEKLAYIALDYEQEMETANTSSSVEKSYELPDGQVITIGGERFRCPEVLFQPSLVGMEAAGIHETTYNSIMKCDVDIRKDLYGNIVLSGGTTMFPGIADRMSKEITALAPSSMKIKVVAPPERKYSVWIGGSILASLSTFQQMWIAKAEYDESGPSIVHRKCF

SEQ ID NO: 24320 - DNA, 1228 bp, Arabidopsis thaliana
  misc_feature (1)..(1228): Ceres Seq. ID no. 12321495
  misc_feature (1)..(1228): Ortholog of  Ceres SEQ ID NO 12635907 as cited in SEQ ID NO 525
  misc_feature (1)..(1228): Ortholog of  Ceres SEQ ID NO 13503463 as cited in SEQ ID NO 65057
aaaatttccctatcaaagtgaatgactttcttctccaaaatcgatttctgaaacatcccatttcttgatttccctctttgtcgcaaacccaacaaagtagagcaaaaccctaaaacggaaaccttccatggcgattatctctgaggtagaagaagaaagcagtagcagccgacccatgatatttccctttaggggcaacactcagttctgcaaacccattagggtttttggagaaagttttcgactttctcggagaacagagcgattttctcaagaaaccctccgcggaggacgagatcgtcgtcgcggttagggcggcgaaggagaagttgaaaaaggctgagaagaagaaagctgagaaggagagtgtgaagcctgtggagaagaaagccgagaaggaaattgttaagcttgtggagaagaaggtagagaaggagagtgtcaagccaactatggctgcttcaagtgctgagcctatagaagtggagaagcctaaggacgaagaggagaagaaggaatctggtcccattgttcctaacaaaggtaatggaactgatcttgagaactactcatggatccagaatctccaggaggttacagttaacattccagtgcctactgggactaaagcacggactgttgtatgtgagattaagaaaaaccgtctcaaggttggtctcaaaggccaggatccaatcgtcgatggggagctctaccgatctgtgaagcctgatgactgctactggaatatcgaggatcaaaaggtgatttcgattctcttgactaagtctgatcagatggagtggtggaaatgctgtgtgaaaggtgaacctgaaatcgatactcagaaagttgaaccagagactagtaaattaggtgaccttgatccagaaactcgctcgactgttgagaaaatgatgtttgatcaaaggcaaaagcagatgggtcttccaacaagcgaggagctacagaagcaagagatccttaagaaattcatgtctgagcatccggagatggacttctcaaatgcaaagtttaactgatgctcgtatcgtccagtctctctgccaaaaaagaaaaaccagtttttgcatcttcaccagtttttaaaagcttgttacttttgtttagtttctcatttctgaatacatagttcggtttatgtccctagctttatgattctctggtttttattgaaactttttctgaaaaaaaaactgttttctcc

SEQ ID NO: 24321 - protein, 196 aa, Arabidopsis thaliana
  peptide (1)..(196): Ceres Seq. ID no. 12321496
MAASSAEPIEVEKPKDEEEKKESGPIVPNKGNGTDLENYSWIQNLQEVTVNIPVPTGTKARTVVCEIKKNRLKVGLKGQDPIVDGELYRSVKPDDCYWNIEDQKVISILLTKSDQMEWWKCCVKGEPEIDTQKVEPETSKLGDLDPETRSTVEKMMFDQRQKQMGLPTSEELQKQEILKKFMSEHPEMDFSNAKFN

SEQ ID NO: 24322 - DNA, 1304 bp, Arabidopsis thaliana
  misc_feature (1)..(1304): Ceres Seq. ID no. 13575209
  misc_feature (1)..(1304): Ortholog of  Ceres SEQ ID NO 13597033 as cited in SEQ ID NO 63479
aaaaggaagtatacgtttgtttctttgctctgaggtatcttcgtttgatacaaggcgaaatcgatcttcttcttcttcttcttcatccccttgcgttttccatctccatcgtctgctgaaaccatttgatcgatctctcaggttacttagaatggcacaagaagccgatgggatcagattggaccaaagacatgggaaggctcgagtgagagttggaagagtttggcgtcatgctcatgatggatctcatcactttgttgaatggaatgttagcatcagtcttctctctcactgtctctcttcttaccgtcttgatgataactctgatattgtcgccacagataccattaaaaacactgtttatgtgaaagccaaggaatgtggagatcggctctcggtggaggaatttgccatacttattgggaaacacttttgctcattttatccacaggtttttactgctatcgtgaatatcattgagaagccctgggagcgtgtctccatcgatggaaaaccacatttacatggttttaagcttgggtcagagaaccatactacagaggcaagagtagaaaagtctggtgcattaaacttaacttccggtattggaggactagctctactgaagacaacccagtcaggatttgagaggtttgtcagagacaaatacaccattctgcctgaaactcgtgagcgaatgctggccacagaggttaatgcatcttggaggtactcgtatgagtcagttgcaagcattccaacaaaaggactctactttagcgagaagttcatggacgttaagaaagttctgatggatactttctttggtccaccagaaactggtgtgtatagcccttctgtccaacgcactctctacctcatgggaagcgccgtactgaaaaggttcgctgatgtatcatcgattcacctaaaaatgccaaatattcattttctaccagtaaatctttcaacgaaggaaaacccttcaatggtgaagtttaaagatgatgtgtacctgccaaccgatgaacctcatggatctatagaagcaactctaagccgtataacctcgaaactatgaggttttaagacaatacatcatacatggaaatatcaaacacaatttcacaggttctgcaacttttggcgtttgcctcgtttatgaaataacaatttaaatgaagtgtgtaaggtcaacttttggcttttgttgcaagaataatactgtaactgcaaacagtttcacataaaaatgtagcttacatatattatcactgattcgcagtcatgttacatttttaccc

SEQ ID NO: 24323 - protein, 359 aa, Arabidopsis thaliana
  peptide (1)..(359): Ceres Seq. ID no. 13575210
KGSIRLFLCSEVSSFDTRRNRSSSSSSSSPCVFHLHRLLKPFDRSLRLLRMAQEADGIRLDQRHGKARVRVGRVWRHAHDGSHHFVEWNVSISLLSHCLSSYRLDDNSDIVATDTIKNTVYVKAKECGDRLSVEEFAILIGKHFCSFYPQVFTAIVNIIEKPWERVSIDGKPHLHGFKLGSENHTTEARVEKSGALNLTSGIGGLALLKTTQSGFERFVRDKYTILPETRERMLATEVNASWRYSYESVASIPTKGLYFSEKFMDVKKVLMDTFFGPPETGVYSPSVQRTLYLMGSAVLKRFADVSSIHLKMPNIHFLPVNLSTKENPSMVKFKDDVYLPTDEPHGSIEATLSRITSKL

SEQ ID NO: 24324 - protein, 309 aa, Arabidopsis thaliana
  peptide (1)..(309): Ceres Seq. ID no. 13575211
MAQEADGIRLDQRHGKARVRVGRVWRHAHDGSHHFVEWNVSISLLSHCLSSYRLDDNSDIVATDTIKNTVYVKAKECGDRLSVEEFAILIGKHFCSFYPQVFTAIVNIIEKPWERVSIDGKPHLHGFKLGSENHTTEARVEKSGALNLTSGIGGLALLKTTQSGFERFVRDKYTILPETRERMLATEVNASWRYSYESVASIPTKGLYFSEKFMDVKKVLMDTFFGPPETGVYSPSVQRTLYLMGSAVLKRFADVSSIHLKMPNIHFLPVNLSTKENPSMVKFKDDVYLPTDEPHGSIEATLSRITSKL

SEQ ID NO: 24325 - DNA, 1394 bp, Arabidopsis thaliana
  misc_feature (1)..(1394): Ceres Seq. ID no. 13494265
  misc_feature (1)..(1394): Ortholog of  Ceres SEQ ID NO 13502952 as cited in SEQ ID NO 62271
  misc_feature (1)..(1394): Ortholog of  Ceres SEQ ID NO 13502973 as cited in SEQ ID NO 68052
  misc_feature (1)..(1394): Ortholog of  Ceres SEQ ID NO 13596000 as cited in SEQ ID NO 68188
acataacacaaaatcctcttctcttctttaataacttttagaaacacaaataaaagtttaattacttttaagcccaacaaaaatgggttatgctaaatcagccatgctgatcttcttactagcattggtcatcgcatcttgtgccacggccatggacatgtccgttgtttcctccaacgataaccaccacgtgaccgccggtcccggccgccgtcagggtattttcgacgctgaagccaccttgatgttcgagtcatggatggtcaaacatgggaaagtgtacgactccgttgccgagaaggaacggcgtttaactatttttgaggacaacctccgttttatcactaaccggaacgctgagaatctcagttaccggcttggtttgaatcggtttgcggatttatctctccatgaatacggagaaatttgccatggggctgatccaagacctcctaggaaccacgtcttcatgactagcagcaaccgatacaagactagtgatggtgatgttcttcctaagtccgttgactggagaaacgaaggcgcagtgactgaagtcaaagatcaaggcctttgcaggagttgttgggctttctccactgtgggagcagtggaaggcttaaacaagattgtgactggagagctagtaactttgtctgagcaagatttgatcaattgtaacaaagaaaacaatggttgcggaggaggcaaagtcgagacagcctatgagttcatcatgaacaatggtggtcttggtaccgacaacgattatccttacaaagctctcaatggagtctgcgaaggccgcctcaaggaagacaacaagaatgttatgattgatgggtatgagaatttgcctgcaaacgatgaagccgctctcatgaaagcggttgctcaccagcctgtgactgccgttgtcgattccagcagccgagagtttcagctttatgaatcgggagtgtttgacggaacttgcggaacaaacctaaaccatggtgttgttgtggtcgggtatggaaccgagaatggtcgtgactactggattgtgaaaaactcgaggggcgacacatggggggaggctggctacatgaagatggctcgcaacattgccaatccaagaggcctatgtggcatcgcaatgcgagcttcataccctctcaagaactcgttttctacggataaagtttcggttgcctaataatatgaactaaatgtatgccatggaacggatcggttaagccattatcgttattcgactttgaaggaaactaaaaaataatgtggtcgattggtttggttttgttatatattatgcatttgtatgggggtcagtcaatgtttgaactttgtataatatttctttgggtctagtgataaatattttcccttttgct

SEQ ID NO: 24326 - protein, 371 aa, Arabidopsis thaliana
  peptide (1)..(371): Ceres Seq. ID no. 13494266
MGYAKSAMLIFLLALVIASCATAMDMSVVSSNDNHHVTAGPGRRQGIFDAEATLMFESWMVKHGKVYDSVAEKERRLTIFEDNLRFITNRNAENLSYRLGLNRFADLSLHEYGEICHGADPRPPRNHVFMTSSNRYKTSDGDVLPKSVDWRNEGAVTEVKDQGLCRSCWAFSTVGAVEGLNKIVTGELVTLSEQDLINCNKENNGCGGGKVETAYEFIMNNGGLGTDNDYPYKALNGVCEGRLKEDNKNVMIDGYENLPANDEAALMKAVAHQPVTAVVDSSSREFQLYESGVFDGTCGTNLNHGVVVVGYGTENGRDYWIVKNSRGDTWGEAGYMKMARNIANPRGLCGIAMRASYPLKNSFSTDKVSVA

SEQ ID NO: 24327 - protein, 364 aa, Arabidopsis thaliana
  peptide (1)..(364): Ceres Seq. ID no. 13494267
MLIFLLALVIASCATAMDMSVVSSNDNHHVTAGPGRRQGIFDAEATLMFESWMVKHGKVYDSVAEKERRLTIFEDNLRFITNRNAENLSYRLGLNRFADLSLHEYGEICHGADPRPPRNHVFMTSSNRYKTSDGDVLPKSVDWRNEGAVTEVKDQGLCRSCWAFSTVGAVEGLNKIVTGELVTLSEQDLINCNKENNGCGGGKVETAYEFIMNNGGLGTDNDYPYKALNGVCEGRLKEDNKNVMIDGYENLPANDEAALMKAVAHQPVTAVVDSSSREFQLYESGVFDGTCGTNLNHGVVVVGYGTENGRDYWIVKNSRGDTWGEAGYMKMARNIANPRGLCGIAMRASYPLKNSFSTDKVSVA

SEQ ID NO: 24328 - protein, 348 aa, Arabidopsis thaliana
  peptide (1)..(348): Ceres Seq. ID no. 13494268
MDMSVVSSNDNHHVTAGPGRRQGIFDAEATLMFESWMVKHGKVYDSVAEKERRLTIFEDNLRFITNRNAENLSYRLGLNRFADLSLHEYGEICHGADPRPPRNHVFMTSSNRYKTSDGDVLPKSVDWRNEGAVTEVKDQGLCRSCWAFSTVGAVEGLNKIVTGELVTLSEQDLINCNKENNGCGGGKVETAYEFIMNNGGLGTDNDYPYKALNGVCEGRLKEDNKNVMIDGYENLPANDEAALMKAVAHQPVTAVVDSSSREFQLYESGVFDGTCGTNLNHGVVVVGYGTENGRDYWIVKNSRGDTWGEAGYMKMARNIANPRGLCGIAMRASYPLKNSFSTDKVSVA

SEQ ID NO: 24329 - DNA, 1156 bp, Arabidopsis thaliana
  misc_feature (1)..(1156): Ceres Seq. ID no. 12384851
  misc_feature (1)..(1156): Ortholog of  Ceres SEQ ID NO 14312711 as cited in SEQ ID NO 1401
  misc_feature (1)..(1156): Ortholog of  Ceres SEQ ID NO 13586635 as cited in SEQ ID NO 14217
  misc_feature (1)..(1156): Ortholog of  Ceres SEQ ID NO 15170220 as cited in SEQ ID NO 55383
  misc_feature (1)..(1156): Ortholog of  Ceres SEQ ID NO 14304198 as cited in SEQ ID NO 56479
  misc_feature (1)..(1156): Ortholog of  Ceres SEQ ID NO 14316543 as cited in SEQ ID NO 57118
  misc_feature (1)..(1156): Ortholog of  Ceres SEQ ID NO 12616285 as cited in SEQ ID NO 63483
acatcttaaaaagtaaaaacacattcatctatccaacaaaaaaaaaaaaaaaaaggagaaatggaaggaatcgatcatagaatggtgagtgtcaatggcataactatgcacattgccgagaaaggtcccaaagaaggacctgtggtgcttctcctccatggattccctgatctctggtacacgtggcgtcaccagattagtgggttatcatctctaggttaccgcgctgtagctccagacctccgaggctacggagactctgattcgccagagtctttctccgagtacacgtgtcttaacgtcgttggggacctcgtagctcttctggacagtgttgctggaaatcaagagaaggtgtttctggtcggtcatgattggggagccattatcggatggtttctctgtttgtttcgacctgaaaagattaacggctttgtgtgtttgagtgtgccgtatagatcaagaaaccctaaagtcaagcccgttcaagggttcaaggctgtatttggagatgattactacatttgtagatttcaggaaccggggaagattgaaggagagattgcaagtgcagatccaagaatatttctgaggaacctcttcacagggaggacactcggtccgccgattttacctaaggataatccctttggggaaaaacctaaccctaatagcgaaaacattgaattgcctgaatggttttctaagaaagatctcgatttctatgtctccaaattcgagaaggcaggatttaccggtggattgaactactacagagccatggatctgaattgggagctcactgcaccatggaccggagctaagattcaagttccagtgaagttcatgacaggtgacttcgacatggtttacaccacaccagggatgaaagagtacattcacggtggtggatttgctgcagatgttccaactcttcaagagatagtggtgattgaagatgctggtcacttcgttaaccaagagaaacctcaagaggtcactgctcacatcaatgacttcttcaccaagcttcgggacaacaacaaaagcttttagagttctcgtttggttctattatgttggctctcaaaacaagttggttcttgcatgtgttgtttcgacaagattttgaataagacttggcattatgaagccc

SEQ ID NO: 24330 - protein, 331 aa, Arabidopsis thaliana; identical to SEQ ID NO: 21476
  peptide (1)..(331): Ceres Seq. ID no. 12384852

SEQ ID NO: 24331 - protein, 324 aa, Arabidopsis thaliana; identical to SEQ ID NO: 21477
  peptide (1)..(324): Ceres Seq. ID no. 12384853

SEQ ID NO: 24332 - protein, 316 aa, Arabidopsis thaliana; identical to SEQ ID NO: 21478
  peptide (1)..(316): Ceres Seq. ID no. 12384854

SEQ ID NO: 24333 - DNA, 1406 bp, Arabidopsis thaliana
  misc_feature (1)..(1406): Ceres Seq. ID no. 12371799
  misc_feature (1)..(1406): Ortholog of  Ceres SEQ ID NO 12636863 as cited in SEQ ID NO 0
aatgcacacaaacatttacccaaaatggcatcggcggttcagaaatcagcgttgctcttatgtggagactacatggaagcctatgaaacgattgttcctctctatgttctccaatcgtttggggttagcgttcattgcgtttcacccaaccgcaacgccggcgatcgctgcgttatgtctgcccacgatttcttgggcctcgagctatacaccgagcttgtcgttgaccagttgactttaaacgcaaacttcgatgacgtcactccggagaattacgacgtcatcatcatcccaggaggccgattcacggagcttctcagcgccgacgagaaatgcgttgacctcgtggcgcgattcgccgaatccaagaagctgatcttcactagctgtcatagccaggttatgctgatggcggccggaatcctcgccggtggtgtgaaatgcacggcgtttgaaagcataaagcctttgatcgaactctccggcggtgagtggtggcaacagcctgggattcagagcatgttcgagatcaccgattgcgttaaagacgggaatttcatgagtacggttggttggccaacgcttggtcacggcattaagcttttgcttgaatctcttggtggcaaagtctgtagcttggagaagaagcaagcttctgtgcttttcctcattggggactatgtagaagattatgggatcaatgtaccgtttagagcactacaagctttaggttgtaaagtggatgctgtgacaccgaacaagaagaagggagaagtgtgtgcaacggcggtttatgaccttgaggatggacggcagattcctgcagagaagcgtggacataacttctttgtgactgcatcgtgggatgatatatgtgtggatgattatgactgtgtagtggttccaggagggagatcacctgagctattggtgatgaatgaaaaggctgttgctttggttaagagttttgcagagaaagataaggtgtttgcagctattggacaggggaaattgcttcttgcagccactggtgttcttaaggggaagcgatgcgcgagtgggaaagggatgaaggtgatggtgaaggtggctggaggtgaggctgtgatggaaaagggatgtgtaactgatgggaaggttgtgacggcagcatcagccacggatctgcctgcctttttgtttgatttatcaactgctcttggtctaactgtcatgttctaagattttgcaactaaaaaacataaaagatagtttgagtaataaaatcatatcttcaatttgctcaattgaagtgaaaagaaaaacaaaagagctcgattgtagtgtctctgctttcatgagttcatggcactcctaacaaactatattgtagctgcttcttggaaataaaagcatgtagtttggtg

SEQ ID NO: 24334 - protein, 406 aa, Arabidopsis thaliana
  peptide (1)..(406): Ceres Seq. ID no. 12371800
NAHKHLPKMASAVQKSALLLCGDYMEAYETIVPLYVLQSFGVSVHCVSPNRNAGDRCVMSAHDFLGLELYTELVVDQLTLNANFDDVTPENYDVIIIPGGRFTELLSADEKCVDLVARFAESKKLIFTSCHSQVMLMAAGILAGGVKCTAFESIKPLIELSGGEWWQQPGIQSMFEITDCVKDGNFMSTVGWPTLGHGIKLLLESLGGKVCSLEKKQASVLFLIGDYVEDYGINVPFRALQALGCKVDAVTPNKKKGEVCATAVYDLEDGRQIPAEKRGHNFFVTASWDDICVDDYDCVVVPGGRSPELLVMNEKAVALVKSFAEKDKVFAAIGQGKLLLAATGVLKGKRCASGKGMKVMVKVAGGEAVMEKGCVTDGKVVTAASATDLPAFLFDLSTALGLTVMF

SEQ ID NO: 24335 - protein, 398 aa, Arabidopsis thaliana
  peptide (1)..(398): Ceres Seq. ID no. 12371801
MASAVQKSALLLCGDYMEAYETIVPLYVLQSFGVSVHCVSPNRNAGDRCVMSAHDFLGLELYTELVVDQLTLNANFDDVTPENYDVIIIPGGRFTELLSADEKCVDLVARFAESKKLIFTSCHSQVMLMAAGILAGGVKCTAFESIKPLIELSGGEWWQQPGIQSMFEITDCVKDGNFMSTVGWPTLGHGIKLLLESLGGKVCSLEKKQASVLFLIGDYVEDYGINVPFRALQALGCKVDAVTPNKKKGEVCATAVYDLEDGRQIPAEKRGHNFFVTASWDDICVDDYDCVVVPGGRSPELLVMNEKAVALVKSFAEKDKVFAAIGQGKLLLAATGVLKGKRCASGKGMKVMVKVAGGEAVMEKGCVTDGKVVTAASATDLPAFLFDLSTALGLTVMF

SEQ ID NO: 24336 - protein, 382 aa, Arabidopsis thaliana
  peptide (1)..(382): Ceres Seq. ID no. 12371802
MEAYETIVPLYVLQSFGVSVHCVSPNRNAGDRCVMSAHDFLGLELYTELVVDQLTLNANFDDVTPENYDVIIIPGGRFTELLSADEKCVDLVARFAESKKLIFTSCHSQVMLMAAGILAGGVKCTAFESIKPLIELSGGEWWQQPGIQSMFEITDCVKDGNFMSTVGWPTLGHGIKLLLESLGGKVCSLEKKQASVLFLIGDYVEDYGINVPFRALQALGCKVDAVTPNKKKGEVCATAVYDLEDGRQIPAEKRGHNFFVTASWDDICVDDYDCVVVPGGRSPELLVMNEKAVALVKSFAEKDKVFAAIGQGKLLLAATGVLKGKRCASGKGMKVMVKVAGGEAVMEKGCVTDGKVVTAASATDLPAFLFDLSTALGLTVMF

SEQ ID NO: 24337 - DNA, 1200 bp, Arabidopsis thaliana
  misc_feature (1)..(1200): Ceres Seq. ID no. 12422777
  misc_feature (1)..(1200): Ortholog of  Ceres SEQ ID NO 12633896 as cited in SEQ ID NO 0
atttattgaatgttctttgaagaagaagaaggcgacgacacaaaaaccttgcatttgcatccatggcgtcgatgccgagcaaacttcttccagtcctagtctgctacgtttttcttttcccctttgcatcatcatctgattattctggggtatctcttccatcttcgtcgcctaaagtctcggtgggcctgtactacgagtctctctgtccctactgctcttccttcattgttaaccacctcgcgaagctcttcgaagacgatctcatatcaatcgtcgatctccatctctctccgtggggcaataccaagctccgttccgataacgtcactgccgtttgccaggtactccttcgttttcttcaatttacgaattcgatgtttccgattcgattgaattaagcttcaattttgagaaaatcaccctttccttaactgaaatttgatgttgtttgcatctgagattgacaaattggtcttctctcatttgcataaatcttgttgcttttgtgttgcagcatggggcatttgaatgcttcttggataccgtagaagcttgtgcaattgatgcttggcctaaagtaagcgatcatttcccgttcatatactgtgtcgagaagttggtgactgaacataagtatgacaagtgggagacgtgttatgagaagctcaatctcaactcgaaacctgttgcagattgtctcagcagtggacatgggaatgagcttgctttgcactatgctgcagaaacgaatgcgcttcagcctcctcacaagtatgtgccctgggtagtcgtggatggtcagccactttatgaggactatgaaaacttcataagctacatctgcaaggcttacaaaggtaataaagtacctggcgcatgtaccaaatatgcaaccggcaacttcattcgtagtgtcaaattgaaacgctcccctctggtgtcctggaaaggcgtgaataagatgtgggatgtgttggaacgtatcacaacctctttatcgtcatacatcgacatcaccggcctgctatgaacacttcctgtatctttttcccatgtaacaaaccaccccaaaaagctatctagattctgatatttaatgaatgtgtgtaatctttatgtttcatcaaaatgtatgtttgttgtgttgtgagaggcctttcaagaatcacatgttgggtaaaaaacctatttcggttt

SEQ ID NO: 24338 - protein, 112 aa, Arabidopsis thaliana
  peptide (1)..(112): Ceres Seq. ID no. 12422778
MASMPSKLLPVLVCYVFLFPFASSSDYSGVSLPSSSPKVSVGLYYESLCPYCSSFIVNHLAKLFEDDLISIVDLHLSPWGNTKLRSDNVTAVCQVLLRFLQFTNSMFPIRLN

SEQ ID NO: 24339 - protein, 109 aa, Arabidopsis thaliana
  peptide (1)..(109): Ceres Seq. ID no. 12422779
MPSKLLPVLVCYVFLFPFASSSDYSGVSLPSSSPKVSVGLYYESLCPYCSSFIVNHLAKLFEDDLISIVDLHLSPWGNTKLRSDNVTAVCQVLLRFLQFTNSMFPIRLN

SEQ ID NO: 24340 - DNA, 1128 bp, Arabidopsis thaliana
  misc_feature (1)..(1128): Ceres Seq. ID no. 12385382
  misc_feature (1)..(1128): Ortholog of  Ceres SEQ ID NO 12562983 as cited in SEQ ID NO 53309
aaaacatctctcaacaacaacaacaaaacaaaacttgcacaatggtgaactttgttgaggtacaaaaaccattgttgtacggtctgatgaaaatggctggcgtcgttccttacactttagagatcgaaccagggacgaagatcaacttttgggtccctaaggaaaccctaaagaagaattccggtaccggaaaaccaacgaaacccgataaacctaaaaagcctgtcgtcttgttaatccatggtttcgctggcgaaggaatcgtgacgtggcagttccaagtcggtgcattatccaagaaatactcggtctacataccggacctcctctttttcggtggatcctacaccgacaactcggaccggtctccggcgtttcaagccgactgtttggtcaaggggcttcgtatcctcggcgtggataagtttgttcccgtagggtttagctacgggggcatggtggctttcaagatcgctgaagcttacccggacatggttagagcaatcgttgtgtctggttcgattcccacaatgaccgataccattaatgaggcgagcttgaaccggttagggtttagttcttccacggatctcttgttaccgacttctgttacgggacttaaggctctcttcaccattgctgtgcataaacccttgtggttccctaaacgattgttcaaagactacatcgaggtaatgtttaacaacagaaaagaaagagctgaactgttagaggctgttgtggtcagcaacaaggaagcgcaaatccctcatttcccacggaaaatacatttcttgtggggtgaaagtgatcaaatctttgatctcgaattggctagagacatgaaagaacaaataggtgagaacgcaacaatagagagtataaagaaggcaggccatttggtacaattggaaagaccttgtgtttacaataggcgtctcaaaaagtttcttgcatctattcactcggaagataaaattaaaatgctacattaagttctatttgatcctgatatactgtatgtatggatcatttgtgtcgagattgaataattattgggttgtttttacttgatttgtctttttgtcatttactatgatcacaatatgtaatattaatctttatggg

SEQ ID NO: 24341 - protein, 330 aa, Arabidopsis thaliana
  peptide (1)..(330): Ceres Seq. ID no. 12385383
NISQQQQQNKTCTMVNFVEVQKPLLYGLMKMAGVVPYTLEIEPGTKINFWVPKETLKKNSGTGKPTKPDKPKKPVVLLIHGFAGEGIVTWQFQVGALSKKYSVYIPDLLFFGGSYTDNSDRSPAFQADCLVKGLRILGVDKFVPVGFSYGGMVAFKIAEAYPDMVRAIVVSGSIPTMTDTINEASLNRLGFSSSTDLLLPTSVTGLKALFTIAVHKPLWFPKRLFKDYIEVMFNNRKERAELLEAVVVSNKEAQIPHFPRKIHFLWGESDQIFDLELARDMKEQIGENATIESIKKAGHLVQLERPCVYNRRLKKFLASIHSEDKIKMLH

SEQ ID NO: 24342 - protein, 317 aa, Arabidopsis thaliana
  peptide (1)..(317): Ceres Seq. ID no. 12385384
MVNFVEVQKPLLYGLMKMAGVVPYTLEIEPGTKINFWVPKETLKKNSGTGKPTKPDKPKKPVVLLIHGFAGEGIVTWQFQVGALSKKYSVYIPDLLFFGGSYTDNSDRSPAFQADCLVKGLRILGVDKFVPVGFSYGGMVAFKIAEAYPDMVRAIVVSGSIPTMTDTINEASLNRLGFSSSTDLLLPTSVTGLKALFTIAVHKPLWFPKRLFKDYIEVMFNNRKERAELLEAVVVSNKEAQIPHFPRKIHFLWGESDQIFDLELARDMKEQIGENATIESIKKAGHLVQLERPCVYNRRLKKFLASIHSEDKIKMLH

SEQ ID NO: 24343 - protein, 302 aa, Arabidopsis thaliana
  peptide (1)..(302): Ceres Seq. ID no. 12385385
MKMAGVVPYTLEIEPGTKINFWVPKETLKKNSGTGKPTKPDKPKKPVVLLIHGFAGEGIVTWQFQVGALSKKYSVYIPDLLFFGGSYTDNSDRSPAFQADCLVKGLRILGVDKFVPVGFSYGGMVAFKIAEAYPDMVRAIVVSGSIPTMTDTINEASLNRLGFSSSTDLLLPTSVTGLKALFTIAVHKPLWFPKRLFKDYIEVMFNNRKERAELLEAVVVSNKEAQIPHFPRKIHFLWGESDQIFDLELARDMKEQIGENATIESIKKAGHLVQLERPCVYNRRLKKFLASIHSEDKIKMLH

SEQ ID NO: 24344 - DNA, 1045 bp, Arabidopsis thaliana
  misc_feature (1)..(1045): Ceres Seq. ID no. 12348539
  misc_feature (1)..(1045): Ortholog of  Ceres SEQ ID NO 13503499 as cited in SEQ ID NO 68684
ttacacatctctctttctctctctcgctctcagttttgtgggattgtttctttaaaaggggttcttagggtttagtgaagctatagatttcaatttcatacatagttaacgtatagaaggaatcttgggttgatcaatggaaggttgtccaagaaacagagaaatcggtccaaaacttcttgatttgattccacaaggaaggaaatggtaccaagaagacaagaacaacacagatcaggagaagaaacttgagctaaggcttggaccacccggtggtgatgaagaagatcattcagcaatcaagaagaagaacacagagataagaaacatcaagaaggaaacagaagacaaatctttccactgttttaatggcaatcacttctctccttccaacaaaaccacttctgttcctcacatctcacagaaaagaactgctcctggtccagtggtgggttggcctccggttcgttcgttcagaaagaatctagcgagcacaagctcttcaaagctaggtaacgaatcctctcatggaggtcaaatcaacaagagtgatgatggtgaaaaacaagttgaaaccaagaaggaaggaatgtttgtcaagatcaacatggatggtgttcctattggtcgtaaagttgatctcaatgcttacaacagctacgaacagctctcttttgtcgttgacaaactcttcagaggtctactcgcagctcaaagagatatctctgatggtcaaggagaagagaaacctatcattggattattagatgggaaaggagaatttactttaacctatgaagacaatgaaggggacaagatgcttgttggggatgttccatggcaaatgtttgtttcatctgtgaagagactgcgtgtgattaaaagctctgagatttcatctgccttgacatttggatgcagtaagcaagagaagatgatgcactgaagagtctttttagaaacttttatttcagacagagagtctcaaagctttataaatgtacatctggtttttgttatatataagagttaatcattggttttt

SEQ ID NO: 24345 - protein, 269 aa, Arabidopsis thaliana
  peptide (1)..(269): Ceres Seq. ID no. 12348540
MEGCPRNREIGPKLLDLIPQGRKWYQEDKNNTDQEKKLELRLGPPGGDEEDHSAIKKKNTEIRNIKKETEDKSFHCFNGNHFSPSNKTTSVPHISQKRTAPGPVVGWPPVRSFRKNLASTSSSKLGNESSHGGQINKSDDGEKQVETKKEGMFVKINMDGVPIGRKVDLNAYNSYEQLSFVVDKLFRGLLAAQRDISDGQGEEKPIIGLLDGKGEFTLTYEDNEGDKMLVGDVPWQMFVSSVKRLRVIKSSEISSALTFGCSKQEKMMH

SEQ ID NO: 24346 - DNA, 1141 bp, Arabidopsis thaliana
  misc_feature (1)..(1141): Ceres Seq. ID no. 12321497
  misc_feature (1)..(1141): Ortholog of  Ceres SEQ ID NO 13583438 as cited in SEQ ID NO 60632
aattttttttttgaatttggttttatatataacaatctggatccgccaccgtcgaattaatctccggaaagctcgtcgaaagatgtcgatgggaggcgacacgacgtgggttgggaagaagccgatcagacgcatcggtggattatctgatgctctctctatcgcctccgatctcggtttcgccgtcgctcctcctccgtcgcaggaagaattacaaagctttgcgtcttcgaatggggaaagaggtgatgatttgataagggtattgagagagttatctgttgttcaaaggaaaattgcagacttgcaggtcgagcttcaagggaggaaggatgataaaaatgtggcgcatttgactcatgttggtgaaatgcaaaagaaaatcgagactttgtcaaggattactcaaatattgaaagatgttatacaaaacaaggatcgcatcattgctcgtctccaacaaccttattcgctagattgcattccagttgaagcagaatatcagaaacaattctcagagttgctaatgaaagccgccagtgattatggcgccttaacagcatccgtgtctgattttcagtggagccaaaactttaaagaacctccttcagtctggggggaaatgctgcgtccaatacctgtggcactagcgtcatgcacgagattctttgaggccatgtctgcgatgagagaatcattcgcgactcttcaagagcttcgagttggtaactctgcagtttctttaccaacaacaccaggaggtaacgaaatgacacatagagactcagattgtgtgactccacctcaagggaggatagagtcaagcttcgacgatttagctgttcataaaacaaggagacaaaacaatgatcaaaatgaagaagaagaagaagaagaagaagaagaagatggtaataacaatgggaaccggagactatcttggcctccttctgtaaaaaagagtagcgtttaaacagttgcttttgtctttgcttgagctttttaatatcgatcgtgttttgtttcatcagcattagtgttctttatggatttacttatttctatttgatagtctttgagtgaaacttaaaacagtgtatattttggtaacactggtttccatggtccatgtgactattat

SEQ ID NO: 24347 - protein, 323 aa, Arabidopsis thaliana
  peptide (1)..(323): Ceres Seq. ID no. 12321498
IFFLNLVLYITIWIRHRRINLRKARRKMSMGGDTTWVGKKPIRRIGGLSDALSIASDLGFAVAPPPSQEELQSFASSNGERGDDLIRVLRELSVVQRKIADLQVELQGRKDDKNVAHLTHVGEMQKKIETLSRITQILKDVIQNKDRIIARLQQPYSLDCIPVEAEYQKQFSELLMKAASDYGALTASVSDFQWSQNFKEPPSVWGEMLRPIPVALASCTRFFEAMSAMRESFATLQELRVGNSAVSLPTTPGGNEMTHRDSDCVTPPQGRIESSFDDLAVHKTRRQNNDQNEEEEEEEEEEDGNNNGNRRLSWPPSVKKSSV

SEQ ID NO: 24348 - protein, 296 aa, Arabidopsis thaliana
  peptide (1)..(296): Ceres Seq. ID no. 12321499
MSMGGDTTWVGKKPIRRIGGLSDALSIASDLGFAVAPPPSQEELQSFASSNGERGDDLIRVLRELSVVQRKIADLQVELQGRKDDKNVAHLTHVGEMQKKIETLSRITQILKDVIQNKDRIIARLQQPYSLDCIPVEAEYQKQFSELLMKAASDYGALTASVSDFQWSQNFKEPPSVWGEMLRPIPVALASCTRFFEAMSAMRESFATLQELRVGNSAVSLPTTPGGNEMTHRDSDCVTPPQGRIESSFDDLAVHKTRRQNNDQNEEEEEEEEEEDGNNNGNRRLSWPPSVKKSSV

SEQ ID NO: 24349 - protein, 294 aa, Arabidopsis thaliana
  peptide (1)..(294): Ceres Seq. ID no. 12321500
MGGDTTWVGKKPIRRIGGLSDALSIASDLGFAVAPPPSQEELQSFASSNGERGDDLIRVLRELSVVQRKIADLQVELQGRKDDKNVAHLTHVGEMQKKIETLSRITQILKDVIQNKDRIIARLQQPYSLDCIPVEAEYQKQFSELLMKAASDYGALTASVSDFQWSQNFKEPPSVWGEMLRPIPVALASCTRFFEAMSAMRESFATLQELRVGNSAVSLPTTPGGNEMTHRDSDCVTPPQGRIESSFDDLAVHKTRRQNNDQNEEEEEEEEEEDGNNNGNRRLSWPPSVKKSSV

SEQ ID NO: 24350 - DNA, 1153 bp, Arabidopsis thaliana
  misc_feature (1)..(1153): Ceres Seq. ID no. 12421479
  misc_feature (1)..(1153): Ortholog of  Ceres SEQ ID NO 14304842 as cited in SEQ ID NO 54198
  misc_feature (1)..(1153): Ortholog of  Ceres SEQ ID NO 14308683 as cited in SEQ ID NO 58723
aaaataaacagagaagaagaaccaaattcaatgcttccttgtcgccgtcttgttctgtcctgcaagaatcaagctgccagttttctccgaaggtgtggaccatcgaaacgaattcaatcagtcaattactgtaaatcaacaagacagggccatgaaattccagatgtgaaacctctttttcccacaggaggaggaactcaagctccttctcgttctcgtgctcgttatgctgttcctgcgattctacttggttttgccggattcgtcggctttcttcattacaacgacgaaaggagagcagttcctagaggtcaagcaagcagcaatagcggttgtggctgcggttctaatacaactgtcaaaggtccgattatcggaggtccgtttacgcttgtgagcacagaaaacaagatagtcacagagaatgacttttgtggtaaatgggttctactctactttggatactctttttccccggatgttggacctgagcaactgaagatgatgtccaaagctgttgataaactagagtctaaacataacgagaagattctgcctgtctttgtcactcttgaccctcaacgagacacaccttctcatctccacgcatacttgaaagagtttgatagtagaatactaggactaaccgggactgcaagtgcaatgaggcaaatggcacaagagtatcgtgtctacttcaagaaggttcaagaggacggagaagattatctcgttgatacttctcacaacatgtacttgataaatccgaagatggagattgtgaggtgctttggggttgagtataatccagacgagctctcacaagagcttcttaaagaagttgcttctgtttcacagtgacccattttgaccaaacactaaagagagaaacactaggatgctctttgattgttttcttcaattcgtgattttttttaagacgattttgttaatccgtctcttattcttgaaaaaatgaaaattagatggtagatcctgcaaagtcgaaaaaatccaaaatttcccatatagtaatattttattcttcaatgttatttttgttgttagagttgtttcttttacttatttacaaattttctttcaacgtttgtaacataatcatcagttttcagttattaaataattctctggt

SEQ ID NO: 24351 - protein, 286 aa, Arabidopsis thaliana
  peptide (1)..(286): Ceres Seq. ID no. 12421480
KINREEEPNSMLPCRRLVLSCKNQAASFLRRCGPSKRIQSVNYCKSTRQGHEIPDVKPLFPTGGGTQAPSRSRARYAVPAILLGFAGFVGFLHYNDERRAVPRGQASSNSGCGCGSNTTVKGPIIGGPFTLVSTENKIVTENDFCGKWVLLYFGYSFSPDVGPEQLKMMSKAVDKLESKHNEKILPVFVTLDPQRDTPSHLHAYLKEFDSRILGLTGTASAMRQMAQEYRVYFKKVQEDGEDYLVDTSHNMYLINPKMEIVRCFGVEYNPDELSQELLKEVASVSQ

SEQ ID NO: 24352 - protein, 276 aa, Arabidopsis thaliana
  peptide (1)..(276): Ceres Seq. ID no. 12421481
MLPCRRLVLSCKNQAASFLRRCGPSKRIQSVNYCKSTRQGHEIPDVKPLFPTGGGTQAPSRSRARYAVPAILLGFAGFVGFLHYNDERRAVPRGQASSNSGCGCGSNTTVKGPIIGGPFTLVSTENKIVTENDFCGKWVLLYFGYSFSPDVGPEQLKMMSKAVDKLESKHNEKILPVFVTLDPQRDTPSHLHAYLKEFDSRILGLTGTASAMRQMAQEYRVYFKKVQEDGEDYLVDTSHNMYLINPKMEIVRCFGVEYNPDELSQELLKEVASVSQ

SEQ ID NO: 24353 - DNA, 1280 bp, Arabidopsis thaliana
  misc_feature (1)..(1280): Ceres Seq. ID no. 12324722
  misc_feature (1)..(1280): Ortholog of  Ceres SEQ ID NO 13586635 as cited in SEQ ID NO 14217
  misc_feature (1)..(1280): Ortholog of  Ceres SEQ ID NO 12616285 as cited in SEQ ID NO 63483
aatttctcaactcttgtgataaagtcttcaccttggtcgctgatttttcttctctctctcacaactatcaccaacaagaatcatgacgagctctgttagagagaagaagatcaagaccaacgggatttggttaaacgttgctgagaaaggagacgaagaagggcctttggttctgttactccatggtttccctgagacatggtactcttggcgtcaccagatcgatttcttgtctagccatggttaccacgtggtcgctccagatctcagaggctacggtgactccgattctctaccgagccacgagtcttacactgtgagtcacctagtcgctgatgtcatcggtttactcgatcactacggcactactcaggcttttgtggctgggcatgactggggagcaatcataggttggtgtctatgcttgtttagaccagaccgagtcaaaggtttcataagtctctctgttccatatttcccaagagatccaaaactcaaaccttcagattttttcaaaatttttggagatggtttatacatcactcagtttcaggtaaaacccaaatttactttcaagatttatgatgttagtgttactattatggtactcattgttgtcgttgattcgatttctcggttctgttttttacaagaaacccggaagagctgaggctgcatttgccaagcatgattgtttatcggtaatgaagaagttcttgctaataacaagaacagactacttagtggctcctcctgacacagagatcatagatcatcttgagataccgtcgacgattccagattggataacagaagaagagattcaagtgtatgcggaaaagtttcaaagatctggattcactggccctttgaattactacagatccatggatatgaattgggagatattggcgccgtggcaagactccaaaatcgtcgttcctactaagtttatagcgggagacaaagatatcggatatgaaggacctaatggaacaatggagtatgtgaaaggagaggtgttcaagatttttgtgcctaatcttgagatagttgttattgaaggtggtcatcattttatccagcaggagaagtctgaacaagtatctcaagagattctctctttcttaaacaagttaagcaaaacagagtaaaatcataccgttctctgtggccttatagaagaaccatgatgctctagtcttaagtaaactactaataatgtgtattcaagaacgaaacccgagtgtgatctccgcaataataatggttcttaaagc

SEQ ID NO: 24354 - protein, 195 aa, Arabidopsis thaliana
  peptide (1)..(195): Ceres Seq. ID no. 12324723
MTSSVREKKIKTNGIWLNVAEKGDEEGPLVLLLHGFPETWYSWRHQIDFLSSHGYHVVAPDLRGYGDSDSLPSHESYTVSHLVADVIGLLDHYGTTQAFVAGHDWGAIIGWCLCLFRPDRVKGFISLSVPYFPRDPKLKPSDFFKIFGDGLYITQFQVKPKFTFKIYDVSVTIMVLIVVVDSISRFCFLQETRKS

SEQ ID NO: 24355 - protein, 190 aa, Arabidopsis thaliana
  peptide (1)..(190): Ceres Seq. ID no. 12324724
MMLVLLLWYSLLSLIRFLGSVFYKKPGRAEAAFAKHDCLSVMKKFLLITRTDYLVAPPDTEIIDHLEIPSTIPDWITEEEIQVYAEKFQRSGFTGPLNYYRSMDMNWEILAPWQDSKIVVPTKFIAGDKDIGYEGPNGTMEYVKGEVFKIFVPNLEIVVIEGGHHFIQQEKSEQVSQEILSFLNKLSKTE

SEQ ID NO: 24356 - protein, 189 aa, Arabidopsis thaliana
  peptide (1)..(189): Ceres Seq. ID no. 12324725
MLVLLLWYSLLSLIRFLGSVFYKKPGRAEAAFAKHDCLSVMKKFLLITRTDYLVAPPDTEIIDHLEIPSTIPDWITEEEIQVYAEKFQRSGFTGPLNYYRSMDMNWEILAPWQDSKIVVPTKFIAGDKDIGYEGPNGTMEYVKGEVFKIFVPNLEIVVIEGGHHFIQQEKSEQVSQEILSFLNKLSKTE

SEQ ID NO: 24357 - DNA, 1362 bp, Arabidopsis thaliana
  misc_feature (1)..(1362): Ceres Seq. ID no. 12395178
  misc_feature (1)..(1362): Ortholog of  Ceres SEQ ID NO 15178173 as cited in SEQ ID NO 54139
  misc_feature (1)..(1362): Ortholog of  Ceres SEQ ID NO 14301836 as cited in SEQ ID NO 67386
atattaaccccttgtgtctctcacaatcccactagtactgaaacatagagatagacttagctcaagaaaagctaatttggtttcactctaatatatagagagagaaagagatcggagagaaaaaaatggcgggaggaacagggttgggagacacgacatacacgaaggtgtttgtgggaggattagcttgggagacgcataaggagacgatgaagaagcactttgagcagtttggagagattttggaagccgtagtcatcaccgacaaggcctccggtagatccaagggctacggattcgtgacattcagggaagcggaggcggcgaggagtgcttgtgtggatgctactccggtgatcgacgggagaagagcaaattgcaaccttgcctctctcggtcttcaaagatccaaaccctccactcctaaccatggaggaggaggcaggattaacaatatgagagtgatgatgagcacaatgcagactggctttggaccacctccaccaccacaaccacccaccttcactcactatccccatctccctctcaatctctttgggtactctccatactcgccagactactcatcattccctacgaacttatacggcatgtacggctgcacttctggaggacaatacggagtctatggaaacagaaacagcggaggcggtggactaaccgcagcagccgcatccgctactcctttttatccttgtggtggaggacatggtggggtccagttctctcaaccacaaccattttatcatcacttgtcttcttataaccctcaccattactctcctccgaccttttctatgcaacaagtgtgttttgttgtgccacaggcgtaacaggctttccgcttcaaccacctcttattccttaccgttaaagaagcttagagtctttggtagctatcaagcttcatatcatcatcttcttcttctcaggtcaagagccattctatggtttaaaggatgctcctggctaatctcaacacttagtttctctccctctgctctaaaagctaccccattttatggaatttggaggtggctttttaagcagatcccaatgggatctcctgtttcagatggtgatcatgtcgtatttgtcatctctcaccttcttgcaattgcatcttctcgagagaatgggtttctctttgagagatattgctaatggagcatcatcatcatcaatcactcatgtgccaatctcaagctgatgcatgtatcagcttaattagtttatgttgttttagcctaaggatggctaatcaacaagacaaagaaaatgtctgttaggataatgtaaaaaaaaaatcaagcaccaaaacaattttctgtttgaaagacc

SEQ ID NO: 24358 - protein, 242 aa, Arabidopsis thaliana
  peptide (1)..(242): Ceres Seq. ID no. 12395179
MAGGTGLGDTTYTKVFVGGLAWETHKETMKKHFEQFGEILEAVVITDKASGRSKGYGFVTFREAEAARSACVDATPVIDGRRANCNLASLGLQRSKPSTPNHGGGGRINNMRVMMSTMQTGFGPPPPPQPPTFTHYPHLPLNLFGYSPYSPDYSSFPTNLYGMYGCTSGGQYGVYGNRNSGGGGLTAAAASATPFYPCGGGHGGVQFSQPQPFYHHLSSYNPHHYSPPTFSMQQVCFVVPQA

SEQ ID NO: 24359 - protein, 214 aa, Arabidopsis thaliana
  peptide (1)..(214): Ceres Seq. ID no. 12395180
MKKHFEQFGEILEAVVITDKASGRSKGYGFVTFREAEAARSACVDATPVIDGRRANCNLASLGLQRSKPSTPNHGGGGRINNMRVMMSTMQTGFGPPPPPQPPTFTHYPHLPLNLFGYSPYSPDYSSFPTNLYGMYGCTSGGQYGVYGNRNSGGGGLTAAAASATPFYPCGGGHGGVQFSQPQPFYHHLSSYNPHHYSPPTFSMQQVCFVVPQA

SEQ ID NO: 24360 - protein, 151 aa, Arabidopsis thaliana
  peptide (1)..(151): Ceres Seq. ID no. 12395181
MVGSSSLNHNHFIITCLLITLTITLLRPFLCNKCVLLCHRRNRLSASTTSYSLPLKKLRVFGSYQASYHHLLLLRSRAILWFKGCSWLISTLSFSPSALKATPFYGIWRWLFKQIPMGSPVSDGDHVVFVISHLLAIASSRENGFLFERYC

SEQ ID NO: 24361 - DNA, 1176 bp, Arabidopsis thaliana
  misc_feature (1)..(1176): Ceres Seq. ID no. 12322874
  misc_feature (1)..(1176): Ortholog of  Ceres SEQ ID NO 15179499 as cited in SEQ ID NO 0
atactgtcgtctccctggattctatcttctcgattttggtgattcgaacacgattttacctatccttgagcgatctcgatcccaactttttgagttgattttatttcaggagttttcaaaaaatctgttgttaagtggtgaatcggaaaatgtcgcagtcttccgtcgatataccgccaaaaggtgggtttagcttcgatctgtgcaaaaggaatgatatgctgacacagaagggtcttaaagcgccgtcgtttctcaagactggaacgactatcgttggattgatatttaaggatggtgtaatacttggggctgatacacgggcaactgaagggcctattgtggctgataagaactgtgagaagattcactacatggcaccaaacatttactgttgtggtgcaggaaccgctgctgacactgaagcagtaactgatatggtcagctcacagctgcggttgcatagataccagactggccgagattctcgagtcgttactgcattgacccttctcaaaaaacatcttttcagctaccaaggccatgtctcagctgctcttgtgcttggtggagttgatattaccgggcctcatcttcacacgatatacccacacggttctactgacactctaccatttgctacaatgggttctggttcccttgctgccatgtcagtgtttgaagcaaagtataaagaaggtctaactagagatgaaggaatcaagttggttgctgaagccatatgctctggtatattcaacgaccttggtagtggtagcaatgtggatatctgtgtgatcactaaagggcacaaggaatacttgaggaattacatggaaccaaacccaagaacctatgttagcagcaaaggctattcattcaccaagaaaaccgaggttctactcaccaaaattacaccattattggagcgagtcgaaattgtagaagtggctggtgaagctatggaggaatgaatctcgtgtgagagacagatactaagagtgaaaccattgttctacctcacatgacagtcatgtttacgttttctactttgttcaatatgaacgactaaaatcgaatcgtagttgcctccatttcgtctttaaatttggcttgaacttgtgattaatgagtatggatgattcggttttgaaatttagctctcacataattttc

SEQ ID NO: 24362 - protein, 274 aa, Arabidopsis thaliana
  peptide (1)..(274): Ceres Seq. ID no. 12322875
MSQSSVDIPPKGGFSFDLCKRNDMLTQKGLKAPSFLKTGTTIVGLIFKDGVILGADTRATEGPIVADKNCEKIHYMAPNIYCCGAGTAADTEAVTDMVSSQLRLHRYQTGRDSRVVTALTLLKKHLFSYQGHVSAALVLGGVDITGPHLHTIYPHGSTDTLPFATMGSGSLAAMSVFEAKYKEGLTRDEGIKLVAEAICSGIFNDLGSGSNVDICVITKGHKEYLRNYMEPNPRTYVSSKGYSFTKKTEVLLTKITPLLERVEIVEVAGEAMEE

SEQ ID NO: 24363 - protein, 251 aa, Arabidopsis thaliana
  peptide (1)..(251): Ceres Seq. ID no. 12322876
MLTQKGLKAPSFLKTGTTIVGLIFKDGVILGADTRATEGPIVADKNCEKIHYMAPNIYCCGAGTAADTEAVTDMVSSQLRLHRYQTGRDSRVVTALTLLKKHLFSYQGHVSAALVLGGVDITGPHLHTIYPHGSTDTLPFATMGSGSLAAMSVFEAKYKEGLTRDEGIKLVAEAICSGIFNDLGSGSNVDICVITKGHKEYLRNYMEPNPRTYVSSKGYSFTKKTEVLLTKITPLLERVEIVEVAGEAMEE

SEQ ID NO: 24364 - protein, 199 aa, Arabidopsis thaliana
  peptide (1)..(199): Ceres Seq. ID no. 12322877
MAPNIYCCGAGTAADTEAVTDMVSSQLRLHRYQTGRDSRVVTALTLLKKHLFSYQGHVSAALVLGGVDITGPHLHTIYPHGSTDTLPFATMGSGSLAAMSVFEAKYKEGLTRDEGIKLVAEAICSGIFNDLGSGSNVDICVITKGHKEYLRNYMEPNPRTYVSSKGYSFTKKTEVLLTKITPLLERVEIVEVAGEAMEE

SEQ ID NO: 24365 - DNA, 2121 bp, Arabidopsis thaliana
  misc_feature (1)..(2121): Ceres Seq. ID no. 12601883
  misc_feature (1)..(2121): Ortholog of  Ceres SEQ ID NO 15179194 as cited in SEQ ID NO 0
gcaagtggcatcgtttttttctttctcatataaatcttttcacattagagtcggcataaaaattccatttcgtatttttctcttcttcctcttctgaaaaattagggtttgagttcttcttctaatcgatcagaaagatgggtggaggaaacgcacagaaatcagccatggctcgtgccaaaaacttggagaaggctaaggctgcaggaaaaggtagccaattggaagctaacaagaaagctatgtcgattcagtgcaaggtttgtatgcaaacattcatctgcacgacatcggaagtgaaatgcagggagcacgcggaggcgaagcatccgaaagccgatgttgtcgcttgtttccctcacctcaagaagtgatgaaagctattatctcaactataaaggattccaatgtataacgtatggatcctcatctttcctatgtttgtatcaaagtctcgacaaattttatggtttctatttctctctacttgtttcaacaataagtctcttgctatgattatataatgaagctttgtgtggaacctttttttttaatataagttggcttcttttcgctaaaaaaaaaaaaagaaaaaaaaaaaaaaaagagctcttttttttttttttttgcttgcaaaaaaattgtagctaaatgcaaaagctcaattaagctaaaagacttttgattattctacaaagtaagagtgcgtctgtagagaacttcatcatcactctcatcttcttcctcatcagtcactatctcgccaccaggcatttctaacttcccacccatgtcaaacgttggaccttcagtatctggatcaatgaagttaccttgtaatcgttcctcgaatctttggtcactgcaattgaggaaccagttcaatgaactcctgattcctttgctctgtagtttttggtacctcggtttgattcttgactccaagctataagtaaagtactcagggtactccacgagttctttcatcggtctccccatctcggtcttgtaaaagtagtaactattcttcatgagttccactcgggaacagaggatctgaggacatctcacaaccattttcgcaatgtcctcaacttgaaatgccctgcccaagagaaactcaatgggtttcattatcacattctgcttaagacttacaatctgtggcattttctctaccacacgagcaaatccttcaggatcaatcttgagcttcaagctgaaaaagtactgttgtgtagacatcttggctttcactggtaacccgagaatttgaggatattgagctataagcaaaggtagtagttctttcttgacgccaaaactaatcaagcaatctacgtttggtttaacagtctcctcgagttaattaaattaatccccccccccccccccgaattaagcaaaagaagaagaagaagaagtaatggcttcctctatgctctcctctgccgctgtggttacctccccggctcaagccaccatggtcgctccattcactggtttgaagtcatccgcttctttcccggtcacccgcaaggccaacaacgacattacttccatcacaagcaatgggggaagagttagctgcatgaaggtgtggccaccaatcggaaagaagaagtttgggactctatcttacctccctgaccttactgacgtcgaattggctaaggaagttgactaccttctccgcaacaagtggattccttgtgttgaattcgagttggagcacggatttgtgtaccgtgagcacggaaacactcccggatactacgatggacggtactggacaatgtggaagcttccattgttcggatgcaccgactctgctcaagtattgaaggaagttgaagaatgcaagaaggagtacccgggcgccttcattaggatcatcggattcgacaacacccgtcaagtccaatgcatcagtttcattgcctacaagcccccaagcttcactgatgcttaaatccttttctggaatattcaatgttgactatccggaacccaattttgtatggtcaatgtaaatttaagtaattattttgccaaagtgaaaaaactgaaggtttgtttttctatcgtttcctctataaaaatctctattcatatcacttc

SEQ ID NO: 24366 - protein, 181 aa, Arabidopsis thaliana
  peptide (1)..(181): Ceres Seq. ID no. 12601884
MASSMLSSAAVVTSPAQATMVAPFTGLKSSASFPVTRKANNDITSITSNGGRVSCMKVWPPIGKKKFGTLSYLPDLTDVELAKEVDYLLRNKWIPCVEFELEHGFVYREHGNTPGYYDGRYWTMWKLPLFGCTDSAQVLKEVEECKKEYPGAFIRIIGFDNTRQVQCISFIAYKPPSFTDA

SEQ ID NO: 24367 - protein, 177 aa, Arabidopsis thaliana
  peptide (1)..(177): Ceres Seq. ID no. 12601885
MLSSAAVVTSPAQATMVAPFTGLKSSASFPVTRKANNDITSITSNGGRVSCMKVWPPIGKKKFGTLSYLPDLTDVELAKEVDYLLRNKWIPCVEFELEHGFVYREHGNTPGYYDGRYWTMWKLPLFGCTDSAQVLKEVEECKKEYPGAFIRIIGFDNTRQVQCISFIAYKPPSFTDA

SEQ ID NO: 24368 - protein, 162 aa, Arabidopsis thaliana
  peptide (1)..(162): Ceres Seq. ID no. 12601886
MVAPFTGLKSSASFPVTRKANNDITSITSNGGRVSCMKVWPPIGKKKFGTLSYLPDLTDVELAKEVDYLLRNKWIPCVEFELEHGFVYREHGNTPGYYDGRYWTMWKLPLFGCTDSAQVLKEVEECKKEYPGAFIRIIGFDNTRQVQCISFIAYKPPSFTDA

SEQ ID NO: 24369 - DNA, 1306 bp, Arabidopsis thaliana
  misc_feature (1)..(1306): Ceres Seq. ID no. 12371585
  misc_feature (1)..(1306): Ortholog of  Ceres SEQ ID NO 14315843 as cited in SEQ ID NO 55215
atattttcgaaactcgaatcaaaattcaaatggcgggctaaacttcgattcagtctctctctttctctctttggtgatggaacaaattagcaacatcgctggtggagacacaacgaaagagactatggcgtctctgggtctcatctgtgagaaagatattcatgaacagcgtcttaaaatcgattctttcatcgcttctcctttccggagatcgatgaactctttagtggagcgagctcaagccactgctcaaagccaagtggaactaatgaatttgaaagcggatctgagagaagcagaggatgagctagttaaagtgttggcagtgaaaacccgtaaagaggcacggcaaatggggataagagattccatttctgcaacacaatctaggattgaagtacttagaagaaatttgcagctacagaagtcaaagaaggatgattctgtgagaattatctcccaacagttgcaagccttgtcaaaatcgaaggacaacgctggtaaagtcaccgaagacaaagcagatattcatgaagcaatctcttggtataatcatgctctcggttttcacgttgaagctggacatggagttaaattcacattcaccaacattgatgcaaaaaggccgacccgcgaattttcgttcacagttcactatggaaatgacatctacacactattggatagcgatctgcaattggattacatcaacgagatggttcaagaattgaataaaaccaatgaccttttcagatttgttcgtctgatgagggagcagtttctgaaatccactttatctgagctgccaacacattcaggacaactgcaacaggaaacgtctgccatatctgcttcagctccagctatatcattttccactgatacaaacatgtcaactccagaaaacaaaagatctaaggttcaagtgaatcggcgacaaaaaagaggtagcgaatcaccactcctagctcctgtatccacatctgccactcgccgttcttctcgctttaagggtaagaaatgaaggtggagctctgttttccttttcacaagcatcaaggaataaacttaagcgtagatgatgctgcggaactttcgacaacaacagattgttgtttgaaattcctataaatattagaatgtcattgtaatcacgcttattgacaatgttgatttctttactagtgtggatgctatgcttatacaccaatcgatgatggagcttgtgggactagattttaatcgatgtaatctcgcgcttctctatttctagatttcgttagctaatggatgcttgtctagcttc

SEQ ID NO: 24370 - protein, 340 aa, Arabidopsis thaliana
  peptide (1)..(340): Ceres Seq. ID no. 12371586
YFRNSNQNSNGGLNFDSVSLFLSLVMEQISNIAGGDTTKETMASLGLICEKDIHEQRLKIDSFIASPFRRSMNSLVERAQATAQSQVELMNLKADLREAEDELVKVLAVKTRKEARQMGIRDSISATQSRIEVLRRNLQLQKSKKDDSVRIISQQLQALSKSKDNAGKVTEDKADIHEAISWYNHALGFHVEAGHGVKFTFTNIDAKRPTREFSFTVHYGNDIYTLLDSDLQLDYINEMVQELNKTNDLFRFVRLMREQFLKSTLSELPTHSGQLQQETSAISASAPAISFSTDTNMSTPENKRSKVQVNRRQKRGSESPLLAPVSTSATRRSSRFKGKK

SEQ ID NO: 24371 - protein, 315 aa, Arabidopsis thaliana
  peptide (1)..(315): Ceres Seq. ID no. 12371587
MEQISNIAGGDTTKETMASLGLICEKDIHEQRLKIDSFIASPFRRSMNSLVERAQATAQSQVELMNLKADLREAEDELVKVLAVKTRKEARQMGIRDSISATQSRIEVLRRNLQLQKSKKDDSVRIISQQLQALSKSKDNAGKVTEDKADIHEAISWYNHALGFHVEAGHGVKFTFTNIDAKRPTREFSFTVHYGNDIYTLLDSDLQLDYINEMVQELNKTNDLFRFVRLMREQFLKSTLSELPTHSGQLQQETSAISASAPAISFSTDTNMSTPENKRSKVQVNRRQKRGSESPLLAPVSTSATRRSSRFKGKK

SEQ ID NO: 24372 - protein, 299 aa, Arabidopsis thaliana
  peptide (1)..(299): Ceres Seq. ID no. 12371588
MASLGLICEKDIHEQRLKIDSFIASPFRRSMNSLVERAQATAQSQVELMNLKADLREAEDELVKVLAVKTRKEARQMGIRDSISATQSRIEVLRRNLQLQKSKKDDSVRIISQQLQALSKSKDNAGKVTEDKADIHEAISWYNHALGFHVEAGHGVKFTFTNIDAKRPTREFSFTVHYGNDIYTLLDSDLQLDYINEMVQELNKTNDLFRFVRLMREQFLKSTLSELPTHSGQLQQETSAISASAPAISFSTDTNMSTPENKRSKVQVNRRQKRGSESPLLAPVSTSATRRSSRFKGKK

SEQ ID NO: 24373 - DNA, 1177 bp, Arabidopsis thaliana
  misc_feature (1)..(1177): Ceres Seq. ID no. 12481884
  misc_feature (1)..(1177): Ortholog of  Ceres SEQ ID NO 13662054 as cited in SEQ ID NO 61539
  misc_feature (1)..(1177): Ortholog of  Ceres SEQ ID NO 13663665 as cited in SEQ ID NO 67230
  misc_feature (1)..(1177): Ortholog of  Ceres SEQ ID NO 15174315 as cited in SEQ ID NO 0
attgtttttgtatgcatttggtctgtgtgttgtgttgtttatcttcttcttcttcaacccgaccaaatacacatccgacggggaaaaagagttccgacaagaatcgagaactgaaagatttgtcatttgtctctcaaatatctgtggagagaagagaaattggaataaagaagacagtgttgtgagagagagagagagagagagagatgagttcgtctctacctctgaggctacttcttcctcttacaacttctctgatttctcctcctcctcctcctccagattctttccatgctccttcgtcgttcagatcgaaaaaccctaatttcaaacgccgattgtcttcttcttcctgttgttcttcccagtcgcagcttttctctgggagatgcagatcctattcgcggtgtgttaccatgtgcttaccagaacacatgagaaatcaagagaacacagaaatcttgacagataaagatgaccacattgaatgtgtgcttgaatcggatgaagattctggcctcaggattccgactcaagcacaggctatcgttgaaggatctggttcagttgcagtgtcagagctaaaacccgctgctgatgtagattacatacaagagctattggcgatacagcagcaaggtcctagatcaattggcttctttgggacaagaaatatgggtttcatgcatcaagaactgattgagatacttagctacgccatggttataaccaaaaatcatatatacacatcaggtgcatctggaactaatgctgcagtcatcagaggtgcattgagagcagagagaccagagctgcttacagtaattctaccccaaagtttgaaaaaacaacctcctgagagccaagaactattgtctaaagtacaaaacgtggtagaaaagccacataatgaccatttgccattgttagaagccaggttgtgtaatatggacatcatatcacaagttcaacaagtgatctgcttcgcgtttcatgacagtaagcttcttatggagacatgtcaagaagccaaaaatctgcgcaagattgtcactctcttctacctcgattgattcacattcactctttattttcttctcgttacaaaacagagaagataatcctccttgtaaattatgaatcttgattaaacaaacacacacaaccacaattatat

SEQ ID NO: 24374 - protein, 288 aa, Arabidopsis thaliana
  peptide (1)..(288): Ceres Seq. ID no. 12481885
MSSSLPLRLLLPLTTSLISPPPPPPDSFHAPSSFRSKNPNFKRRLSSSSCCSSQSQLFSGRCRSYSRCVTMCLPEHMRNQENTEILTDKDDHIECVLESDEDSGLRIPTQAQAIVEGSGSVAVSELKPAADVDYIQELLAIQQQGPRSIGFFGTRNMGFMHQELIEILSYAMVITKNHIYTSGASGTNAAVIRGALRAERPELLTVILPQSLKKQPPESQELLSKVQNVVEKPHNDHLPLLEARLCNMDIISQVQQVICFAFHDSKLLMETCQEAKNLRKIVTLFYLD

SEQ ID NO: 24375 - protein, 218 aa, Arabidopsis thaliana
  peptide (1)..(218): Ceres Seq. ID no. 12481886
MCLPEHMRNQENTEILTDKDDHIECVLESDEDSGLRIPTQAQAIVEGSGSVAVSELKPAADVDYIQELLAIQQQGPRSIGFFGTRNMGFMHQELIEILSYAMVITKNHIYTSGASGTNAAVIRGALRAERPELLTVILPQSLKKQPPESQELLSKVQNVVEKPHNDHLPLLEARLCNMDIISQVQQVICFAFHDSKLLMETCQEAKNLRKIVTLFYLD

SEQ ID NO: 24376 - protein, 212 aa, Arabidopsis thaliana
  peptide (1)..(212): Ceres Seq. ID no. 12481887
MRNQENTEILTDKDDHIECVLESDEDSGLRIPTQAQAIVEGSGSVAVSELKPAADVDYIQELLAIQQQGPRSIGFFGTRNMGFMHQELIEILSYAMVITKNHIYTSGASGTNAAVIRGALRAERPELLTVILPQSLKKQPPESQELLSKVQNVVEKPHNDHLPLLEARLCNMDIISQVQQVICFAFHDSKLLMETCQEAKNLRKIVTLFYLD

SEQ ID NO: 24377 - DNA, 1499 bp, Arabidopsis thaliana
  misc_feature (1)..(1499): Ceres Seq. ID no. 13494257
  misc_feature (1)..(1499): Ortholog of  Ceres SEQ ID NO 13595870 as cited in SEQ ID NO 62101
  misc_feature (1)..(1499): Ortholog of  Ceres SEQ ID NO 13590241 as cited in SEQ ID NO 63878
  misc_feature (1)..(1499): Ortholog of  Ceres SEQ ID NO 13657939 as cited in SEQ ID NO 66349
  misc_feature (1)..(1499): Ortholog of  Ceres SEQ ID NO 13660597 as cited in SEQ ID NO 67655
aatgccaccaactgttcttttcctgtaatttccagtttagagctttcttcttcctttccctatcctcaaccccaaacgaacgctcttcaagaattagggtttcgttttgaatcttctctgattcccaaatccaaagatatgaagagatcttcagggagaaaggattcaaatttcatagaacaattgatactttacgtcgctagtgctgcattgagtagcttggttctctacgttggtctccgtcaacttgacccgaaccgtgacgccgctaaaaagtctctcgagcacaaaagagaaatcgccaaacgtttgggtcgtcctcttattcaaaccaatcaatacgaggatgtgattgcgtgtgatgtaataaacccattacacatagatgttgaatttggttctattggaggattggagtcaattaagcaagctttgtatgagcttgtgattctaccattgaaaagacctgagctttttgcttatgggaagttactgggtcctcaaaagggtgttttgttgtatggtcctcctggaactgggaagactatgcttgctaaagcgattgcgagagagtctgaagctgtttttattaatgtaaaggtttctaatttgatgagcaagtggtttggtgatgcacagaagcttgtgtctgctgtgtttagcttggcgtataaactccaacctgctattatttttatcgatgaggtggatagctttcttggccagcgacggtcgactgataatgaagcaatgtcgaatatgaagaccgagtttatggctttatgggatggatttactacagaccagaatgcgagggtgatggttcttgctgcaactaacagaccatcagagctcgatgaagcgatattgaggcgttttcctcagtcatttgagatcgggatgcctgattgccaggagagagcgcaaatattgaaagttgttttgaaaggagagagtgttgaatcagatattaactatgatcgtatagctcgtttatgtgaggactataccggatcagatatttttgaactctgcaaaaaagcagcttacttcccaatccgagaaatcctagaggcagagaaagagggcaaacgagtttctgttcctagaccattgacacaactggacttggagaaggttcttgctacctcaaagaagacacaagttgctgcaagcgagtacactggtttaagctctcaatcttctgtctggggaagtccaagcaatgccgatgaggtccaagcagctataaacggcatctccaagctttttgtctcgcagcttagaaacattcagccagattctcaggattcatatcaacaacatccttcagaaggagattcggaatagaagcaaactcttcactagagcttcgtatagtccaaaaagagtacaacccaagaatatacactttttgtaaacctcatatttctctgaataagttggagcattgttgccgtaagatgtttttagaaaatttaattcatgtctcgttagtg

SEQ ID NO: 24378 - protein, 449 aa, Arabidopsis thaliana
  peptide (1)..(449): Ceres Seq. ID no. 13494258
NATNCSFPVISSLELSSSFPYPQPQTNALQELGFRFESSLIPKSKDMKRSSGRKDSNFIEQLILYVASAALSSLVLYVGLRQLDPNRDAAKKSLEHKREIAKRLGRPLIQTNQYEDVIACDVINPLHIDVEFGSIGGLESIKQALYELVILPLKRPELFAYGKLLGPQKGVLLYGPPGTGKTMLAKAIARESEAVFINVKVSNLMSKWFGDAQKLVSAVFSLAYKLQPAIIFIDEVDSFLGQRRSTDNEAMSNMKTEFMALWDGFTTDQNARVMVLAATNRPSELDEAILRRFPQSFEIGMPDCQERAQILKVVLKGESVESDINYDRIARLCEDYTGSDIFELCKKAAYFPIREILEAEKEGKRVSVPRPLTQLDLEKVLATSKKTQVAASEYTGLSSQSSVWGSPSNADEVQAAINGISKLFVSQLRNIQPDSQDSYQQHPSEGDSE

SEQ ID NO: 24379 - protein, 403 aa, Arabidopsis thaliana
  peptide (1)..(403): Ceres Seq. ID no. 13494259
MKRSSGRKDSNFIEQLILYVASAALSSLVLYVGLRQLDPNRDAAKKSLEHKREIAKRLGRPLIQTNQYEDVIACDVINPLHIDVEFGSIGGLESIKQALYELVILPLKRPELFAYGKLLGPQKGVLLYGPPGTGKTMLAKAIARESEAVFINVKVSNLMSKWFGDAQKLVSAVFSLAYKLQPAIIFIDEVDSFLGQRRSTDNEAMSNMKTEFMALWDGFTTDQNARVMVLAATNRPSELDEAILRRFPQSFEIGMPDCQERAQILKVVLKGESVESDINYDRIARLCEDYTGSDIFELCKKAAYFPIREILEAEKEGKRVSVPRPLTQLDLEKVLATSKKTQVAASEYTGLSSQSSVWGSPSNADEVQAAINGISKLFVSQLRNIQPDSQDSYQQHPSEGDSE

SEQ ID NO: 24380 - protein, 267 aa, Arabidopsis thaliana
  peptide (1)..(267): Ceres Seq. ID no. 13494260
MLAKAIARESEAVFINVKVSNLMSKWFGDAQKLVSAVFSLAYKLQPAIIFIDEVDSFLGQRRSTDNEAMSNMKTEFMALWDGFTTDQNARVMVLAATNRPSELDEAILRRFPQSFEIGMPDCQERAQILKVVLKGESVESDINYDRIARLCEDYTGSDIFELCKKAAYFPIREILEAEKEGKRVSVPRPLTQLDLEKVLATSKKTQVAASEYTGLSSQSSVWGSPSNADEVQAAINGISKLFVSQLRNIQPDSQDSYQQHPSEGDSE

SEQ ID NO: 24381 - DNA, 1606 bp, Arabidopsis thaliana
  misc_feature (1)..(1606): Ceres Seq. ID no. 12343570
  misc_feature (1)..(1606): Ortholog of  Ceres SEQ ID NO 13660872 as cited in SEQ ID NO 60830
  misc_feature (1)..(1606): Ortholog of  Ceres SEQ ID NO 12616221 as cited in SEQ ID NO 63291
aaaaacaaataatatctaacaaaaaaccattcacaaaaaaaatagagagaatcatctgagagactagtagtgatgagatgagcttcttctcctacaatctcagaaacctccgatcactgttttagataatctctacaacggatacaatggaaagcaccgattcttccggtggtccaccaccgccacaacctaaccttcctccaggcttccggtttcaccctaccgacgaagagcttgttgttcactacctcaaacgcaaagcagcctctgctcctttacctgtcgccatcatcgccgaagtcgatctctataaatttgatccatgggaacttcccgctaaagcatcgtttggagaacaagaatggtacttctttagtccacgagatcggaagtatccaaacggagcaagaccaaacagagcggcgacttcaggttattggaaagcgaccggtacagataaaccggtacttgcttccgacggtaaccaaaaggtgggcgtgaagaaggcactagtcttctacagtggtaaaccaccaaaaggcgttaaaagtgattggatcatgcatgagtatcgtctcatcgaaaacaaaccaaacaatcgacctcctggctgtgatttcggcaacaagaaaaactcactcagacttgatgattgggtgttatgtagaatctacaagaagaacaacgcaagtcgacatgttgataacgataaggatcatgatatgatcgattacattttcaggaagattcctccatctttatcaatggcggctgcttctacaggacttcaccatcatcatcataatgtctcaagatcaatgaatttcttccctggcaaattctccggtggtggttacgggattttctctgacggtggtaacacgagtatatacgacggcggtggcatgatcaacaatattggtactgactcagtggatcacgacaataacgcagacgtcgttggtttaaatcatgcttcgtcgtctggtcctatgatgatggcgaatttgaaacgaactctcccggtgccgtattggcctgtagcagaggaggagcaagatgcatctccgagcaaacggtttcacggtgtaggaggaggaggaggagattgttcgaacatgtcttcttcgatgatggaagagacacctccactaatgcaacaacaaggtggtgtattaggagatggattattcagaacgacatcgtaccaattacccggtttaaattggtactcttcttaatcaaatgtgtttcgccgccggtgtgaagaattttccggtgacagtgaagattttttccgattggtggggtcatttgcatgcattatataatttgagatttgtgtatatgttttgggttaattaattggtcataggggttaggggaagaagattatttagagagcggagaagatcagaagtgaggcaacatatagaaaacataggtttaaaaaatattactgtttgttaagtttaatgattaaatgtataaatcttatacttagatgtttatatatagtttgtatagatgcatatagtttctctcaatgctattttgagattgtattttcttgttaaggaaatgattaaaaaaaaaatagttgtgc

SEQ ID NO: 24382 - protein, 364 aa, Arabidopsis thaliana
  peptide (1)..(364): Ceres Seq. ID no. 12343571
MESTDSSGGPPPPQPNLPPGFRFHPTDEELVVHYLKRKAASAPLPVAIIAEVDLYKFDPWELPAKASFGEQEWYFFSPRDRKYPNGARPNRAATSGYWKATGTDKPVLASDGNQKVGVKKALVFYSGKPPKGVKSDWIMHEYRLIENKPNNRPPGCDFGNKKNSLRLDDWVLCRIYKKNNASRHVDNDKDHDMIDYIFRKIPPSLSMAAASTGLHHHHHNVSRSMNFFPGKFSGGGYGIFSDGGNTSIYDGGGMINNIGTDSVDHDNNADVVGLNHASSSGPMMMANLKRTLPVPYWPVAEEEQDASPSKRFHGVGGGGGDCSNMSSSMMEETPPLMQQQGGVLGDGLFRTTSYQLPGLNWYSS

SEQ ID NO: 24383 - protein, 226 aa, Arabidopsis thaliana
  peptide (1)..(226): Ceres Seq. ID no. 12343572
MHEYRLIENKPNNRPPGCDFGNKKNSLRLDDWVLCRIYKKNNASRHVDNDKDHDMIDYIFRKIPPSLSMAAASTGLHHHHHNVSRSMNFFPGKFSGGGYGIFSDGGNTSIYDGGGMINNIGTDSVDHDNNADVVGLNHASSSGPMMMANLKRTLPVPYWPVAEEEQDASPSKRFHGVGGGGGDCSNMSSSMMEETPPLMQQQGGVLGDGLFRTTSYQLPGLNWYSS

SEQ ID NO: 24384 - DNA, 1346 bp, Arabidopsis thaliana
  misc_feature (1)..(1346): Ceres Seq. ID no. 12562433
  misc_feature (1)..(1346): Ortholog of  Ceres SEQ ID NO 15178873 as cited in SEQ ID NO 1103
  misc_feature (1)..(1346): Ortholog of  Ceres SEQ ID NO 15173557 as cited in SEQ ID NO 60031
  misc_feature (1)..(1346): Ortholog of  Ceres SEQ ID NO 13590940 as cited in SEQ ID NO 68653
gacgacactcgcaacttcttccttatcgacacctacactctcctgctacaatggcgactttcctaacaaatgttgtttcaatcaaacctacaatcttctcattccagtccgaatccttcactcctttgcatacacgggtcaatgtattctcctcgaaaccctttccttctctcgctggaactttctcccggagctctagaacgagattcattccttatgctgtaacggagacggaagaaaaacccgccgctttggaccctagttcagaagctgccaggcgtgtgtatatcggtaacatacccaggacggtgaccaatgagcagctcactaaacttgttgaagaacacggtgctgttgaaaaagttcaggtgatgtatgataagtattcaggaagaagccgtcgatttgggtttgctacaatgaaatcagttgaagatgctaatgctgtggttgagaaattgaatggcaataccgttgaagggcgtgagataaaggttaacattacagagaaacctatagcatcatcacctgatttatcagttcttcagtctgaggattcagcatttgtagatagcccttacaaagtgtatgttgggaatctagcaaagactgttacaaaagagatgcttgagaatttgttttctgagaaagggaaagtagtaagtgctaaggtttcaagagtacctggaacttccaaatccaccgggtttggattcgttacgttttcttctgaagaagatgtggaagcagccattgttgctcttaacaattcgttgctggaaggacagaagattcgggtgaataaggcttagcctattggatcataaagaatgtgaaaagaatcgctttgaagagtttttgtaatgcaaatcattagagcttagtgtatcatcttgtattcattctaagttgaaaatgaaaccatatcttttcaaaagccaaaaaaaaaaaaaaaaaagcttctcgtgccgttttttttttttttttttgatataagatgtgcagcctatataaatagtgaaaacaaattctagttcattcattacaatttcccaaaacgagtataagaactcgcccaaaccaacaaataagtaattgctaaaacaatactctcctcccctctctgggcaggacagcatcaaacacacctaaagccattctatgacaaaaccaaaatggcaaacaaataacccctgtgagtttccataactacacagggatgcaaagaatgaaataaactcggcctctccacaaatacaaaggccggagactgaaccccaaaacaaagaagaggaaagaattgaagaaaaataatatattctgaaaaaatcaaatagttgtttgct

SEQ ID NO: 24385 - protein, 269 aa, Arabidopsis thaliana
  peptide (1)..(269): Ceres Seq. ID no. 12562434
RHSQLLPYRHLHSPATMATFLTNVVSIKPTIFSFQSESFTPLHTRVNVFSSKPFPSLAGTFSRSSRTRFIPYAVTETEEKPAALDPSSEAARRVYIGNIPRTVTNEQLTKLVEEHGAVEKVQVMYDKYSGRSRRFGFATMKSVEDANAVVEKLNGNTVEGREIKVNITEKPIASSPDLSVLQSEDSAFVDSPYKVYVGNLAKTVTKEMLENLFSEKGKVVSAKVSRVPGTSKSTGFGFVTFSSEEDVEAAIVALNNSLLEGQKIRVNKA

SEQ ID NO: 24386 - protein, 253 aa, Arabidopsis thaliana
  peptide (1)..(253): Ceres Seq. ID no. 12562435
MATFLTNVVSIKPTIFSFQSESFTPLHTRVNVFSSKPFPSLAGTFSRSSRTRFIPYAVTETEEKPAALDPSSEAARRVYIGNIPRTVTNEQLTKLVEEHGAVEKVQVMYDKYSGRSRRFGFATMKSVEDANAVVEKLNGNTVEGREIKVNITEKPIASSPDLSVLQSEDSAFVDSPYKVYVGNLAKTVTKEMLENLFSEKGKVVSAKVSRVPGTSKSTGFGFVTFSSEEDVEAAIVALNNSLLEGQKIRVNKA

SEQ ID NO: 24387 - protein, 146 aa, Arabidopsis thaliana
  peptide (1)..(146): Ceres Seq. ID no. 12562436
MYDKYSGRSRRFGFATMKSVEDANAVVEKLNGNTVEGREIKVNITEKPIASSPDLSVLQSEDSAFVDSPYKVYVGNLAKTVTKEMLENLFSEKGKVVSAKVSRVPGTSKSTGFGFVTFSSEEDVEAAIVALNNSLLEGQKIRVNKA

SEQ ID NO: 24388 - DNA, 548 bp, Arabidopsis thaliana
  misc_feature (1)..(548): Ceres Seq. ID no. 12395205
  misc_feature (1)..(548): Ortholog of  Ceres SEQ ID NO 12611730 as cited in SEQ ID NO 56744
atcatttctccacaattccacaaactcaaattacccaacttcttaaacacattcccatcacctcacaaaccattaaccgagagccaactagcgagtagaatcaactatcaagcaatggcatcgatgaccatgaccgctaccttcttcccggccgtcgccaaggttccctcagccaccggcggacgaaggctctccgtagtcagagcctccacgagcgacaacacacccagcttagaagtcaaggaacagagcagcaccacaatgaggagggacctcatgttcacggctgcagctgcagcggtttgttctttggctaaggtagccatggctgaagaagaagagcccaagcgagggacagaggcggccaagaagaaatacgcacaagtttgtgtcacaatgcctacggccaagatctgccgctactgattcaacaacccaccttctgcatgtctatctctctctttcaatttcggtaaattttctcaattaagtttggtctgtaatcgtatatttgatcatcaatttaccaaaagcccttttatctttct

SEQ ID NO: 24389 - protein, 141 aa, Arabidopsis thaliana
  peptide (1)..(141): Ceres Seq. ID no. 12395206
IISPQFHKLKLPNFLNTFPSPHKPLTESQLASRINYQAMASMTMTATFFPAVAKVPSATGGRRLSVVRASTSDNTPSLEVKEQSSTTMRRDLMFTAAAAAVCSLAKVAMAEEEEPKRGTEAAKKKYAQVCVTMPTAKICRY

SEQ ID NO: 24390 - protein, 103 aa, Arabidopsis thaliana
  peptide (1)..(103): Ceres Seq. ID no. 12395207
MASMTMTATFFPAVAKVPSATGGRRLSVVRASTSDNTPSLEVKEQSSTTMRRDLMFTAAAAAVCSLAKVAMAEEEEPKRGTEAAKKKYAQVCVTMPTAKICRY

SEQ ID NO: 24391 - protein, 100 aa, Arabidopsis thaliana
  peptide (1)..(100): Ceres Seq. ID no. 12395208
MTMTATFFPAVAKVPSATGGRRLSVVRASTSDNTPSLEVKEQSSTTMRRDLMFTAAAAAVCSLAKVAMAEEEEPKRGTEAAKKKYAQVCVTMPTAKICRY

SEQ ID NO: 24392 - DNA, 1187 bp, Arabidopsis thaliana
  misc_feature (1)..(1187): Ceres Seq. ID no. 13492612
  misc_feature (1)..(1187): Ortholog of  Ceres SEQ ID NO 13596039 as cited in SEQ ID NO 62117
acaaattcagattccaaatttctcaaactctgaaatcgttctttcaaatctctcaatcgggatcaagatgcagatctttgttaagactctcaccggaaagactatcaccctcgaggtggaaagctctgacaccatcgacaacgttaaggccaagatccaggataaggaaggcattcctccggatcagcagaggcttattttcgccggaaaacagctagaggatggccgtacgttggctgattacaatatccagaaggaatccaccctccacttggttctcaggctccgtggtggtatgcagattttcgtcaagaccttaacgggaaagacgattactcttgaggtggagagttctgacaccatcgacaacgtcaaggccaagatccaagacaaggagggtattcctccggaccagcagaggttgatcttcgctggaaagcagttggaggatggcagaactcttgctgactacaacatccagaaggagtccacacttcatcttgttctcaggctccgtggtggtatgcagatctttgtcaagacgttgactggaaagactatcactttggaggtggagagctctgacactatcgacaatgtcaaagccaagatccaggacaaagagggtatcccaccggaccagcagagattgatcttcgccggaaaacaacttgaagatggtagaactttggctgactacaacattcagaaggagtctacacttcacttggtgttgcgtctccgtggaggtatgcagattttcgtgaagactctcactggaaagaccattactcttgaagttgagagctccgacaccattgacaacgtgaaggctaagatccaggacaaggaaggtatccctccggaccagcagcgtctcatcttcgctggaaaacagcttgaggatggtcgtactttggccgactacaacatccagaaggagtctacccttcacttggtgctaaggctccgtggtggtttctaaaaacttatctctgttatgaatcagaagaagttcatgtctcgtttcatttaaaactttggtggtttgtgttttggggccttgtaaagcccctgatgaataattgttcaactatgtttccgttcctgtgttatacctttctttctaatgagtaatgacatcaaacttcttctgtattggaattatgtccttgtgagtctcttta

SEQ ID NO: 24393 - protein, 327 aa, Arabidopsis thaliana
  peptide (1)..(327): Ceres Seq. ID no. 13492613
QIQIPNFSNSEIVLSNLSIGIKMQIFVKTLTGKTITLEVESSDTIDNVKAKIQDKEGIPPDQQRLIFAGKQLEDGRTLADYNIQKESTLHLVLRLRGGMQIFVKTLTGKTITLEVESSDTIDNVKAKIQDKEGIPPDQQRLIFAGKQLEDGRTLADYNIQKESTLHLVLRLRGGMQIFVKTLTGKTITLEVESSDTIDNVKAKIQDKEGIPPDQQRLIFAGKQLEDGRTLADYNIQKESTLHLVLRLRGGMQIFVKTLTGKTITLEVESSDTIDNVKAKIQDKEGIPPDQQRLIFAGKQLEDGRTLADYNIQKESTLHLVLRLRGGF

SEQ ID NO: 24394 - protein, 305 aa, Arabidopsis thaliana
  peptide (1)..(305): Ceres Seq. ID no. 13492614
MQIFVKTLTGKTITLEVESSDTIDNVKAKIQDKEGIPPDQQRLIFAGKQLEDGRTLADYNIQKESTLHLVLRLRGGMQIFVKTLTGKTITLEVESSDTIDNVKAKIQDKEGIPPDQQRLIFAGKQLEDGRTLADYNIQKESTLHLVLRLRGGMQIFVKTLTGKTITLEVESSDTIDNVKAKIQDKEGIPPDQQRLIFAGKQLEDGRTLADYNIQKESTLHLVLRLRGGMQIFVKTLTGKTITLEVESSDTIDNVKAKIQDKEGIPPDQQRLIFAGKQLEDGRTLADYNIQKESTLHLVLRLRGGF

SEQ ID NO: 24395 - protein, 229 aa, Arabidopsis thaliana
  peptide (1)..(229): Ceres Seq. ID no. 13492615
MQIFVKTLTGKTITLEVESSDTIDNVKAKIQDKEGIPPDQQRLIFAGKQLEDGRTLADYNIQKESTLHLVLRLRGGMQIFVKTLTGKTITLEVESSDTIDNVKAKIQDKEGIPPDQQRLIFAGKQLEDGRTLADYNIQKESTLHLVLRLRGGMQIFVKTLTGKTITLEVESSDTIDNVKAKIQDKEGIPPDQQRLIFAGKQLEDGRTLADYNIQKESTLHLVLRLRGGF

SEQ ID NO: 24396 - DNA, 1194 bp, Arabidopsis thaliana
  misc_feature (1)..(1194): Ceres Seq. ID no. 13487831
  misc_feature (1)..(1194): Ortholog of  Ceres SEQ ID NO 14304969 as cited in SEQ ID NO 53193
  misc_feature (1)..(1194): Ortholog of  Ceres SEQ ID NO 14307442 as cited in SEQ ID NO 54239
  misc_feature (1)..(1194): Ortholog of  Ceres SEQ ID NO 13638897 as cited in SEQ ID NO 55839
  misc_feature (1)..(1194): Ortholog of  Ceres SEQ ID NO 14302561 as cited in SEQ ID NO 56543
  misc_feature (1)..(1194): Ortholog of  Ceres SEQ ID NO 15177758 as cited in SEQ ID NO 57504
  misc_feature (1)..(1194): Ortholog of  Ceres SEQ ID NO 15177710 as cited in SEQ ID NO 59217
  misc_feature (1)..(1194): Ortholog of  Ceres SEQ ID NO 13596958 as cited in SEQ ID NO 63319
  misc_feature (1)..(1194): Ortholog of  Ceres SEQ ID NO 12614814 as cited in SEQ ID NO 68816
tgccctcttaccttttcagagagagaaacaatatttctaatctattacaagtaacatgatcggccaacttatgaacctcaaggccacggagctctgtctcggcctccccggcggcgctgaagcagttgagagtcctgccaaatcggcggtgggaagcaagagaggcttctccgaaaccgttgatctcatgctcaatcttcaatctaacaaagaaggctccgttgatctcaaaaacgtttctgctgttcccaaggagaagactacccttaaagatccttctaagcctcctgctaaagcacaagtggtgggatggccacctgtgaggaactacaggaagaacatgatgactcagcagaagaccagtagtggtgcggaggaggccagcagtgagaaggccgggaactttggtggaggagcagccggagccggcttggtgaaggtctccatggacggtgctccatatctgaggaaagttgacctcaagatgtacaaaagctaccaggatctttctgatgcattggccaaaatgttcagctcctttactatgggaaactatggagcacaaggaatgatagatttcatgaacgagagcaagctaatgaatctgctgaatagctctgagtatgtgccaagctacgaggacaaagatggtgactggatgctcgttggcgatgtcccatgggaaatgtttgtcgagtcttgcaaacgtttgcgcattatgaagggatctgaagcagttggacttgctccgagagcaatggagaagtactgcaagaacagatcttgaattaataataaaaaaaaagaagcatcaatgatcaacaatatgacgggttcttgattttatatgtatttttatgattgtatgtggctatcacctatatatgtgtgttgtaattttaaatacttgatgggtatatagggcagtattttaccagtaagatgtggacaaacttgtaatgtgaccaaaagagaggaaacttcaatatctctgtgtttgtgtcatatttattgcccaacatgtgtctgtcggtttgatgatcaatcacaacttgatatgtgcatacatataaatgtgtgtatgtaggtgtgtgtacatgtacatgtgttttgatccctactctgctacttgtcgtttcttgtgtgtgttatctaatagttttttcccaaaatgaataattcgttgttatgttt

SEQ ID NO: 24397 - protein, 243 aa, Arabidopsis thaliana
  peptide (1)..(243): Ceres Seq. ID no. 13487832
MIGQLMNLKATELCLGLPGGAEAVESPAKSAVGSKRGFSETVDLMLNLQSNKEGSVDLKNVSAVPKEKTTLKDPSKPPAKAQVVGWPPVRNYRKNMMTQQKTSSGAEEASSEKAGNFGGGAAGAGLVKVSMDGAPYLRKVDLKMYKSYQDLSDALAKMFSSFTMGNYGAQGMIDFMNESKLMNLLNSSEYVPSYEDKDGDWMLVGDVPWEMFVESCKRLRIMKGSEAVGLAPRAMEKYCKNRS

SEQ ID NO: 24398 - protein, 238 aa, Arabidopsis thaliana
  peptide (1)..(238): Ceres Seq. ID no. 13487833
MNLKATELCLGLPGGAEAVESPAKSAVGSKRGFSETVDLMLNLQSNKEGSVDLKNVSAVPKEKTTLKDPSKPPAKAQVVGWPPVRNYRKNMMTQQKTSSGAEEASSEKAGNFGGGAAGAGLVKVSMDGAPYLRKVDLKMYKSYQDLSDALAKMFSSFTMGNYGAQGMIDFMNESKLMNLLNSSEYVPSYEDKDGDWMLVGDVPWEMFVESCKRLRIMKGSEAVGLAPRAMEKYCKNRS

SEQ ID NO: 24399 - protein, 199 aa, Arabidopsis thaliana
  peptide (1)..(199): Ceres Seq. ID no. 13487834
MLNLQSNKEGSVDLKNVSAVPKEKTTLKDPSKPPAKAQVVGWPPVRNYRKNMMTQQKTSSGAEEASSEKAGNFGGGAAGAGLVKVSMDGAPYLRKVDLKMYKSYQDLSDALAKMFSSFTMGNYGAQGMIDFMNESKLMNLLNSSEYVPSYEDKDGDWMLVGDVPWEMFVESCKRLRIMKGSEAVGLAPRAMEKYCKNRS

SEQ ID NO: 24400 - DNA, 1172 bp, Arabidopsis thaliana
  misc_feature (1)..(1172): Ceres Seq. ID no. 12338524
  misc_feature (1)..(1172): Ortholog of  Ceres SEQ ID NO 13594482 as cited in SEQ ID NO 51285
  misc_feature (1)..(1172): Ortholog of  Ceres SEQ ID NO 13655381 as cited in SEQ ID NO 63359
  misc_feature (1)..(1172): Ortholog of  Ceres SEQ ID NO 12617583 as cited in SEQ ID NO 64897
acaatgccacttctcctccgtcgatttccctctccctccgtcgtctcctccttcttcctccgtcgctcaatggcttcctcaacaatctcctcggatataatcactccatcaaacaccaaaatcggatggatcggaaccggagtcatgggccgatcaatgtgtggacacttaatcaaagccggttacacagtcaccgtcttcaatcgaaccatctccaaagctcaaactctcatcgacatgggtgctaacgtcgccgactcaccaaactcagtcgctgaacaatccgacgtcgttttcaccatcgttggttatccttccgatgtccgtcacgtccttctcgatccaaagtccggagctttatctggtctccgtcaaggaggtgttctcgttgatatgactacttctgagccttctttagcagaggagatagctaaagctgcttcctttaagaattgtttctcaatagacgctcctgtctcaggtggagatttaggagctaagaatgggaagctatctatattcgccggaggtgatgaaaccaccgtgaaacgtttagatccgttgttttcgttaatgggtaaagtcaacttcatgggaacaagtgggaaaggtcaatttgcgaaattggctaatcagataactattgcttcgactatgttaggacttgtggaaggtttgatttatgctcataaagctggacttgatgttaagaagtttcttgaagcgatttctactggtgctgctggttctaagtctatagatttgtatggagataggattctgaagagggattttgatcctggtttttatgtgaatcattttgtgaaagatttagggatttgtttgaatgaatgtcagaggatgggtttggctttgcctggtttagctcttgctcaacagctttacttgtctcttaaggctcatggtgaaggtgatcttggtactcaagctcttctcttggctcttgaacgtctcaacaatgtctctgttcaatcatctgactcttgatttaggttctgttccactttctgataatgcatctgttggagattttatgttgttatgaagtaaagatttgatcttttgtgtacccatttgttggtaaaacatgatttgaagtaaacttttgtgtacgcatatgagattcatacacagtagttttatgtgtaccc

SEQ ID NO: 24401 - protein, 335 aa, Arabidopsis thaliana
  peptide (1)..(335): Ceres Seq. ID no. 12338526
TMPLLLRRFPSPSVVSSFFLRRSMASSTISSDIITPSNTKIGWIGTGVMGRSMCGHLIKAGYTVTVFNRTISKAQTLIDMGANVADSPNSVAEQSDVVFTIVGYPSDVRHVLLDPKSGALSGLRQGGVLVDMTTSEPSLAEEIAKAASFKNCFSIDAPVSGGDLGAKNGKLSIFAGGDETTVKRLDPLFSLMGKVNFMGTSGKGQFAKLANQITIASTMLGLVEGLIYAHKAGLDVKKFLEAISTGAAGSKSIDLYGDRILKRDFDPGFYVNHFVKDLGICLNECQRMGLALPGLALAQQLYLSLKAHGEGDLGTQALLLALERLNNVSVQSSDS

SEQ ID NO: 24402 - protein, 334 aa, Arabidopsis thaliana
  peptide (1)..(334): Ceres Seq. ID no. 12338527
MPLLLRRFPSPSVVSSFFLRRSMASSTISSDIITPSNTKIGWIGTGVMGRSMCGHLIKAGYTVTVFNRTISKAQTLIDMGANVADSPNSVAEQSDVVFTIVGYPSDVRHVLLDPKSGALSGLRQGGVLVDMTTSEPSLAEEIAKAASFKNCFSIDAPVSGGDLGAKNGKLSIFAGGDETTVKRLDPLFSLMGKVNFMGTSGKGQFAKLANQITIASTMLGLVEGLIYAHKAGLDVKKFLEAISTGAAGSKSIDLYGDRILKRDFDPGFYVNHFVKDLGICLNECQRMGLALPGLALAQQLYLSLKAHGEGDLGTQALLLALERLNNVSVQSSDS

SEQ ID NO: 24403 - protein, 312 aa, Arabidopsis thaliana
  peptide (1)..(312): Ceres Seq. ID no. 12338528
MASSTISSDIITPSNTKIGWIGTGVMGRSMCGHLIKAGYTVTVFNRTISKAQTLIDMGANVADSPNSVAEQSDVVFTIVGYPSDVRHVLLDPKSGALSGLRQGGVLVDMTTSEPSLAEEIAKAASFKNCFSIDAPVSGGDLGAKNGKLSIFAGGDETTVKRLDPLFSLMGKVNFMGTSGKGQFAKLANQITIASTMLGLVEGLIYAHKAGLDVKKFLEAISTGAAGSKSIDLYGDRILKRDFDPGFYVNHFVKDLGICLNECQRMGLALPGLALAQQLYLSLKAHGEGDLGTQALLLALERLNNVSVQSSDS

SEQ ID NO: 24404 - DNA, 662 bp, Arabidopsis thaliana
  misc_feature (1)..(662): Ceres Seq. ID no. 12331139
  misc_feature (1)..(662): Ortholog of  Ceres SEQ ID NO 15179080 as cited in SEQ ID NO 0
atcgaaaaagatcgaaaaaaaatcgagaagcgaatagcggaagaacagaaaaagggaaattctgagaatcaaatcggaaaggtagaagaatcgagtcggaaaaatggaaacgacgaaaagtaacagcagcgagtccgatgtcaacgccaaatgggacgcttgtctcgatctcactgctcgtcgctttgtctactcttccctcggcggcgctttcgccggtcttctcttcttcaggagtccggttacgagatgggcgtcgattgcttttggtgctggaattggtattggttctgcatacacagattgttctcgtgtttttgatgcgtcttcttcaacttcagctactttattagcagctcccaagagtacagagacttctgtatctcaggcagcagaagagtgaagacaacgaggaagcttggaggtaaaaaaccaaacattgatagggttacattacgaaatggtaattgatcttgcaggacaaggcttttgagataacgccattgttaaaaaaaaacttttgcttctcagtgtggttttgtacactgatgtcaaaattgttaatgacccactcatttttttttgttttgaaaaatcttatgttcttttacttgagaaataattcctccgttgatttgtttgcctctactgttccttcattc

SEQ ID NO: 24405 - protein, 99 aa, Arabidopsis thaliana
  peptide (1)..(99): Ceres Seq. ID no. 12331140
METTKSNSSESDVNAKWDACLDLTARRFVYSSLGGAFAGLLFFRSPVTRWASIAFGAGIGIGSAYTDCSRVFDASSSTSATLLAAPKSTETSVSQAAEE

SEQ ID NO: 24406 - protein, 71 aa, Arabidopsis thaliana
  peptide (1)..(71): Ceres Seq. ID no. 12331141
MSTPNGTLVSISLLVALSTLPSAALSPVFSSSGVRLRDGRRLLLVLELVLVLHTQIVLVFLMRLLQLQLLY

SEQ ID NO: 24407 - protein, 56 aa, Arabidopsis thaliana
  peptide (1)..(56): Ceres Seq. ID no. 12331142
MGRLSRSHCSSLCLLFPRRRFRRSSLLQESGYEMGVDCFWCWNWYWFCIHRLFSCF

SEQ ID NO: 24408 - DNA, 1262 bp, Arabidopsis thaliana
  misc_feature (1)..(1262): Ceres Seq. ID no. 12322010
  misc_feature (1)..(1262): Ortholog of  Ceres SEQ ID NO 13597638 as cited in SEQ ID NO 65448
  misc_feature (1)..(1262): Ortholog of  Ceres SEQ ID NO 14302772 as cited in SEQ ID NO 69055
aaagcaacaaaaacttaacccatttcttcttctttttttgtttctctctcacaaacacaacaaatatggaatacagctgtgtagacgacagtagtactacgtcagaatctctctccatctctactactccaaagccgacaacgacaacggagaagaaactctcttctccaccggcgacttcgatgcgtctctacagaatgggaagcggcggaagcagcgttgttttggattcagagaacggcgtcgagaccgagtcacgaaagcttccgtcgtcgaaatacaaaggcgttgtgcctcagcctaacggaagatggggagctcagatttacgagaagcatcagcgagtttggctcggtactttcaacgaggaagaagaagctgcgtcttcttacgacatcgccgtgaggaggttccgaggccgcgacgccgtcactaacttcaaatctcaagttgatggaaacgacgccgaatcggcttttcttgacgctcattctaaagctgagatcgtggatatgttgaggaaacacacttacgccgatgagtttgagcagagtagacggaagtttgttaacggcgacggaaaacgctctgggttggagacggcgacgtacggaaacgacgctgttttgagagcgcgtgaggttttgttcgagaagactgttacgccgagcgacgtcgggaagctgaaccgtttagtgataccgaaacaacacgcggagaagcattttccgttatcggcgatgacgacggcgatggggatgaatccgtctccgacgaaaggcgttttgattaacttggaagatagaacagggaaagtgtggcggttccgttacagttactggaacagcagtcaaagttacgtgttgaccaagggctggagccggttcgttaaagagaagaatcttcgagccggtgatgtggtttgtttcgagagatcaaccggaccagaccggcaattgtatatccactggaaagtccggtctagtccggttcagactgtggttaggctattcggagtcaacattttcaatgtgagtaacgagaaaccaaacgacgtcgcagtagagtgtgttggcaagaagagatctcgggaagatgatttgttttcgttagggtgttccaagaagcaggcgattatcaacatcttgtgacaaattctttttttttggttttttttcttcaatttgtttctcctttttcaatattttgtattgaaatgacaagttgtaaattaggacaatacaagaaaaaatgacaactag

SEQ ID NO: 24409 - protein, 382 aa, Arabidopsis thaliana
  peptide (1)..(382): Ceres Seq. ID no. 12322011
SNKNLTHFFFFFCFSLTNTTNMEYSCVDDSSTTSESLSISTTPKPTTTTEKKLSSPPATSMRLYRMGSGGSSVVLDSENGVETESRKLPSSKYKGVVPQPNGRWGAQIYEKHQRVWLGTFNEEEEAASSYDIAVRRFRGRDAVTNFKSQVDGNDAESAFLDAHSKAEIVDMLRKHTYADEFEQSRRKFVNGDGKRSGLETATYGNDAVLRAREVLFEKTVTPSDVGKLNRLVIPKQHAEKHFPLSAMTTAMGMNPSPTKGVLINLEDRTGKVWRFRYSYWNSSQSYVLTKGWSRFVKEKNLRAGDVVCFERSTGPDRQLYIHWKVRSSPVQTVVRLFGVNIFNVSNEKPNDVAVECVGKKRSREDDLFSLGCSKKQAIINIL

SEQ ID NO: 24410 - protein, 361 aa, Arabidopsis thaliana
  peptide (1)..(361): Ceres Seq. ID no. 12322012
MEYSCVDDSSTTSESLSISTTPKPTTTTEKKLSSPPATSMRLYRMGSGGSSVVLDSENGVETESRKLPSSKYKGVVPQPNGRWGAQIYEKHQRVWLGTFNEEEEAASSYDIAVRRFRGRDAVTNFKSQVDGNDAESAFLDAHSKAEIVDMLRKHTYADEFEQSRRKFVNGDGKRSGLETATYGNDAVLRAREVLFEKTVTPSDVGKLNRLVIPKQHAEKHFPLSAMTTAMGMNPSPTKGVLINLEDRTGKVWRFRYSYWNSSQSYVLTKGWSRFVKEKNLRAGDVVCFERSTGPDRQLYIHWKVRSSPVQTVVRLFGVNIFNVSNEKPNDVAVECVGKKRSREDDLFSLGCSKKQAIINIL

SEQ ID NO: 24411 - protein, 322 aa, Arabidopsis thaliana
  peptide (1)..(322): Ceres Seq. ID no. 12322013
MRLYRMGSGGSSVVLDSENGVETESRKLPSSKYKGVVPQPNGRWGAQIYEKHQRVWLGTFNEEEEAASSYDIAVRRFRGRDAVTNFKSQVDGNDAESAFLDAHSKAEIVDMLRKHTYADEFEQSRRKFVNGDGKRSGLETATYGNDAVLRAREVLFEKTVTPSDVGKLNRLVIPKQHAEKHFPLSAMTTAMGMNPSPTKGVLINLEDRTGKVWRFRYSYWNSSQSYVLTKGWSRFVKEKNLRAGDVVCFERSTGPDRQLYIHWKVRSSPVQTVVRLFGVNIFNVSNEKPNDVAVECVGKKRSREDDLFSLGCSKKQAIINIL

SEQ ID NO: 24412 - DNA, 1200 bp, Arabidopsis thaliana
  misc_feature (1)..(1200): Ceres Seq. ID no. 12324635
  misc_feature (1)..(1200): Ortholog of  Ceres SEQ ID NO 14314471 as cited in SEQ ID NO 52369
ataagaaaaaaaagatgtcgaccgatatttcaccaccctactctcaaactcacgtggagcccgttaatggttatccttctgacaacaagagatgcgacgattcctctgttcctgccaaatatgatgatcttgtccgtaactctgctctcttctgggaaaagctccgagctttcctcggattaaccagcaagactttgaaggttcctactgtgggaggaaacactcttgatctgcatcggcttttcatcgaggttacgtctcgaggtggtatcgaaagggtggtgaaggatcggaaatggaaagaagtgattggtgcattcagttttccgacaacgataacaagtgcatcgtttgtcttgaggaagtattatctcaagtttctttttcagctggaacatgtgtattaccttgaaaaaccggtgtcttcactccaatcaacagatgaagcattgaagagccttgccaatgaatctccaaaccctgaggaaggtattgatgaaccacaagttgggtatgaggttcaaggattcattgatgggaagtttgatagcggctatctggtgacgatgaaattgggttctcaagagctgaaaggtgtcctttaccacattcctcaaacgccaagtcagtctcaacaaaccatggaaacaccttcagccattgtacaatcatcacaacgccggcataggaagaaatcaaagttggctgtagtcgatactcaaaaacccaaatgccacaggagtggctacaacttcttttttgctgagcagtacgcgaggcttaaacctgagtaccatggacaagaacgatccatcactaagaaaataggacacatgtggagcaatctcactgaatctgagaaacaggtttatcaagacaaaggagttaaggatgtggagagatacagaattgagatgttggaatataagtcttcacatgaatcaggagctactgcttctacagtggctcagtagcttttctcccttttgttgtcttacgtgtctgttgtaacatttttccttttctctatagaacttgttttctttttctttctaaatgtaatgttttctatcagttggaggatttgtcagctttattatggctttagagctagtgaggaggttactaactgtgaactagtgtctctcttgttgtttcttttagtaagtgccatttttgtagtgaattacaggcatatcc

SEQ ID NO: 24413 - protein, 323 aa, Arabidopsis thaliana
  peptide (1)..(323): Ceres Seq. ID no. 12324636
KKKKMSTDISPPYSQTHVEPVNGYPSDNKRCDDSSVPAKYDDLVRNSALFWEKLRAFLGLTSKTLKVPTVGGNTLDLHRLFIEVTSRGGIERVVKDRKWKEVIGAFSFPTTITSASFVLRKYYLKFLFQLEHVYYLEKPVSSLQSTDEALKSLANESPNPEEGIDEPQVGYEVQGFIDGKFDSGYLVTMKLGSQELKGVLYHIPQTPSQSQQTMETPSAIVQSSQRRHRKKSKLAVVDTQKPKCHRSGYNFFFAEQYARLKPEYHGQERSITKKIGHMWSNLTESEKQVYQDKGVKDVERYRIEMLEYKSSHESGATASTVAQ

SEQ ID NO: 24414 - protein, 319 aa, Arabidopsis thaliana
  peptide (1)..(319): Ceres Seq. ID no. 12324637
MSTDISPPYSQTHVEPVNGYPSDNKRCDDSSVPAKYDDLVRNSALFWEKLRAFLGLTSKTLKVPTVGGNTLDLHRLFIEVTSRGGIERVVKDRKWKEVIGAFSFPTTITSASFVLRKYYLKFLFQLEHVYYLEKPVSSLQSTDEALKSLANESPNPEEGIDEPQVGYEVQGFIDGKFDSGYLVTMKLGSQELKGVLYHIPQTPSQSQQTMETPSAIVQSSQRRHRKKSKLAVVDTQKPKCHRSGYNFFFAEQYARLKPEYHGQERSITKKIGHMWSNLTESEKQVYQDKGVKDVERYRIEMLEYKSSHESGATASTVAQ

SEQ ID NO: 24415 - DNA, 1155 bp, Arabidopsis thaliana
  misc_feature (1)..(1155): Ceres Seq. ID no. 12335621
  misc_feature (1)..(1155): Ortholog of  Ceres SEQ ID NO 14311981 as cited in SEQ ID NO 55703
  misc_feature (1)..(1155): Ortholog of  Ceres SEQ ID NO 15226227 as cited in SEQ ID NO 63433
  misc_feature (1)..(1155): Ortholog of  Ceres SEQ ID NO 13599003 as cited in SEQ ID NO 0
atcaactcgtttcttcgctgtcttagaaatccacaatatctttcttcacactttctttcactttcccgggaaaacagccgagaaaataaaagaaacgaagaaaagtttgttcctttgtggggatcaaagaagaatgtactcggcgattcggtcttcgcttcctctagatggcagcttgggagactactctgacggaaccaatcttcccatcgacgcttgtctggtcctaaccactgaccccaagcctcgccttcgttggacctctgagctccatgaaagattcgttgacgccgtcactcaactcggcggacccgacaaagcaacgcctaaaactataatgagaacaatgggagtgaagggtctcactctttaccacctcaaatctcatcttcagaaattccgcttggggaggcaatcttgtaaagaatcaattgacaactctaaggatgtttcttgtgttgcggagagtcaggacactggttcatcttcaacatcatcgttaagattggctgctcaagaacagaacgagagttaccaggtcactgaagctttgcgtgcccagatggaagtccaaagaagactacacgagcaactagaggtgcaaaggcgactccagttaaggatcgaggcacaagggaagtacctgcaatcaattctagagaaagcttgcaaggctatagaggagcaagctgttgcatttgctgggttagaggcagctagagaagagctttcagagctagccataaaggcctccatcaccaatgggtgccaaggaacaacaagcaccttcgacacaaccaaaatgatgattccatccttatccgagcttgcagtagcaatagagcacaagaacaactgttcagcagagagctctctgacttccagcactgtaggaagtccggtatcagctgcgttgatgaagaagagacaacgaggagtgtttggaaatggagatagtgtggttgttggtcatgatgctggatgggttatgcctagtagtagcattggatgaagttagcaagagagagagagagagcgagaccagattttagcttatttaattttgctatgttgtatttaactctaaactctgtcatcaaacttgtcttagcgtctatgtatatatttgttgaatctgtagcctctcttttagtc

SEQ ID NO: 24416 - protein, 336 aa, Arabidopsis thaliana
  peptide (1)..(336): Ceres Seq. ID no. 12335622
STRFFAVLEIHNIFLHTFFHFPGKTAEKIKETKKSLFLCGDQRRMYSAIRSSLPLDGSLGDYSDGTNLPIDACLVLTTDPKPRLRWTSELHERFVDAVTQLGGPDKATPKTIMRTMGVKGLTLYHLKSHLQKFRLGRQSCKESIDNSKDVSCVAESQDTGSSSTSSLRLAAQEQNESYQVTEALRAQMEVQRRLHEQLEVQRRLQLRIEAQGKYLQSILEKACKAIEEQAVAFAGLEAAREELSELAIKASITNGCQGTTSTFDTTKMMIPSLSELAVAIEHKNNCSAESSLTSSTVGSPVSAALMKKRQRGVFGNGDSVVVGHDAGWVMPSSSIG

SEQ ID NO: 24417 - protein, 292 aa, Arabidopsis thaliana
  peptide (1)..(292): Ceres Seq. ID no. 12335623
MYSAIRSSLPLDGSLGDYSDGTNLPIDACLVLTTDPKPRLRWTSELHERFVDAVTQLGGPDKATPKTIMRTMGVKGLTLYHLKSHLQKFRLGRQSCKESIDNSKDVSCVAESQDTGSSSTSSLRLAAQEQNESYQVTEALRAQMEVQRRLHEQLEVQRRLQLRIEAQGKYLQSILEKACKAIEEQAVAFAGLEAAREELSELAIKASITNGCQGTTSTFDTTKMMIPSLSELAVAIEHKNNCSAESSLTSSTVGSPVSAALMKKRQRGVFGNGDSVVVGHDAGWVMPSSSIG

SEQ ID NO: 24418 - protein, 224 aa, Arabidopsis thaliana
  peptide (1)..(224): Ceres Seq. ID no. 12335624
MRTMGVKGLTLYHLKSHLQKFRLGRQSCKESIDNSKDVSCVAESQDTGSSSTSSLRLAAQEQNESYQVTEALRAQMEVQRRLHEQLEVQRRLQLRIEAQGKYLQSILEKACKAIEEQAVAFAGLEAAREELSELAIKASITNGCQGTTSTFDTTKMMIPSLSELAVAIEHKNNCSAESSLTSSTVGSPVSAALMKKRQRGVFGNGDSVVVGHDAGWVMPSSSIG

SEQ ID NO: 24419 - DNA, 2078 bp, Arabidopsis thaliana
  misc_feature (1)..(2078): Ceres Seq. ID no. 12325297
  misc_feature (1)..(2078): Ortholog of  Ceres SEQ ID NO 13600419 as cited in SEQ ID NO 0
gaattgatcgactgggaaacagagaaccaccgtttctacagttggatatggctggtgggcaaatagagaagctagtcaaatacaagagcactgtcaaggatccaggaactcctggatttctcagaattagagaagggatgttgctcttcgtccctaatgatcccaaatcagattctaagctcaaagtacttactcagaacatcaaaagtcaaaaatataccaaagaaggatcaaataaacctccttggctcaatctcaccaacaagcaggcaaagagtcatatctttgagtttgaaaattatcccgacatgcatgcttgccgtgatttcatcactaaggcccttgctaaatgtgaagaggagcctaataaatccgttgtctcgacatcttccgagcaactcagtattaaggaattggagctgcgcttcaagcttctgagagaaaatagtgagctgcagagattgcataagcaatttgtggaaagtaaagtactgactgaagatgaattctgggctacaagaaagaaattacttggtaaagattccatcagaaagtcaaaacagcagctcgggcttaagagcatgatggtttctggcatcaaaccatctactgatgggcggactaatagggtgacgtttaacttgacacctgagataatttttcagatttttgctgagaagccagctgttcggcaggcattcatcaattatgttccgagtaagatgacagaaaaagacttctggacaaaatattttagagcagaatatctttacagcaccaaaaatacagcagtagctgcagcagaagctgctgaggacgaggaactcgctgtctttctgaagcctgatgagatattggctcgggaaactcgtcacaagattagacgggttgatccaactcttgacatggaggctgaccagggagacgactacactcatcttatggaccacgggatccagcgtgatggcaccatggatgttgttgaaccacaaaatgatcagtttaaacgatcacttttgcaagatcttaatcgtcatgctgctgttgtattggaaggcagaagcattgatgttgagtcagaagatacaaggattgttgcagaggctctcacacgggttaaacaagtaagcaaagctgatggtgaaaccaccaaggacgctaatcaggagagattggaaagaatgtcccgggtagcaggaatggaggatcttcaagcaccacaaaatttcccattggcgccgctttctatcaaggatcctcgtgattactttgaatctcaacaaggaaacgtcctcaatgtacccagaggagcaaagggcttgaagagaaatgtccatgaagcttatggattactaaaggaatccattttagagattagagctacaggattaagtgatccgttgattaagcctgaagtttctttcgaggttttcagttcgttaacccgaaccattgcaactgctaaaaatattaatgggaagaacccacgagagagctttctggacagattaccaaagtccactaaggatgaagttctacaccattggacatcaatacaagaattactgaaacatttttggtcatcttatccgataacaaccacatatcttcataccaaggttggtaaactgaaggatgcaatgtccaatacatattcaaaacttgaggcaatgaaagagtcggtgcaatctgatctccggcatcaggtttctctactggttcgtccaatgcaacaggctcttgacgctgcgttccatcactacgaagtggatctgcagagaagaacagctaagagcggcgaaagaccaaacggctacgtataaaggacaaaaaaactaaaactaaaaagctttgcaagatctttgaattgtttcatcagccttggttggtgtttttgaaaatcttcatttgtccctttttgtccgaccattgagatacaaaaatgcgtttatattgtagtaatattttcttttcttttttttgttaattaggcgttatattgttaactgcgagagacaacaaagagattttctcgatctgaacatttttgagtttgcaatgtattagtaaattctctc

SEQ ID NO: 24420 - protein, 606 aa, Arabidopsis thaliana
  peptide (1)..(606): Ceres Seq. ID no. 12325298
IDRLGNREPPFLQLDMAGGQIEKLVKYKSTVKDPGTPGFLRIREGMLLFVPNDPKSDSKLKVLTQNIKSQKYTKEGSNKPPWLNLTNKQAKSHIFEFENYPDMHACRDFITKALAKCEEEPNKSVVSTSSEQLSIKELELRFKLLRENSELQRLHKQFVESKVLTEDEFWATRKKLLGKDSIRKSKQQLGLKSMMVSGIKPSTDGRTNRVTFNLTPEIIFQIFAEKPAVRQAFINYVPSKMTEKDFWTKYFRAEYLYSTKNTAVAAAEAAEDEELAVFLKPDEILARETRHKIRRVDPTLDMEADQGDDYTHLMDHGIQRDGTMDVVEPQNDQFKRSLLQDLNRHAAVVLEGRSIDVESEDTRIVAEALTRVKQVSKADGETTKDANQERLERMSRVAGMEDLQAPQNFPLAPLSIKDPRDYFESQQGNVLNVPRGAKGLKRNVHEAYGLLKESILEIRATGLSDPLIKPEVSFEVFSSLTRTIATAKNINGKNPRESFLDRLPKSTKDEVLHHWTSIQELLKHFWSSYPITTTYLHTKVGKLKDAMSNTYSKLEAMKESVQSDLRHQVSLLVRPMQQALDAAFHHYEVDLQRRTAKSGERPNGYV

SEQ ID NO: 24421 - protein, 591 aa, Arabidopsis thaliana
  peptide (1)..(591): Ceres Seq. ID no. 12325299
MAGGQIEKLVKYKSTVKDPGTPGFLRIREGMLLFVPNDPKSDSKLKVLTQNIKSQKYTKEGSNKPPWLNLTNKQAKSHIFEFENYPDMHACRDFITKALAKCEEEPNKSVVSTSSEQLSIKELELRFKLLRENSELQRLHKQFVESKVLTEDEFWATRKKLLGKDSIRKSKQQLGLKSMMVSGIKPSTDGRTNRVTFNLTPEIIFQIFAEKPAVRQAFINYVPSKMTEKDFWTKYFRAEYLYSTKNTAVAAAEAAEDEELAVFLKPDEILARETRHKIRRVDPTLDMEADQGDDYTHLMDHGIQRDGTMDVVEPQNDQFKRSLLQDLNRHAAVVLEGRSIDVESEDTRIVAEALTRVKQVSKADGETTKDANQERLERMSRVAGMEDLQAPQNFPLAPLSIKDPRDYFESQQGNVLNVPRGAKGLKRNVHEAYGLLKESILEIRATGLSDPLIKPEVSFEVFSSLTRTIATAKNINGKNPRESFLDRLPKSTKDEVLHHWTSIQELLKHFWSSYPITTTYLHTKVGKLKDAMSNTYSKLEAMKESVQSDLRHQVSLLVRPMQQALDAAFHHYEVDLQRRTAKSGERPNGYV

SEQ ID NO: 24422 - protein, 561 aa, Arabidopsis thaliana
  peptide (1)..(561): Ceres Seq. ID no. 12325300
MLLFVPNDPKSDSKLKVLTQNIKSQKYTKEGSNKPPWLNLTNKQAKSHIFEFENYPDMHACRDFITKALAKCEEEPNKSVVSTSSEQLSIKELELRFKLLRENSELQRLHKQFVESKVLTEDEFWATRKKLLGKDSIRKSKQQLGLKSMMVSGIKPSTDGRTNRVTFNLTPEIIFQIFAEKPAVRQAFINYVPSKMTEKDFWTKYFRAEYLYSTKNTAVAAAEAAEDEELAVFLKPDEILARETRHKIRRVDPTLDMEADQGDDYTHLMDHGIQRDGTMDVVEPQNDQFKRSLLQDLNRHAAVVLEGRSIDVESEDTRIVAEALTRVKQVSKADGETTKDANQERLERMSRVAGMEDLQAPQNFPLAPLSIKDPRDYFESQQGNVLNVPRGAKGLKRNVHEAYGLLKESILEIRATGLSDPLIKPEVSFEVFSSLTRTIATAKNINGKNPRESFLDRLPKSTKDEVLHHWTSIQELLKHFWSSYPITTTYLHTKVGKLKDAMSNTYSKLEAMKESVQSDLRHQVSLLVRPMQQALDAAFHHYEVDLQRRTAKSGERPNGYV

SEQ ID NO: 24423 - DNA, 3435 bp, Arabidopsis thaliana
  misc_feature (1)..(3435): Ceres Seq. ID no. 13491817
  misc_feature (1)..(3435): Ortholog of  Ceres SEQ ID NO 14308747 as cited in SEQ ID NO 55372
agatgcttccttcttcactttaatcacccttttcgattttcgttttccagctttttgattcctctgtttcaccaagtagacgaagtagaagaagaagaagaagaagaaagttttcacctttactctaaaagtttcactttttatgtctgctttgaagctctgagatcggagaaagcaatatctatggcggaagcaagacgattcagcccagttcatgaattagatgttggacaaatactctcagaagcacgacatcgatggcttcgtcctcctgaaatctgtgaaattttacagaattaccaaagatttcaaatttctactgagccacctactacaccatcaagtgggtctgtttttatgtttgatcgaaaggtgctcagatacttcaggaaagacggtcacaattggaggaagaaaaaagatggaaagactgtgaaggaagctcatgagaggttgaaggcgggaagcgttgatgttctacattgttactatgcgcatggacaggacaatgaaaactttcaaagacgcagttactggttgcttcaggaagaactttcccacatagtttttgttcactacctcgaagttaagggtagtagagtttctacttcttttaaccggatgcaaaggactgaagacgcggctcggtctcctcaagaaactggggacgccttgaccagtgaacatgatggttatgcttcttgcagcttcaatcaaaatgatcatagcaatcattcacaaactactgactcagcaagtgtcaatggttttcactctccagaacttgaagatgctgaatcagcatacaatcagcatggaagttccacagcttactctcatcaagaacttcagcagcctgcaacaggaggaaaccttactggttttgatccttactatcaaatctctttgacgcccagggatagttatcaaaaagagcttcgcacaatccccgtaactgattcttcaattatggtagacaaaagcaaaactatcaacagtcctggagtaacaaatgggttaaaaaacagaaaatccattgattcccaaacctgggaagagattctgggaaattgtggttctggagttgaagccttacctttgcagcctaacagtgagcatgaagtgctggaccaaatactcgaaagctcttttacaatgcaagattttgctagtctacaagagtccatggtcaaaagccagaatcaggagttaaattcaggacttacatctgatcgtaccgtgtggttccaaggacaagatatggagctaaatgctataagcaatctagcttcgaatgaaaaagctccatatctatctacgatgaaacaacatctgttacacggtgcattgggcgaagaaggtctgaaaaagatggacagtttcaatcgctggatgagcaaagaacttggagatgttggtgttatagctgatgcaaacgagtcctttactcaatcaagttcaagaacctactgggaagaagttgagagtgaggatgggtccaatggtcacaactctaggagggacatggatggatatgttatgagtccttccctctcaaaggaacagctctttagcatcaatgacttctctccaagctgggcttatgtgggttgtgaagtggtggtttttgtcactggaaaattcttaaagactcgggaggagactgaaattggcgagtggtcttgcatgtttgggcaaacagaagttccagcagatgttatatctaatggtattctccaatgtgttgctcctatgcatgaggctggaagagttcccttttatgtaacatgttccaacagattggcatgcagtgaagtgcgtgaattcgagtataaggttgccgagtctcaagtttttgatagagaagcagatgatgagtctactattgacattcttgaggcaagatttgttaaactgttgtgctcgaaatctgaaaatacaagccctgtttctgggaatgacagtgatttgtcacaattgagcgagaagattagtttactacttttcgagaacgatgaccagttggatcagatgctcatgaatgaaatctcccaagaaaatatgaaaaacaaccttttgcaggaatttctgaaagaaagcttacactcatggcttttacaaaagatagcagaaggtggaaaaggtccaagtgttttggatgaaggtggccaaggtgtattacattttgcagcttctcttggttacaactgggccttagaaccaacaataatcgctggtgtaagcgttgattttcgcgatgtaaatggttggaccgcacttcattgggcagctttctttggcagggagaggataattggttcactcatagctcttggtgctgctcctggaactttaactgacccaaatccagatttcccatcaggaagcacaccttctgatctagcctatgctaatggtcacaaaggaattgctggttatctctcagaatatgccttaagagctcatgtttctttgctcagtctaaatgataaaaatgccgaaactgttgagatggctcctagcccatccagctcatcattgacagactcgttgacagctgtacgtaacgctactcaggcagcagctcggattcatcaggttttcagggctcagtctttccagaagaagcaactaaaagaatttggagataaaaagcttggaatgtcggaggagcgtgctctttcgatgcttgctcctaaaacacacaaatcaggaagggcacatagtgatgattccgtgcaagccgctgctattcggattcagaacaagttccgaggttacaagggaagaaaagactatttgattaccagacaaagaatcatcaaaatacaggctcatgtgagaggttatcagtttaggaaaaactacagaaagataatttggtcagtgggggtattagagaaggtgatattacgttggagacggaaaggagctggtttgcgcgggtttaagtcagaagcacttgttgagaagatgcaagacggaacagagaaagaagaagatgatgattttttcaaacaaggaagaaagcaaacagaggataggctacaaaaagctcttgcaagagtgaaatccatggttcaatatcctgaagctagagatcaataccgtagattgctaaatgttgtcaacgacatccaagaaagcaaggttgaaaaagctcttgaaaattcagaagcaacttgttttgatgatgatgatgatctgatagatattgaagcattgttggaagatgatgacacattgatgttgcctatgtcctcatctttgtggaccagttaaatcactctcaagctttgttgtgatattgtgtcacagtattattgactcattaaacttgtaaattcttgtgtaatcactcttctcatatactgtaactgcattcatgactctaatttaaatgatatatatttgaaacataaatcaaacttatgt

SEQ ID NO: 24424 - protein, 1093 aa, Arabidopsis thaliana
  peptide (1)..(1093): Ceres Seq. ID no. 13491818
RCFLLHFNHPFRFSFSSFLIPLFHQVDEVEEEEEEESFHLYSKSFTFYVCFEALRSEKAISMAEARRFSPVHELDVGQILSEARHRWLRPPEICEILQNYQRFQISTEPPTTPSSGSVFMFDRKVLRYFRKDGHNWRKKKDGKTVKEAHERLKAGSVDVLHCYYAHGQDNENFQRRSYWLLQEELSHIVFVHYLEVKGSRVSTSFNRMQRTEDAARSPQETGDALTSEHDGYASCSFNQNDHSNHSQTTDSASVNGFHSPELEDAESAYNQHGSSTAYSHQELQQPATGGNLTGFDPYYQISLTPRDSYQKELRTIPVTDSSIMVDKSKTINSPGVTNGLKNRKSIDSQTWEEILGNCGSGVEALPLQPNSEHEVLDQILESSFTMQDFASLQESMVKSQNQELNSGLTSDRTVWFQGQDMELNAISNLASNEKAPYLSTMKQHLLHGALGEEGLKKMDSFNRWMSKELGDVGVIADANESFTQSSSRTYWEEVESEDGSNGHNSRRDMDGYVMSPSLSKEQLFSINDFSPSWAYVGCEVVVFVTGKFLKTREETEIGEWSCMFGQTEVPADVISNGILQCVAPMHEAGRVPFYVTCSNRLACSEVREFEYKVAESQVFDREADDESTIDILEARFVKLLCSKSENTSPVSGNDSDLSQLSEKISLLLFENDDQLDQMLMNEISQENMKNNLLQEFLKESLHSWLLQKIAEGGKGPSVLDEGGQGVLHFAASLGYNWALEPTIIAGVSVDFRDVNGWTALHWAAFFGRERIIGSLIALGAAPGTLTDPNPDFPSGSTPSDLAYANGHKGIAGYLSEYALRAHVSLLSLNDKNAETVEMAPSPSSSSLTDSLTAVRNATQAAARIHQVFRAQSFQKKQLKEFGDKKLGMSEERALSMLAPKTHKSGRAHSDDSVQAAAIRIQNKFRGYKGRKDYLITRQRIIKIQAHVRGYQFRKNYRKIIWSVGVLEKVILRWRRKGAGLRGFKSEALVEKMQDGTEKEEDDDFFKQGRKQTEDRLQKALARVKSMVQYPEARDQYRRLLNVVNDIQESKVEKALENSEATCFDDDDDLIDIEALLEDDDTLMLPMSSSLWTS

SEQ ID NO: 24425 - protein, 1032 aa, Arabidopsis thaliana
  peptide (1)..(1032): Ceres Seq. ID no. 13491819
MAEARRFSPVHELDVGQILSEARHRWLRPPEICEILQNYQRFQISTEPPTTPSSGSVFMFDRKVLRYFRKDGHNWRKKKDGKTVKEAHERLKAGSVDVLHCYYAHGQDNENFQRRSYWLLQEELSHIVFVHYLEVKGSRVSTSFNRMQRTEDAARSPQETGDALTSEHDGYASCSFNQNDHSNHSQTTDSASVNGFHSPELEDAESAYNQHGSSTAYSHQELQQPATGGNLTGFDPYYQISLTPRDSYQKELRTIPVTDSSIMVDKSKTINSPGVTNGLKNRKSIDSQTWEEILGNCGSGVEALPLQPNSEHEVLDQILESSFTMQDFASLQESMVKSQNQELNSGLTSDRTVWFQGQDMELNAISNLASNEKAPYLSTMKQHLLHGALGEEGLKKMDSFNRWMSKELGDVGVIADANESFTQSSSRTYWEEVESEDGSNGHNSRRDMDGYVMSPSLSKEQLFSINDFSPSWAYVGCEVVVFVTGKFLKTREETEIGEWSCMFGQTEVPADVISNGILQCVAPMHEAGRVPFYVTCSNRLACSEVREFEYKVAESQVFDREADDESTIDILEARFVKLLCSKSENTSPVSGNDSDLSQLSEKISLLLFENDDQLDQMLMNEISQENMKNNLLQEFLKESLHSWLLQKIAEGGKGPSVLDEGGQGVLHFAASLGYNWALEPTIIAGVSVDFRDVNGWTALHWAAFFGRERIIGSLIALGAAPGTLTDPNPDFPSGSTPSDLAYANGHKGIAGYLSEYALRAHVSLLSLNDKNAETVEMAPSPSSSSLTDSLTAVRNATQAAARIHQVFRAQSFQKKQLKEFGDKKLGMSEERALSMLAPKTHKSGRAHSDDSVQAAAIRIQNKFRGYKGRKDYLITRQRIIKIQAHVRGYQFRKNYRKIIWSVGVLEKVILRWRRKGAGLRGFKSEALVEKMQDGTEKEEDDDFFKQGRKQTEDRLQKALARVKSMVQYPEARDQYRRLLNVVNDIQESKVEKALENSEATCFDDDDDLIDIEALLEDDDTLMLPMSSSLWTS

SEQ ID NO: 24426 - protein, 974 aa, Arabidopsis thaliana
  peptide (1)..(974): Ceres Seq. ID no. 13491820
MFDRKVLRYFRKDGHNWRKKKDGKTVKEAHERLKAGSVDVLHCYYAHGQDNENFQRRSYWLLQEELSHIVFVHYLEVKGSRVSTSFNRMQRTEDAARSPQETGDALTSEHDGYASCSFNQNDHSNHSQTTDSASVNGFHSPELEDAESAYNQHGSSTAYSHQELQQPATGGNLTGFDPYYQISLTPRDSYQKELRTIPVTDSSIMVDKSKTINSPGVTNGLKNRKSIDSQTWEEILGNCGSGVEALPLQPNSEHEVLDQILESSFTMQDFASLQESMVKSQNQELNSGLTSDRTVWFQGQDMELNAISNLASNEKAPYLSTMKQHLLHGALGEEGLKKMDSFNRWMSKELGDVGVIADANESFTQSSSRTYWEEVESEDGSNGHNSRRDMDGYVMSPSLSKEQLFSINDFSPSWAYVGCEVVVFVTGKFLKTREETEIGEWSCMFGQTEVPADVISNGILQCVAPMHEAGRVPFYVTCSNRLACSEVREFEYKVAESQVFDREADDESTIDILEARFVKLLCSKSENTSPVSGNDSDLSQLSEKISLLLFENDDQLDQMLMNEISQENMKNNLLQEFLKESLHSWLLQKIAEGGKGPSVLDEGGQGVLHFAASLGYNWALEPTIIAGVSVDFRDVNGWTALHWAAFFGRERIIGSLIALGAAPGTLTDPNPDFPSGSTPSDLAYANGHKGIAGYLSEYALRAHVSLLSLNDKNAETVEMAPSPSSSSLTDSLTAVRNATQAAARIHQVFRAQSFQKKQLKEFGDKKLGMSEERALSMLAPKTHKSGRAHSDDSVQAAAIRIQNKFRGYKGRKDYLITRQRIIKIQAHVRGYQFRKNYRKIIWSVGVLEKVILRWRRKGAGLRGFKSEALVEKMQDGTEKEEDDDFFKQGRKQTEDRLQKALARVKSMVQYPEARDQYRRLLNVVNDIQESKVEKALENSEATCFDDDDDLIDIEALLEDDDTLMLPMSSSLWTS

SEQ ID NO: 24427 - DNA, 1691 bp, Arabidopsis thaliana
  misc_feature (1)..(1691): Ceres Seq. ID no. 13486727
  misc_feature (1)..(1691): Ortholog of  Ceres SEQ ID NO 15176333 as cited in SEQ ID NO 52787
  misc_feature (1)..(1691): Ortholog of  Ceres SEQ ID NO 14303479 as cited in SEQ ID NO 54254
  misc_feature (1)..(1691): Ortholog of  Ceres SEQ ID NO 12611392 as cited in SEQ ID NO 56826
  misc_feature (1)..(1691): Ortholog of  Ceres SEQ ID NO 13660872 as cited in SEQ ID NO 60830
  misc_feature (1)..(1691): Ortholog of  Ceres SEQ ID NO 12616221 as cited in SEQ ID NO 63291
aaaagatcgacgaacataaaaacaaaaacatataatttgggtttttagagttcgaaacttgaaatctttttttttttggttgctgaggaatcgaagtagaagagtataaatgggtgttagagagaaagatccgttagcccagttgagtttgccaccaggttttagattttatccgacagatgaagagcttcttgttcagtatctatgtcggaaagttgcaggctatcatttctctctccaggtcatcggagacatcgatctctacaagttcgatccttgggatttgccaagtaaggctttgtttggagagaaggaatggtatttctttagcccaagagatcggaaatatccgaacgggtcaagacccaatagagtagccgggtcgggttattggaaagcaacgggtactgacaaaattatcacggcggatggtcgtcgtgtcgggattaaaaaagctctggtcttttacgccggaaaagctcccaaaggcactaaaaccaactggattatgcacgagtatcgcttaatagaacattctcgtagccatggaagctccaagttggatgattgggtgttgtgtcgaatttacaagaaaacatctggatctcagagacaagctgttactcctgttcaagcttgtcgtgaagagcatagcacgaatgggtcgtcatcgtcttcttcatcacagcttgacgacgttcttgattcgttcccggagataaaagaccagtcttttaatcttcctcggatgaattcgctcaggacgattcttaacgggaactttgattgggctagcttggcaggtcttaatccaattccagagctagctccgaccaatggattaccgagttacggtggttacgatgcgtttcgagcggcggaaggtgaggcggagagtgggcatgtgaatcggcagcagaactcgagcgggttgactcagagtttcgggtacagctcgagtgggtttggtgtttcgggtcaaacattcgagtttaggcaatgagagagatgtgaagttactgatgggtgaaaaaagtaaaaaaaaaacttggagatagtagagtggcaattgatgtaaataatagggatttatatggggcttttaccgattcggtgaggcttaggattccacaaaggaaaaaggctcgactggggactagtttgatccaacttgacggcccacaaatgtgtaatgtttctcaacggagagaaaaataaatggttaccaatatttttacaccggttatgtgttgataccatttgcacaaaacggtttaagttctgaattgaataacttaacacccaaaatttggtaaaaagcttaatacaaaaagttcaaaggcattttcgcttactgcgacactcggagttgcagagtactctacgtaacagactctgttcatagagtttgcggcaccggtggtgggacattcttgcggacacagtatgtacttttggaagcatcgttcctaagggttgctgcagtaaactccttgtgacttggctcgcaagaaacataacatggccgcaagaaaaaacagcattaacgaagaggtgtttgagatcttcatgtctagtttattcttcctgttttattatgtgtcgactggtgtcaaaagaaacgtgttgattgtgaatttgtagacgccactctgtaaatttatttaaaataaactattttacttcacgtc

SEQ ID NO: 24428 - protein, 297 aa, Arabidopsis thaliana
  peptide (1)..(297): Ceres Seq. ID no. 13486728
MGVREKDPLAQLSLPPGFRFYPTDEELLVQYLCRKVAGYHFSLQVIGDIDLYKFDPWDLPSKALFGEKEWYFFSPRDRKYPNGSRPNRVAGSGYWKATGTDKIITADGRRVGIKKALVFYAGKAPKGTKTNWIMHEYRLIEHSRSHGSSKLDDWVLCRIYKKTSGSQRQAVTPVQACREEHSTNGSSSSSSSQLDDVLDSFPEIKDQSFNLPRMNSLRTILNGNFDWASLAGLNPIPELAPTNGLPSYGGYDAFRAAEGEAESGHVNRQQNSSGLTQSFGYSSSGFGVSGQTFEFRQ

SEQ ID NO: 24429 - protein, 164 aa, Arabidopsis thaliana
  peptide (1)..(164): Ceres Seq. ID no. 13486729
MHEYRLIEHSRSHGSSKLDDWVLCRIYKKTSGSQRQAVTPVQACREEHSTNGSSSSSSSQLDDVLDSFPEIKDQSFNLPRMNSLRTILNGNFDWASLAGLNPIPELAPTNGLPSYGGYDAFRAAEGEAESGHVNRQQNSSGLTQSFGYSSSGFGVSGQTFEFRQ

SEQ ID NO: 24430 - DNA, 843 bp, Arabidopsis thaliana
  misc_feature (1)..(843): Ceres Seq. ID no. 12321998
  misc_feature (1)..(843): Ortholog of  Ceres SEQ ID NO 14309148 as cited in SEQ ID NO 0
accactctcttctcctgttttcctcttccccaactctcaattttgctcagacaaaaaatcaatggctttgcaaatgcagcaaacttcagcagccttcacaatctcctcaccatccaccgccgctgcacgcatcaaactctcccctttcagaaccgtggcggttaaccgcggagttagatgcagcggcggtggagtcggaggcggagatgccgggaagaaaaaagcagttcctaattcgaattatgtagttcctattgacaaattctcgtcttcttcgtcgattactaggcctttgattgagatacttcgtgaccttaataagaagattcctgataacattgttaagagtcatgatcctccttctacttctgctgctacttctggttttatcccttggtaccatgcaaatcggatgcttagcttctatgctcctggttggtgtggtgaagttagagatgttattttctctgagaatggaaatgttactgttgtttatcgtctcactattcgtggctctgatggtgaggcacatcgtgaatcaactgggacagtaacgacgactgattatcacatcgaggatccagttactgcagctgaggaaatagcattctgcagagcatgtgctcgatttggtctcggcttgtatctataccacgaatagttcaccgatcatatcaagtttccttactgtttttcaagaccctcaattccgtgatctgtttgttttttcttccttctttttgacatccttgtgttatctagagtaccaaaacatgcaattaacaggagtttttatgtataaccaaactcttcatgttataatatatacagttacattacatc

SEQ ID NO: 24431 - protein, 219 aa, Arabidopsis thaliana
  peptide (1)..(219): Ceres Seq. ID no. 12321999
PLSSPVFLFPNSQFCSDKKSMALQMQQTSAAFTISSPSTAAARIKLSPFRTVAVNRGVRCSGGGVGGGDAGKKKAVPNSNYVVPIDKFSSSSSITRPLIEILRDLNKKIPDNIVKSHDPPSTSAATSGFIPWYHANRMLSFYAPGWCGEVRDVIFSENGNVTVVYRLTIRGSDGEAHRESTGTVTTTDYHIEDPVTAAEEIAFCRACARFGLGLYLYHE

SEQ ID NO: 24432 - protein, 199 aa, Arabidopsis thaliana
  peptide (1)..(199): Ceres Seq. ID no. 12322000
MALQMQQTSAAFTISSPSTAAARIKLSPFRTVAVNRGVRCSGGGVGGGDAGKKKAVPNSNYVVPIDKFSSSSSITRPLIEILRDLNKKIPDNIVKSHDPPSTSAATSGFIPWYHANRMLSFYAPGWCGEVRDVIFSENGNVTVVYRLTIRGSDGEAHRESTGTVTTTDYHIEDPVTAAEEIAFCRACARFGLGLYLYHE

SEQ ID NO: 24433 - protein, 195 aa, Arabidopsis thaliana
  peptide (1)..(195): Ceres Seq. ID no. 12322001
MQQTSAAFTISSPSTAAARIKLSPFRTVAVNRGVRCSGGGVGGGDAGKKKAVPNSNYVVPIDKFSSSSSITRPLIEILRDLNKKIPDNIVKSHDPPSTSAATSGFIPWYHANRMLSFYAPGWCGEVRDVIFSENGNVTVVYRLTIRGSDGEAHRESTGTVTTTDYHIEDPVTAAEEIAFCRACARFGLGLYLYHE

SEQ ID NO: 24434 - DNA, 1137 bp, Arabidopsis thaliana
  misc_feature (1)..(1137): Ceres Seq. ID no. 12322002
  misc_feature (1)..(1137): Ortholog of  Ceres SEQ ID NO 12609214 as cited in SEQ ID NO 52165
acttagaaatggcttcttcgtcttcacccccggcggcgatggaggtcggagaatctacaaactggacggagcttccaccggaactgacttcagcaatcctgcaccgtcttggcgcgattgagatacttgaaaacgctcagaaagtttgcagatcttggcgtcgtgtttgtaaagacccatcgatgtggcgtaaaattgacatgcataacctcggagatttggacgacatggattacaacctcgagatcatgtgccgtcacgctgttgatcgtagccagggaggcttggttgatatcggtatttggtactttggtactgttgatctcctcaattacatcgcccataggtcgagtaatctgagaagccttagacttataaggtgttctcaaattacagacgatggatttgtcgaagcagttgtgaaacttccacttgaagaactcgagttgtcatactgctcattttcagtagagtctctcagagttgtaggccagtgttgtttaaatatgaagactttgaagctgaacaagcatcctcaaaaggagaatgacgatgatgctctagcaatcgctgaaacaattccgaaacttcgccatctccagctttgtgggaacgggttgtcagacaccggtttaaacgctattcttgacaattgctcaaacctggaacatcttgatttacgccggtgtttcaatgttaaccttgttggggatttgcagaagcggtgttttgagagtgtcaaagttgtgagacaccctaatgactcgattcatgatatcgacattggttcatcagaagacgaagacccttatgacttctctgatatcgatctgatgtcaggtgatgatgattttgagggttactatgacttctcaggtgctagtgacttttctgactatgaccagtttgatttctagatgcatcggtttcgtgcaggtgaatttttttcgaacttgttcatgacttgttttaagttagctcatagtttcaatggattttatgtgtccttgaagtatgttaccgtttgtaatgatgtcttttgctgtttgtctttcaacaatttctaagctcagaaaagtttcaaagatggtgattgtttcatcttgcttttaacgaaagaaattgagtttattcttc

SEQ ID NO: 24435 - protein, 304 aa, Arabidopsis thaliana
  peptide (1)..(304): Ceres Seq. ID no. 12322003
LEMASSSSPPAAMEVGESTNWTELPPELTSAILHRLGAIEILENAQKVCRSWRRVCKDPSMWRKIDMHNLGDLDDMDYNLEIMCRHAVDRSQGGLVDIGIWYFGTVDLLNYIAHRSSNLRSLRLIRCSQITDDGFVEAVVKLPLEELELSYCSFSVESLRVVGQCCLNMKTLKLNKHPQKENDDDALAIAETIPKLRHLQLCGNGLSDTGLNAILDNCSNLEHLDLRRCFNVNLVGDLQKRCFESVKVVRHPNDSIHDIDIGSSEDEDPYDFSDIDLMSGDDDFEGYYDFSGASDFSDYDQFDF

SEQ ID NO: 24436 - protein, 302 aa, Arabidopsis thaliana
  peptide (1)..(302): Ceres Seq. ID no. 12322004
MASSSSPPAAMEVGESTNWTELPPELTSAILHRLGAIEILENAQKVCRSWRRVCKDPSMWRKIDMHNLGDLDDMDYNLEIMCRHAVDRSQGGLVDIGIWYFGTVDLLNYIAHRSSNLRSLRLIRCSQITDDGFVEAVVKLPLEELELSYCSFSVESLRVVGQCCLNMKTLKLNKHPQKENDDDALAIAETIPKLRHLQLCGNGLSDTGLNAILDNCSNLEHLDLRRCFNVNLVGDLQKRCFESVKVVRHPNDSIHDIDIGSSEDEDPYDFSDIDLMSGDDDFEGYYDFSGASDFSDYDQFDF

SEQ ID NO: 24437 - protein, 292 aa, Arabidopsis thaliana
  peptide (1)..(292): Ceres Seq. ID no. 12322005
MEVGESTNWTELPPELTSAILHRLGAIEILENAQKVCRSWRRVCKDPSMWRKIDMHNLGDLDDMDYNLEIMCRHAVDRSQGGLVDIGIWYFGTVDLLNYIAHRSSNLRSLRLIRCSQITDDGFVEAVVKLPLEELELSYCSFSVESLRVVGQCCLNMKTLKLNKHPQKENDDDALAIAETIPKLRHLQLCGNGLSDTGLNAILDNCSNLEHLDLRRCFNVNLVGDLQKRCFESVKVVRHPNDSIHDIDIGSSEDEDPYDFSDIDLMSGDDDFEGYYDFSGASDFSDYDQFDF

SEQ ID NO: 24438 - DNA, 1262 bp, Arabidopsis thaliana
  misc_feature (1)..(1262): Ceres Seq. ID no. 12321476
  misc_feature (1)..(1262): Ortholog of  Ceres SEQ ID NO 14308679 as cited in SEQ ID NO 58616
  misc_feature (1)..(1262): Ortholog of  Ceres SEQ ID NO 13596492 as cited in SEQ ID NO 68623
attttctatctttgttctcttctcctaatttcaaaagagccgttagagagagacagatcgagaaagaaccagagagagaaacctgagaaaatcgaagatggctacgaacattgggatgatggattctgcatatttcgtcgggagatcggagattctggcttggattaactctactctccaactcaatctctccaaagtcgaagaggcttgttcaggcgctgttcattgtcagctgatggattcggtgcatcctgggactgttccgatgcacaaggttaactttgatgcgaagagtgaatatgagatgattcagaactataaggttcttcaggatgtgtttaataaactcaagatcactaagcacatcgaagtgagcaaactcgttaagggaaggccattggataacttggagtttatgcagtggatgaaaaagtactgtgattctgttaatggaggccagcataattaccatgcacttgagagaagggaagccagcaaaggaggtaaagaagcaacgaagagagctgcagctacacaacaatcaggcaagagttcgtcttcttcagctccacctcgaccttcatcttcaaatggaacccgtaagcatgagccacaatccaacaacaccggtactcaccattcttcaactgggaatcaccaccactcttcaaaaccatcagctaaacaatctaaaccagtgcctgcttatgatgaaaagatcacagaactgaaactttacattgacagcttagagaaagagagagatttctatttctctaaactcagagatgtagagattctctgtcaaaacccagacacagagcacttacctcttgttggttccataaaaagaatcctatacgcagcagatggagaagacgttggagcagcagagacacagactttgagtcccattgctgaaggatcagaagagagaaggaacagtgtaacagagtcgcagaagaggaagctcatagtgaatctcgacgtagatgttgcagcgattacaacactctctccaagacaacgcctttctgatgcttctgatgtcaaatgcagtggttcatctcctctcttgacctgctgaaatcagagttagctatataatactctcttatgaaaacattctctctcagagaatctgttctatgtttgaaaaaaattccctatccctccttataaacatactctactagtactctgttgaaaatatcattgttgtgatgttttgtggtccttatggtataatatgttttgcccct

SEQ ID NO: 24439 - protein, 329 aa, Arabidopsis thaliana
  peptide (1)..(329): Ceres Seq. ID no. 12321477
MATNIGMMDSAYFVGRSEILAWINSTLQLNLSKVEEACSGAVHCQLMDSVHPGTVPMHKVNFDAKSEYEMIQNYKVLQDVFNKLKITKHIEVSKLVKGRPLDNLEFMQWMKKYCDSVNGGQHNYHALERREASKGGKEATKRAAATQQSGKSSSSSAPPRPSSSNGTRKHEPQSNNTGTHHSSTGNHHHSSKPSAKQSKPVPAYDEKITELKLYIDSLEKERDFYFSKLRDVEILCQNPDTEHLPLVGSIKRILYAADGEDVGAAETQTLSPIAEGSEERRNSVTESQKRKLIVNLDVDVAAITTLSPRQRLSDASDVKCSGSSPLLTC

SEQ ID NO: 24440 - protein, 323 aa, Arabidopsis thaliana
  peptide (1)..(323): Ceres Seq. ID no. 12321478
MMDSAYFVGRSEILAWINSTLQLNLSKVEEACSGAVHCQLMDSVHPGTVPMHKVNFDAKSEYEMIQNYKVLQDVFNKLKITKHIEVSKLVKGRPLDNLEFMQWMKKYCDSVNGGQHNYHALERREASKGGKEATKRAAATQQSGKSSSSSAPPRPSSSNGTRKHEPQSNNTGTHHSSTGNHHHSSKPSAKQSKPVPAYDEKITELKLYIDSLEKERDFYFSKLRDVEILCQNPDTEHLPLVGSIKRILYAADGEDVGAAETQTLSPIAEGSEERRNSVTESQKRKLIVNLDVDVAAITTLSPRQRLSDASDVKCSGSSPLLTC

SEQ ID NO: 24441 - protein, 322 aa, Arabidopsis thaliana
  peptide (1)..(322): Ceres Seq. ID no. 12321479
MDSAYFVGRSEILAWINSTLQLNLSKVEEACSGAVHCQLMDSVHPGTVPMHKVNFDAKSEYEMIQNYKVLQDVFNKLKITKHIEVSKLVKGRPLDNLEFMQWMKKYCDSVNGGQHNYHALERREASKGGKEATKRAAATQQSGKSSSSSAPPRPSSSNGTRKHEPQSNNTGTHHSSTGNHHHSSKPSAKQSKPVPAYDEKITELKLYIDSLEKERDFYFSKLRDVEILCQNPDTEHLPLVGSIKRILYAADGEDVGAAETQTLSPIAEGSEERRNSVTESQKRKLIVNLDVDVAAITTLSPRQRLSDASDVKCSGSSPLLTC

SEQ ID NO: 24442 - DNA, 1146 bp, Arabidopsis thaliana
  misc_feature (1)..(1146): Ceres Seq. ID no. 12321805
  misc_feature (1)..(1146): Ortholog of  Ceres SEQ ID NO 14312176 as cited in SEQ ID NO 59203
  misc_feature (1)..(1146): Ortholog of  Ceres SEQ ID NO 14302780 as cited in SEQ ID NO 65368
gcttcatttttttctccgaccaaacaagttccgggtgttttgaaagaaccccgacaatggcgtggaacgtgttcaagttctgcacagcacttcgcgccttgggttcgatcatgatcttaattgttatcgggatcatcggattcacatactacgccgttgtcgtcgttaattacggacctgctctactgatcggtggtgtcgattcattactatctgttctcgtcttagcgttcttccactttctgcttataatgctactgtggagttatttctctgttgttgtgacggaccctggtggtgttccaacgggttggaggccagaattagacatagagaaaagcgagggaaaccaagctttgattggagaagcttcggttggagattcctcgtctcatggtgtaagatattgtagaaagtgcaatcaatataaaccgcctcgttctcaccattgttcagtctgtggaagatgcatactaaagatggaccatcactgtgtttgggtggtgaattgtgttggtgcaaataactacaaatcatttctcctattcttgttttacacatttcttgagacaacggtagttgcagtatcactattgccaattttcctcgtattcttcagcgatggagatggtgatataaccgtatcaccaggaagcctagcagccagctttgttgcatttgtattgaacatagcatttgccctaagtgtcctaggcttcctaataatgcacataatgttggtcgctcgtaacaccacaactattgaggcgtatgagaagcatacagtgaactggccatacaacgttggtcgtaagacaaactttgaacaggtttttggaagtgataaaatgtattggttcgtgccattgtacacggaagacgataagaagaagttgccagcacttggagggttagactttacgagcaggtcggagtccgagacagagccgcttcagtctctatgaccttacaaacttgaaatttttggaagtgtgtcttctgctttgtgtatgtatcaatcaaatattatatcaaacattgtcttgtgtattataaagattagtgcctattgtggaatttgtatctttttatttcgtgaaaagaaatttctcaaacttcttaaatataccattttcacatttgctc

SEQ ID NO: 24443 - protein, 320 aa, Arabidopsis thaliana
  peptide (1)..(320): Ceres Seq. ID no. 12321806
FIFFSDQTSSGCFERTPTMAWNVFKFCTALRALGSIMILIVIGIIGFTYYAVVVVNYGPALLIGGVDSLLSVLVLAFFHFLLIMLLWSYFSVVVTDPGGVPTGWRPELDIEKSEGNQALIGEASVGDSSSHGVRYCRKCNQYKPPRSHHCSVCGRCILKMDHHCVWVVNCVGANNYKSFLLFLFYTFLETTVVAVSLLPIFLVFFSDGDGDITVSPGSLAASFVAFVLNIAFALSVLGFLIMHIMLVARNTTTIEAYEKHTVNWPYNVGRKTNFEQVFGSDKMYWFVPLYTEDDKKKLPALGGLDFTSRSESETEPLQSL

SEQ ID NO: 24444 - protein, 302 aa, Arabidopsis thaliana
  peptide (1)..(302): Ceres Seq. ID no. 12321807
MAWNVFKFCTALRALGSIMILIVIGIIGFTYYAVVVVNYGPALLIGGVDSLLSVLVLAFFHFLLIMLLWSYFSVVVTDPGGVPTGWRPELDIEKSEGNQALIGEASVGDSSSHGVRYCRKCNQYKPPRSHHCSVCGRCILKMDHHCVWVVNCVGANNYKSFLLFLFYTFLETTVVAVSLLPIFLVFFSDGDGDITVSPGSLAASFVAFVLNIAFALSVLGFLIMHIMLVARNTTTIEAYEKHTVNWPYNVGRKTNFEQVFGSDKMYWFVPLYTEDDKKKLPALGGLDFTSRSESETEPLQSL

SEQ ID NO: 24445 - protein, 284 aa, Arabidopsis thaliana
  peptide (1)..(284): Ceres Seq. ID no. 12321808
MILIVIGIIGFTYYAVVVVNYGPALLIGGVDSLLSVLVLAFFHFLLIMLLWSYFSVVVTDPGGVPTGWRPELDIEKSEGNQALIGEASVGDSSSHGVRYCRKCNQYKPPRSHHCSVCGRCILKMDHHCVWVVNCVGANNYKSFLLFLFYTFLETTVVAVSLLPIFLVFFSDGDGDITVSPGSLAASFVAFVLNIAFALSVLGFLIMHIMLVARNTTTIEAYEKHTVNWPYNVGRKTNFEQVFGSDKMYWFVPLYTEDDKKKLPALGGLDFTSRSESETEPLQSL

SEQ ID NO: 24446 - DNA, 1188 bp, Arabidopsis thaliana
  misc_feature (1)..(1188): Ceres Seq. ID no. 12325059
  misc_feature (1)..(1188): Ortholog of  Ceres SEQ ID NO 12612470 as cited in SEQ ID NO 55136
  misc_feature (1)..(1188): Ortholog of  Ceres SEQ ID NO 12612425 as cited in SEQ ID NO 56789
  misc_feature (1)..(1188): Ortholog of  Ceres SEQ ID NO 13503512 as cited in SEQ ID NO 65121
acccgacccggatctattagacactcgttcttcgtcgttatcaattcggagatgattccgcttcctctgttaccaacgccgattgaaaccaactacagagcttgcaccattccttatagattcccttccgataatctcaagaaagccactcctactgaaatctcctggatcaacgtcttcgccaattccattccttctttcaagaaacgtgcagagagcgataccagtgttccagatgctcctgctagagctaaaatttttgaacaaagatatgcgggatttcttgaaggctggaagaaagatccagagagtaatggtgggccaccagatggtgttattctcggccgagttcgtgagcatttactcagagagttaggatttagggacatattcaagaaagtcaaggatgaggagaatgcaaaggctatatcactatttcctgaagttgtcagtctgagtgatgctattgaagatgacggagaacggttagagaatttggtgagagggatatttgctggaaacatctttgatcttggttctgcacagcttgctgaggttttctcaagggatggcatatctttcttggctacctctcaaaacttggttccacgaccatgggtcatcgatgacttgaacaagttccaagccaaatgggtcaagaagccttggaagaaggcagtgatttttgttgataattctggtgcagacataattttgggtattttgcctttcgcaagagagttgctccgtcgaggaattcaggtggtgctagctgctaacgagctgccagctatcaacgatgtaacataactgagcttacagatatcgtgtcgcagttaaaggatggaaatggccaattgataggcgttgatacttcaaagcttctgattgcaaattcagggaacgatttagcggttattgatctctcaagagtatcgcacgagcttgcttacctttcatctgatgcagacttagtcatcctagaaggcatgggtcgcgggatcgagacaaacctttatgctcagttcaagtgtgattctctcaagatcggaatggtgaagcacgttgaagtagcacagtttctcggaggacgactttacgactgtgtctttaaattcaatgaagttcagagttaattacatttcaatgatattgtactgaatcatccattcgatatatcattttatc

SEQ ID NO: 24447 - protein, 269 aa, Arabidopsis thaliana
  peptide (1)..(269): Ceres Seq. ID no. 12325060
TRPGSIRHSFFVVINSEMIPLPLLPTPIETNYRACTIPYRFPSDNLKKATPTEISWINVFANSIPSFKKRAESDTSVPDAPARAKIFEQRYAGFLEGWKKDPESNGGPPDGVILGRVREHLLRELGFRDIFKKVKDEENAKAISLFPEVVSLSDAIEDDGERLENLVRGIFAGNIFDLGSAQLAEVFSRDGISFLATSQNLVPRPWVIDDLNKFQAKWVKKPWKKAVIFVDNSGADIILGILPFARELLRRGIQVVLAANELPAINDVT

SEQ ID NO: 24448 - protein, 252 aa, Arabidopsis thaliana
  peptide (1)..(252): Ceres Seq. ID no. 12325061
MIPLPLLPTPIETNYRACTIPYRFPSDNLKKATPTEISWINVFANSIPSFKKRAESDTSVPDAPARAKIFEQRYAGFLEGWKKDPESNGGPPDGVILGRVREHLLRELGFRDIFKKVKDEENAKAISLFPEVVSLSDAIEDDGERLENLVRGIFAGNIFDLGSAQLAEVFSRDGISFLATSQNLVPRPWVIDDLNKFQAKWVKKPWKKAVIFVDNSGADIILGILPFARELLRRGIQVVLAANELPAINDVT

SEQ ID NO: 24449 - DNA, 1473 bp, Arabidopsis thaliana
  misc_feature (1)..(1473): Ceres Seq. ID no. 12371852
  misc_feature (1)..(1473): Ortholog of  Ceres SEQ ID NO 15177384 as cited in SEQ ID NO 51085
  misc_feature (1)..(1473): Ortholog of  Ceres SEQ ID NO 14308787 as cited in SEQ ID NO 55614
  misc_feature (1)..(1473): Ortholog of  Ceres SEQ ID NO 13656547 as cited in SEQ ID NO 65935
aaatacacctaacttgtttagtacacaacagcaacatcaaactctaataaacccaagttggtgtatactataatggtgatggctggtgcttcttctttggatgagatcagacaggctcagagagctgatggacctgcaggcatcttggctattggcactgctaaccctgagaaccatgtgcttcaggcggagtatcctgactactacttccgcatcaccaacagtgaacacatgaccgacctcaaggagaagttcaagcgcatgtgcgacaagtcgacaattcggaaacgtcacatgcatctgacggaggaattcctcaaggaaaacccacacatgtgtgcttacatggctccttctctggacaccagacaggacatcgtggtggtcgaagtccctaagctaggcaaagaagcggcagtgaaggccatcaaggagtggggccagcccaagtcaaagatcactcatgtcgtcttctgcactacctccggcgtcgacatgcctggtgctgactaccagctcaccaagcttcttggtctccgtccttccgtcaagcgtctcatgatgtaccagcaaggttgcttcgccggcggtactgtcctccgtatcgctaaggatctcgccgagaacaatcgtggagcacgtgtcctcgttgtctgctctgagatcacagccgttaccttccgtggtccctctgacacccaccttgactccctcgtcggtcaggctcttttcagtgatggcgccgccgcactcattgtggggtcggaccctgacacatctgtcggagagaaacccatctttgagatggtgtctgccgctcagaccatccttccagactctgatggtgccatagacggacatttgagggaagttggtctcaccttccatctcctcaaggatgttcccggcctcatctccaagaacattgtgaagagtctagacgaagcgtttaaacctttggggataagtgactggaactccctcttctggatagcccaccctggaggtccagcgatcctagaccaggtggagataaagctaggactaaaggaagagaagatgagggcgacacgtcacgtgttgagcgagtatggaaacatgtcgagcgcgtgcgttctcttcatactagacgagatgaggaggaagtcagctaaggatggtgtggccacgacaggagaagggttggagtggggtgtcttgtttggtttcggaccaggtctcactgttgagacagtcgtcttgcacagcgttcctctctaaacagaacgcttgccttctatctgcctacctacctacgcaaaactttaatcctgtcttatgttttatataatataatcattatatgtttacgcaataattaaggaagaattcatttgatgtgatatgtgatatgtgctggacaggtctattcgactgtttttgtactctcttttttgtgtctttttacaatattaaatctatgggtcttgaatc

SEQ ID NO: 24450 - protein, 395 aa, Arabidopsis thaliana
  peptide (1)..(395): Ceres Seq. ID no. 12371853
MVMAGASSLDEIRQAQRADGPAGILAIGTANPENHVLQAEYPDYYFRITNSEHMTDLKEKFKRMCDKSTIRKRHMHLTEEFLKENPHMCAYMAPSLDTRQDIVVVEVPKLGKEAAVKAIKEWGQPKSKITHVVFCTTSGVDMPGADYQLTKLLGLRPSVKRLMMYQQGCFAGGTVLRIAKDLAENNRGARVLVVCSEITAVTFRGPSDTHLDSLVGQALFSDGAAALIVGSDPDTSVGEKPIFEMVSAAQTILPDSDGAIDGHLREVGLTFHLLKDVPGLISKNIVKSLDEAFKPLGISDWNSLFWIAHPGGPAILDQVEIKLGLKEEKMRATRHVLSEYGNMSSACVLFILDEMRRKSAKDGVATTGEGLEWGVLFGFGPGLTVETVVLHSVPL

SEQ ID NO: 24451 - protein, 393 aa, Arabidopsis thaliana
  peptide (1)..(393): Ceres Seq. ID no. 12371854
MAGASSLDEIRQAQRADGPAGILAIGTANPENHVLQAEYPDYYFRITNSEHMTDLKEKFKRMCDKSTIRKRHMHLTEEFLKENPHMCAYMAPSLDTRQDIVVVEVPKLGKEAAVKAIKEWGQPKSKITHVVFCTTSGVDMPGADYQLTKLLGLRPSVKRLMMYQQGCFAGGTVLRIAKDLAENNRGARVLVVCSEITAVTFRGPSDTHLDSLVGQALFSDGAAALIVGSDPDTSVGEKPIFEMVSAAQTILPDSDGAIDGHLREVGLTFHLLKDVPGLISKNIVKSLDEAFKPLGISDWNSLFWIAHPGGPAILDQVEIKLGLKEEKMRATRHVLSEYGNMSSACVLFILDEMRRKSAKDGVATTGEGLEWGVLFGFGPGLTVETVVLHSVPL

SEQ ID NO: 24452 - protein, 342 aa, Arabidopsis thaliana
  peptide (1)..(342): Ceres Seq. ID no. 12371855
MTDLKEKFKRMCDKSTIRKRHMHLTEEFLKENPHMCAYMAPSLDTRQDIVVVEVPKLGKEAAVKAIKEWGQPKSKITHVVFCTTSGVDMPGADYQLTKLLGLRPSVKRLMMYQQGCFAGGTVLRIAKDLAENNRGARVLVVCSEITAVTFRGPSDTHLDSLVGQALFSDGAAALIVGSDPDTSVGEKPIFEMVSAAQTILPDSDGAIDGHLREVGLTFHLLKDVPGLISKNIVKSLDEAFKPLGISDWNSLFWIAHPGGPAILDQVEIKLGLKEEKMRATRHVLSEYGNMSSACVLFILDEMRRKSAKDGVATTGEGLEWGVLFGFGPGLTVETVVLHSVPL

SEQ ID NO: 24453 - DNA, 1507 bp, Arabidopsis thaliana
  misc_feature (1)..(1507): Ceres Seq. ID no. 12348339
  misc_feature (1)..(1507): Ortholog of  Ceres SEQ ID NO 13597532 as cited in SEQ ID NO 64873
acagagagatagattgggaattgaatttgggaatccaggtttagggatgaatcgatcaacgatgatgattatgaggattgaagagtcggcgattgttttgtctctgctcaaatcggatctccggccgatggaagacgttttatcggaattcgactctaagttcgaaagcgctcgttacctcagtgtctgcaattctctttccatgatgttgcaggatcagcagatgtttaagaatactgaacgtctaattgcatttggtatcatataccagtgttattcttcacagaagccatctttcaacccgtttttatctgaaatgataagtgctgcttgtaatgaacagctggaaaagtctgaaagggcatttcttctccacctgttacaatggaatagttacaacaacgtgaaagagattctcaaactctcagctgttgattatatcagatcgtttgatccttcaactcatgattttccggaactaggagagctgcaacgagagtatggcgacaaagccgatcctggaccatctagtcacatttttgcagactattccctgaaaaagctattgcatgatcctgatgttcctcgtgggtgtgatcctaactctccagagtttgatgtgcaagctggagtgaatcccagaattggatctggtgatagggatgaggcactatctggattcttaggaaatttgacaatggggggattaggtcctaggtggatccgtccatgtccaccaaggtgcccagttcatcagagcgagttgctttggattgaccctgataacaagcatgagcttgtttgggacgataaaatgtgtgctgatactagcagtggtgcaacagttagagacttgcttgttaagggtttaaaggtgacactttcacctacggagcaagaggacatcgttacagaattggcaaatgacccaaagcttgtctttcactgcggaataactccacgggagctgccgcaattagtagagcacaatcctcagatagcagttgaaattctcaccaagttgaataactccacagagattaatgactattatgaagctctaggaaatatggacatgagcctgcactcaatggaagttgtgaataggctcacaactgcagttgaacttcccaaggacttcatacggatgtacatcactaattgcatatcgtcttgtgagaacgctaagcaagacaaatacatgcagaataggcttgtacggcttgtttgcgtcttcttgcaaagcttaattcgtaacaagatcatcaacgtgaaggatctattcatagaagttcaagctttctgcattgagttttctcgggttcgagaagcagctggtctcttcaggcttttgaaacaattggatgaataatttactctttcttcttcttcttcttcttctaatcatcttcgtctccattttattgtattccctatttttgtagctaaagaaagtactttattttgaatccaagacagttttcgctttttctagagtttcattctc

SEQ ID NO: 24454 - protein, 456 aa, Arabidopsis thaliana
  peptide (1)..(456): Ceres Seq. ID no. 12348340
QRDRLGIEFGNPGLGMNRSTMMIMRIEESAIVLSLLKSDLRPMEDVLSEFDSKFESARYLSVCNSLSMMLQDQQMFKNTERLIAFGIIYQCYSSQKPSFNPFLSEMISAACNEQLEKSERAFLLHLLQWNSYNNVKEILKLSAVDYIRSFDPSTHDFPELGELQREYGDKADPGPSSHIFADYSLKKLLHDPDVPRGCDPNSPEFDVQAGVNPRIGSGDRDEALSGFLGNLTMGGLGPRWIRPCPPRCPVHQSELLWIDPDNKHELVWDDKMCADTSSGATVRDLLVKGLKVTLSPTEQEDIVTELANDPKLVFHCGITPRELPQLVEHNPQIAVEILTKLNNSTEINDYYEALGNMDMSLHSMEVVNRLTTAVELPKDFIRMYITNCISSCENAKQDKYMQNRLVRLVCVFLQSLIRNKIINVKDLFIEVQAFCIEFSRVREAAGLFRLLKQLDE

SEQ ID NO: 24455 - protein, 441 aa, Arabidopsis thaliana
  peptide (1)..(441): Ceres Seq. ID no. 12348341
MNRSTMMIMRIEESAIVLSLLKSDLRPMEDVLSEFDSKFESARYLSVCNSLSMMLQDQQMFKNTERLIAFGIIYQCYSSQKPSFNPFLSEMISAACNEQLEKSERAFLLHLLQWNSYNNVKEILKLSAVDYIRSFDPSTHDFPELGELQREYGDKADPGPSSHIFADYSLKKLLHDPDVPRGCDPNSPEFDVQAGVNPRIGSGDRDEALSGFLGNLTMGGLGPRWIRPCPPRCPVHQSELLWIDPDNKHELVWDDKMCADTSSGATVRDLLVKGLKVTLSPTEQEDIVTELANDPKLVFHCGITPRELPQLVEHNPQIAVEILTKLNNSTEINDYYEALGNMDMSLHSMEVVNRLTTAVELPKDFIRMYITNCISSCENAKQDKYMQNRLVRLVCVFLQSLIRNKIINVKDLFIEVQAFCIEFSRVREAAGLFRLLKQLDE

SEQ ID NO: 24456 - protein, 436 aa, Arabidopsis thaliana
  peptide (1)..(436): Ceres Seq. ID no. 12348342
MMIMRIEESAIVLSLLKSDLRPMEDVLSEFDSKFESARYLSVCNSLSMMLQDQQMFKNTERLIAFGIIYQCYSSQKPSFNPFLSEMISAACNEQLEKSERAFLLHLLQWNSYNNVKEILKLSAVDYIRSFDPSTHDFPELGELQREYGDKADPGPSSHIFADYSLKKLLHDPDVPRGCDPNSPEFDVQAGVNPRIGSGDRDEALSGFLGNLTMGGLGPRWIRPCPPRCPVHQSELLWIDPDNKHELVWDDKMCADTSSGATVRDLLVKGLKVTLSPTEQEDIVTELANDPKLVFHCGITPRELPQLVEHNPQIAVEILTKLNNSTEINDYYEALGNMDMSLHSMEVVNRLTTAVELPKDFIRMYITNCISSCENAKQDKYMQNRLVRLVCVFLQSLIRNKIINVKDLFIEVQAFCIEFSRVREAAGLFRLLKQLDE

SEQ ID NO: 24457 - DNA, 1187 bp, Arabidopsis thaliana
  misc_feature (1)..(1187): Ceres Seq. ID no. 13487935
  misc_feature (1)..(1187): Ortholog of  Ceres SEQ ID NO 12636774 as cited in SEQ ID NO 372
  misc_feature (1)..(1187): Ortholog of  Ceres SEQ ID NO 12582113 as cited in SEQ ID NO 58349
  misc_feature (1)..(1187): Ortholog of  Ceres SEQ ID NO 12615466 as cited in SEQ ID NO 62761
  misc_feature (1)..(1187): Ortholog of  Ceres SEQ ID NO 14314080 as cited in SEQ ID NO 63105
  misc_feature (1)..(1187): Ortholog of  Ceres SEQ ID NO 13597295 as cited in SEQ ID NO 63743
  misc_feature (1)..(1187): Ortholog of  Ceres SEQ ID NO 12617090 as cited in SEQ ID NO 64005
  misc_feature (1)..(1187): Ortholog of  Ceres SEQ ID NO 13597439 as cited in SEQ ID NO 64081
  misc_feature (1)..(1187): Ortholog of  Ceres SEQ ID NO 13597233 as cited in SEQ ID NO 64370
  misc_feature (1)..(1187): Ortholog of  Ceres SEQ ID NO 13598327 as cited in SEQ ID NO 68040
  misc_feature (1)..(1187): Ortholog of  Ceres SEQ ID NO 13599438 as cited in SEQ ID NO 0
aaattcaagtagaaacaatggagaagccaaagttcaagactgtccaagaggtggttgcagctggcgaaggactgccggagagatatctccacgcacccaccggagacggcgaagttcaacctcttaacgcagcggtaccggagatggatattccggccatcgatctgaatcttctcctctcttcttctgaagctggtcaacaagagctgagtaaacttcactcggcactctctacatggggcgttgttcaggtgatgaatcatggaattacaaaagcgtttcttgacaagatttacaagctaaccaaggagttctttgcgcttccgaccgaagagaaacagaagtgcgcgagagagattgatagtatccaaggatatggtaacgacatgattctttgggatgatcaagttcttgattggatcgaccgtttgtatattactacttaccctgaagatcaaagacaacttaatttctggcctgaagtcccacttggattcagggaaactttacatgaatacacaatgaagcaacggatagtgattgagcaattttttaaggccatggctagatctttggaattagaagagaatagttttctagacatgtatggagaaagtgctacgttggatactagattcaacatgtatccaccatgtccgagcccggacaaggttattggtgttaaaccgcacgctgatggctcggctatcactcttctcttacccgacaaagatgtcggagggcttcagttccagaaagatgggaagtggtataaagctcctatagtccctgatacaattttgatcaatgttggtgatcaaatggagataatgagcaatgggatatacaagagcccggttcatagagtggtgactaacagagaaaaggaaagaatatctgtggcaactttttgcattccaggtgcagataaagagattcagcctgtgaatgagcttgtgtctgaggcaagaccaagattatataaaacagttaagaagtatgtggagctctacttcaagtactatcaacaaggccgaagacctattgaagctgcattgatctgatcacacttttcaagtctcatttattggtttcacaaatgaatctgtttctttcgttacttgagatcctttataagaataaaactgtttccttgtttgttggaatgtgaggctgcattgtgttgc

SEQ ID NO: 24458 - protein, 353 aa, Arabidopsis thaliana
  peptide (1)..(353): Ceres Seq. ID no. 13487936
IQVETMEKPKFKTVQEVVAAGEGLPERYLHAPTGDGEVQPLNAAVPEMDIPAIDLNLLLSSSEAGQQELSKLHSALSTWGVVQVMNHGITKAFLDKIYKLTKEFFALPTEEKQKCAREIDSIQGYGNDMILWDDQVLDWIDRLYITTYPEDQRQLNFWPEVPLGFRETLHEYTMKQRIVIEQFFKAMARSLELEENSFLDMYGESATLDTRFNMYPPCPSPDKVIGVKPHADGSAITLLLPDKDVGGLQFQKDGKWYKAPIVPDTILINVGDQMEIMSNGIYKSPVHRVVTNREKERISVATFCIPGADKEIQPVNELVSEARPRLYKTVKKYVELYFKYYQQGRRPIEAALI

SEQ ID NO: 24459 - protein, 348 aa, Arabidopsis thaliana
  peptide (1)..(348): Ceres Seq. ID no. 13487937
MEKPKFKTVQEVVAAGEGLPERYLHAPTGDGEVQPLNAAVPEMDIPAIDLNLLLSSSEAGQQELSKLHSALSTWGVVQVMNHGITKAFLDKIYKLTKEFFALPTEEKQKCAREIDSIQGYGNDMILWDDQVLDWIDRLYITTYPEDQRQLNFWPEVPLGFRETLHEYTMKQRIVIEQFFKAMARSLELEENSFLDMYGESATLDTRFNMYPPCPSPDKVIGVKPHADGSAITLLLPDKDVGGLQFQKDGKWYKAPIVPDTILINVGDQMEIMSNGIYKSPVHRVVTNREKERISVATFCIPGADKEIQPVNELVSEARPRLYKTVKKYVELYFKYYQQGRRPIEAALI

SEQ ID NO: 24460 - protein, 306 aa, Arabidopsis thaliana
  peptide (1)..(306): Ceres Seq. ID no. 13487938
MDIPAIDLNLLLSSSEAGQQELSKLHSALSTWGVVQVMNHGITKAFLDKIYKLTKEFFALPTEEKQKCAREIDSIQGYGNDMILWDDQVLDWIDRLYITTYPEDQRQLNFWPEVPLGFRETLHEYTMKQRIVIEQFFKAMARSLELEENSFLDMYGESATLDTRFNMYPPCPSPDKVIGVKPHADGSAITLLLPDKDVGGLQFQKDGKWYKAPIVPDTILINVGDQMEIMSNGIYKSPVHRVVTNREKERISVATFCIPGADKEIQPVNELVSEARPRLYKTVKKYVELYFKYYQQGRRPIEAALI

SEQ ID NO: 24461 - DNA, 1944 bp, Arabidopsis thaliana
  misc_feature (1)..(1944): Ceres Seq. ID no. 12336460
  misc_feature (1)..(1944): Ortholog of  Ceres SEQ ID NO 13660443 as cited in SEQ ID NO 67438
aatatcttcacgcagctgtctagggtttttcgcctctttctcaactctcttctcgaaaacctagcagtcgtctctttctcagttctccatgggaaagtctaaatccgccaccaaagttgcagagattaaggccactaagcctttgaagaaaggcaagagagagcctgaagatgatattgacaccaaagtgagtcttaagaagcagaagaaagacgtgattgctgctgtccagaaggaaaaagctgtgaagaaggttcctaagaaggttgagagctctgatgattcagattctgaatctgaggaagaggagaaggctaagaaagtcccagccaagaaggctgcttcaagcagtgatgagtcatctgatgactcttcttcagatgatgaacctgcacccaagaaggccgttgctgctactaacggaactgttgcaaagaagtctaaggatgactcatcatcatctgatgatgattcttcagacgaggaagttgctgtcaccaagaagcccgcagctgctgctaaaaatggctctgtaaaggccaagaaagagagttcgtctgaagatgattcatcttctgaagacgaacctgcgaagaaacctgctgctaagattgccaagccagctgctaaggattcttcatcctctgatgatgactcagatgaggattccgaggatgagaaacctgctaccaagaaggcagctcctgctgctgccaaggctgcaagcagctcagattcatcagatgaagattctgatgaggaaagtgaagatgagaaacctgcccagaaaaaggctgacactaaggcctctaaaaaatcgagtagtgatgagtcaagcgagtctgaggaagatgagagtgaagacgaggaggaaacccctaagaaaaagagctctgatgtagaaatggttgatgctgagaaatcaagtgctaaacagccaaagacaccatccactcctgctgctggaggatcaaagacactctttgctgccaatctctcttttaacattgaaagagcagatgttgagaatttcttcaaagaagctggtgaagttgttgatgttagattctctaccaacagagacgatggttctttcaggggatttggccatgttgagttcgcatcttctgaagaagcacagaaggcgcttgaattccatggtaggccattgctcggtcgtgagattcgtcttgatattgctcaggagagaggtgagagaggcgagagacccgcattcactccacaaagcggcaacttcagaagtggtggtgatggtggtgatgaaaagaaaattttcgttaagggatttgacgcttcactttctgaggatgatatcaagaacactttgagggaacatttcagttcatgtggagagatcaaaaatgtatctgttccaattgaccgtgacactggtaactccaaaggaattgcttaccttgagttttcagaaggcaaagagaaggcgttggaactaaatggaagtgatatgggaggaggattctatcttgtagtcgatgagcctagaccgagaggagatagcagtggtggtggtggatttggaaggggcaatggtcgtttcggtagtggtggtggcagaggaagagatggaggtcgtggtcgttttggtagtggtggtggcagaggaagagatggaggtcgtggtcgttttggtagtggtggtggcaggggaagtgatcgtggtcgtggaagacctagttttactccccaaggtaagaagactaccttcggtgacgagtagaagcgtctgtagaagaaaagtctcttcttatgttgttaacttatgatacttcgcatccttttattgtttcgtttcttttttgttctagttaagtttctgtcagaaccttaaatttttgtctgaatgttaagttaagctcaattttgagtgctttgggtgttcaatcattgttatcttcgtctatc

SEQ ID NO: 24462 - protein, 556 aa, Arabidopsis thaliana
  peptide (1)..(556): Ceres Seq. ID no. 12336461
MGKSKSATKVAEIKATKPLKKGKREPEDDIDTKVSLKKQKKDVIAAVQKEKAVKKVPKKVESSDDSDSESEEEEKAKKVPAKKAASSSDESSDDSSSDDEPAPKKAVAATNGTVAKKSKDDSSSSDDDSSDEEVAVTKKPAAAAKNGSVKAKKESSSEDDSSSEDEPAKKPAAKIAKPAAKDSSSSDDDSDEDSEDEKPATKKAAPAAAKAASSSDSSDEDSDEESEDEKPAQKKADTKASKKSSSDESSESEEDESEDEEETPKKKSSDVEMVDAEKSSAKQPKTPSTPAAGGSKTLFAANLSFNIERADVENFFKEAGEVVDVRFSTNRDDGSFRGFGHVEFASSEEAQKALEFHGRPLLGREIRLDIAQERGERGERPAFTPQSGNFRSGGDGGDEKKIFVKGFDASLSEDDIKNTLREHFSSCGEIKNVSVPIDRDTGNSKGIAYLEFSEGKEKALELNGSDMGGGFYLVVDEPRPRGDSSGGGGFGRGNGRFGSGGGRGRDGGRGRFGSGGGRGRDGGRGRFGSGGGRGSDRGRGRPSFTPQGKKTTFGDE

SEQ ID NO: 24463 - protein, 284 aa, Arabidopsis thaliana
  peptide (1)..(284): Ceres Seq. ID no. 12336462
MVDAEKSSAKQPKTPSTPAAGGSKTLFAANLSFNIERADVENFFKEAGEVVDVRFSTNRDDGSFRGFGHVEFASSEEAQKALEFHGRPLLGREIRLDIAQERGERGERPAFTPQSGNFRSGGDGGDEKKIFVKGFDASLSEDDIKNTLREHFSSCGEIKNVSVPIDRDTGNSKGIAYLEFSEGKEKALELNGSDMGGGFYLVVDEPRPRGDSSGGGGFGRGNGRFGSGGGRGRDGGRGRFGSGGGRGRDGGRGRFGSGGGRGSDRGRGRPSFTPQGKKTTFGDE

SEQ ID NO: 24464 - DNA, 1549 bp, Arabidopsis thaliana
  misc_feature (1)..(1549): Ceres Seq. ID no. 13487151
  misc_feature (1)..(1549): Ortholog of  Ceres SEQ ID NO 15179482 as cited in SEQ ID NO 0
agttgtcgtcgtcatcttcaatttggacttccaacgccgacaccgtttaactccgatggttcccccgccgtctaatccgcagcaggttcagcagttcctctcctctgccctctcccagcgcggcccatcttcagtcccctacgaagagtccaacaagtggttgatccggcaacatctacttaacctaatctcttcttacccttccttagagcccaaaacggcatcgtttatgcacaacgatggtcgctccgtcaacctccttcaagcagatggtacgattccgatgccttttcatggagtcacctataacatacctgtgattatctggctcctcgagtcatatcctcgtcatcctccttgcgtctatgtgaatcccaccgctgatatgatcatcaagcgacctcacgcacatgtcactccttctggtctcgtttctcttccgtaccttcagaattgggtctaccctagctccaatctcgtagatctcgtctccgatctcagcgctgcttttgctcgtgatccgcctctttattctcgacgccgtcctcagccaccgccaccgtctcctcctacggtatacgattcgtctctgtcacgacctccttcggctgatcagtcattgcctagaccgttcccgccatcaccttacggcggaggagtaagtagggtgcaagtgcagcatgttcaccaccagcagcaatctgatgatgcggcggaggttttcaagagaaatgcgattaataagatggtggagatggttcatagcgatttggtttcgatgaggagagccagagaagctgaagcagaggagctgctgagcttgcaagctgggctgaagagaagagaggatgagcttaatatagggttgaaagagatggttgaggagaaagaaacacttgaacaacaattacagattatctccatgaacactgatattctagactcgtgggttagagagaaccaaggcaaaaccaagaatttagttgatttggatgtggataatgcttttgaatgtggtgacacactctctaagcagatgttagagtgtactgctttggatttagccattgaagatgctatttattccttggataagtcgtttcaagatggtgttgttccctttgatcagtatttgaggaatgtgaggttgttgtcgagagaacagttcttccaccgagccacgggttctaaagtcagggcggcacaaatggaggttcaggttgcagccatcgcaggtaggttacattcatgaatgaaattcagtgtttttgtttgcgggatactgtgtcacacaatgctggtttatatagtctgagattagcatctttgaggagtatttctgtggctatgcgtgtgatgatggttcctctttaagattgaattaaatgtctatagactatatatacacgtacactgttgtgcacatacatatttgaatggatcagggcctgagaatcgtctccttttgtgatctatgactacttttttacatgttggggatctttgtgataaacagtattattatctaatgaatcaatcaattggtttg

SEQ ID NO: 24465 - protein, 416 aa, Arabidopsis thaliana
  peptide (1)..(416): Ceres Seq. ID no. 13487152
VVVVIFNLDFQRRHRLTPMVPPPSNPQQVQQFLSSALSQRGPSSVPYEESNKWLIRQHLLNLISSYPSLEPKTASFMHNDGRSVNLLQADGTIPMPFHGVTYNIPVIIWLLESYPRHPPCVYVNPTADMIIKRPHAHVTPSGLVSLPYLQNWVYPSSNLVDLVSDLSAAFARDPPLYSRRRPQPPPPSPPTVYDSSLSRPPSADQSLPRPFPPSPYGGGVSRVQVQHVHHQQQSDDAAEVFKRNAINKMVEMVHSDLVSMRRAREAEAEELLSLQAGLKRREDELNIGLKEMVEEKETLEQQLQIISMNTDILDSWVRENQGKTKNLVDLDVDNAFECGDTLSKQMLECTALDLAIEDAIYSLDKSFQDGVVPFDQYLRNVRLLSREQFFHRATGSKVRAAQMEVQVAAIAGRLHS

SEQ ID NO: 24466 - protein, 398 aa, Arabidopsis thaliana
  peptide (1)..(398): Ceres Seq. ID no. 13487153
MVPPPSNPQQVQQFLSSALSQRGPSSVPYEESNKWLIRQHLLNLISSYPSLEPKTASFMHNDGRSVNLLQADGTIPMPFHGVTYNIPVIIWLLESYPRHPPCVYVNPTADMIIKRPHAHVTPSGLVSLPYLQNWVYPSSNLVDLVSDLSAAFARDPPLYSRRRPQPPPPSPPTVYDSSLSRPPSADQSLPRPFPPSPYGGGVSRVQVQHVHHQQQSDDAAEVFKRNAINKMVEMVHSDLVSMRRAREAEAEELLSLQAGLKRREDELNIGLKEMVEEKETLEQQLQIISMNTDILDSWVRENQGKTKNLVDLDVDNAFECGDTLSKQMLECTALDLAIEDAIYSLDKSFQDGVVPFDQYLRNVRLLSREQFFHRATGSKVRAAQMEVQVAAIAGRLHS

SEQ ID NO: 24467 - protein, 340 aa, Arabidopsis thaliana
  peptide (1)..(340): Ceres Seq. ID no. 13487154
MHNDGRSVNLLQADGTIPMPFHGVTYNIPVIIWLLESYPRHPPCVYVNPTADMIIKRPHAHVTPSGLVSLPYLQNWVYPSSNLVDLVSDLSAAFARDPPLYSRRRPQPPPPSPPTVYDSSLSRPPSADQSLPRPFPPSPYGGGVSRVQVQHVHHQQQSDDAAEVFKRNAINKMVEMVHSDLVSMRRAREAEAEELLSLQAGLKRREDELNIGLKEMVEEKETLEQQLQIISMNTDILDSWVRENQGKTKNLVDLDVDNAFECGDTLSKQMLECTALDLAIEDAIYSLDKSFQDGVVPFDQYLRNVRLLSREQFFHRATGSKVRAAQMEVQVAAIAGRLHS

SEQ ID NO: 24468 - DNA, 1458 bp, Arabidopsis thaliana
  misc_feature (1)..(1458): Ceres Seq. ID no. 13487845
  misc_feature (1)..(1458): Ortholog of  Ceres SEQ ID NO 13598741 as cited in SEQ ID NO 62749
  misc_feature (1)..(1458): Ortholog of  Ceres SEQ ID NO 12587535 as cited in SEQ ID NO 64020
  misc_feature (1)..(1458): Ortholog of  Ceres SEQ ID NO 12586366 as cited in SEQ ID NO 68983
aaagtattattccgaatgtaaatagtggaacaaaaagaacagctgggaggattttgtttaaaaggacactacacttcccagctttccctcactgcccgaaaagaacactgcagaaacactttcctctgttcacagagaaagagagagatgatgctttacagcaacaatagttggagatcgaattccattttaatacttctacttggtctctccattgtggccgccgcagactccgccggcaaaacttcaccggtcgaagacggcttggtggttaacggcgactttgagacaccgccgtcaaacggcttccctgatgacgcaatcatcgaggacacctccgagatcccgagctggcgatccgatggtacggtggagctaatcaagtccggtcaaaaacaaggcgggatgatcttgatcgtgcctgagggccgtcacgctgttagattaggaaacgatgcagagatcagccaagaacttacggtggagaaaggctctatctactccgtcacgttcagtgcagcccgcacatgtgcacaactcgagtcgctgaatgtttcggtagcttcttctgatgaacctatcgcatcgcaaaccattgacttgcaaacggtgtacagcgttcaaggatgggatccatatgcatgggcgtttgaagcggttgtggatcgcgtccggttggtttttaagaaccctggcatggaggatgatcctacttgtggacctatcattgacgacattgccgttaagaagctctttactcctgataaacccaaaggcaatgcagtgattaatggagattttgaagaaggtccatggatgtttaggaacactaccttaggtgttctgcttccaacaaacctcgatgaagaaatatcgtctcttcctggatggaccgtctaatcgaaccgagcagtacggtttattgactcagaccatttctcggtccccgaggggaagcgagctttggaacttttatcgggcaaagaaggcataatttctcaaatggttgagacaaaggcgaacattccgtacaagatgtctttctctttgggacacgcaggggacaagtgtaaggaacctttggctgtaatggcttttgctggagatcaagcacagaactttcattatatggcgcaagcaaactcgagtttcgaaagatcggagttgaacttcactgcgaaagctgaacgtacgaggatcgccttctacagcatttattacaatacgaggacggacgatatgacttcattgtgtggacctgtgattgatgacgttaaggtttggttctccgggtctagtagaattggatttagttttccgctttttattcttctttctttggttttcatctagattgttccggttcagaaattgtattggtagaccgggaattaagacgggattccacgttgtatgatgtatcgttgtatgatggatcggttcaaggtacaagaaatg

SEQ ID NO: 24469 - protein, 250 aa, Arabidopsis thaliana
  peptide (1)..(250): Ceres Seq. ID no. 13487846
MMLYSNNSWRSNSILILLLGLSIVAAADSAGKTSPVEDGLVVNGDFETPPSNGFPDDAIIEDTSEIPSWRSDGTVELIKSGQKQGGMILIVPEGRHAVRLGNDAEISQELTVEKGSIYSVTFSAARTCAQLESLNVSVASSDEPIASQTIDLQTVYSVQGWDPYAWAFEAVVDRVRLVFKNPGMEDDPTCGPIIDDIAVKKLFTPDKPKGNAVINGDFEEGPWMFRNTTLGVLLPTNLDEEISSLPGWTV

SEQ ID NO: 24470 - protein, 249 aa, Arabidopsis thaliana
  peptide (1)..(249): Ceres Seq. ID no. 13487847
MLYSNNSWRSNSILILLLGLSIVAAADSAGKTSPVEDGLVVNGDFETPPSNGFPDDAIIEDTSEIPSWRSDGTVELIKSGQKQGGMILIVPEGRHAVRLGNDAEISQELTVEKGSIYSVTFSAARTCAQLESLNVSVASSDEPIASQTIDLQTVYSVQGWDPYAWAFEAVVDRVRLVFKNPGMEDDPTCGPIIDDIAVKKLFTPDKPKGNAVINGDFEEGPWMFRNTTLGVLLPTNLDEEISSLPGWTV

SEQ ID NO: 24471 - protein, 164 aa, Arabidopsis thaliana
  peptide (1)..(164): Ceres Seq. ID no. 13487848
MILIVPEGRHAVRLGNDAEISQELTVEKGSIYSVTFSAARTCAQLESLNVSVASSDEPIASQTIDLQTVYSVQGWDPYAWAFEAVVDRVRLVFKNPGMEDDPTCGPIIDDIAVKKLFTPDKPKGNAVINGDFEEGPWMFRNTTLGVLLPTNLDEEISSLPGWTV

SEQ ID NO: 24472 - DNA, 1323 bp, Arabidopsis thaliana
  misc_feature (1)..(1323): Ceres Seq. ID no. 12324839
  misc_feature (1)..(1323): Ortholog of  Ceres SEQ ID NO 15171943 as cited in SEQ ID NO 54306
  misc_feature (1)..(1323): Ortholog of  Ceres SEQ ID NO 13655812 as cited in SEQ ID NO 64743
  misc_feature (1)..(1323): Ortholog of  Ceres SEQ ID NO 15178828 as cited in SEQ ID NO 0
aaacaaatttcaagttctttaaacgatttccttttcaagaaaaacccttctccttcttctttttaccacatagatcttcttgatctacaatggattctgtttctctttctgaggttactgtcattagagaaacaacacatttggggtttatgcacagtttcagactcagacagccattttgtggtgtcaaaatatctccaaagttctatttatccaaagttgatggaccaaaggcaatatcttcgagcagcaacacaaagagtcaatttgtttatggaggaggaagcatagctgcaacttcagattcaggttataagatgaatggagtaaacctaaaaagcagaacattgatgagttctgcagttaaagaaagatcattacttgatgcttatgatgatgagtatggtggagtaatagtagatcatggaaaattaccatcaaacccttatgctttcgcttctatgcttcgagcttctctatccgattggagaagaaagggaaagaaaggagtttggttaaagttacctgtggaacaatcagaattagtcccaatagctataaaggaaggttttgagtatcatcatgcagagaaaggatatgtaatgttaacatattggataccaaaggaggaacctagtatgcttcctgcaaatgcttcacatcaagttggtgttggaggttttgtattaaatcaacataaagaggtgcttgtggtacaagaaaagtattgtgctccttcgattactggtctatggaaattaccaacagggtttatcaatgaatctgaagagattttctctggtgctgtaagagaagtcaaggaagaaactggggtagatacagagttctcagaggttatagctttcagacatgctcacaacgttgcatttgagaaatctgatctgttcttcatctgtatgttgagaccactctctgataagataatcatcgatgctcttgagatcaaagccgcaaagtggatgccattggctgaatttgtggagcaaccgatgataagaggggacaaaatgtttaagagagtgattgaaatctgcgaggcaagattaagccatcggtactgcggtctttctcctcatcgacttgtctctacttttgatggcaaaccttcttctctctattacaacgttgttgatgatgatcatgatccttcccactccaattgtagcactgagttttatagatagacgggtaaaacagaaccaaatcaagtggttcgattctgtatatacttattctcatgtaatgtatgttgttatttgatactctctcttcagtatagtaaatagtaatagatcctctgcg

SEQ ID NO: 24473 - protein, 371 aa, Arabidopsis thaliana
  peptide (1)..(371): Ceres Seq. ID no. 12324840
MDSVSLSEVTVIRETTHLGFMHSFRLRQPFCGVKISPKFYLSKVDGPKAISSSSNTKSQFVYGGGSIAATSDSGYKMNGVNLKSRTLMSSAVKERSLLDAYDDEYGGVIVDHGKLPSNPYAFASMLRASLSDWRRKGKKGVWLKLPVEQSELVPIAIKEGFEYHHAEKGYVMLTYWIPKEEPSMLPANASHQVGVGGFVLNQHKEVLVVQEKYCAPSITGLWKLPTGFINESEEIFSGAVREVKEETGVDTEFSEVIAFRHAHNVAFEKSDLFFICMLRPLSDKIIIDALEIKAAKWMPLAEFVEQPMIRGDKMFKRVIEICEARLSHRYCGLSPHRLVSTFDGKPSSLYYNVVDDDHDPSHSNCSTEFYR

SEQ ID NO: 24474 - protein, 351 aa, Arabidopsis thaliana
  peptide (1)..(351): Ceres Seq. ID no. 12324841
MHSFRLRQPFCGVKISPKFYLSKVDGPKAISSSSNTKSQFVYGGGSIAATSDSGYKMNGVNLKSRTLMSSAVKERSLLDAYDDEYGGVIVDHGKLPSNPYAFASMLRASLSDWRRKGKKGVWLKLPVEQSELVPIAIKEGFEYHHAEKGYVMLTYWIPKEEPSMLPANASHQVGVGGFVLNQHKEVLVVQEKYCAPSITGLWKLPTGFINESEEIFSGAVREVKEETGVDTEFSEVIAFRHAHNVAFEKSDLFFICMLRPLSDKIIIDALEIKAAKWMPLAEFVEQPMIRGDKMFKRVIEICEARLSHRYCGLSPHRLVSTFDGKPSSLYYNVVDDDHDPSHSNCSTEFYR

SEQ ID NO: 24475 - protein, 295 aa, Arabidopsis thaliana
  peptide (1)..(295): Ceres Seq. ID no. 12324842
MNGVNLKSRTLMSSAVKERSLLDAYDDEYGGVIVDHGKLPSNPYAFASMLRASLSDWRRKGKKGVWLKLPVEQSELVPIAIKEGFEYHHAEKGYVMLTYWIPKEEPSMLPANASHQVGVGGFVLNQHKEVLVVQEKYCAPSITGLWKLPTGFINESEEIFSGAVREVKEETGVDTEFSEVIAFRHAHNVAFEKSDLFFICMLRPLSDKIIIDALEIKAAKWMPLAEFVEQPMIRGDKMFKRVIEICEARLSHRYCGLSPHRLVSTFDGKPSSLYYNVVDDDHDPSHSNCSTEFYR

SEQ ID NO: 24476 - DNA, 1582 bp, Arabidopsis thaliana
  misc_feature (1)..(1582): Ceres Seq. ID no. 12739242
  misc_feature (1)..(1582): Ortholog of  Ceres SEQ ID NO 15171805 as cited in SEQ ID NO 57433
  misc_feature (1)..(1582): Ortholog of  Ceres SEQ ID NO 13596743 as cited in SEQ ID NO 62731
aggttcatttgctctgcaaatttgtctgaaaaaatctttgtgcgaatcaggaaaaatgtcgtcgacccatcagttagtttcttcgatgatctcttcttcctcatccactttcttagccccttcaaattttaatctcagaactcgaaatgcttgcttacccatggcaaaacgggtcaatacttgcaaatgtgttgctacgccgcaagagaagatcgagtataagaccaaagtgtcacggaattcaaacatgtccaaacttcaggctggatacctattcccggagattgcaagaagaaggtctgcacacttgttgaaatatccagatgcacaagttataagtcttggaataggcgacacaactgagccaattcctgaagtgatcacttctgctatggcaaagaaagctcatgagttgtcaacaatagagggatatagtggttatggtgctgaacaaggtgcaaagccactgagagctgctattgcgaaaacattctacggtggccttggcataggggatgatgacgtttttgtttctgatggagctaaatgtgatatctcacgtctccaggttatgtttggttccaatgttacaattgctgttcaggatccttcatatccggcttatgtggactccagtgttattatgggtcagactgggcaatttaacactgatgtgcaaaagtatggaaacatcgagtacatgagatgcactccagagaatggcttctttcccgacttgtccaccgttggcgggacagatataattttcttctgttccccaaataaccctacgggtgctgctgccacgagagagcaactaacgcagttagttgagtttgcaaagaagaacggttctataatagtgtatgattccgcctatgcaatgtacatgtctgatgataacccacgatccatcttcgaaatccctggagcagaggaggtcgctatggagacagcttcgttcagcaaatatgctggtttcactggagttcgacttggttggactgtcatcccgaaaaagctactctattcagacggtttccctgttgccaaagacttcaatcggattatctgcacttgtttcaatggtgcatctaatatctctcaagctggtgctcttgcttgccttacacccgaaggacttgaggcaatgcataaggtgattggattctataaagaaaacacaaacataatcattgacacattcacatctctcgggtatgatgtatatggaggaaagaatgcgccttacgtatgggttcacttcccgaaccaaagctcatgggatgtgtttgctgagattctggagaagactcatgtggttacaactccaggaagtgggtttggaccagggggtgaagggttcgttcgtgtcagtgcctttggtcacagagagaacatcttagaggcatgtcgaagattcaagcagctttacaaatgaagaaccttgtttgtaatcgttcctcatcatcatcaccctctttaatgacatgatttgagttaaaataatgtcgtttccattgttttctggaatttgtagaagacacttttgacaccagtgtttcaagcaatttggcaaagc

SEQ ID NO: 24477 - protein, 479 aa, Arabidopsis thaliana
  peptide (1)..(479): Ceres Seq. ID no. 12739243
GSFALQICLKKSLCESGKMSSTHQLVSSMISSSSSTFLAPSNFNLRTRNACLPMAKRVNTCKCVATPQEKIEYKTKVSRNSNMSKLQAGYLFPEIARRRSAHLLKYPDAQVISLGIGDTTEPIPEVITSAMAKKAHELSTIEGYSGYGAEQGAKPLRAAIAKTFYGGLGIGDDDVFVSDGAKCDISRLQVMFGSNVTIAVQDPSYPAYVDSSVIMGQTGQFNTDVQKYGNIEYMRCTPENGFFPDLSTVGGTDIIFFCSPNNPTGAAATREQLTQLVEFAKKNGSIIVYDSAYAMYMSDDNPRSIFEIPGAEEVAMETASFSKYAGFTGVRLGWTVIPKKLLYSDGFPVAKDFNRIICTCFNGASNISQAGALACLTPEGLEAMHKVIGFYKENTNIIIDTFTSLGYDVYGGKNAPYVWVHFPNQSSWDVFAEILEKTHVVTTPGSGFGPGGEGFVRVSAFGHRENILEACRRFKQLYK

SEQ ID NO: 24478 - protein, 461 aa, Arabidopsis thaliana
  peptide (1)..(461): Ceres Seq. ID no. 12739244
MSSTHQLVSSMISSSSSTFLAPSNFNLRTRNACLPMAKRVNTCKCVATPQEKIEYKTKVSRNSNMSKLQAGYLFPEIARRRSAHLLKYPDAQVISLGIGDTTEPIPEVITSAMAKKAHELSTIEGYSGYGAEQGAKPLRAAIAKTFYGGLGIGDDDVFVSDGAKCDISRLQVMFGSNVTIAVQDPSYPAYVDSSVIMGQTGQFNTDVQKYGNIEYMRCTPENGFFPDLSTVGGTDIIFFCSPNNPTGAAATREQLTQLVEFAKKNGSIIVYDSAYAMYMSDDNPRSIFEIPGAEEVAMETASFSKYAGFTGVRLGWTVIPKKLLYSDGFPVAKDFNRIICTCFNGASNISQAGALACLTPEGLEAMHKVIGFYKENTNIIIDTFTSLGYDVYGGKNAPYVWVHFPNQSSWDVFAEILEKTHVVTTPGSGFGPGGEGFVRVSAFGHRENILEACRRFKQLYK

SEQ ID NO: 24479 - protein, 451 aa, Arabidopsis thaliana
  peptide (1)..(451): Ceres Seq. ID no. 12739245
MISSSSSTFLAPSNFNLRTRNACLPMAKRVNTCKCVATPQEKIEYKTKVSRNSNMSKLQAGYLFPEIARRRSAHLLKYPDAQVISLGIGDTTEPIPEVITSAMAKKAHELSTIEGYSGYGAEQGAKPLRAAIAKTFYGGLGIGDDDVFVSDGAKCDISRLQVMFGSNVTIAVQDPSYPAYVDSSVIMGQTGQFNTDVQKYGNIEYMRCTPENGFFPDLSTVGGTDIIFFCSPNNPTGAAATREQLTQLVEFAKKNGSIIVYDSAYAMYMSDDNPRSIFEIPGAEEVAMETASFSKYAGFTGVRLGWTVIPKKLLYSDGFPVAKDFNRIICTCFNGASNISQAGALACLTPEGLEAMHKVIGFYKENTNIIIDTFTSLGYDVYGGKNAPYVWVHFPNQSSWDVFAEILEKTHVVTTPGSGFGPGGEGFVRVSAFGHRENILEACRRFKQLYK

SEQ ID NO: 24480 - DNA, 1517 bp, Arabidopsis thaliana
  misc_feature (1)..(1517): Ceres Seq. ID no. 12343508
  misc_feature (1)..(1517): Ortholog of  Ceres SEQ ID NO 13594345 as cited in SEQ ID NO 58043
  misc_feature (1)..(1517): Ortholog of  Ceres SEQ ID NO 13662880 as cited in SEQ ID NO 65422
  misc_feature (1)..(1517): Ortholog of  Ceres SEQ ID NO 12779098 as cited in SEQ ID NO 67698
  misc_feature (1)..(1517): Ortholog of  Ceres SEQ ID NO 13596180 as cited in SEQ ID NO 67941
  misc_feature (1)..(1517): Ortholog of  Ceres SEQ ID NO 13596089 as cited in SEQ ID NO 68373
atcattcactcacgacactaaccatgaccaaattctccgagccaatcagagactcccacgtggcagttctcgcgtttttccccgttggcgctcatgccggtcctctcttagccgtcactcgccgtctcgccgccgcttctccctccaccatcttttctttcttcaacaccgcaagatcaaacgcgtcgttgttctcctctgatcatcccgagaacatcaaggtccacgacgtctctgacggtgttccggagggaaccatgctcgggaatccactggagatggtcgagctgtttctcgaagcggctccacgtattttccggagcgaaatcgcggcggcagagatagaagttggaaagaaagtgacatgcatgctaacagatgccttcttctggttcgcagcggacatagcggctgagctgaacgcgacttgggttgccttctgggccggcggagcaaactcactctgtgctcatctctacactgatctcatcagagaaaccatcggtctcaaagatgtgagtatggaagagacattagggtttataccaggaatggagaattacagagttaaagatataccagaggaagttgtatttgaagatttggactctgttttcccaaaggctttataccaaatgagtcttgctttacctcgtgcctctgctgttttcatcagttcctttgaagagttagaacctacattgaactataacctaagatccaaacttaaacgtttcttgaacatcgcccctctcacgttattatcttctacatcggagaaagagatgcgtgatcctcatggctgctttgcttggatggggaagagatcagctgcttctgtagcgtacattagcttcggcaccgtcatggaacctcctcctgaagagcttgtggcgatagcacaagggttggaatcaagcaaagtgccgtttgtttggtcgctgaaggagaagaacatggttcatctaccaaaagggtttttggatcggacaagagagcaagggatagtggttccttgggctccacaagtggaactgctgaaacacgaggcaatgggtgtgaatgtgacacattgtggatggaactcagtgttggagagtgtgtcggcaggtgtaccgatgatcggcagaccgattttggcggataataggctcaacggaagagcagtggaggttgtgtggaaggttggagtgatgatggataatggagtcttcacgaaagaaggatttgagaagtgtttgaatgatgtttttgttcatgatgatggtaagacgatgaaggctaatgccaagaagcttaaagaaaaactccaagaagatttctccatgaaaggaagctctttagagaatttcaaaatattgttggacgaaattgtgaaagtttaggttgtttacaacataattgaagactataaatgtgatttcaaaattaacaaaatcatagtcaaataagtgtgtgcctattctattttgtcaaagtaagagtgtatggatctattctatttcaaagggttgttg

SEQ ID NO: 24481 - protein, 460 aa, Arabidopsis thaliana
  peptide (1)..(460): Ceres Seq. ID no. 12343509
HSLTTLTMTKFSEPIRDSHVAVLAFFPVGAHAGPLLAVTRRLAAASPSTIFSFFNTARSNASLFSSDHPENIKVHDVSDGVPEGTMLGNPLEMVELFLEAAPRIFRSEIAAAEIEVGKKVTCMLTDAFFWFAADIAAELNATWVAFWAGGANSLCAHLYTDLIRETIGLKDVSMEETLGFIPGMENYRVKDIPEEVVFEDLDSVFPKALYQMSLALPRASAVFISSFEELEPTLNYNLRSKLKRFLNIAPLTLLSSTSEKEMRDPHGCFAWMGKRSAASVAYISFGTVMEPPPEELVAIAQGLESSKVPFVWSLKEKNMVHLPKGFLDRTREQGIVVPWAPQVELLKHEAMGVNVTHCGWNSVLESVSAGVPMIGRPILADNRLNGRAVEVVWKVGVMMDNGVFTKEGFEKCLNDVFVHDDGKTMKANAKKLKEKLQEDFSMKGSSLENFKILLDEIVKV

SEQ ID NO: 24482 - protein, 453 aa, Arabidopsis thaliana
  peptide (1)..(453): Ceres Seq. ID no. 12343510
MTKFSEPIRDSHVAVLAFFPVGAHAGPLLAVTRRLAAASPSTIFSFFNTARSNASLFSSDHPENIKVHDVSDGVPEGTMLGNPLEMVELFLEAAPRIFRSEIAAAEIEVGKKVTCMLTDAFFWFAADIAAELNATWVAFWAGGANSLCAHLYTDLIRETIGLKDVSMEETLGFIPGMENYRVKDIPEEVVFEDLDSVFPKALYQMSLALPRASAVFISSFEELEPTLNYNLRSKLKRFLNIAPLTLLSSTSEKEMRDPHGCFAWMGKRSAASVAYISFGTVMEPPPEELVAIAQGLESSKVPFVWSLKEKNMVHLPKGFLDRTREQGIVVPWAPQVELLKHEAMGVNVTHCGWNSVLESVSAGVPMIGRPILADNRLNGRAVEVVWKVGVMMDNGVFTKEGFEKCLNDVFVHDDGKTMKANAKKLKEKLQEDFSMKGSSLENFKILLDEIVKV

SEQ ID NO: 24483 - protein, 375 aa, Arabidopsis thaliana
  peptide (1)..(375): Ceres Seq. ID no. 12343511
MLGNPLEMVELFLEAAPRIFRSEIAAAEIEVGKKVTCMLTDAFFWFAADIAAELNATWVAFWAGGANSLCAHLYTDLIRETIGLKDVSMEETLGFIPGMENYRVKDIPEEVVFEDLDSVFPKALYQMSLALPRASAVFISSFEELEPTLNYNLRSKLKRFLNIAPLTLLSSTSEKEMRDPHGCFAWMGKRSAASVAYISFGTVMEPPPEELVAIAQGLESSKVPFVWSLKEKNMVHLPKGFLDRTREQGIVVPWAPQVELLKHEAMGVNVTHCGWNSVLESVSAGVPMIGRPILADNRLNGRAVEVVWKVGVMMDNGVFTKEGFEKCLNDVFVHDDGKTMKANAKKLKEKLQEDFSMKGSSLENFKILLDEIVKV

SEQ ID NO: 24484 - DNA, 3109 bp, Arabidopsis thaliana
  misc_feature (1)..(3109): Ceres Seq. ID no. 13486900
  misc_feature (1)..(3109): Ortholog of  Ceres SEQ ID NO 13658778 as cited in SEQ ID NO 66511
atccatccaaatctcaatccctaattagggttcatttctctgtttctccaaacaggggaattcgaagatgatggagtctaggtctcccatctgcaacacttgtggtgaagagattggtgtaaaatcaaacggagagttctttgtggcttgtcatgagtgtagtttcccaatctgcaaagcttgtcttgagtatgaattcaaagaaggtcgaagaatttgcttgcgttgcggcaatccttacgatgagaatgtgtttgatgatgttgagacaaagacatctaaaactcaatccattgttccaacacagaccaataacacttctcaggattcagggattcatgctagacatataagtacagtctcaacaatagacagtgaactgaatgatgaatatggcaatccaatttggaagaacagagtggagagctggaaagacaagaaagacaagaagagcaagaagaagaagaaagatccaaaagcaacaaaagctgaacaacatgaggctcagattcctacccaacagcacatggaagatacgccaccgaacacagaatctggtgctacagatgtgctttcggttgtgattcctatcccaaggacaaaaatcacttcatataggattgtcatcatcatgcggttgatcatcttggctctgttttttaactaccgtatcacgcatcctgtcgatagcgcttacggtttatggctaacatctgtgatatgtgagatttggtttgctgtttcttgggtgttggatcagttccctaaatggtctcctattaaccgagaaacttacatcgaccggttatccgcaagattcgaaagagaaggcgagcaatcacagcttgcagctgtagatttctttgttagtacggtagatccattaaaggagccacctttgataactgcaaacacggttctttcgatcctcgcgcttgattatccggtggataaagtctcttgctatgtatctgatgatggtgctgcaatgctttcgtttgagtctttggttgagacagcagattttgctaggaaatgggtacctttctgcaaaaagtactccatcgagccacgagctcccgagttttacttctcgcttaaaatcgattacttgagggataaagttcaaccttcttttgtgaaagaacgtagagccatgaaaagagattatgaagagtttaaaataagaatgaatgctttagtcgccaaggctcaaaagacaccagaagaaggatggacaatgcaagatggaacatcttggcccgggaacaacactcgtgaccatcccgggatgattcaggtttttcttggatatagcggtgctcgcgacattgaaggaaatgaacttccaagattagtttacgtctctagagagaagagacctggttatcagcatcacaaaaaggccggggcagagaacgcattggtgagggtgtctgcggttttaacgaatgctccattcattcttaaccttgattgtgatcactacgtcaacaatagcaaagccgtgcgtgaagcaatgtgctttttaatggatcctgttgttggtcaagacgtttgctttgttcagttcccacagagatttgatggaatcgacaagagtgatcgatatgctaaccgcaacattgttttcttcgatgttaatatgagagggcttgatgggattcaaggtccagtttatgttggtacaggtactgtctttagaagacaagcactttacggatacagtccaccttcaaaaccgaggattttaccgcaatcttcatcatcgtcgtgttgctgtctaaccaagaagaaacaacctcaagatccttccgagatttacaaagatgcaaagcgagaagaacttgatgctgcaatctttaatcttggggacctagacaactacgatgagtacgacagatcgatgctgatttcacaaacaagctttgagaaaacgtttggtctctctacggttttcatcgagtctactcttatggagaatggcggtgttcccgactctgtaaacccgtcaacgctcatcaaagaagctattcatgtcattagctgtggatacgaagagaaaactgaatggggaaaagaaataggatggatttacgggtcgatcaccgaagacattttgacgggtttcaagatgcattgtcgtggatggaggtcgatttactgtatgccattaagaccagcatttaaaggatctgctccaatcaatctatcagataggcttcaccaggttctacgttgggctcttggctcggttgagatcttccttagccgacattgtcctttgtggtacggttgcagcggaggccgcctcaagttgctccagagattagcttatataaacactattgtctacccattcacttctttgcctcttgttgcttactgtactcttccagctatttgccttcttaccggcaaatttatcatcccaacgctatcaaacctagcaagcatgctgtttctaggtctctttatatcaatcatcttaacgagtgtcctcgagcttcgatggagcggagtcagtatcgaagacttatggagaaacgaacagttttgggttattggaggtgtctcagctcatctctttgccgttttccaaggattcctcaaaatgctcgctggtctcgacacaaatttcacagtcacatcgaaaaccgcagatgatttagaattcggtgagctttacattgtcaaatggacaactctcttgatccctccgacgtcacttcttataatcaacttggtcggagttgttgctggattctctgacgctcttaacaaaggttatgaagcttggggacctttgtttgggaaggtatttttcgccttttgggtgattcttcatctttatccattcctcaaaggtcttatgggaagacaaaacagaacacctactattgttattctctggtctatcttgcttgcttctgtgttttcacttgtttgggttcgtatcaatcctttcgtctccaaaaccgatacgacttccctttctctgaactgtcttttgatcgattgctaagagaagatacgttatgtttgtattttgaaagattgatcatatgtgttttggttgttttataaattttcatatggttgcttgagc

SEQ ID NO: 24485 - protein, 985 aa, Arabidopsis thaliana
  peptide (1)..(985): Ceres Seq. ID no. 13486901
MMESRSPICNTCGEEIGVKSNGEFFVACHECSFPICKACLEYEFKEGRRICLRCGNPYDENVFDDVETKTSKTQSIVPTQTNNTSQDSGIHARHISTVSTIDSELNDEYGNPIWKNRVESWKDKKDKKSKKKKKDPKATKAEQHEAQIPTQQHMEDTPPNTESGATDVLSVVIPIPRTKITSYRIVIIMRLIILALFFNYRITHPVDSAYGLWLTSVICEIWFAVSWVLDQFPKWSPINRETYIDRLSARFEREGEQSQLAAVDFFVSTVDPLKEPPLITANTVLSILALDYPVDKVSCYVSDDGAAMLSFESLVETADFARKWVPFCKKYSIEPRAPEFYFSLKIDYLRDKVQPSFVKERRAMKRDYEEFKIRMNALVAKAQKTPEEGWTMQDGTSWPGNNTRDHPGMIQVFLGYSGARDIEGNELPRLVYVSREKRPGYQHHKKAGAENALVRVSAVLTNAPFILNLDCDHYVNNSKAVREAMCFLMDPVVGQDVCFVQFPQRFDGIDKSDRYANRNIVFFDVNMRGLDGIQGPVYVGTGTVFRRQALYGYSPPSKPRILPQSSSSSCCCLTKKKQPQDPSEIYKDAKREELDAAIFNLGDLDNYDEYDRSMLISQTSFEKTFGLSTVFIESTLMENGGVPDSVNPSTLIKEAIHVISCGYEEKTEWGKEIGWIYGSITEDILTGFKMHCRGWRSIYCMPLRPAFKGSAPINLSDRLHQVLRWALGSVEIFLSRHCPLWYGCSGGRLKLLQRLAYINTIVYPFTSLPLVAYCTLPAICLLTGKFIIPTLSNLASMLFLGLFISIILTSVLELRWSGVSIEDLWRNEQFWVIGGVSAHLFAVFQGFLKMLAGLDTNFTVTSKTADDLEFGELYIVKWTTLLIPPTSLLIINLVGVVAGFSDALNKGYEAWGPLFGKVFFAFWVILHLYPFLKGLMGRQNRTPTIVILWSILLASVFSLVWVRINPFVSKTDTTSLSLNCLLIDC

SEQ ID NO: 24486 - protein, 984 aa, Arabidopsis thaliana
  peptide (1)..(984): Ceres Seq. ID no. 13486902
MESRSPICNTCGEEIGVKSNGEFFVACHECSFPICKACLEYEFKEGRRICLRCGNPYDENVFDDVETKTSKTQSIVPTQTNNTSQDSGIHARHISTVSTIDSELNDEYGNPIWKNRVESWKDKKDKKSKKKKKDPKATKAEQHEAQIPTQQHMEDTPPNTESGATDVLSVVIPIPRTKITSYRIVIIMRLIILALFFNYRITHPVDSAYGLWLTSVICEIWFAVSWVLDQFPKWSPINRETYIDRLSARFEREGEQSQLAAVDFFVSTVDPLKEPPLITANTVLSILALDYPVDKVSCYVSDDGAAMLSFESLVETADFARKWVPFCKKYSIEPRAPEFYFSLKIDYLRDKVQPSFVKERRAMKRDYEEFKIRMNALVAKAQKTPEEGWTMQDGTSWPGNNTRDHPGMIQVFLGYSGARDIEGNELPRLVYVSREKRPGYQHHKKAGAENALVRVSAVLTNAPFILNLDCDHYVNNSKAVREAMCFLMDPVVGQDVCFVQFPQRFDGIDKSDRYANRNIVFFDVNMRGLDGIQGPVYVGTGTVFRRQALYGYSPPSKPRILPQSSSSSCCCLTKKKQPQDPSEIYKDAKREELDAAIFNLGDLDNYDEYDRSMLISQTSFEKTFGLSTVFIESTLMENGGVPDSVNPSTLIKEAIHVISCGYEEKTEWGKEIGWIYGSITEDILTGFKMHCRGWRSIYCMPLRPAFKGSAPINLSDRLHQVLRWALGSVEIFLSRHCPLWYGCSGGRLKLLQRLAYINTIVYPFTSLPLVAYCTLPAICLLTGKFIIPTLSNLASMLFLGLFISIILTSVLELRWSGVSIEDLWRNEQFWVIGGVSAHLFAVFQGFLKMLAGLDTNFTVTSKTADDLEFGELYIVKWTTLLIPPTSLLIINLVGVVAGFSDALNKGYEAWGPLFGKVFFAFWVILHLYPFLKGLMGRQNRTPTIVILWSILLASVFSLVWVRINPFVSKTDTTSLSLNCLLIDC

SEQ ID NO: 24487 - protein, 832 aa, Arabidopsis thaliana
  peptide (1)..(832): Ceres Seq. ID no. 13486903
MEDTPPNTESGATDVLSVVIPIPRTKITSYRIVIIMRLIILALFFNYRITHPVDSAYGLWLTSVICEIWFAVSWVLDQFPKWSPINRETYIDRLSARFEREGEQSQLAAVDFFVSTVDPLKEPPLITANTVLSILALDYPVDKVSCYVSDDGAAMLSFESLVETADFARKWVPFCKKYSIEPRAPEFYFSLKIDYLRDKVQPSFVKERRAMKRDYEEFKIRMNALVAKAQKTPEEGWTMQDGTSWPGNNTRDHPGMIQVFLGYSGARDIEGNELPRLVYVSREKRPGYQHHKKAGAENALVRVSAVLTNAPFILNLDCDHYVNNSKAVREAMCFLMDPVVGQDVCFVQFPQRFDGIDKSDRYANRNIVFFDVNMRGLDGIQGPVYVGTGTVFRRQALYGYSPPSKPRILPQSSSSSCCCLTKKKQPQDPSEIYKDAKREELDAAIFNLGDLDNYDEYDRSMLISQTSFEKTFGLSTVFIESTLMENGGVPDSVNPSTLIKEAIHVISCGYEEKTEWGKEIGWIYGSITEDILTGFKMHCRGWRSIYCMPLRPAFKGSAPINLSDRLHQVLRWALGSVEIFLSRHCPLWYGCSGGRLKLLQRLAYINTIVYPFTSLPLVAYCTLPAICLLTGKFIIPTLSNLASMLFLGLFISIILTSVLELRWSGVSIEDLWRNEQFWVIGGVSAHLFAVFQGFLKMLAGLDTNFTVTSKTADDLEFGELYIVKWTTLLIPPTSLLIINLVGVVAGFSDALNKGYEAWGPLFGKVFFAFWVILHLYPFLKGLMGRQNRTPTIVILWSILLASVFSLVWVRINPFVSKTDTTSLSLNCLLIDC

SEQ ID NO: 24488 - DNA, 1692 bp, Arabidopsis thaliana
  misc_feature (1)..(1692): Ceres Seq. ID no. 13580675
  misc_feature (1)..(1692): Ortholog of  Ceres SEQ ID NO 14307863 as cited in SEQ ID NO 20504
agaaatcgaaaaaatcagatctagatctaaaagaagagcgtcttcataaacgcccttcttcttcttcgtcttcttccctgcaaatctagtttctagatcttttctttcttccgcgaaacgaaaatgagagagtgcatttcgatccacattggtcaggccggtatccaggtcggaaatgcttgctgggagctttactgtcttgaacatggcattcagcctgatggccagatgccgagtgacaagactgttggcggaggtgacgatgctttcaacaccttcttcagtgagaccggtgcagggaagcacgtcccacgtgctgtctttgttgatcttgagccaactgtgatcgatgaggtcaggactggtacttaccgtcagcttttccaccctgagcaactcatcagcggtaaagaagacgcagctaacaatttcgcccgtgggcattacaccattgggaaagagattgttgatctgtgcttggaccgtatcagaaagctcgctgataactgtactggtctccaaggattcctcgtcttcaacgctgttggtggagggactggatctggtcttggatctctcctccttgagagactttctgttgactacgggaaaaagtccaagttgggtttcacagtttacccatctccacaggtctccacctctgttgttgagccttacaacagtgtcctctccactcactcactcttggaacacactgatgtctctatcctcctcgacaatgaagctatctatgacatctgcagacgttccctaagcattgagagacccacctacaccaacctcaaccgtctcgtctctcaggttatctcatccttgactgcttctctgaggttcgatggtgccttgaatgttgatgtgactgagttccaaaccaacttggtcccatacccaagaatccacttcatgctttcctcctatgccccagtcatctccgcagagaaggccttccatgagcagctctcggttgctgagatcacaaacagtgcttttgagccagcatccatgatggcaaagtgtgaccctcgtcacggaaagtacatggcttgctgtttgatgtaccgtggtgatgtcgtccccaaggatgtgaacgcagctgttggcaccatcaagaccaagcgtactattcagtttgtggactggtgtcctactggattcaagtgtggaatcaactaccagccaccaactgttgttccaggaggtgatcttgctaaagtccagagagctgtgtgtatgatctcaaactccaccagtgttgctgaggtgttctcccgtattgatcacaagtttgatcttatgtacgcaaaacgtgctttcgttcactggtatgtgggtgagggtatggaagaaggagaattttcagaggctcgtgaggatcttgcagcattggagaaggattacgaagaggttggtgctgaaggtggtgacgatgaggatgatgaaggagaggagtactaagaaggttgtcggttttatgtgggatttctattatctcgtgtttgtgtgaataggctcgaaactcttacgagtcgtacttgtgttttcaaaaaccatatttctatctcttgcttgtggcggtagccatttgttctagttcgtttgtttctgataatattttcatctccaagaactgaatttaagctgggtttggtttaaatcgattgtccaaaatct

SEQ ID NO: 24489 - protein, 450 aa, Arabidopsis thaliana
  peptide (1)..(450): Ceres Seq. ID no. 13580676
MRECISIHIGQAGIQVGNACWELYCLEHGIQPDGQMPSDKTVGGGDDAFNTFFSETGAGKHVPRAVFVDLEPTVIDEVRTGTYRQLFHPEQLISGKEDAANNFARGHYTIGKEIVDLCLDRIRKLADNCTGLQGFLVFNAVGGGTGSGLGSLLLERLSVDYGKKSKLGFTVYPSPQVSTSVVEPYNSVLSTHSLLEHTDVSILLDNEAIYDICRRSLSIERPTYTNLNRLVSQVISSLTASLRFDGALNVDVTEFQTNLVPYPRIHFMLSSYAPVISAEKAFHEQLSVAEITNSAFEPASMMAKCDPRHGKYMACCLMYRGDVVPKDVNAAVGTIKTKRTIQFVDWCPTGFKCGINYQPPTVVPGGDLAKVQRAVCMISNSTSVAEVFSRIDHKFDLMYAKRAFVHWYVGEGMEEGEFSEAREDLAALEKDYEEVGAEGGDDEDDEGEEY

SEQ ID NO: 24490 - protein, 415 aa, Arabidopsis thaliana
  peptide (1)..(415): Ceres Seq. ID no. 13580677
MPSDKTVGGGDDAFNTFFSETGAGKHVPRAVFVDLEPTVIDEVRTGTYRQLFHPEQLISGKEDAANNFARGHYTIGKEIVDLCLDRIRKLADNCTGLQGFLVFNAVGGGTGSGLGSLLLERLSVDYGKKSKLGFTVYPSPQVSTSVVEPYNSVLSTHSLLEHTDVSILLDNEAIYDICRRSLSIERPTYTNLNRLVSQVISSLTASLRFDGALNVDVTEFQTNLVPYPRIHFMLSSYAPVISAEKAFHEQLSVAEITNSAFEPASMMAKCDPRHGKYMACCLMYRGDVVPKDVNAAVGTIKTKRTIQFVDWCPTGFKCGINYQPPTVVPGGDLAKVQRAVCMISNSTSVAEVFSRIDHKFDLMYAKRAFVHWYVGEGMEEGEFSEAREDLAALEKDYEEVGAEGGDDEDDEGEEY

SEQ ID NO: 24491 - DNA, 1862 bp, Arabidopsis thaliana
  misc_feature (1)..(1862): Ceres Seq. ID no. 13500134
  misc_feature (1)..(1862): Ortholog of  Ceres SEQ ID NO 14315028 as cited in SEQ ID NO 57989
atgaaatctgcaaatttaggtcttttaatagaaatctgaatttcatgttgctgaaagaatttacaacgaagttgtaaatactctgagaaacatgtaagtcaggagagagtcccttctatggtttatatttggcggcttttaagaagcatacgcatatcaagtgtttgatgaaattcctcagagaagatgatgtccaccacagtcagattaaacaggtttacgtatctaacgagtactgcaaaactgacacgttacttttgctctcaccatttagttgaccgatcggaaacggcgttgcatgaagttattcggatagtttcttctccagttggtggtctagatgaccttgaagaaaacttgaaccaggtttctgtttctccatcatcaaaccttgttacccaagtgattgagtcttgcaagaacgagacttcaccgagaaggctgttgaggtttttctcctggtcgtgtaaaagcttgggatctagtttacacgacaaggaattcaactatgtcctaagagttttggctgagaagaaggatcacacagctatgcagatactcttatcagatctcaggaaggagaatcgggcgatggacaagcaaacgtttagcattgtcgctgaaactctggttaaggttggtaaggaagaagatgcaataggtatcttcaagatcttggacaaattttcttgcccacaagatggtttcactgtgacggctattataagcgctctttgttccagaggacatgtgaagagagcattgggagttatgcatcatcacaaggatgtaatatccgggaatgaattgtctgtgtatagaagtcttttattcgggtggtcggtacaaagaaacgtgaaggaagcaagaagagttatacaagatatgaaatcagcagggattacaccggatttgttctgtttcaactcgttgctgacctgcctttgcgaaagaaacgtgaatcgaaacccgtctgggcttgttcctgaagctttgaatattatgttggagatgaggtcttacaaaatccaacctacgtctatgagttacaacattttgctctcttgtttgggaaggactaggagggtgagagagtcctgccagattttagaacagatgaaaagatcgggatgtgatccggatacagggagctattacttcgttgtgagggtcctgtatttgacaggaaggtttggtaaaggcaaccaaattgtggatgagatgatcgagagaggatttagacccgaacgcaaattctattatgatctgatcggggttctttgtggggtcgagcgggttaactttgctcttcaattgtttgagaagatgaagagaagctcagtgggtggttatggtcaggtttatgatctgctcataccaaaactatgtaaaggaggaaactttgagaaaggaagagagctttgggaagaggcattgtcaattgatgttacacttagttgctccattagtttgcttgatccatctgtcacagaggttttcaaacctatgaagatgaaagaagaagctgcaatggtggatcgtcgtgctcttaacttgaagattcacgctagaatgaacaaaacaaagccaaaactgaaactaaaaccgaaacgcaggagcaagacaaagaagaagaatctgcaacattgattgatttcttctacccattgttaagaacatctgatatagcaggcaatgtatcacaagaaactcaagtaagatgttctgctttttatgtattagtagtaatgcagaagcaaaggacatgagattcttttgttgttctctttgtcccattgattcttattacgaaaaatatgggttctgaagaatacaaaacaagagacaagaatattgtgatc

SEQ ID NO: 24492 - protein, 487 aa, Arabidopsis thaliana
  peptide (1)..(487): Ceres Seq. ID no. 13500135
MMSTTVRLNRFTYLTSTAKLTRYFCSHHLVDRSETALHEVIRIVSSPVGGLDDLEENLNQVSVSPSSNLVTQVIESCKNETSPRRLLRFFSWSCKSLGSSLHDKEFNYVLRVLAEKKDHTAMQILLSDLRKENRAMDKQTFSIVAETLVKVGKEEDAIGIFKILDKFSCPQDGFTVTAIISALCSRGHVKRALGVMHHHKDVISGNELSVYRSLLFGWSVQRNVKEARRVIQDMKSAGITPDLFCFNSLLTCLCERNVNRNPSGLVPEALNIMLEMRSYKIQPTSMSYNILLSCLGRTRRVRESCQILEQMKRSGCDPDTGSYYFVVRVLYLTGRFGKGNQIVDEMIERGFRPERKFYYDLIGVLCGVERVNFALQLFEKMKRSSVGGYGQVYDLLIPKLCKGGNFEKGRELWEEALSIDVTLSCSISLLDPSVTEVFKPMKMKEEAAMVDRRALNLKIHARMNKTKPKLKLKPKRRSKTKKKNLQH

SEQ ID NO: 24493 - protein, 486 aa, Arabidopsis thaliana
  peptide (1)..(486): Ceres Seq. ID no. 13500136
MSTTVRLNRFTYLTSTAKLTRYFCSHHLVDRSETALHEVIRIVSSPVGGLDDLEENLNQVSVSPSSNLVTQVIESCKNETSPRRLLRFFSWSCKSLGSSLHDKEFNYVLRVLAEKKDHTAMQILLSDLRKENRAMDKQTFSIVAETLVKVGKEEDAIGIFKILDKFSCPQDGFTVTAIISALCSRGHVKRALGVMHHHKDVISGNELSVYRSLLFGWSVQRNVKEARRVIQDMKSAGITPDLFCFNSLLTCLCERNVNRNPSGLVPEALNIMLEMRSYKIQPTSMSYNILLSCLGRTRRVRESCQILEQMKRSGCDPDTGSYYFVVRVLYLTGRFGKGNQIVDEMIERGFRPERKFYYDLIGVLCGVERVNFALQLFEKMKRSSVGGYGQVYDLLIPKLCKGGNFEKGRELWEEALSIDVTLSCSISLLDPSVTEVFKPMKMKEEAAMVDRRALNLKIHARMNKTKPKLKLKPKRRSKTKKKNLQH

SEQ ID NO: 24494 - protein, 366 aa, Arabidopsis thaliana
  peptide (1)..(366): Ceres Seq. ID no. 13500137
MQILLSDLRKENRAMDKQTFSIVAETLVKVGKEEDAIGIFKILDKFSCPQDGFTVTAIISALCSRGHVKRALGVMHHHKDVISGNELSVYRSLLFGWSVQRNVKEARRVIQDMKSAGITPDLFCFNSLLTCLCERNVNRNPSGLVPEALNIMLEMRSYKIQPTSMSYNILLSCLGRTRRVRESCQILEQMKRSGCDPDTGSYYFVVRVLYLTGRFGKGNQIVDEMIERGFRPERKFYYDLIGVLCGVERVNFALQLFEKMKRSSVGGYGQVYDLLIPKLCKGGNFEKGRELWEEALSIDVTLSCSISLLDPSVTEVFKPMKMKEEAAMVDRRALNLKIHARMNKTKPKLKLKPKRRSKTKKKNLQH

SEQ ID NO: 24495 - DNA, 1677 bp, Arabidopsis thaliana
  misc_feature (1)..(1677): Ceres Seq. ID no. 12371837
  misc_feature (1)..(1677): Ortholog of  Ceres SEQ ID NO 13597546 as cited in SEQ ID NO 65017
  misc_feature (1)..(1677): Ortholog of  Ceres SEQ ID NO 14307912 as cited in SEQ ID NO 66380
  misc_feature (1)..(1677): Ortholog of  Ceres SEQ ID NO 14308045 as cited in SEQ ID NO 67444
  misc_feature (1)..(1677): Ortholog of  Ceres SEQ ID NO 13654353 as cited in SEQ ID NO 68318
aatattaatttcttcaattaaccttgataagagttaaaaaagtaaaaaacctcgagaagagttgtagctgtggtcaacacttgagaggcagcacgatgagctccatatggaacgttgcaatgttgatggtagctttggtggttgtgaggatcagccactggctttaccgatggtcaaaccctaagtgccctggcaagttaccacctggatcgatgggttttccaatcattggagagactctcgatttctttaagccttgtggagtcgaaggtatcccaacctttgttaagaagaggatgataaggtatgggccgttgtttcgaacaaacatttttggttccaaaaccgtggtttcgacagatccggatgtgatccaccagattttccggcaagagaacacgtcttttgagctaggctatccagacatatttgtgaaagtatttggaaaagataatttgttcttgaaggaagtgttcatccacaagtacctccaaaaaatcactatgcaaattcttggctccgagggtttgaagcaaacaatgttaggaaacatggacaaagcaacccgcgaccatattaggtccattgctagccaggggagcttcaatgttcgtaaagaagttgaaaacttggtagtagcgtacatgacaccaaagctgataagtaaccttaaaccagagacgcaatcaaagcttatagataatctcaacgccttcaatcttgattggtttaagtccttcttaagactctctacttggaaagctgtcaccaaagccctcaagtcacgcgaagaagctatccaggtgatgaaagacgttctcatgatgagaaaagagacgcgagagaagcaagaagacttccttaacacgcttctagaagaactggagaaagacggtagctttttcgaccaaggatcggctataaatctcatcttccttctggcgtttgccttgagagaaggtacctctagttgtactgctttggccgtgaagttcatatccaaagacccgaaagtgcttgcagagctcaagcgtgagcataaggcaattgtagacaacagaaaagataaggaagctggagttagctgggaagaatatagacacaacatgactttcaccaacatggttagcaatgaggtgcttcgcctagcaaacacgacccctttgttgtttcgaaaggcggtgcaagatgttgagatcaaaggatatacaattccggctggttggattgtggcggttgcaccttcagcggttcattttgatcctgcaatctatgagaacccatttgagtttaatccatggagatgggaggggaaagaaatgatttggggatctaaaacgttcatggcgtttggatatggagttagactttgtgtaggtgcagagttttcacggcttcaaatggcaatcttcctccatcatcttgtggcatattacgatttctcaatggtccaagactccgagatcattcgttcaccattccatcaatacaccaaggatctgcttataaacatctctcagtctcctaccaagtgaaccatgcatgcagtttccaaatcttaataatcagatcattatatgcaataatctcatttcctgcttccgcaaaatctctggagtctttttatatgtaatatgcgatctctataatttttaaaaagtatctatcttgtcaaat

SEQ ID NO: 24496 - protein, 479 aa, Arabidopsis thaliana
  peptide (1)..(479): Ceres Seq. ID no. 12371838
MSSIWNVAMLMVALVVVRISHWLYRWSNPKCPGKLPPGSMGFPIIGETLDFFKPCGVEGIPTFVKKRMIRYGPLFRTNIFGSKTVVSTDPDVIHQIFRQENTSFELGYPDIFVKVFGKDNLFLKEVFIHKYLQKITMQILGSEGLKQTMLGNMDKATRDHIRSIASQGSFNVRKEVENLVVAYMTPKLISNLKPETQSKLIDNLNAFNLDWFKSFLRLSTWKAVTKALKSREEAIQVMKDVLMMRKETREKQEDFLNTLLEELEKDGSFFDQGSAINLIFLLAFALREGTSSCTALAVKFISKDPKVLAELKREHKAIVDNRKDKEAGVSWEEYRHNMTFTNMVSNEVLRLANTTPLLFRKAVQDVEIKGYTIPAGWIVAVAPSAVHFDPAIYENPFEFNPWRWEGKEMIWGSKTFMAFGYGVRLCVGAEFSRLQMAIFLHHLVAYYDFSMVQDSEIIRSPFHQYTKDLLINISQSPTK

SEQ ID NO: 24497 - protein, 471 aa, Arabidopsis thaliana
  peptide (1)..(471): Ceres Seq. ID no. 12371839
MLMVALVVVRISHWLYRWSNPKCPGKLPPGSMGFPIIGETLDFFKPCGVEGIPTFVKKRMIRYGPLFRTNIFGSKTVVSTDPDVIHQIFRQENTSFELGYPDIFVKVFGKDNLFLKEVFIHKYLQKITMQILGSEGLKQTMLGNMDKATRDHIRSIASQGSFNVRKEVENLVVAYMTPKLISNLKPETQSKLIDNLNAFNLDWFKSFLRLSTWKAVTKALKSREEAIQVMKDVLMMRKETREKQEDFLNTLLEELEKDGSFFDQGSAINLIFLLAFALREGTSSCTALAVKFISKDPKVLAELKREHKAIVDNRKDKEAGVSWEEYRHNMTFTNMVSNEVLRLANTTPLLFRKAVQDVEIKGYTIPAGWIVAVAPSAVHFDPAIYENPFEFNPWRWEGKEMIWGSKTFMAFGYGVRLCVGAEFSRLQMAIFLHHLVAYYDFSMVQDSEIIRSPFHQYTKDLLINISQSPTK

SEQ ID NO: 24498 - protein, 469 aa, Arabidopsis thaliana
  peptide (1)..(469): Ceres Seq. ID no. 12371840
MVALVVVRISHWLYRWSNPKCPGKLPPGSMGFPIIGETLDFFKPCGVEGIPTFVKKRMIRYGPLFRTNIFGSKTVVSTDPDVIHQIFRQENTSFELGYPDIFVKVFGKDNLFLKEVFIHKYLQKITMQILGSEGLKQTMLGNMDKATRDHIRSIASQGSFNVRKEVENLVVAYMTPKLISNLKPETQSKLIDNLNAFNLDWFKSFLRLSTWKAVTKALKSREEAIQVMKDVLMMRKETREKQEDFLNTLLEELEKDGSFFDQGSAINLIFLLAFALREGTSSCTALAVKFISKDPKVLAELKREHKAIVDNRKDKEAGVSWEEYRHNMTFTNMVSNEVLRLANTTPLLFRKAVQDVEIKGYTIPAGWIVAVAPSAVHFDPAIYENPFEFNPWRWEGKEMIWGSKTFMAFGYGVRLCVGAEFSRLQMAIFLHHLVAYYDFSMVQDSEIIRSPFHQYTKDLLINISQSPTK

SEQ ID NO: 24499 - DNA, 1492 bp, Arabidopsis thaliana
  misc_feature (1)..(1492): Ceres Seq. ID no. 13487939
  misc_feature (1)..(1492): Ortholog of  Ceres SEQ ID NO 15169655 as cited in SEQ ID NO 64922
  misc_feature (1)..(1492): Ortholog of  Ceres SEQ ID NO 13596004 as cited in SEQ ID NO 68212
ccacgcgtccgccgctcttctccactcttcttctctgttctatcgcagacatttttgtttatatgcatacataataataatacactcttgtcaggatttttgattctctctttggttttctcggaaaaatgtctgcgatactccaaggagctggagctgcaacggctctctcgccgtttaattctatcgattccaacaaactcgttgctccttctcgctcttctctttcagtgaggagcaagagatacattgttgccggatctgatagtaaaagctttggttctagcctcgtagctcgtcgctctgagccgttgataccaaatgctgttacgacgaaggcggacactgctgcgagctctacttcatcaaagcctggacatgagctattacttttcgaggctcttcaagaaggtctagaagaagagatggacagagatccacatgtatgtgtcatgggtgaagatgtaggccattacggaggctcatacaaagtaactaaaggcctagctgataagtttggcgatctcagggttctggacactccaatctgtgaaaacgccttcaccggtatgggcattggagccgccatgacaggactaagacccgtcatcgaaggtatgaacatggggtttctactcttagccttcaaccaaatctccaacaactgtggtatgcttcactatacatccggtggtcaattcactatcccggttgttatccgtgggcctggaggtgtgggccggcagctcggagccgagcattcccagcgtctcgagtcttacttccagtcaatccctgggatccagatggtggcttgctcaacaccttacaacgctaaaggattgatgaaagcggcgataagaagtgagaatcctgtgattctgtttgaacacgttctgctctataacctcaaggagagtattccggatgaagaatacatatgtaatctggaagaagcagaaatggtcagacccggtgaacacatcacgatactgacgtattcaaggatgaggtaccatgtaatgcaggctgcaaagacgctggtgaacaaagggtatgatccagaggttatcgacataaggtcgttgaagccgtttgatctctacacaattggaaactcggtgaagaagacacaccgggttttgattgtggaggaatgtatgagaacgggaggaatcggagccagtttgacggctgcaataaacgagaactttcatgattacttagatgctccggtgatgtgtttgtcttctcaggatgtcccaactccttacgccggtacattggaagaatggacggttgttcagccagctcagatcgtcactgccgtcgaacaactttgccagtaattgctttttttacggtgattgtgttttacccttttttactttttgttactgtttgtcttcgatggaaaatgcttgtgaaatgaaaactctgaattttactcttatgatatgagcatttatattttctatagataataacttcc

SEQ ID NO: 24500 - protein, 406 aa, Arabidopsis thaliana
  peptide (1)..(406): Ceres Seq. ID no. 13487940
MSAILQGAGAATALSPFNSIDSNKLVAPSRSSLSVRSKRYIVAGSDSKSFGSSLVARRSEPLIPNAVTTKADTAASSTSSKPGHELLLFEALQEGLEEEMDRDPHVCVMGEDVGHYGGSYKVTKGLADKFGDLRVLDTPICENAFTGMGIGAAMTGLRPVIEGMNMGFLLLAFNQISNNCGMLHYTSGGQFTIPVVIRGPGGVGRQLGAEHSQRLESYFQSIPGIQMVACSTPYNAKGLMKAAIRSENPVILFEHVLLYNLKESIPDEEYICNLEEAEMVRPGEHITILTYSRMRYHVMQAAKTLVNKGYDPEVIDIRSLKPFDLYTIGNSVKKTHRVLIVEECMRTGGIGASLTAAINENFHDYLDAPVMCLSSQDVPTPYAGTLEEWTVVQPAQIVTAVEQLCQ

SEQ ID NO: 24501 - protein, 307 aa, Arabidopsis thaliana
  peptide (1)..(307): Ceres Seq. ID no. 13487941
MDRDPHVCVMGEDVGHYGGSYKVTKGLADKFGDLRVLDTPICENAFTGMGIGAAMTGLRPVIEGMNMGFLLLAFNQISNNCGMLHYTSGGQFTIPVVIRGPGGVGRQLGAEHSQRLESYFQSIPGIQMVACSTPYNAKGLMKAAIRSENPVILFEHVLLYNLKESIPDEEYICNLEEAEMVRPGEHITILTYSRMRYHVMQAAKTLVNKGYDPEVIDIRSLKPFDLYTIGNSVKKTHRVLIVEECMRTGGIGASLTAAINENFHDYLDAPVMCLSSQDVPTPYAGTLEEWTVVQPAQIVTAVEQLCQ

SEQ ID NO: 24502 - protein, 298 aa, Arabidopsis thaliana
  peptide (1)..(298): Ceres Seq. ID no. 13487942
MGEDVGHYGGSYKVTKGLADKFGDLRVLDTPICENAFTGMGIGAAMTGLRPVIEGMNMGFLLLAFNQISNNCGMLHYTSGGQFTIPVVIRGPGGVGRQLGAEHSQRLESYFQSIPGIQMVACSTPYNAKGLMKAAIRSENPVILFEHVLLYNLKESIPDEEYICNLEEAEMVRPGEHITILTYSRMRYHVMQAAKTLVNKGYDPEVIDIRSLKPFDLYTIGNSVKKTHRVLIVEECMRTGGIGASLTAAINENFHDYLDAPVMCLSSQDVPTPYAGTLEEWTVVQPAQIVTAVEQLCQ

SEQ ID NO: 24503 - DNA, 2091 bp, Arabidopsis thaliana
  misc_feature (1)..(2091): Ceres Seq. ID no. 12329923
  misc_feature (1)..(2091): Ortholog of  Ceres SEQ ID NO 13659033 as cited in SEQ ID NO 66372
  misc_feature (1)..(2091): Ortholog of  Ceres SEQ ID NO 13655724 as cited in SEQ ID NO 68973
attttttcgcgtcttcactgttgtggatttcttctgaatcttctgagctcgcttcacctacaagaagacaacaaggatcattttctctagattccagatcctgaagaaggtgaaatcttatctgtgatccagtggaagattgaatcaagtaacggattcacttagttcacttgcgtattgcatgcccctgaagataacattttgaataatgttgatattgaattatcacctataagctctggttcttgttgcttgtattggttctgggtatctactagtgaagaaaccatggcttttggttctcctaggaataattctatattagctgcggctggatttcctcggaaagtgtctacagttgcaattgctattggtggtttggcatcattctttgttttcggattgttgcttcgtctttcgtatccgaatagttcttcagttggtggcatattttatgggatagggaatcctgaacaagttcatgtccctttatctttgagcaaccatactgtcaatatccttcagaagagtagtgacatcaatgcgtttgataaaaatctgacttctgattctagctctggcttacctgttgttgttagcaaaagtataccacctccagatttcagtagtgataggaagttggagacacctttgacacaagaaaaagaggatttggtttcttcggatataactgaaaagactgatgttcaatcaggtgaacgtgaaaccaatgtttccaaggctgaagacactccaagtgcatcatctcctccagatgatgtctctgaaactgcttcagcagaaccagagtgtgatttgtatcaaggtagttggttttatgatcctgggggacctctctacacgaacaactcttgccctgtcctgacgcagatgcagaattgccagggaaatggaagacctgacaagggatatgagaactggagatggaaaccgtctcagtgtgagcttcctcggtttgatgccagaaaatttcttgaacttatgaaaggcaagacactggcctttataggagattcagtagctcgtaatcagatggagtccatgttgtgccttctttggcaggttgaaacaccagtcaatcgtgggagccgaaagatgcagagatggtattttaagcaatcatcagtaatgattgcccgtatttggtcatcttggcttgttcatcagttcaacgaaaaattcgattatgctcctgaaggtgtcacaaaactaaagctggatcttcctgatgagcgcataatggaagctatcccgaaattcgacgtggttgtcctctcatcagggcactggtttgcaaagcagtctgtctacatattgaaagaagagatcgtgggaggccaattatggtggccagacaaatcaaaacccatgaaagtcaataacgtggatgcatttggaatatcagttgaaacaatccttaagtccatggctacacacccgaactacagcggtttgaccattgtgagaacattctcacctgatcattacgaaggtggtgcttggaacacaggtggatcatgcacggggaaagaagaacccatccttccagggaagctagtgaaaaacggattcacagagataatgcatgagaagcaagcgacaggatataaccaagccgtcgataaagtcgcggagaatttgaagctaaaactaaagctgatggatatcacagaggcatttggatatcgccatgatggtcatcctggtccattcagaagtcctgaccctaacaagatcactaaacggggaccagacggacggcctccacctcaggactgcttgcactggtgcatgccaggaccagtcgatacatggaacgaaatggtcttggagctcataaggagagacaggaaaagctcatcaacttgacttggtttgaaactcaaaggatgagagagcatattacacgacttatactattaatctgattcttggttactgataaactcaaagataaactcacttgtagatttgtgctaggcacggtgagttaggattagaatttgttccactatacttgttggttcgtttgtcctgagattgaaatttaagatttgggagttatgagtc

SEQ ID NO: 24504 - protein, 533 aa, Arabidopsis thaliana
  peptide (1)..(533): Ceres Seq. ID no. 12329924
MAFGSPRNNSILAAAGFPRKVSTVAIAIGGLASFFVFGLLLRLSYPNSSSVGGIFYGIGNPEQVHVPLSLSNHTVNILQKSSDINAFDKNLTSDSSSGLPVVVSKSIPPPDFSSDRKLETPLTQEKEDLVSSDITEKTDVQSGERETNVSKAEDTPSASSPPDDVSETASAEPECDLYQGSWFYDPGGPLYTNNSCPVLTQMQNCQGNGRPDKGYENWRWKPSQCELPRFDARKFLELMKGKTLAFIGDSVARNQMESMLCLLWQVETPVNRGSRKMQRWYFKQSSVMIARIWSSWLVHQFNEKFDYAPEGVTKLKLDLPDERIMEAIPKFDVVVLSSGHWFAKQSVYILKEEIVGGQLWWPDKSKPMKVNNVDAFGISVETILKSMATHPNYSGLTIVRTFSPDHYEGGAWNTGGSCTGKEEPILPGKLVKNGFTEIMHEKQATGYNQAVDKVAENLKLKLKLMDITEAFGYRHDGHPGPFRSPDPNKITKRGPDGRPPPQDCLHWCMPGPVDTWNEMVLELIRRDRKSSST

SEQ ID NO: 24505 - protein, 332 aa, Arabidopsis thaliana
  peptide (1)..(332): Ceres Seq. ID no. 12329925
MQNCQGNGRPDKGYENWRWKPSQCELPRFDARKFLELMKGKTLAFIGDSVARNQMESMLCLLWQVETPVNRGSRKMQRWYFKQSSVMIARIWSSWLVHQFNEKFDYAPEGVTKLKLDLPDERIMEAIPKFDVVVLSSGHWFAKQSVYILKEEIVGGQLWWPDKSKPMKVNNVDAFGISVETILKSMATHPNYSGLTIVRTFSPDHYEGGAWNTGGSCTGKEEPILPGKLVKNGFTEIMHEKQATGYNQAVDKVAENLKLKLKLMDITEAFGYRHDGHPGPFRSPDPNKITKRGPDGRPPPQDCLHWCMPGPVDTWNEMVLELIRRDRKSSST

SEQ ID NO: 24506 - protein, 295 aa, Arabidopsis thaliana
  peptide (1)..(295): Ceres Seq. ID no. 12329926
MKGKTLAFIGDSVARNQMESMLCLLWQVETPVNRGSRKMQRWYFKQSSVMIARIWSSWLVHQFNEKFDYAPEGVTKLKLDLPDERIMEAIPKFDVVVLSSGHWFAKQSVYILKEEIVGGQLWWPDKSKPMKVNNVDAFGISVETILKSMATHPNYSGLTIVRTFSPDHYEGGAWNTGGSCTGKEEPILPGKLVKNGFTEIMHEKQATGYNQAVDKVAENLKLKLKLMDITEAFGYRHDGHPGPFRSPDPNKITKRGPDGRPPPQDCLHWCMPGPVDTWNEMVLELIRRDRKSSST

SEQ ID NO: 24507 - DNA, 1022 bp, Arabidopsis thaliana
  misc_feature (1)..(1022): Ceres Seq. ID no. 12322862
  misc_feature (1)..(1022): Ortholog of  Ceres SEQ ID NO 13593919 as cited in SEQ ID NO 54135
  misc_feature (1)..(1022): Ortholog of  Ceres SEQ ID NO 14303359 as cited in SEQ ID NO 54913
  misc_feature (1)..(1022): Ortholog of  Ceres SEQ ID NO 13596017 as cited in SEQ ID NO 62012
cttacgcgtcatgtaaaaaaaaaagaagcgtaaattacgaaaaacagagagataaatccgggcattgagattttggagatagagagagagaaaaatcgaaatctattgtctatctcctcaatttggattggattttctgcatatcatcgctctagctttcgcgggttttggattcgattccttacccttctccaatcgaagtttttggctttgaattggatttgggtttcgttccaaaatcagctctttttgttaatcagcagatatgcaggaccagctggtgtgtcatggttgtaggaatttattgatgtatcctagaggagcatctaatgtgcgttgtgcgttatgtaacactatcaacatggttcctcctcctcctccacctcacgacatggcacacattatatgtggtggttgtagaacaatgcttatgtatacgcgtggggctagtagcgtaagatgctcttgctgtcaaactacgaaccttgtgccagcgcactccaatcaggttgcccatgctccttccagtcaggttgcgcagatcaattgtgggcattgtcggacgaccctcatgtatccttacggtgcatcatccgtcaaatgcgctgtttgtcaattcgtaactaacgttaatatgagcaatggaagggtacctctcccaactaaccggccaaatggaacagcttgtcccccctctacatcaacttcaacaccaccctctcagacccaaaccgttgttgtagaaaaccccatgtccgttgatgaaagcggaaagttggtgagcaatgttgttgttggagtgacaactgacaaaaagtaatcaagaatgagtgagatcttaaagatcaaatccaaattcttcctctattcctgcgtttggtttgtgcatattacatacgcggaaaaactgtatgttatatatctcttgactcctttttaacccaagagaaaaagcttatcagaatctcttgttactgcattattggggtttattcaaagttgaagacacaaggtttttgccc

SEQ ID NO: 24508 - protein, 184 aa, Arabidopsis thaliana
  peptide (1)..(184): Ceres Seq. ID no. 12322863
MQDQLVCHGCRNLLMYPRGASNVRCALCNTINMVPPPPPPHDMAHIICGGCRTMLMYTRGASSVRCSCCQTTNLVPAHSNQVAHAPSSQVAQINCGHCRTTLMYPYGASSVKCAVCQFVTNVNMSNGRVPLPTNRPNGTACPPSTSTSTPPSQTQTVVVENPMSVDESGKLVSNVVVGVTTDKK

SEQ ID NO: 24509 - protein, 170 aa, Arabidopsis thaliana
  peptide (1)..(170): Ceres Seq. ID no. 12322864
MYPRGASNVRCALCNTINMVPPPPPPHDMAHIICGGCRTMLMYTRGASSVRCSCCQTTNLVPAHSNQVAHAPSSQVAQINCGHCRTTLMYPYGASSVKCAVCQFVTNVNMSNGRVPLPTNRPNGTACPPSTSTSTPPSQTQTVVVENPMSVDESGKLVSNVVVGVTTDKK

SEQ ID NO: 24510 - protein, 152 aa, Arabidopsis thaliana
  peptide (1)..(152): Ceres Seq. ID no. 12322865
MVPPPPPPHDMAHIICGGCRTMLMYTRGASSVRCSCCQTTNLVPAHSNQVAHAPSSQVAQINCGHCRTTLMYPYGASSVKCAVCQFVTNVNMSNGRVPLPTNRPNGTACPPSTSTSTPPSQTQTVVVENPMSVDESGKLVSNVVVGVTTDKK

SEQ ID NO: 24511 - DNA, 1504 bp, Arabidopsis thaliana
  misc_feature (1)..(1504): Ceres Seq. ID no. 13647866
  misc_feature (1)..(1504): Ortholog of  Ceres SEQ ID NO 13596780 as cited in SEQ ID NO 62360
ggctaacttaaaaaacaaggctcgaggcggttctcttatctgcaaaactaaagactgttgtagagctcactagtcccccccccccccccccgaaaagcttaagtgagaagcagaaaaaaatggcgaaatctcagatctggtttggttttgcgttactcgcgttgcttctggtttcagccgtagctgacgatgtggttgttttgactgacgatagcttcgaaaaggaagttggtaaagataaaggagctctcgtcgagttttacgctccctggtgtggtcactgcaagaaacttgctccagagtatgaaaagctaggggcaagcttcaagaaggctaagtctgtgttgattgcaaaggttgattgtgatgagcaaaagagtgtctgtactaaatatggtgttagtggatacccaaccattcagtggtttcctaaaggatctcttgaacctcaaaagtatgagggtccacgcaatgctgaagctttggctgaatacgtgaacaaggaaggaggcaccaacgtaaaattagctgcagttccacaaaacgtggttgttttgacacctgacaatttcgatgagattgttctggatcaaaacaaagatgtcctagtcgaattttatgcaccatggtgtggccactgcaaatcactcgctcccacatacgaaaaggtagccacagtgtttaaacaggaagaaggtgtagtcatcgccaatttggatgctgatgcacacaaagcccttggcgagaaatatggagtgagtggattcccaacattgaaattcttcccaaaggacaacaaagctggtcacgattatgacggtggcagggatttagatgactttgtaagcttcatcaacgagaaatctgggaccagcagggacagtaaagggcagcttacttcaaaggctggtatagtcgaaagcttagatgctttggtaaaagagttagttgcagctagtgaagatgagaagaaggcagtgttgtctcgcatagaaaaggaagcaagtacccttaagggctccaccacgaggtatggaaagctttacttgaaactcgcaaagagctacatagaaaaaggttcagactatgctagcaaagaaacggagaggcttggacgggtgcttgggaagtcgataagtccagtgaaagctgatgaactcactctcaagagaaatatcctaaccacgttcgttgcttcttcttagaagtcatatagcttgaagctaagagaataggagtcgagagagtttataactgatactgttttgagattttatgtttgtcaagatcaagaacgtctgtggttatttctggttagttctgaaactcttttgaacccaagtttatctgtctctggtgaacaagcgaccccgataatcataaacttcattcgcgttaaaaaaaaaggttcagtaatgggccaggctcgtattcattattaatgggctaggctcgtgttcataaaaagtctgtaatgggtcattgaggtatacaaaggacatcc

SEQ ID NO: 24512 - protein, 361 aa, Arabidopsis thaliana
  peptide (1)..(361): Ceres Seq. ID no. 13647867
MAKSQIWFGFALLALLLVSAVADDVVVLTDDSFEKEVGKDKGALVEFYAPWCGHCKKLAPEYEKLGASFKKAKSVLIAKVDCDEQKSVCTKYGVSGYPTIQWFPKGSLEPQKYEGPRNAEALAEYVNKEGGTNVKLAAVPQNVVVLTPDNFDEIVLDQNKDVLVEFYAPWCGHCKSLAPTYEKVATVFKQEEGVVIANLDADAHKALGEKYGVSGFPTLKFFPKDNKAGHDYDGGRDLDDFVSFINEKSGTSRDSKGQLTSKAGIVESLDALVKELVAASEDEKKAVLSRIEKEASTLKGSTTRYGKLYLKLAKSYIEKGSDYASKETERLGRVLGKSISPVKADELTLKRNILTTFVASS

SEQ ID NO: 24513 - DNA, 468 bp, Arabidopsis thaliana
  misc_feature (1)..(468): Ceres Seq. ID no. 12337936
  misc_feature (1)..(468): Ortholog of  Ceres SEQ ID NO 14309158 as cited in SEQ ID NO 0
atagaatataaccatattccggacatgaagatcgtgacattggtactcgtcgtcttcgtcatactttcgacatcattcccggctgccatcaaagccgaagacacgggagatacaggaaatgtgggagtgacatgtgacgcaaggcagcttcagccttgccttgccgcgattacgggaggaggacaaccctcgggtgcatgttgtgcaaagcttacagagcaacagtcatgcctatgtggtttcgctaagaaccctgcgttcgcacagtacattagctctccaaacgctcgcaaagtgctccttgcttgcaatgttgcttatcccacttgttgaaacttatctagattttataaataaataaacgaaaggaaataaattacattatatcaaacgttatgatacaattcaaccgtttgtgttaatgtactggcttacatggttaaataaagtttaatttcttggttgctc

SEQ ID NO: 24514 - protein, 110 aa, Arabidopsis thaliana
  peptide (1)..(110): Ceres Seq. ID no. 12337937
IEYNHIPDMKIVTLVLVVFVILSTSFPAAIKAEDTGDTGNVGVTCDARQLQPCLAAITGGGQPSGACCAKLTEQQSCLCGFAKNPAFAQYISSPNARKVLLACNVAYPTC

SEQ ID NO: 24515 - protein, 102 aa, Arabidopsis thaliana
  peptide (1)..(102): Ceres Seq. ID no. 12337938
MKIVTLVLVVFVILSTSFPAAIKAEDTGDTGNVGVTCDARQLQPCLAAITGGGQPSGACCAKLTEQQSCLCGFAKNPAFAQYISSPNARKVLLACNVAYPTC

SEQ ID NO: 24516 - DNA, 1376 bp, Arabidopsis thaliana
  misc_feature (1)..(1376): Ceres Seq. ID no. 13490520
  misc_feature (1)..(1376): Ortholog of  Ceres SEQ ID NO 14302820 as cited in SEQ ID NO 63287
aaattgtccccaaaaaaaaaaaaaaaaagtttctagaggcttcgttagcctaattcattaactaggttctcctagtgtctgctgctaattcccaaatctcagcgaaatcaaacttctctgctctgcttagctctcagctagctgaaatctctctcaatccgtgtagcttagcttccctaatccaaccatggcaaagttcggtgaaggtgacaagagatggatcgtagaagacagacctgacggcaccaacgtccataactggcactggtccgaaaccaattgccttgaatggtctcgcaacttcttcaccaaacaattctccggcgttgatatcctctccggcgaaggtaatcttttcatcaaggtcagtaagatcgagaaagtcgaaggcgaggcttatgtgaatgtgaggaaggggaagattatccctggctacgagcttaacgtctctttatcttgggaaggtgaggctaaagattccgatgggaagacgcttttgaaagctgatggattggtcgatatgccttatatctccgatgagaatgctgatgaagatccggagattaggttttcggtgaaggatgagggaccgattgggaggactttgaaggaagcgatggtgaagaaggggaaggagattattctggagaaggttagggtttatgtggaggctatggcgagaggaggcccgtgtagggatgaattggaatcgaagaaggttgcgccgaaatcggtagcggctggatcagctacggtggcggtggagaagtctggtgctgccccggtggtgtctgctgctgcggtggagagtaaggtagttaaggagaagaagaaggcgaagactaaggaagggtttaagacaattactatgaccgagaagtttaattgcagagctagggatttgtatgagattttaatggatgagaatcgttggaaaggttttacgcagagtaatgctaagattagtaaagatgtgaatggtccgattagtgtctttgatgggtctgttactggaataaatcttgagcttgaagaaggcaaattgattgttcagaagtggagatttgggagctggcctgatggtcttgattcaacggtgaagatcgttttcgaggagcctcaaccaggagtcaccattgtcaatcttactcacactgacgttcctgaagaggacagatacgggaatgcgactgtggtggaaaacactgagagaggatggagagatcttatattccataggatccgtgcagttttcggatttggaatatgaacttatgattttgattatcaaataagttgattatgatttggaccgataaccaatgcaaaatgtatgattttaaagtttttcagttttagttaatgcatttcccttg

SEQ ID NO: 24517 - protein, 360 aa, Arabidopsis thaliana
  peptide (1)..(360): Ceres Seq. ID no. 13490521
MAKFGEGDKRWIVEDRPDGTNVHNWHWSETNCLEWSRNFFTKQFSGVDILSGEGNLFIKVSKIEKVEGEAYVNVRKGKIIPGYELNVSLSWEGEAKDSDGKTLLKADGLVDMPYISDENADEDPEIRFSVKDEGPIGRTLKEAMVKKGKEIILEKVRVYVEAMARGGPCRDELESKKVAPKSVAAGSATVAVEKSGAAPVVSAAAVESKVVKEKKKAKTKEGFKTITMTEKFNCRARDLYEILMDENRWKGFTQSNAKISKDVNGPISVFDGSVTGINLELEEGKLIVQKWRFGSWPDGLDSTVKIVFEEPQPGVTIVNLTHTDVPEEDRYGNATVVENTERGWRDLIFHRIRAVFGFGI

SEQ ID NO: 24518 - protein, 249 aa, Arabidopsis thaliana
  peptide (1)..(249): Ceres Seq. ID no. 13490522
MPYISDENADEDPEIRFSVKDEGPIGRTLKEAMVKKGKEIILEKVRVYVEAMARGGPCRDELESKKVAPKSVAAGSATVAVEKSGAAPVVSAAAVESKVVKEKKKAKTKEGFKTITMTEKFNCRARDLYEILMDENRWKGFTQSNAKISKDVNGPISVFDGSVTGINLELEEGKLIVQKWRFGSWPDGLDSTVKIVFEEPQPGVTIVNLTHTDVPEEDRYGNATVVENTERGWRDLIFHRIRAVFGFGI

SEQ ID NO: 24519 - protein, 217 aa, Arabidopsis thaliana
  peptide (1)..(217): Ceres Seq. ID no. 13490523
MVKKGKEIILEKVRVYVEAMARGGPCRDELESKKVAPKSVAAGSATVAVEKSGAAPVVSAAAVESKVVKEKKKAKTKEGFKTITMTEKFNCRARDLYEILMDENRWKGFTQSNAKISKDVNGPISVFDGSVTGINLELEEGKLIVQKWRFGSWPDGLDSTVKIVFEEPQPGVTIVNLTHTDVPEEDRYGNATVVENTERGWRDLIFHRIRAVFGFGI

SEQ ID NO: 24520 - DNA, 1086 bp, Arabidopsis thaliana
  misc_feature (1)..(1086): Ceres Seq. ID no. 12334577
  misc_feature (1)..(1086): Ortholog of  Ceres SEQ ID NO 13594193 as cited in SEQ ID NO 58558
tcctcagttcttgatcactatatcttgaaggaattaagaagatgaatggtgaggcacggtctcgagtagtcgaccaagaagctggttcaactccatctactttgagagatgaagatcatccgtcgagacaaaggcttttcggatgtctcccttatgatatagatctcaatcccctacgcattgtaatggcggaattggtggggacattcattctaatgttcagtgtgtgtggggtcataagcagtacccaattatccggcggccacgtgggattgctagagtacgccgtcaccgctggattatctgtggtggtcgtagtttactccatcggacacatctctggcgcccatcttaacccttccatcaccattgctttcgctgtctttggcggattcccgtggtctcaggttccgttgtatataacggcgcaaacattgggggcaacggcggcaacattagttggggtgtcagtgtacggagtaaacgctgacattatggcaacaaaacctgctttaagctgcgtttctgcatttttcgttgaactcatagctacgagcatcgtcgtgtttctcgcctccgcgttgcattgtggtcctcatcaaaatttgggtaacttgacggggttcgtgattggaacagtcatttcccttggagtgcttattaccggaccgatttcaggaggatcgatgaacccagctcgatcacttggaccggcggtggtggcatgggattttgaagacttatggatttacatgacagctccggtgatcggagccataatcggagttttgacatacagatcaattagcctaaaaaccaggccttgcccttctccagtttccccttccgtttcttcatttttacgttaatcacttcaaaacctaatatctattatacaaataaacacttttgattttttttcttggttaaggtttttaagtttttgtcattacgtcattagatgccgtgatgcgaaaacagagagctacttatcggattgaagatatagagggtaaagcaaatgaaaacagggggcattttgttctttttacacaatgaaatgaacgcaattaaaaatctttagtc

SEQ ID NO: 24521 - protein, 275 aa, Arabidopsis thaliana
  peptide (1)..(275): Ceres Seq. ID no. 12334578
MNGEARSRVVDQEAGSTPSTLRDEDHPSRQRLFGCLPYDIDLNPLRIVMAELVGTFILMFSVCGVISSTQLSGGHVGLLEYAVTAGLSVVVVVYSIGHISGAHLNPSITIAFAVFGGFPWSQVPLYITAQTLGATAATLVGVSVYGVNADIMATKPALSCVSAFFVELIATSIVVFLASALHCGPHQNLGNLTGFVIGTVISLGVLITGPISGGSMNPARSLGPAVVAWDFEDLWIYMTAPVIGAIIGVLTYRSISLKTRPCPSPVSPSVSSFLR

SEQ ID NO: 24522 - protein, 227 aa, Arabidopsis thaliana
  peptide (1)..(227): Ceres Seq. ID no. 12334579
MAELVGTFILMFSVCGVISSTQLSGGHVGLLEYAVTAGLSVVVVVYSIGHISGAHLNPSITIAFAVFGGFPWSQVPLYITAQTLGATAATLVGVSVYGVNADIMATKPALSCVSAFFVELIATSIVVFLASALHCGPHQNLGNLTGFVIGTVISLGVLITGPISGGSMNPARSLGPAVVAWDFEDLWIYMTAPVIGAIIGVLTYRSISLKTRPCPSPVSPSVSSFLR

SEQ ID NO: 24523 - protein, 217 aa, Arabidopsis thaliana
  peptide (1)..(217): Ceres Seq. ID no. 12334580
MFSVCGVISSTQLSGGHVGLLEYAVTAGLSVVVVVYSIGHISGAHLNPSITIAFAVFGGFPWSQVPLYITAQTLGATAATLVGVSVYGVNADIMATKPALSCVSAFFVELIATSIVVFLASALHCGPHQNLGNLTGFVIGTVISLGVLITGPISGGSMNPARSLGPAVVAWDFEDLWIYMTAPVIGAIIGVLTYRSISLKTRPCPSPVSPSVSSFLR

SEQ ID NO: 24524 - DNA, 973 bp, Arabidopsis thaliana
  misc_feature (1)..(973): Ceres Seq. ID no. 13499864
  misc_feature (1)..(973): Ortholog of  Ceres SEQ ID NO 15225572 as cited in SEQ ID NO 61651
ccctgtttgcacatcactcttctcagtcctcacgcatcgtatcagagaaaatgagctcccaaatctgcagatctgcttctagagcagccaggtctcttctttcttcagccaagaatgctcgtttcttctccgaaggccgagccattggtgcagcaagtgtggtgcatgcgactggaaaagtccctcagtatgcatccaactttggaaaatcgggttctggcttcgtctctaatagctggatcaccggactccttgctcttcctgctgcagccttcatgctccaagatcaggaagcacttgctgcagagatggaacgcactttcatcgctatcaaacctgatggagtgcagcgaggactgatatcagaaatcattacacggttcgaacgcaaaggatacaagcttgttggcattaaagtcatggttccttcaaagggtttcgcgcagaagcattaccatgatctaaaggagagacctttcttcaacggcttgtgtaacttccttagctcaggccctgttgttgccatggtatgggaaggtgaaggagtgattagatacggacgtaaactgattggagccactgatcctcagaaatcagaacctggaactatccgaggcgatctcgctgttgttgttggaaggaacattatacatggaagcgatggaccagagacagctaaagacgagatcagcttgtggtttaagcctgaagaactcgtttcttacactagtaacgctgagaagtggatctacggccagaactgaactattccctctttctcccttattttcaaccgttagatcagacataaataattacttcttttgttttttcttttacccaaacactgaaaacgtaccgggaataacaaatttactgcatttgttatcaagtttgttctaatagacccaatgaaattaggccacgtgtgcgatcatgtaaccggtttaccgtaatgtggacttgaaatccc

SEQ ID NO: 24525 - protein, 253 aa, Arabidopsis thaliana
  peptide (1)..(253): Ceres Seq. ID no. 13499865
LFAHHSSQSSRIVSEKMSSQICRSASRAARSLLSSAKNARFFSEGRAIGAASVVHATGKVPQYASNFGKSGSGFVSNSWITGLLALPAAAFMLQDQEALAAEMERTFIAIKPDGVQRGLISEIITRFERKGYKLVGIKVMVPSKGFAQKHYHDLKERPFFNGLCNFLSSGPVVAMVWEGEGVIRYGRKLIGATDPQKSEPGTIRGDLAVVVGRNIIHGSDGPETAKDEISLWFKPEELVSYTSNAEKWIYGQN

SEQ ID NO: 24526 - protein, 237 aa, Arabidopsis thaliana
  peptide (1)..(237): Ceres Seq. ID no. 13499866
MSSQICRSASRAARSLLSSAKNARFFSEGRAIGAASVVHATGKVPQYASNFGKSGSGFVSNSWITGLLALPAAAFMLQDQEALAAEMERTFIAIKPDGVQRGLISEIITRFERKGYKLVGIKVMVPSKGFAQKHYHDLKERPFFNGLCNFLSSGPVVAMVWEGEGVIRYGRKLIGATDPQKSEPGTIRGDLAVVVGRNIIHGSDGPETAKDEISLWFKPEELVSYTSNAEKWIYGQN

SEQ ID NO: 24527 - protein, 162 aa, Arabidopsis thaliana
  peptide (1)..(162): Ceres Seq. ID no. 13499867
MLQDQEALAAEMERTFIAIKPDGVQRGLISEIITRFERKGYKLVGIKVMVPSKGFAQKHYHDLKERPFFNGLCNFLSSGPVVAMVWEGEGVIRYGRKLIGATDPQKSEPGTIRGDLAVVVGRNIIHGSDGPETAKDEISLWFKPEELVSYTSNAEKWIYGQN

SEQ ID NO: 24528 - DNA, 684 bp, Arabidopsis thaliana
  misc_feature (1)..(684): Ceres Seq. ID no. 12332058
  misc_feature (1)..(684): Ortholog of  Ceres SEQ ID NO 14314198 as cited in SEQ ID NO 57472
  misc_feature (1)..(684): Ortholog of  Ceres SEQ ID NO 15174264 as cited in SEQ ID NO 61877
atcttcttcatcatcatcaatcacaaaaatccaaatcccaaaactttcccgagaaaactaaaaaaatggcaccaaaagccggaaagaaaccagcagagaaaaagcccgcagagaaagctccagcagaagaagagaaagtagccgaaaaagcaccagcagagaagaaaccaaaagccggaaaaaaactaccaaaagaagcagtcaccggaggagtcgagaagaagaagaaacgagtcaagaaaagcacagagacatacaagatctacatcttcaaggtgttgaaacaagttcatccagatattggaatctcaagtaaagctatggggattatgaacagttttatcaatgatatattcgagaaacttgcgcaagaagcttcaaaattagctaggtataataagaaacctacgattacttctagggagattcagacagctgttagactagtgttacctggtgaacttgctaagcatgctgtttctgaaggaactaaggctgttactaagtttactagctcttaggtttagccgtttaggtttcgaatcttggttcgttttgatatggaatctgatggtttttatgtaatttgttgaagattgtaatggtgttaatgttttctttttaatttggattttgtgtttagtgacttgggattctacaagaagtttgatatttatgaatgtt

SEQ ID NO: 24529 - protein, 172 aa, Arabidopsis thaliana
  peptide (1)..(172): Ceres Seq. ID no. 12332059
LLHHHQSQKSKSQNFPEKTKKMAPKAGKKPAEKKPAEKAPAEEEKVAEKAPAEKKPKAGKKLPKEAVTGGVEKKKKRVKKSTETYKIYIFKVLKQVHPDIGISSKAMGIMNSFINDIFEKLAQEASKLARYNKKPTITSREIQTAVRLVLPGELAKHAVSEGTKAVTKFTSS

SEQ ID NO: 24530 - protein, 151 aa, Arabidopsis thaliana
  peptide (1)..(151): Ceres Seq. ID no. 12332060
MAPKAGKKPAEKKPAEKAPAEEEKVAEKAPAEKKPKAGKKLPKEAVTGGVEKKKKRVKKSTETYKIYIFKVLKQVHPDIGISSKAMGIMNSFINDIFEKLAQEASKLARYNKKPTITSREIQTAVRLVLPGELAKHAVSEGTKAVTKFTSS

SEQ ID NO: 24531 - DNA, 1280 bp, Arabidopsis thaliana
  misc_feature (1)..(1280): Ceres Seq. ID no. 13492384
  misc_feature (1)..(1280): Ortholog of  Ceres SEQ ID NO 15177854 as cited in SEQ ID NO 51851
  misc_feature (1)..(1280): Ortholog of  Ceres SEQ ID NO 15177087 as cited in SEQ ID NO 51932
  misc_feature (1)..(1280): Ortholog of  Ceres SEQ ID NO 13662937 as cited in SEQ ID NO 64415
  misc_feature (1)..(1280): Ortholog of  Ceres SEQ ID NO 13595984 as cited in SEQ ID NO 68340
  misc_feature (1)..(1280): Ortholog of  Ceres SEQ ID NO 12635014 as cited in SEQ ID NO 0
acaattcagggaaaatcttcaaagtgtttgcagagaaatctaaattcatcaacagttttttacaaaagaaatggaaaacggagaagcaaaacagagtgtacctcttctcactccctataagatgggaagattcaatctttcccatagggttgttctagcaccattgacgagacagagatcgtacggaaacgttcctcagcctcacgctgccatatattactctcagagaacgactccaggaggttttctcatcactgaagccactggagtttcagatacagctcaaggatatcaagatactcctgggatatggactaaagagcatgtggaggcatggaagccaatcgttgatgctgtacatgccaaaggtggtatcttcttctgtcagatctggcatgttggccgcgtttctaatagcgggtttcagccaaatggaaaagctcctatctcttgttcggataagccattgatgcctcaaattcgctctaatggcatcgatgaagctctctttacccctccaagacggcttggtatcgaagaaatccccggcattgtcaatgattttaggcttgctgcaagaaatgctatggaagctggttttgatggagttgagattcatggagctaatggctatctgattgaccagttcatgaaggatacggtgaatgatagaactgatgaatacggtggatcattgcaaaaccgttgcaaatttcctctagaaatagtcgatgcagttgctaaggagatcggaccagaccgtgttggaatcaggctctctccatttgctgactacatggaatctggagacactaatccaggagcattagggctttatatggcggaatctttgaacaaatacggaatcctctactgtcatgtgattgaagcgagaatgaaaacaatgggagaagtacatgcttgtcctcacacactaatgccgatgaggaaagcgtttaaggggacttttatctccgcaggaggtttcacgagggaagatgggaatgaggctgtgtcaaagggaagaactgatttggtggcttatggtcgatggtttctagccaacccggacctgccaaagaggttccaagtggatgcaccgctgaataagtacgatagaccaacgttttacacttctgatccagtcgtcggttacaccgattaccctttcctcgaatcaacagcttaaaattgttatcaataatgtaatgtagtgtgtttcccttatataagatgtaataagtttctggcttttcatttatactttttaagtttaagcc

SEQ ID NO: 24532 - protein, 372 aa, Arabidopsis thaliana
  peptide (1)..(372): Ceres Seq. ID no. 13492385
MENGEAKQSVPLLTPYKMGRFNLSHRVVLAPLTRQRSYGNVPQPHAAIYYSQRTTPGGFLITEATGVSDTAQGYQDTPGIWTKEHVEAWKPIVDAVHAKGGIFFCQIWHVGRVSNSGFQPNGKAPISCSDKPLMPQIRSNGIDEALFTPPRRLGIEEIPGIVNDFRLAARNAMEAGFDGVEIHGANGYLIDQFMKDTVNDRTDEYGGSLQNRCKFPLEIVDAVAKEIGPDRVGIRLSPFADYMESGDTNPGALGLYMAESLNKYGILYCHVIEARMKTMGEVHACPHTLMPMRKAFKGTFISAGGFTREDGNEAVSKGRTDLVAYGRWFLANPDLPKRFQVDAPLNKYDRPTFYTSDPVVGYTDYPFLESTA

SEQ ID NO: 24533 - protein, 355 aa, Arabidopsis thaliana
  peptide (1)..(355): Ceres Seq. ID no. 13492386
MGRFNLSHRVVLAPLTRQRSYGNVPQPHAAIYYSQRTTPGGFLITEATGVSDTAQGYQDTPGIWTKEHVEAWKPIVDAVHAKGGIFFCQIWHVGRVSNSGFQPNGKAPISCSDKPLMPQIRSNGIDEALFTPPRRLGIEEIPGIVNDFRLAARNAMEAGFDGVEIHGANGYLIDQFMKDTVNDRTDEYGGSLQNRCKFPLEIVDAVAKEIGPDRVGIRLSPFADYMESGDTNPGALGLYMAESLNKYGILYCHVIEARMKTMGEVHACPHTLMPMRKAFKGTFISAGGFTREDGNEAVSKGRTDLVAYGRWFLANPDLPKRFQVDAPLNKYDRPTFYTSDPVVGYTDYPFLESTA

SEQ ID NO: 24534 - protein, 239 aa, Arabidopsis thaliana
  peptide (1)..(239): Ceres Seq. ID no. 13492387
MPQIRSNGIDEALFTPPRRLGIEEIPGIVNDFRLAARNAMEAGFDGVEIHGANGYLIDQFMKDTVNDRTDEYGGSLQNRCKFPLEIVDAVAKEIGPDRVGIRLSPFADYMESGDTNPGALGLYMAESLNKYGILYCHVIEARMKTMGEVHACPHTLMPMRKAFKGTFISAGGFTREDGNEAVSKGRTDLVAYGRWFLANPDLPKRFQVDAPLNKYDRPTFYTSDPVVGYTDYPFLESTA

SEQ ID NO: 24535 - DNA, 1869 bp, Arabidopsis thaliana
  misc_feature (1)..(1869): Ceres Seq. ID no. 12439756
  misc_feature (1)..(1869): Ortholog of  Ceres SEQ ID NO 13582619 as cited in SEQ ID NO 56520
  misc_feature (1)..(1869): Ortholog of  Ceres SEQ ID NO 13660872 as cited in SEQ ID NO 60830
  misc_feature (1)..(1869): Ortholog of  Ceres SEQ ID NO 12616221 as cited in SEQ ID NO 63291
attatttcgaaatcattgttttgctctttcttttgattcgaattcgacagaacagctcttttaagttattcataaaccttgtgtttgagttttggtccatcgagtatatgggtcgtggctcagtaacatcgctcgctcctgggtttcgttttcatcccacagacgaagaactcgttcgttactatctgaaacgaaagatctgcaataaaccttttaagttcgatgctatctctgttaccgatgtatacaaatctgagccttgggatctcccagacaagtcgaggctgaaaagtagagacttggagtggtacttcttcagtatgcttgataagaagtatagaaatggatcaaagacgaatcgtgcgactgagatgggatattggaagactacagggaaagatcgagagattcttaatggttcaaaagtcgttgggatgaagaagactcttgtttatcacaaaggtcgagctcctcgtggcgaaagaaccaattgggttatgcatgagtatcggttggttgatcaagaccttgataaaactggtgttcaccaagatgcgtttgtgctttgtaggatttttcagaagagtggctccggacctaaaaatggagagcagtacggtgctccgtttgttgaggaggagtgggaggaggaggatgatatgacatttgtacctgaccaagaagatcttggaagtgaagatcatgtttatgtccatatggatgacattgatcagaagtctgaaaactttgtggtctatgatgccattcctattccgttaaactttattcacggggagtcgagcaataatgttgaaacaaactactcagactccataaactatatacaacaaacaggaaactatatggactctggtggctactttgagcaaccagcagaatcttatgagaaagatcagaagcctatcatccgtgaccgtgatggtagccttcaaaatgaaggaattggatgtggggtccaggacaagcactcggaaactttgcaatcttctgacaacatctttgggactgatacatcatgctacaatgattttccagttgagagcaactatttgattggtgaggcgtttctggatccgaacagtaatcttctggagaatgatggtctgtacctggaaacaaatgatctcagtagtactcagcaagatggtttcgactttgaagattatcttaccttctttgatgaaacttttgatccttcgcaactgatgggaaatgaagatgtttttttcgatcaagaagagctctttcaagaggttgagactaaggaactagagaaagaggagacttcaagaagcaaacatgtggtggaagaaaaggaaaaggatgaagcatcttgttcaaaacaagttgatgcagatgcaacagagtttgagccagattacaagtacccgttactaaagaaggcaagccacatgttgggtgctattcctgctccgcttgcaaatgcttctgagttccctacaaaggatgcagctatccggttacacgcagcacaatcatcaggttcagttcatgtaaccgcaggtatgatcacgatatcagacagcaacatgggctggtcatacggcaaaaacgagaaccttgacttgatcctttctttggggttggtccaagggaataccgcccccgaaaaatcagggaatagttcagcatgggcaatgttaatattcatgtgtttctgggttcttctactctcagttagtttcaaagtgagcattttggtctcttccaggtgataggtaaccctttcttgttcaaacaagacttttgtgtttgtacattgatatagatgaacttgcagtgttcaatgttttattctctaataatattgaataaaccccatattct

SEQ ID NO: 24536 - protein, 584 aa, Arabidopsis thaliana
  peptide (1)..(584): Ceres Seq. ID no. 12439757
YFEIIVLLFLLIRIRQNSSFKLFINLVFEFWSIEYMGRGSVTSLAPGFRFHPTDEELVRYYLKRKICNKPFKFDAISVTDVYKSEPWDLPDKSRLKSRDLEWYFFSMLDKKYRNGSKTNRATEMGYWKTTGKDREILNGSKVVGMKKTLVYHKGRAPRGERTNWVMHEYRLVDQDLDKTGVHQDAFVLCRIFQKSGSGPKNGEQYGAPFVEEEWEEEDDMTFVPDQEDLGSEDHVYVHMDDIDQKSENFVVYDAIPIPLNFIHGESSNNVETNYSDSINYIQQTGNYMDSGGYFEQPAESYEKDQKPIIRDRDGSLQNEGIGCGVQDKHSETLQSSDNIFGTDTSCYNDFPVESNYLIGEAFLDPNSNLLENDGLYLETNDLSSTQQDGFDFEDYLTFFDETFDPSQLMGNEDVFFDQEELFQEVETKELEKEETSRSKHVVEEKEKDEASCSKQVDADATEFEPDYKYPLLKKASHMLGAIPAPLANASEFPTKDAAIRLHAAQSSGSVHVTAGMITISDSNMGWSYGKNENLDLILSLGLVQGNTAPEKSGNSSAWAMLIFMCFWVLLLSVSFKVSILVSSR

SEQ ID NO: 24537 - protein, 549 aa, Arabidopsis thaliana
  peptide (1)..(549): Ceres Seq. ID no. 12439758
MGRGSVTSLAPGFRFHPTDEELVRYYLKRKICNKPFKFDAISVTDVYKSEPWDLPDKSRLKSRDLEWYFFSMLDKKYRNGSKTNRATEMGYWKTTGKDREILNGSKVVGMKKTLVYHKGRAPRGERTNWVMHEYRLVDQDLDKTGVHQDAFVLCRIFQKSGSGPKNGEQYGAPFVEEEWEEEDDMTFVPDQEDLGSEDHVYVHMDDIDQKSENFVVYDAIPIPLNFIHGESSNNVETNYSDSINYIQQTGNYMDSGGYFEQPAESYEKDQKPIIRDRDGSLQNEGIGCGVQDKHSETLQSSDNIFGTDTSCYNDFPVESNYLIGEAFLDPNSNLLENDGLYLETNDLSSTQQDGFDFEDYLTFFDETFDPSQLMGNEDVFFDQEELFQEVETKELEKEETSRSKHVVEEKEKDEASCSKQVDADATEFEPDYKYPLLKKASHMLGAIPAPLANASEFPTKDAAIRLHAAQSSGSVHVTAGMITISDSNMGWSYGKNENLDLILSLGLVQGNTAPEKSGNSSAWAMLIFMCFWVLLLSVSFKVSILVSSR

SEQ ID NO: 24538 - protein, 478 aa, Arabidopsis thaliana
  peptide (1)..(478): Ceres Seq. ID no. 12439759
MLDKKYRNGSKTNRATEMGYWKTTGKDREILNGSKVVGMKKTLVYHKGRAPRGERTNWVMHEYRLVDQDLDKTGVHQDAFVLCRIFQKSGSGPKNGEQYGAPFVEEEWEEEDDMTFVPDQEDLGSEDHVYVHMDDIDQKSENFVVYDAIPIPLNFIHGESSNNVETNYSDSINYIQQTGNYMDSGGYFEQPAESYEKDQKPIIRDRDGSLQNEGIGCGVQDKHSETLQSSDNIFGTDTSCYNDFPVESNYLIGEAFLDPNSNLLENDGLYLETNDLSSTQQDGFDFEDYLTFFDETFDPSQLMGNEDVFFDQEELFQEVETKELEKEETSRSKHVVEEKEKDEASCSKQVDADATEFEPDYKYPLLKKASHMLGAIPAPLANASEFPTKDAAIRLHAAQSSGSVHVTAGMITISDSNMGWSYGKNENLDLILSLGLVQGNTAPEKSGNSSAWAMLIFMCFWVLLLSVSFKVSILVSSR

SEQ ID NO: 24539 - DNA, 1304 bp, Arabidopsis thaliana; identical to SEQ ID NO: 24322
  misc_feature (1)..(1304): Ceres Seq. ID no. 13575209
  misc_feature (1)..(1304): Ortholog of  Ceres SEQ ID NO 13597033 as cited in SEQ ID NO 63479

SEQ ID NO: 24540 - protein, 359 aa, Arabidopsis thaliana; identical to SEQ ID NO: 24323
  peptide (1)..(359): Ceres Seq. ID no. 13575210

SEQ ID NO: 24541 - protein, 309 aa, Arabidopsis thaliana; identical to SEQ ID NO: 24324
  peptide (1)..(309): Ceres Seq. ID no. 13575211

SEQ ID NO: 24542 - DNA, 1152 bp, Arabidopsis thaliana
  misc_feature (1)..(1152): Ceres Seq. ID no. 12328034
  misc_feature (1)..(1152): Ortholog of  Ceres SEQ ID NO 14311579 as cited in SEQ ID NO 51717
tcgccgcaaaatttgttctccggaagagaatggattttcttaaggcaacgattatagttgccctaatttgcaatttcgcctcactggcgtcttctgttcctttcatagttctgcatggaattggggataaatgcagtaatgcaggagtgacacaattcacagagcttttaagcgattggtctggttctcaaggatattgcttggagattgggaatggctcatgggactcatggactatgcctctccttgatcagacatcagttgtttgtgagaaggtgaaaagtatgccagagcttagtgacggttacagcattgtggggctttctcagggtaacatgattggtcgagctctcattgagttttgcgatggagcaccacctgttaagagttttgtttcggtagcgggtcctcatgctggcactgcatcgattccgttccgtggtgctacctggatttgcatcatgttggacagtatgatcaaagcagagatctatagcgactatatgcaggaacatttggctcctagcggttttctcaaaatcccaactgacatagcgggttacatggaaggctgtaggtttctcccaaagctaaacaacgaacttccagtcaaaaactcgacttataaggagaggttctcgagtttggagaatcttgtgcttattatgtttgagcatgacacaatattgatacctaaagaaacctcatggtttggatattatcctgatgggtctttcaagaccattcttccgccgcaagagaccaagctatatactgaagactggattggtttgagaaccttagatgaagctggaaaagtgaagttcgttaacgtctctggaaatcatcttcagatatctcatacagacatgaagaagcatatagtgccatacctctgtgataaatcatcgtcgtcatcatccacaacaatggcagtttccggatcatcttcctcacaccagtggcttccaagtgtagggaacattattatggatcttattggtccagaagtggatcaggcttcagcttgtgctacgtcatgtgtaaatctgatgtcctgtgttgttgtttgttctcttactaaacacgatcgtctcgtgatatgtttgtaacttgaagataaaacaagaaaactgttccaaaatccctctc

SEQ ID NO: 24543 - protein, 369 aa, Arabidopsis thaliana
  peptide (1)..(369): Ceres Seq. ID no. 12328035
AAKFVLRKRMDFLKATIIVALICNFASLASSVPFIVLHGIGDKCSNAGVTQFTELLSDWSGSQGYCLEIGNGSWDSWTMPLLDQTSVVCEKVKSMPELSDGYSIVGLSQGNMIGRALIEFCDGAPPVKSFVSVAGPHAGTASIPFRGATWICIMLDSMIKAEIYSDYMQEHLAPSGFLKIPTDIAGYMEGCRFLPKLNNELPVKNSTYKERFSSLENLVLIMFEHDTILIPKETSWFGYYPDGSFKTILPPQETKLYTEDWIGLRTLDEAGKVKFVNVSGNHLQISHTDMKKHIVPYLCDKSSSSSSTTMAVSGSSSSHQWLPSVGNIIMDLIGPEVDQASACATSCVNLMSCVVVCSLTKHDRLVICL

SEQ ID NO: 24544 - protein, 360 aa, Arabidopsis thaliana
  peptide (1)..(360): Ceres Seq. ID no. 12328036
MDFLKATIIVALICNFASLASSVPFIVLHGIGDKCSNAGVTQFTELLSDWSGSQGYCLEIGNGSWDSWTMPLLDQTSVVCEKVKSMPELSDGYSIVGLSQGNMIGRALIEFCDGAPPVKSFVSVAGPHAGTASIPFRGATWICIMLDSMIKAEIYSDYMQEHLAPSGFLKIPTDIAGYMEGCRFLPKLNNELPVKNSTYKERFSSLENLVLIMFEHDTILIPKETSWFGYYPDGSFKTILPPQETKLYTEDWIGLRTLDEAGKVKFVNVSGNHLQISHTDMKKHIVPYLCDKSSSSSSTTMAVSGSSSSHQWLPSVGNIIMDLIGPEVDQASACATSCVNLMSCVVVCSLTKHDRLVICL

SEQ ID NO: 24545 - protein, 291 aa, Arabidopsis thaliana
  peptide (1)..(291): Ceres Seq. ID no. 12328037
MPLLDQTSVVCEKVKSMPELSDGYSIVGLSQGNMIGRALIEFCDGAPPVKSFVSVAGPHAGTASIPFRGATWICIMLDSMIKAEIYSDYMQEHLAPSGFLKIPTDIAGYMEGCRFLPKLNNELPVKNSTYKERFSSLENLVLIMFEHDTILIPKETSWFGYYPDGSFKTILPPQETKLYTEDWIGLRTLDEAGKVKFVNVSGNHLQISHTDMKKHIVPYLCDKSSSSSSTTMAVSGSSSSHQWLPSVGNIIMDLIGPEVDQASACATSCVNLMSCVVVCSLTKHDRLVICL

SEQ ID NO: 24546 - DNA, 1123 bp, Arabidopsis thaliana
  misc_feature (1)..(1123): Ceres Seq. ID no. 12396474
  misc_feature (1)..(1123): Ortholog of  Ceres SEQ ID NO 12625805 as cited in SEQ ID NO 65246
gcttagagagaaagaagaacaaacaaaacaatcattggaagaagcaaaagaaaaaaaaaagattgaaatggagaagaagctaccgagaagattggaaggcaaagtcgcgattgtgacggcttcgacgcaagggattggtttcggaatcactgagcgtttcggtctcgaaggcgcttccgtcgtcgtctcttcccgcaaacaggcaaatgttgatgaggcagtagcaaaactcaaatccaaagggattgatgcatatggaatcgtctgtcatgtttccaatgctcaacatcgccgcaatcttgtcgaaaagacggttcagaaatatgggaagatagatatcgttgtctgtaacgctgctgccaatccatctacagacccaatcttgtctagcaaagaagctgttcttgacaagctttgggaaatcaatgtcaaatcctctatacttctcctgcaggatatggctcctcaccttgagaagggttcttctgttatcttcataacttctattgctggattttcaccacaaggagctatggctatgtatggtgtcactaaaactgctcttctcggactaactaaggcgcttgctgctgagatggcccccgatacacgtgtgaacgcagttgcacccggttttgtgcccacacactttgcttctttcatcaccggtagctctgaagtgagggaaggtattgaagagaagactctgcttaacaggttgggaacaacgggagacatggctgctgcggctgctttcttagcatcagatgattcttcttacatcactggagaaactttggttgtcgctggaggaatgccttcaagactctaaacaatttcacatcaataatagcgtaaagaatgcaatcagggtatcaagtaagtagagatgttttttttagagttttcaactaaacaagactttaagaaacgaaagatgttccaataatatcacgaggccattggatacttgttggtcttgtaaaagataatttcttcatcagaaagactcgtttgggtttaattcagtggtagaacaataaagtttgggtttcgcatgtatgtgtatatgtaacaactagggttttattgtttgtgtaggtttacttctgtgtttatgttt

SEQ ID NO: 24547 - protein, 276 aa, Arabidopsis thaliana
  peptide (1)..(276): Ceres Seq. ID no. 12396475
LREKEEQTKQSLEEAKEKKKIEMEKKLPRRLEGKVAIVTASTQGIGFGITERFGLEGASVVVSSRKQANVDEAVAKLKSKGIDAYGIVCHVSNAQHRRNLVEKTVQKYGKIDIVVCNAAANPSTDPILSSKEAVLDKLWEINVKSSILLLQDMAPHLEKGSSVIFITSIAGFSPQGAMAMYGVTKTALLGLTKALAAEMAPDTRVNAVAPGFVPTHFASFITGSSEVREGIEEKTLLNRLGTTGDMAAAAAFLASDDSSYITGETLVVAGGMPSRL

SEQ ID NO: 24548 - protein, 254 aa, Arabidopsis thaliana
  peptide (1)..(254): Ceres Seq. ID no. 12396476
MEKKLPRRLEGKVAIVTASTQGIGFGITERFGLEGASVVVSSRKQANVDEAVAKLKSKGIDAYGIVCHVSNAQHRRNLVEKTVQKYGKIDIVVCNAAANPSTDPILSSKEAVLDKLWEINVKSSILLLQDMAPHLEKGSSVIFITSIAGFSPQGAMAMYGVTKTALLGLTKALAAEMAPDTRVNAVAPGFVPTHFASFITGSSEVREGIEEKTLLNRLGTTGDMAAAAAFLASDDSSYITGETLVVAGGMPSRL

SEQ ID NO: 24549 - DNA, 1182 bp, Arabidopsis thaliana
  misc_feature (1)..(1182): Ceres Seq. ID no. 12738964
  misc_feature (1)..(1182): Ortholog of  Ceres SEQ ID NO 12484482 as cited in SEQ ID NO 53324
  misc_feature (1)..(1182): Ortholog of  Ceres SEQ ID NO 15176234 as cited in SEQ ID NO 54949
  misc_feature (1)..(1182): Ortholog of  Ceres SEQ ID NO 14314507 as cited in SEQ ID NO 59337
aacatacacaaaacactaaaagtagaagaaaaatggcgactcttaaggtttctgattctgttcctgctccttctgatgatgctgagcaattgagaaccgctttgatggggtacaaacgaggacttgatcatatcaatcttggctcacagaagtgctgaacagaggaaagtgatcaggcaagcataccatgaaacctacggtgaagaccttctcaagactcttgacaaggagctctctaacgacttcgagagagctatcttgttgtggactcttgaacccggtgagcgtgatgctttattggctaatgaagctacaaaaagatggacttcaagcaaccaagtgcttatggaagtagcttgcacaaggacatcaacgcagctgcttcacgcgaggcaagcttaccatgctcgctacaagaagtctcttgaagaggacgtggctcaccacactaccggtgacttcagaaagcttttggtctctcttgttacctcatacaggtacgaaggagatgaagtgaacatgacattggctaagcaagaagctaagctggtccatgagaaaatcaaggacaagcactacaatgatgaggatgttattagaatcttgtccacaagaagcaaagctcagatcaatgctacttttaaccgttaccaagatgatcatggcgaggaaattctcaagagtcttgaggaaggagatgatgatgacaagttccttgcacttttgaggtcaaccattcagtgcttgacaagaccagagctttactttgtcgatgttcttcgttcagcaatcaacaaaactggaactgatgaaggagcactcactagaattgtgaccacaagagctgagattgacttgaaggtcattggagaggagtaccagcgcaggaacagcattcctttggagaaagctattaccaaagacactcgtggagattacgagaagatgctcgtcgcacttctcggtgaagatgatgcttaatcaatcaatcctccacagagaaacataagctgctctacagcttctgttatctcttatctccctctctctctctttgatgagtttcaaatcgtttgattttgtttctacaaaaaccttgtttgtttctgttgtgtgttttgagttcctaaataatgcaaaagagagagacagagagaaccagtgtggtctcttaagttatat

SEQ ID NO: 24550 - protein, 211 aa, Arabidopsis thaliana
  peptide (1)..(211): Ceres Seq. ID no. 12738965
MEVACTRTSTQLLHARQAYHARYKKSLEEDVAHHTTGDFRKLLVSLVTSYRYEGDEVNMTLAKQEAKLVHEKIKDKHYNDEDVIRILSTRSKAQINATFNRYQDDHGEEILKSLEEGDDDDKFLALLRSTIQCLTRPELYFVDVLRSAINKTGTDEGALTRIVTTRAEIDLKVIGEEYQRRNSIPLEKAITKDTRGDYEKMLVALLGEDDA

SEQ ID NO: 24551 - protein, 153 aa, Arabidopsis thaliana
  peptide (1)..(153): Ceres Seq. ID no. 12738966
MTLAKQEAKLVHEKIKDKHYNDEDVIRILSTRSKAQINATFNRYQDDHGEEILKSLEEGDDDDKFLALLRSTIQCLTRPELYFVDVLRSAINKTGTDEGALTRIVTTRAEIDLKVIGEEYQRRNSIPLEKAITKDTRGDYEKMLVALLGEDDA

SEQ ID NO: 24552 - DNA, 1564 bp, Arabidopsis thaliana
  misc_feature (1)..(1564): Ceres Seq. ID no. 12439795
  misc_feature (1)..(1564): Ortholog of  Ceres SEQ ID NO 14311961 as cited in SEQ ID NO 51512
agtgttcaccattttttatttttctccacaaacccaatctttctacaatggttctcttcttctccactcgttttctcttcttctccatcttcttcccttgcctcatctctatcactctctaccaactcgactcattcgagccagcttcacttcccgcggactcactcatcacctctcccacttcaatcccgccacttctcaacgacagatttctcaccggagctgagtttatcggcgtcggtcttctcaataaccccgaggatatcgcctaccataaggactctaatctcatctatactggttgtgttgatggatgggtgaaacgagtcagtgttcacgactcagctaatgactcaatcgtagaggattgggtcaataccggtggtagacctctcggtatcgcttttggacttcacggcgaagtcattgtcgccgacgcaaacaagggattgttgagtataagcgatggcgggaagaagacggaattgttgacggatgaagcagacggtgttagatttaagctgacggatgcagttaccgttgctgataacggcgttttgtatttcacagatgcttcttcgaaatacgatttctatcaatttatctttgatttcttggaaggcaaaccacacggtcgtgtcatgagctttgatcctaccacacgtgccacacgtgttcttctcaaagacctctacttcgctaatggcatatcaatgtcccctgatcaaacacatttcgtcttctgcgaaaccatcatgagaagatgcagtaagtattatattagtgaggagcgtgttgaggtatttattcagggcttaccaggttatccagataacattcggtacgacggagatggacattactggattgcattgatttcggaagtaacaacgtcatggaaactctcgatgaaataccttttcttgaggaaactcatatacatggcggctaagtatggcgtggaactactgtctataaagaatgcagccgttttgcaagtggatttggatgggaatcctatcgcaatgtaccatgatcatccattctctcacataacaagcggagtcaagattgggaaccatctctattttgggagcctcttgcattcctacattactagactcgatcttttaaagtatcccgcacaaaagaagctttaaacatcaagtttaggagtattcactgtcacaaaatgtaaagtcttcgtccctggcacatcatcatgtccttttgtcttcgtccctggcacatcatgtacggttgttgtaaggtcgagttttggtgttaaggtgttgttagtttataatctttgtgaatatggttagcttcttggtgcattgcaaggttaggtgaggtgaatagaggtggcgaataggttttagtggtttcacttttcgttgagctagtgtattagtccatgtttgctcgttcgttttgcgttagttttcggagaagctataagcttctatctggaggttttgtggacggtgttgttctcggaaaactaaagtatagcagaagattgcaaaatacttcgatggtttattgatatgaattgcatgcc

SEQ ID NO: 24553 - protein, 385 aa, Arabidopsis thaliana
  peptide (1)..(385): Ceres Seq. ID no. 12439796
CSPFFIFLHKPNLSTMVLFFSTRFLFFSIFFPCLISITLYQLDSFEPASLPADSLITSPTSIPPLLNDRFLTGAEFIGVGLLNNPEDIAYHKDSNLIYTGCVDGWVKRVSVHDSANDSIVEDWVNTGGRPLGIAFGLHGEVIVADANKGLLSISDGGKKTELLTDEADGVRFKLTDAVTVADNGVLYFTDASSKYDFYQFIFDFLEGKPHGRVMSFDPTTRATRVLLKDLYFANGISMSPDQTHFVFCETIMRRCSKYYISEERVEVFIQGLPGYPDNIRYDGDGHYWIALISEVTTSWKLSMKYLFLRKLIYMAAKYGVELLSIKNAAVLQVDLDGNPIAMYHDHPFSHITSGVKIGNHLYFGSLLHSYITRLDLLKYPAQKKL

SEQ ID NO: 24554 - protein, 370 aa, Arabidopsis thaliana
  peptide (1)..(370): Ceres Seq. ID no. 12439797
MVLFFSTRFLFFSIFFPCLISITLYQLDSFEPASLPADSLITSPTSIPPLLNDRFLTGAEFIGVGLLNNPEDIAYHKDSNLIYTGCVDGWVKRVSVHDSANDSIVEDWVNTGGRPLGIAFGLHGEVIVADANKGLLSISDGGKKTELLTDEADGVRFKLTDAVTVADNGVLYFTDASSKYDFYQFIFDFLEGKPHGRVMSFDPTTRATRVLLKDLYFANGISMSPDQTHFVFCETIMRRCSKYYISEERVEVFIQGLPGYPDNIRYDGDGHYWIALISEVTTSWKLSMKYLFLRKLIYMAAKYGVELLSIKNAAVLQVDLDGNPIAMYHDHPFSHITSGVKIGNHLYFGSLLHSYITRLDLLKYPAQKKL

SEQ ID NO: 24555 - DNA, 1500 bp, Arabidopsis thaliana
  misc_feature (1)..(1500): Ceres Seq. ID no. 12576542
  misc_feature (1)..(1500): Ortholog of  Ceres SEQ ID NO 14303770 as cited in SEQ ID NO 53890
gaaagatccattcaccaactctttataccagcctctgtaacgttcgatcatcttgtatttcatttcaaccactcattgtttttagtttgttttacgaagaatcaactatggcgacgaagagaagcgttggaactttgaaggaagcggatctgaagggaaagagtgtgttcgtgagggttgatctcaacgttcctttggatgataactctaacatcaccgatgacaccaggattcgtgccgctgttcccaccatcaagtacttgatgggtaatggatctagggttgttctctgcagtcacttgggccgcccaaaaggtgttactcctaagtacagcttaaagcctcttgtgcccagattgtctgaacttcttggtgttgaggttgtaatggcaaatgactctattggtgaggaagtccagaagttggttgcaggactacctgaaggtggtgttttgctcttggagaatgtgaggttctacgccgaggaagagaagaatgatcctgaatttgcaaagaagcttgctgctcttgccgatgtttacgttaatgatgccttcggaactgctcacagagctcatgcttccactgagggagttgccaaattcttgaagccttcagttgctggtttcctcatgcagaaggaacttgattaccttgtcggagctgtggcaaaccccaagaagccttttgctgccattgttggaggctcaaaggtttcaacaaagattggtgtcattgagtctctcttgaacacagttgacatcctcctgctcggtggaggtatgatttttactttctacaaggcacaaggactctcagtcggatcttcccttgtggaggaggacaagcttgacttggcaaagtcactcatggagaaagcaaaggccaaaggtgtctctctcttgctcccaaccgatgtggttattgctgacaagtttgctcccgatgctaacagcaagatagtgccagccactgccatccctgatggctggatgggtctagatattggtccagactccatcaagacattcagcgaagctctggacacaaccaaaaccatcatctggaatggtcccatgggtgtgtttgaattcgataagtttgctgctggaactgaggccgtagcaaagcagcttgcagaactaagcggaaagggagtaaccacaatcattggaggaggtgactctgttgctgccgtcgagaaggttggtttggcagacaagatgagccacatctctaccggaggcggtgctagtttggagcttcttgagggtaagccacttccaggagtcctcgctctcgacgaagcttgaaaatcctcacgttggatttcatcgctattttgtgttgttatatgtataacaagtcgtctggttatcttgtgaccagacgagcaagccattatttatcagcttgagattttcgtctacggctctctttttatgagttttttagtttggagcctttttttaataataagagatgaaactctgattgacg

SEQ ID NO: 24556 - protein, 436 aa, Arabidopsis thaliana
  peptide (1)..(436): Ceres Seq. ID no. 12576543
KIHSPTLYTSLCNVRSSCISFQPLIVFSLFYEESTMATKRSVGTLKEADLKGKSVFVRVDLNVPLDDNSNITDDTRIRAAVPTIKYLMGNGSRVVLCSHLGRPKGVTPKYSLKPLVPRLSELLGVEVVMANDSIGEEVQKLVAGLPEGGVLLLENVRFYAEEEKNDPEFAKKLAALADVYVNDAFGTAHRAHASTEGVAKFLKPSVAGFLMQKELDYLVGAVANPKKPFAAIVGGSKVSTKIGVIESLLNTVDILLLGGGMIFTFYKAQGLSVGSSLVEEDKLDLAKSLMEKAKAKGVSLLLPTDVVIADKFAPDANSKIVPATAIPDGWMGLDIGPDSIKTFSEALDTTKTIIWNGPMGVFEFDKFAAGTEAVAKQLAELSGKGVTTIIGGGDSVAAVEKVGLADKMSHISTGGGASLELLEGKPLPGVLALDEA

SEQ ID NO: 24557 - protein, 401 aa, Arabidopsis thaliana
  peptide (1)..(401): Ceres Seq. ID no. 12576544
MATKRSVGTLKEADLKGKSVFVRVDLNVPLDDNSNITDDTRIRAAVPTIKYLMGNGSRVVLCSHLGRPKGVTPKYSLKPLVPRLSELLGVEVVMANDSIGEEVQKLVAGLPEGGVLLLENVRFYAEEEKNDPEFAKKLAALADVYVNDAFGTAHRAHASTEGVAKFLKPSVAGFLMQKELDYLVGAVANPKKPFAAIVGGSKVSTKIGVIESLLNTVDILLLGGGMIFTFYKAQGLSVGSSLVEEDKLDLAKSLMEKAKAKGVSLLLPTDVVIADKFAPDANSKIVPATAIPDGWMGLDIGPDSIKTFSEALDTTKTIIWNGPMGVFEFDKFAAGTEAVAKQLAELSGKGVTTIIGGGDSVAAVEKVGLADKMSHISTGGGASLELLEGKPLPGVLALDEA

SEQ ID NO: 24558 - protein, 349 aa, Arabidopsis thaliana
  peptide (1)..(349): Ceres Seq. ID no. 12576545
MGNGSRVVLCSHLGRPKGVTPKYSLKPLVPRLSELLGVEVVMANDSIGEEVQKLVAGLPEGGVLLLENVRFYAEEEKNDPEFAKKLAALADVYVNDAFGTAHRAHASTEGVAKFLKPSVAGFLMQKELDYLVGAVANPKKPFAAIVGGSKVSTKIGVIESLLNTVDILLLGGGMIFTFYKAQGLSVGSSLVEEDKLDLAKSLMEKAKAKGVSLLLPTDVVIADKFAPDANSKIVPATAIPDGWMGLDIGPDSIKTFSEALDTTKTIIWNGPMGVFEFDKFAAGTEAVAKQLAELSGKGVTTIIGGGDSVAAVEKVGLADKMSHISTGGGASLELLEGKPLPGVLALDEA

SEQ ID NO: 24559 - DNA, 1208 bp, Arabidopsis thaliana
  misc_feature (1)..(1208): Ceres Seq. ID no. 12384855
  misc_feature (1)..(1208): Ortholog of  Ceres SEQ ID NO 14313038 as cited in SEQ ID NO 59520
  misc_feature (1)..(1208): Ortholog of  Ceres SEQ ID NO 13595464 as cited in SEQ ID NO 59792
  misc_feature (1)..(1208): Ortholog of  Ceres SEQ ID NO 14316416 as cited in SEQ ID NO 60078
  misc_feature (1)..(1208): Ortholog of  Ceres SEQ ID NO 13664262 as cited in SEQ ID NO 61094
aaagacaaatatataacaattgaaacacatgtgtgttatcaggagaatttgtatggcttgaggaggtgtgcatcatccgtctatcaataccctgacaaggaaaaccctaattttttttggcccaaagggttttatactttaatctcatactccgattcattgtcgaaaaacgatgatgcataattcaaccgaagaatcggaatgggaggtgagacctggtggtatgctcgtccaacgaagagacgacgccgcttcctccgaccacaaacctctccaggatcccgactctgcttccgccgcttttgctcaaaccatcagaatcactgtttctcatggctcatcgcaccacgatcttcatatttctgctcacgccactttcggggatgtaaagaaagctcttgttcagaaaactggattggaagctagtgaattgaagatcttgttcagaggagttgagagagatgatgctgaacaattgcaagctgctggtgttaaggatgcgtctaagcttgttgttgttgttgaggatacgaataagagagtggaacaacagcctcctgtggtaactaaagagatggaaaaagctattgctgctgttaacgcggttacaggagaggtcgataagctctcggatagagttgttgctttagaagttgctgtgaatggagggacgcaagttgcggtgcgggagtttgacatggctgcagagcttcttatgaggcagctgctcaaattggatggcattgaggctgaaggggacgctaaagtacagcgtaaggctgaggtacgtagaatccaaaacttgcaggaggctgtggataagttgaaggcaagatgttcaaatccgtttgtggatcagagcaaagctgcagctgtaagcactgagtgggaatcgttcggaaacggtgtcggaagcttgaaccctcctccgccagcttcgccttcggccaatgtaactcaagattgggagaaatttgactgacattttagtactgctacgttgccttggaaaaaaatgcttattgaaactgtttatctttttgattattgttaaatattggaaaacgaccatcgtctttatcttctaatgtatagatatatagtatcggaaatctacatctctgtacgaaatgttggaataatccctgggaatagtctttgatgtctctcagtctctgtcgtgcctaattggcttatgtcgtagtacc

SEQ ID NO: 24560 - protein, 269 aa, Arabidopsis thaliana
  peptide (1)..(269): Ceres Seq. ID no. 12384856
MMHNSTEESEWEVRPGGMLVQRRDDAASSDHKPLQDPDSASAAFAQTIRITVSHGSSHHDLHISAHATFGDVKKALVQKTGLEASELKILFRGVERDDAEQLQAAGVKDASKLVVVVEDTNKRVEQQPPVVTKEMEKAIAAVNAVTGEVDKLSDRVVALEVAVNGGTQVAVREFDMAAELLMRQLLKLDGIEAEGDAKVQRKAEVRRIQNLQEAVDKLKARCSNPFVDQSKAAAVSTEWESFGNGVGSLNPPPPASPSANVTQDWEKFD

SEQ ID NO: 24561 - protein, 268 aa, Arabidopsis thaliana
  peptide (1)..(268): Ceres Seq. ID no. 12384857
MHNSTEESEWEVRPGGMLVQRRDDAASSDHKPLQDPDSASAAFAQTIRITVSHGSSHHDLHISAHATFGDVKKALVQKTGLEASELKILFRGVERDDAEQLQAAGVKDASKLVVVVEDTNKRVEQQPPVVTKEMEKAIAAVNAVTGEVDKLSDRVVALEVAVNGGTQVAVREFDMAAELLMRQLLKLDGIEAEGDAKVQRKAEVRRIQNLQEAVDKLKARCSNPFVDQSKAAAVSTEWESFGNGVGSLNPPPPASPSANVTQDWEKFD

SEQ ID NO: 24562 - protein, 252 aa, Arabidopsis thaliana
  peptide (1)..(252): Ceres Seq. ID no. 12384858
MLVQRRDDAASSDHKPLQDPDSASAAFAQTIRITVSHGSSHHDLHISAHATFGDVKKALVQKTGLEASELKILFRGVERDDAEQLQAAGVKDASKLVVVVEDTNKRVEQQPPVVTKEMEKAIAAVNAVTGEVDKLSDRVVALEVAVNGGTQVAVREFDMAAELLMRQLLKLDGIEAEGDAKVQRKAEVRRIQNLQEAVDKLKARCSNPFVDQSKAAAVSTEWESFGNGVGSLNPPPPASPSANVTQDWEKFD

SEQ ID NO: 24563 - DNA, 1742 bp, Arabidopsis thaliana
  misc_feature (1)..(1742): Ceres Seq. ID no. 12377355
  misc_feature (1)..(1742): Ortholog of  Ceres SEQ ID NO 15170811 as cited in SEQ ID NO 52649
  misc_feature (1)..(1742): Ortholog of  Ceres SEQ ID NO 13638331 as cited in SEQ ID NO 58047
  misc_feature (1)..(1742): Ortholog of  Ceres SEQ ID NO 15225845 as cited in SEQ ID NO 65125
atcattcttagaaccaaaaaggaaagtcccaacgatcccattttactccttttcaccacctctagtagcagagagagagagagagtatggcgattacggtgccgagacggcaactcttcatcggcggtcaatggactgagcccgttctccgtaaaactctccctgttgtcaatcccgccaccgaagacatcatcggttatattccagctgcaacttctgaagatgtggagcttgctgtggaagctgctaggaaagcatttactaggaacaacggaaaggattgggctagagcaactggtgctgttcgtgccaaatacttgcgcgctattgcagctaaggtaatagagaggaagtctgaactagctaatcttgaggctattgattgcggtaaacctctagatgaagcagcatgggacatggatgatgttgctggatgttttgaatattatgctgacctagctgaaggcttggatgcaaagcagaagactcctctttctcttccgatggatacttttaagggttatattctcaaggaacccattggcgtagttggcatgattactccatggaactatccgttattgatggctgtctggaaagtcgctccttcacttgctgctgggtgcacggctatactgaaaccttcagagttggcctccctgacatgtttggagctcgctgatatttgccgcgaggtgggtctaccacctggtgttcttaatattctgactggtttaggaactgaagcaggtgctccactggcatcgcatccacatgttgacaagattgtattcactggaagcacaacaactggaagcagcattatgacttccgctgccaaattggtgaaaccagtttccttggagcttgggggtaaaagccctatcattgtctttgatgatgtcgatattgataaagctgtggaatggactatgtttggttgtttctggacgaatgggcagatttgtagtgccacatctcgacttcttgtgcatgaaaggattgctgacgagtttttggacaagctggtaaagtggaccaagaacattaagatttcagatccttttgaagaaggctgtaggcttggtcctgttgtcagtaaaggacagtacgagagagttctaaagtttgtctcaaacgctaggaatgaaggtgcaactgttctttgtggaggagttcgtcctgagcatttaaagaagggatactttgttgaacctgcgattgtttcaaatgtgactacttcaatggaaatctggagagaggaagtctttggtcctgctctgtgtgtgaaaacattctccaccgaggatgaggcaattcagcttgcaaatgactctcaatatggattagcaggcgcagtattatcaaatgatctggagcggtgtgatcgtgttagtaaggctttccaggcgggaatagtgtgggtcaactgctctcagccatgcttctgccaagctccatggggtggaaccaaacgcagtggatttggccgtgaattgggagaatggggacttgagaactacttgagtgtgaagcaggtgactcagtatatctctgatgaaccatggggatggtacaaacctccttccaagctctgagacaaacactagttcctgatatttccttaaaacatgtactcatgagaatataccaataaagcaagagacccttctgtaagagaaatggtattgctactttaaattcttgaaaaaaatgaaaaataagatgagatgatatttctt

SEQ ID NO: 24564 - protein, 503 aa, Arabidopsis thaliana
  peptide (1)..(503): Ceres Seq. ID no. 12377356
MAITVPRRQLFIGGQWTEPVLRKTLPVVNPATEDIIGYIPAATSEDVELAVEAARKAFTRNNGKDWARATGAVRAKYLRAIAAKVIERKSELANLEAIDCGKPLDEAAWDMDDVAGCFEYYADLAEGLDAKQKTPLSLPMDTFKGYILKEPIGVVGMITPWNYPLLMAVWKVAPSLAAGCTAILKPSELASLTCLELADICREVGLPPGVLNILTGLGTEAGAPLASHPHVDKIVFTGSTTTGSSIMTSAAKLVKPVSLELGGKSPIIVFDDVDIDKAVEWTMFGCFWTNGQICSATSRLLVHERIADEFLDKLVKWTKNIKISDPFEEGCRLGPVVSKGQYERVLKFVSNARNEGATVLCGGVRPEHLKKGYFVEPAIVSNVTTSMEIWREEVFGPALCVKTFSTEDEAIQLANDSQYGLAGAVLSNDLERCDRVSKAFQAGIVWVNCSQPCFCQAPWGGTKRSGFGRELGEWGLENYLSVKQVTQYISDEPWGWYKPPSKL

SEQ ID NO: 24565 - protein, 393 aa, Arabidopsis thaliana
  peptide (1)..(393): Ceres Seq. ID no. 12377357
MDDVAGCFEYYADLAEGLDAKQKTPLSLPMDTFKGYILKEPIGVVGMITPWNYPLLMAVWKVAPSLAAGCTAILKPSELASLTCLELADICREVGLPPGVLNILTGLGTEAGAPLASHPHVDKIVFTGSTTTGSSIMTSAAKLVKPVSLELGGKSPIIVFDDVDIDKAVEWTMFGCFWTNGQICSATSRLLVHERIADEFLDKLVKWTKNIKISDPFEEGCRLGPVVSKGQYERVLKFVSNARNEGATVLCGGVRPEHLKKGYFVEPAIVSNVTTSMEIWREEVFGPALCVKTFSTEDEAIQLANDSQYGLAGAVLSNDLERCDRVSKAFQAGIVWVNCSQPCFCQAPWGGTKRSGFGRELGEWGLENYLSVKQVTQYISDEPWGWYKPPSKL

SEQ ID NO: 24566 - protein, 364 aa, Arabidopsis thaliana
  peptide (1)..(364): Ceres Seq. ID no. 12377358
MDTFKGYILKEPIGVVGMITPWNYPLLMAVWKVAPSLAAGCTAILKPSELASLTCLELADICREVGLPPGVLNILTGLGTEAGAPLASHPHVDKIVFTGSTTTGSSIMTSAAKLVKPVSLELGGKSPIIVFDDVDIDKAVEWTMFGCFWTNGQICSATSRLLVHERIADEFLDKLVKWTKNIKISDPFEEGCRLGPVVSKGQYERVLKFVSNARNEGATVLCGGVRPEHLKKGYFVEPAIVSNVTTSMEIWREEVFGPALCVKTFSTEDEAIQLANDSQYGLAGAVLSNDLERCDRVSKAFQAGIVWVNCSQPCFCQAPWGGTKRSGFGRELGEWGLENYLSVKQVTQYISDEPWGWYKPPSKL

SEQ ID NO: 24567 - DNA, 1654 bp, Arabidopsis thaliana
  misc_feature (1)..(1654): Ceres Seq. ID no. 12321803
  misc_feature (1)..(1654): Ortholog of  Ceres SEQ ID NO 13581563 as cited in SEQ ID NO 58942
  misc_feature (1)..(1654): Ortholog of  Ceres SEQ ID NO 13658707 as cited in SEQ ID NO 66286
  misc_feature (1)..(1654): Ortholog of  Ceres SEQ ID NO 13654528 as cited in SEQ ID NO 68080
ctttttgcttctctcttaactaccattacattacatacctcttctttctaggtggtaacaatcttgatactggcattaaccagtgttattcccatttacgcaaacgttcacggcgccgggaaaatatgcgacgaacttggccggcgatcattgagtacaagaccacacagtgtctccattacagattttggagctgttggagatggcaaaacgctcaacactcttgcgtttcaaaacgccgttttctatcttatgtctttcgccgacaaaggtggggcccagctctatgttccgccgggacattggctcaccgggagttttagcctcaccagccacctcactctctttctcgaaaacgacgccgttatagtcgcttctcaggatccatcgcattgggaagtggttgatcctttaccttcatacggaaggggaattgatttgcctgggaagcgatacaagagtttgatcaacggtaacaagctacatgatgttgttgtaacaggtgataatggaactatagatggtcaaggcttggtttggtgggatcggtttacttctcattccttaaagtataaccgtcctcacctcatcgagtttctttcttctgaaaatgtaattgtctccaatcttacgttcttgaatgctcctgcttattcaatctattcaatctactctagccatgtatatattcataagatattggcccattcttctcctaaatctccttatacaatcggtattgtaccagattcttctgattacgtctgcatccaaaactctaccattaacgtggggtatgacgcgatttccctcaaaagcggttgggatgaatatggaattgcctattctcgtcccactgaaaatgttcatataagaaatgtgtaccttcgaggagcttctggttcctctatctcctttggcagtgaaatgtctggtggaatatctgatgtcgtggttgataacgctcatatacactactcgttaaccggcattgcctttagaaccacaaaaggcagaggtggttatatcaaagagatcgatatttcaaacatcgatatgttgagaataggtactgccattgttgctaatggtagctttggatctcaccctgatgataaatatgatgtgaatgctctcccacttgtgagtcacatcagattaagcaacatttctggagagaacattggcattgcggggaaattgtttgggatcaaagaatctccatttagctcagtgactttgtcgaatgtttctttgtcgatgagctcaggttcttctgtttcttggcaatgctcctacgtttacgggtcctcggagtcagtcattcctgaaccgtgtcccgagctgaagagagatgctgatgcttacggtagagctgcagtctagtgaaacagactgcaaaagaaaaaagaaaaaaaaagcaagaaacatatcttgggattctttgataggattcaattcatcaatcatttcatattttgtggagttagagaaggtcagattctttcctcaagtaaaccacattgtctttagatcatacatgttcctttcggttattctggtttcctatttttatgttgtttgcatattctgagataagaaatctgtacaggttcatttcttcattcatgtgtaaacaaagaaattttgtttc

SEQ ID NO: 24568 - protein, 377 aa, Arabidopsis thaliana
  peptide (1)..(377): Ceres Seq. ID no. 12321804
MSFADKGGAQLYVPPGHWLTGSFSLTSHLTLFLENDAVIVASQDPSHWEVVDPLPSYGRGIDLPGKRYKSLINGNKLHDVVVTGDNGTIDGQGLVWWDRFTSHSLKYNRPHLIEFLSSENVIVSNLTFLNAPAYSIYSIYSSHVYIHKILAHSSPKSPYTIGIVPDSSDYVCIQNSTINVGYDAISLKSGWDEYGIAYSRPTENVHIRNVYLRGASGSSISFGSEMSGGISDVVVDNAHIHYSLTGIAFRTTKGRGGYIKEIDISNIDMLRIGTAIVANGSFGSHPDDKYDVNALPLVSHIRLSNISGENIGIAGKLFGIKESPFSSVTLSNVSLSMSSGSSVSWQCSYVYGSSESVIPEPCPELKRDADAYGRAAV

SEQ ID NO: 24569 - DNA, 1115 bp, Arabidopsis thaliana
  misc_feature (1)..(1115): Ceres Seq. ID no. 12336070
  misc_feature (1)..(1115): Ortholog of  Ceres SEQ ID NO 12598859 as cited in SEQ ID NO 62872
  misc_feature (1)..(1115): Ortholog of  Ceres SEQ ID NO 12617350 as cited in SEQ ID NO 63777
  misc_feature (1)..(1115): Ortholog of  Ceres SEQ ID NO 15176153 as cited in SEQ ID NO 0
  misc_feature (1)..(1115): Ortholog of  Ceres SEQ ID NO 15179157 as cited in SEQ ID NO 0
atattcaaaaacagaacacaacctctcttctcactctatatactcccaaaatggcttataactaccgttttgccattcttctcgttctcctctccgccaccgtcggctttaccgcagccgcgttgaagcctccggttcgaaccttgaacggaaacattactcttaatctcatttggtacggaaaattcaccccaatccaacggtccataatcgtcgatttcatccgctctatcagttctgtcaccgccgccaaaggtccatccgtcgcgtcgtggtggaagacgacggagaagtacaaaaccggcgtttcaactcttgttgtcggtaaacagctcctccttgagaattaccctctcggaaaatccctaaagagcccttaccttcgtgctctgtcaagcaaacttaacgctggtggtgctcggtcaataaccgtcgtcttaacggcgaaagacgtcaccgttgagggactctgtatgaaccgatgcgggactcacgggtcaaagtcaagttccgttaacagtggagcttacgtgtgggtcggaaactctgaaacgcagtgtcctggttactgcgcgtggccgtttcatcagcctatctacggacctcagtctccgccgttagtcgcacctaacggcgacgtcggagttgacggaatgattataaacatcgcgactcttcttgttaacaccgtaacgaatccgtctccagaagctgtctcggcttgtaccgggatattcggttcgggtgcttacccgggttacgcgggtcgggttctcgtagacaagacgagtggagcgagttacaacgctttgggtctcgccggtagaaaatatctattgccggcgttgtgggatcctcagacttcgacgtgtaaaactatggtttgaattttagatggtctgtgaacgagacacgtggctagaattgatggtgattaaaagcttgttgtagtcaaagaaagtttgtagatatctatcgcgtctggttcggagtttggggaaagggatgtgtttgttttgttattttgttatgccctgtgtaaattcgatctttggaaatatgtgaaagatagattcatatatctattttaataataacgatttgtagtttccacc

SEQ ID NO: 24570 - protein, 294 aa, Arabidopsis thaliana
  peptide (1)..(294): Ceres Seq. ID no. 12336071
IQKQNTTSLLTLYTPKMAYNYRFAILLVLLSATVGFTAAALKPPVRTLNGNITLNLIWYGKFTPIQRSIIVDFIRSISSVTAAKGPSVASWWKTTEKYKTGVSTLVVGKQLLLENYPLGKSLKSPYLRALSSKLNAGGARSITVVLTAKDVTVEGLCMNRCGTHGSKSSSVNSGAYVWVGNSETQCPGYCAWPFHQPIYGPQSPPLVAPNGDVGVDGMIINIATLLVNTVTNPSPEAVSACTGIFGSGAYPGYAGRVLVDKTSGASYNALGLAGRKYLLPALWDPQTSTCKTMV

SEQ ID NO: 24571 - protein, 278 aa, Arabidopsis thaliana
  peptide (1)..(278): Ceres Seq. ID no. 12336072
MAYNYRFAILLVLLSATVGFTAAALKPPVRTLNGNITLNLIWYGKFTPIQRSIIVDFIRSISSVTAAKGPSVASWWKTTEKYKTGVSTLVVGKQLLLENYPLGKSLKSPYLRALSSKLNAGGARSITVVLTAKDVTVEGLCMNRCGTHGSKSSSVNSGAYVWVGNSETQCPGYCAWPFHQPIYGPQSPPLVAPNGDVGVDGMIINIATLLVNTVTNPSPEAVSACTGIFGSGAYPGYAGRVLVDKTSGASYNALGLAGRKYLLPALWDPQTSTCKTMV

SEQ ID NO: 24572 - DNA, 1334 bp, Arabidopsis thaliana
  misc_feature (1)..(1334): Ceres Seq. ID no. 12324375
  misc_feature (1)..(1334): Ortholog of  Ceres SEQ ID NO 12612330 as cited in SEQ ID NO 56418
aaaatttcgtgtgattttctaagacttgagtaatcttgttttccgaaattttctcaccaagctcgaacacaaagatcggccatggctacgctcttcaccgtcgctcgtccttcttcactcctctatgtttcctccataaatccaagcaagaccttctctccttctatctccctaaaacttaactctctctctttctcttttggttatcgtcccaagccactccggttttctaaaatccgatcttctctgccctcggaatctgaatcggaatccgacctagatgcgtctgcagttacagatgaatggggtgagaaacctggagatgcaaatgagcccgactctcagccagataatgtgaccgtgaatgtgattacggacgaatggggcgagaaatccggacccgaacttgaggaatccgggacccggtttatggaatcggatcctccaaggaacgaagacgagtggggaggagaaattggaggagaaactgaagccgacgctggaaatggaagtgcggtgtctgacccgacttgggagctgaaaaggtgtttggcggattcggtgtacggaactgaattaggtttcaaagctgggtcagaagtccgagcggaggttttggagcttgtgaatcaactggaagctctgaatcctactccggctccgttagagaatccagaacttctcgacggcaactgggttttgctgtacactgctttctctgagttgattcctctactagctgcgggttcgacacctttgttgaaagttaaaagcataagtcagtcaatagacacaaacaatctcattatcgacaactccactacactctccagcccttttgcagacttctccttcagtgctactgcttcatttgaagttcgaagcccttcaagaattgaggtttctttcaaagaaggcacgctaaaacccccggtgatcaaatcaagtgtagatctcccagagagtgtgggcgtctttgggcagcagattagcctttcgttgttaaagcagtctttgaaccccttacaagatgtggcagcaaacatttcacgggcactctctggtcagccacctctcaagcttccgtttccaggaaaccgaggcagctcttggctcttgaccacttatctcgacaaggatctcaggatttctagaggagatggtggccttttcgtgcttgccagagaaggaagctctctgcttgagctctgaaatatttgataaagtatatatatagcaggcttcatgtaaaaaccgtaaccactacagtagagacatcttcagaataatgctgaatgcagattattgggcctaatcttaaattttaattatgt

SEQ ID NO: 24573 - protein, 376 aa, Arabidopsis thaliana
  peptide (1)..(376): Ceres Seq. ID no. 12324376
MATLFTVARPSSLLYVSSINPSKTFSPSISLKLNSLSFSFGYRPKPLRFSKIRSSLPSESESESDLDASAVTDEWGEKPGDANEPDSQPDNVTVNVITDEWGEKSGPELEESGTRFMESDPPRNEDEWGGEIGGETEADAGNGSAVSDPTWELKRCLADSVYGTELGFKAGSEVRAEVLELVNQLEALNPTPAPLENPELLDGNWVLLYTAFSELIPLLAAGSTPLLKVKSISQSIDTNNLIIDNSTTLSSPFADFSFSATASFEVRSPSRIEVSFKEGTLKPPVIKSSVDLPESVGVFGQQISLSLLKQSLNPLQDVAANISRALSGQPPLKLPFPGNRGSSWLLTTYLDKDLRISRGDGGLFVLAREGSSLLEL

SEQ ID NO: 24574 - protein, 260 aa, Arabidopsis thaliana
  peptide (1)..(260): Ceres Seq. ID no. 12324377
MESDPPRNEDEWGGEIGGETEADAGNGSAVSDPTWELKRCLADSVYGTELGFKAGSEVRAEVLELVNQLEALNPTPAPLENPELLDGNWVLLYTAFSELIPLLAAGSTPLLKVKSISQSIDTNNLIIDNSTTLSSPFADFSFSATASFEVRSPSRIEVSFKEGTLKPPVIKSSVDLPESVGVFGQQISLSLLKQSLNPLQDVAANISRALSGQPPLKLPFPGNRGSSWLLTTYLDKDLRISRGDGGLFVLAREGSSLLEL

SEQ ID NO: 24575 - DNA, 789 bp, Arabidopsis thaliana
  misc_feature (1)..(789): Ceres Seq. ID no. 12482926
  misc_feature (1)..(789): Ortholog of  Ceres SEQ ID NO 13638893 as cited in SEQ ID NO 55835
  misc_feature (1)..(789): Ortholog of  Ceres SEQ ID NO 13661656 as cited in SEQ ID NO 61607
  misc_feature (1)..(789): Ortholog of  Ceres SEQ ID NO 14309331 as cited in SEQ ID NO 0
aaaaccgacctacaaaatcccttcttcttcctcttcactctttctcattttccaccattaaaaaacctctctactctctcctcaaaaactcaaaagagcaaaaaaaagagaagaagaatcaaaatcccacacaatggcaacacactcttccttcaccgcaacaacacctctctttctcatcgttcttctatccctatcctccgtctcagttctcggcgcatctcaccaccacgcaacggcgccggctccgtctgtagactgttcgactctcatactcaacatggctgactgtttatccttcgtttcgagcggaggcacggtggcgaaaccggaaggtacatgttgctctggtcttaagacggtgcttaaagctgactctcagtgtctatgtgaagcgtttaagagcagtgcttctcttggagttactttgaatatcactaaggcttctactcttcccgccgcatgcaagcttcacgctccttctatcgctacttgtggattgtctgttgctccaagtactgctccaggagtagctgctgctggacctgagacagccggatttctagctccaaatccttcttcagggaacgatggatcttctttgattccgacctcgttcacaactgtactcagtgccgtactgttcgttttgttcttctctagtgcgtaaaaaaaaaactgaatcttttttcaccagctagatttggctgtatgaaattgattaatggtttttattagggttaatctatgtatgttttggagtgttctgttttgagaccatatcggttt

SEQ ID NO: 24576 - protein, 178 aa, Arabidopsis thaliana
  peptide (1)..(178): Ceres Seq. ID no. 12482927
MATHSSFTATTPLFLIVLLSLSSVSVLGASHHHATAPAPSVDCSTLILNMADCLSFVSSGGTVAKPEGTCCSGLKTVLKADSQCLCEAFKSSASLGVTLNITKASTLPAACKLHAPSIATCGLSVAPSTAPGVAAAGPETAGFLAPNPSSGNDGSSLIPTSFTTVLSAVLFVLFFSSA

SEQ ID NO: 24577 - protein, 129 aa, Arabidopsis thaliana
  peptide (1)..(129): Ceres Seq. ID no. 12482928
MADCLSFVSSGGTVAKPEGTCCSGLKTVLKADSQCLCEAFKSSASLGVTLNITKASTLPAACKLHAPSIATCGLSVAPSTAPGVAAAGPETAGFLAPNPSSGNDGSSLIPTSFTTVLSAVLFVLFFSSA

SEQ ID NO: 24578 - protein, 95 aa, Arabidopsis thaliana
  peptide (1)..(95): Ceres Seq. ID no. 12482929
KTDLQNPFFFLFTLSHFPPLKNLSTLSSKTQKSKKKRRRIKIPHNGNTLFLHRNNTSLSHRSSIPILRLSSRRISPPRNGAGSVCRLFDSHTQHG

SEQ ID NO: 24579 - DNA, 2099 bp, Arabidopsis thaliana
  misc_feature (1)..(2099): Ceres Seq. ID no. 12396181
  misc_feature (1)..(2099): Ortholog of  Ceres SEQ ID NO 14312408 as cited in SEQ ID NO 55042
attcatcaaaagccacataagaagttgatgcagaagcaataataacaaaaaacattaaaaaaaaacctcttcagttttggtttctgcagtctccaatggctctcaagctctttctctttgctcttcttctctgtctcccgacttctctctcctccactgcctctaaaggtaaagagaagaagtcgaagtttaatccatacagatacacattcatcgataaagcaagcacattctcatcatcttcctcatcttcattttcatccaacggtcaagattcgtcctacgactacatagtcatcggaggtggaaccgcagggtgtcctctcgccgcaacgttgtcgcagaatttcagcgttcttgttttagagagaggtggcgttccgtttacaaacgcaaacgtttctttcctcaggaattttcacatcggacttgctgacatttcagcttcttccgcgtctcaagcgtttgtttccactgacggcgtttacaacgctcgtgctagagttctcggtggcggttcctgtattaacgccggtttttactccagagccgatgctgcgttcgtgaagcgagcaggatgggatccgaagctggtgaaggaatcgtatccatgggtggagagagagattgttcatcagccaaagttaacgttatggcagaaagctctcagagacagtcttttagaggttggagtcagacctttcaatggtttcacctacgatcacgtctccggaaccaaaatcggcgggacaattttcgatagattcggccgtcgtcacacggcggcggagcttctcgcttacgctaatcctcagaagcttagagtcttgatctacgccactgtgcaaaaaatcgtctttgacacttcaggaacaaggcctagagtaacaggagtgatattcaaagatgagaaaggtaatcaacaccaggctttactctcgaatagaaagggaagtgaagtgatattatctagtggagctattgggtgaccacagatgctgatgttaagtgggattggacctaagaaggagcttcagaggctgaagattcctgtggttttagagaatgagcatgtagggaaaggaatggctgataatcccatgaacacgatcttggtaccttcaaaggcgcctatagagcagtcacttattcagactgttggaattacaaagatgggtgtgtatgttgaagccagtactggctttgggcaatctcctgagagtattcatactcactatgggattatgtcgaacaagaatgaattgttttccaccattcctgcaaagcagagaagaccagaagcaacgcaagcttacatcacaagaaacaaataccaacttcacgaagcattcaatggaagtttcatcttggagaaacttgcttacccgatctctagagggcatttgagcttggtcaacacaaatgttgatgacaacccttcagtcaccttcaattactttaaacacccggtggatctccaacgctgtgttgaagccattcgtcttgtttccaaagtggtgacgtctaagcgtttcttaaactacacgcagtgtgacaagcaaaacgtacacaagatgcttagcttaagcgtcaaggcaaacatcaatctaaggccaaagcaactgaacgataccaaatcaatggctcagttctgcaaagacactgttgtcacaatctggcactaccatggtggatgtcttgtgggtaaagttgtgagccctaaccgcaaagttcttggtgtcgacaggcttagagttattgatggttcaacgtttgacgagtctccaggaaccaacccgcaagctactatgatgatgatgggaagatacatgggagtcaagattcttcgggagagacttggaaacaaagctggtgtttagtttgcagattgagcttttatggtagacaaattcgtagcagataattctgatgtggaattgtgttggagaatatctctctctgtctccttctctgttatttgatattcgattcattgaagtataggatcatattgtctaatgaactgtgtaaccctctattgggcaatcggctctgttgcttattagcttgtgtgaaaagttaatcacgttttctgtttc

SEQ ID NO: 24580 - protein, 297 aa, Arabidopsis thaliana
  peptide (1)..(297): Ceres Seq. ID no. 12396182
MALKLFLFALLLCLPTSLSSTASKGKEKKSKFNPYRYTFIDKASTFSSSSSSSFSSNGQDSSYDYIVIGGGTAGCPLAATLSQNFSVLVLERGGVPFTNANVSFLRNFHIGLADISASSASQAFVSTDGVYNARARVLGGGSCINAGFYSRADAAFVKRAGWDPKLVKESYPWVEREIVHQPKLTLWQKALRDSLLEVGVRPFNGFTYDHVSGTKIGGTIFDRFGRRHTAAELLAYANPQKLRVLIYATVQKIVFDTSGTRPRVTGVIFKDEKGNQHQALLSNRKGSEVILSSGAIG

SEQ ID NO: 24581 - protein, 294 aa, Arabidopsis thaliana
  peptide (1)..(294): Ceres Seq. ID no. 12396183
MLMLSGIGPKKELQRLKIPVVLENEHVGKGMADNPMNTILVPSKAPIEQSLIQTVGITKMGVYVEASTGFGQSPESIHTHYGIMSNKNELFSTIPAKQRRPEATQAYITRNKYQLHEAFNGSFILEKLAYPISRGHLSLVNTNVDDNPSVTFNYFKHPVDLQRCVEAIRLVSKVVTSKRFLNYTQCDKQNVHKMLSLSVKANINLRPKQLNDTKSMAQFCKDTVVTIWHYHGGCLVGKVVSPNRKVLGVDRLRVIDGSTFDESPGTNPQATMMMMGRYMGVKILRERLGNKAGV

SEQ ID NO: 24582 - protein, 292 aa, Arabidopsis thaliana
  peptide (1)..(292): Ceres Seq. ID no. 12396184
MLSGIGPKKELQRLKIPVVLENEHVGKGMADNPMNTILVPSKAPIEQSLIQTVGITKMGVYVEASTGFGQSPESIHTHYGIMSNKNELFSTIPAKQRRPEATQAYITRNKYQLHEAFNGSFILEKLAYPISRGHLSLVNTNVDDNPSVTFNYFKHPVDLQRCVEAIRLVSKVVTSKRFLNYTQCDKQNVHKMLSLSVKANINLRPKQLNDTKSMAQFCKDTVVTIWHYHGGCLVGKVVSPNRKVLGVDRLRVIDGSTFDESPGTNPQATMMMMGRYMGVKILRERLGNKAGV

SEQ ID NO: 24583 - DNA, 1390 bp, Arabidopsis thaliana
  misc_feature (1)..(1390): Ceres Seq. ID no. 12338463
  misc_feature (1)..(1390): Ortholog of  Ceres SEQ ID NO 14303542 as cited in SEQ ID NO 63539
  misc_feature (1)..(1390): Ortholog of  Ceres SEQ ID NO 12407937 as cited in SEQ ID NO 0
aaaaaaatcccaaaaagcttcgttcttttttagtcatcatcatcttcttcttttcttcttcttcggttgctaaatcggagatggcgactgctctggtttctcctcttacttcacaactcaaccatgaagctgtctgttccaagtttgtgttacccaaatcgccgttcatatcgggatctaagctcttttcatcgaacatgccttgctctactgttcctagacgcacaagaagatcacactgctttgcttctgctaaagatatgagctttgaccatatccctaaacaatttcgtggagacaatctcaaagacggagtgatgcagaacttcaagaacgtaccgcaatatttttacgggcttaattcagctcaaatggatatgttcatgacagaagatagccctgtccgtaggcaagcggaaaaagttacagaggaaagcatctcgtctagaaataactatttgaacaatggaggaatatggagtatatccggtatgaatgcagcagatgctagaagatatagcatgagtgtccagatgtacagaggtggaggtggcggcggaggatctgaaagaccaagaactgctcctccagatttgccttctttgctattggatgctcgcatatgctaccttggcatgccaatcgtacctgcagttactgagttactcgttgctcaatttatgtggttagactatgataacccaacaaagcccatctacctatatataaattcacccgggacccagaatgagaagatggaaactgttggatcagaaacagaggcttatgccatagccgatactatttcttattgcaaatcagatgtatacactatcaattgtggcatggcttttggtcaagcagcaatgcttctttctctcgggaaaaaaggttatcgtgccgtacaaccacattcatcaacaaaattatatctgccaaaagtaaacagatcgagtggagctgccatagacatgtggataaaggccaaggaacttgatgcaaataccgagtactacatcgagctgttagctaagggaacagggaaatccaaagagcagatcaacgaggacatcaagcgacctaaatatctccaagctcaagcagccattgactatggaattgcagacaagatagctgactcgcaggacagttctttcgagaaacgggattacgatgggacccttgcccagagagctatgagacctggaggaggcagtccagcagctccagccggactaagatgatcaattcccaccagaaagaaagaggttgaatcctaatttcctagtcactctggaatatgtagctcttacaatctataagcaaacacatgtggtagtaacatacaaaaaagtgttggcaaaaagggaaataacatcaaaagttatcc

SEQ ID NO: 24584 - protein, 413 aa, Arabidopsis thaliana
  peptide (1)..(413): Ceres Seq. ID no. 12338464
KNPKKLRSFLVIIIFFFSSSSVAKSEMATALVSPLTSQLNHEAVCSKFVLPKSPFISGSKLFSSNMPCSTVPRRTRRSHCFASAKDMSFDHIPKQFRGDNLKDGVMQNFKNVPQYFYGLNSAQMDMFMTEDSPVRRQAEKVTEESISSRNNYLNNGGIWSISGMNAADARRYSMSVQMYRGGGGGGGSERPRTAPPDLPSLLLDARICYLGMPIVPAVTELLVAQFMWLDYDNPTKPIYLYINSPGTQNEKMETVGSETEAYAIADTISYCKSDVYTINCGMAFGQAAMLLSLGKKGYRAVQPHSSTKLYLPKVNRSSGAAIDMWIKAKELDANTEYYIELLAKGTGKSKEQINEDIKRPKYLQAQAAIDYGIADKIADSQDSSFEKRDYDGTLAQRAMRPGGGSPAAPAGLR

SEQ ID NO: 24585 - protein, 387 aa, Arabidopsis thaliana
  peptide (1)..(387): Ceres Seq. ID no. 12338466
MATALVSPLTSQLNHEAVCSKFVLPKSPFISGSKLFSSNMPCSTVPRRTRRSHCFASAKDMSFDHIPKQFRGDNLKDGVMQNFKNVPQYFYGLNSAQMDMFMTEDSPVRRQAEKVTEESISSRNNYLNNGGIWSISGMNAADARRYSMSVQMYRGGGGGGGSERPRTAPPDLPSLLLDARICYLGMPIVPAVTELLVAQFMWLDYDNPTKPIYLYINSPGTQNEKMETVGSETEAYAIADTISYCKSDVYTINCGMAFGQAAMLLSLGKKGYRAVQPHSSTKLYLPKVNRSSGAAIDMWIKAKELDANTEYYIELLAKGTGKSKEQINEDIKRPKYLQAQAAIDYGIADKIADSQDSSFEKRDYDGTLAQRAMRPGGGSPAAPAGLR

SEQ ID NO: 24586 - protein, 348 aa, Arabidopsis thaliana
  peptide (1)..(348): Ceres Seq. ID no. 12338467
MPCSTVPRRTRRSHCFASAKDMSFDHIPKQFRGDNLKDGVMQNFKNVPQYFYGLNSAQMDMFMTEDSPVRRQAEKVTEESISSRNNYLNNGGIWSISGMNAADARRYSMSVQMYRGGGGGGGSERPRTAPPDLPSLLLDARICYLGMPIVPAVTELLVAQFMWLDYDNPTKPIYLYINSPGTQNEKMETVGSETEAYAIADTISYCKSDVYTINCGMAFGQAAMLLSLGKKGYRAVQPHSSTKLYLPKVNRSSGAAIDMWIKAKELDANTEYYIELLAKGTGKSKEQINEDIKRPKYLQAQAAIDYGIADKIADSQDSSFEKRDYDGTLAQRAMRPGGGSPAAPAGLR

SEQ ID NO: 24587 - DNA, 1302 bp, Arabidopsis thaliana
  misc_feature (1)..(1302): Ceres Seq. ID no. 13487771
  misc_feature (1)..(1302): Ortholog of  Ceres SEQ ID NO 14314434 as cited in SEQ ID NO 52401
  misc_feature (1)..(1302): Ortholog of  Ceres SEQ ID NO 14303939 as cited in SEQ ID NO 54286
  misc_feature (1)..(1302): Ortholog of  Ceres SEQ ID NO 14307760 as cited in SEQ ID NO 54741
  misc_feature (1)..(1302): Ortholog of  Ceres SEQ ID NO 15179003 as cited in SEQ ID NO 0
gatcggtcccttttgttttatcgttttagggtttgtagctcctttctctttttttcttttctcaatttcccccaaattaaaaaaaaactctctctttcagagatttacaaatttcatttctccaaatccgaaaccccaaagtgaatatttttccttctgggtttcttttgtttgcctggaaacatttgtctcagattttgattttgaccggagtactcatattctccggcgatttctccggcgacatcgtctgtgaaatggagggaattactcatccaatacctcgtactgttgaagaggtctttagcgacttcagaggtcgacgagctggtcttattaaagctctcactaatgatatggtgaagttttaccaaacgtgtgatcctgagaaggagaatttgtgtctctatggacttccaaatgagacatgggaggttaatctacccgttgaggaagttcctcctgagcttcctgaaccagctttaggcatcaatttcgctagagacggaatgcaagaaaaggactgggtatctttggtcgcagttcacagtgattcatggctgctttctgttgcattttactttggtgcacgtttcggatttggcaagaatgagaggaagaggctgttccagatgattaatgagctgccaaccattttcgaagttgtgagcggcaatgcaaagcagtccaaggatctatctgttaacaacaataatagcaaaagcaaacctagtggcgtcaagtctcgccaatccgaatctctcacaaaggttgcaaagatgtcatctccaccgccaaaagaagaagaagaagaagaagatgagagtgaagatgagagtgaagacgatgaacaaggtgcggtttgtggtgcttgtggagacaactacggtacagatgagttctggatttgctgcgacgcctgtgagaaatggttccatggaaaatgtgtgaagataacacctgcaaaagcagaacacatcaagcattacaaatgcccaacttgcagtaacaagagagccagaccttgaagttaaataaccaaattataagaaggtaaagtgagttaggagaaaattgtgaaagaagaaggtgaagtttccagtttataagaaatgccagtaaaagggactagaagatgtaagcaggtaaaaaatatttgtattgcttaatctttattgttggattgagactatttacagttggtgatgtcttttcttttctttttttttggatttttgttgttgttaatgttaattctactmctaatttgtttggtctgtttaagatattttagttctgatt

SEQ ID NO: 24588 - protein, 256 aa, Arabidopsis thaliana
  peptide (1)..(256): Ceres Seq. ID no. 15220487
MEGITHPIPRTVEEVFSDFRGRRAGLIKALTNDMVKFYQTCDPEKENLCLYGLPNETWEVNLPVEEVPPELPEPALGINFARDGMQEKDWVSLVAVHSDSWLLSVAFYFGARFGFGKNERKRLFQMINELPTIFEVVSGNAKQSKDLSVNNNNSKSKPSGVKSRQSESLTKVAKMSSPPPKEEEEEEDESEDESEDDEQGAVCGACGDNYGTDEFWICCDACEKWFHGKCVKITPAKAEHIKHYKCPTCSNKRARP

SEQ ID NO: 24589 - protein, 223 aa, Arabidopsis thaliana
  peptide (1)..(223): Ceres Seq. ID no. 15220488
MVKFYQTCDPEKENLCLYGLPNETWEVNLPVEEVPPELPEPALGINFARDGMQEKDWVSLVAVHSDSWLLSVAFYFGARFGFGKNERKRLFQMINELPTIFEVVSGNAKQSKDLSVNNNNSKSKPSGVKSRQSESLTKVAKMSSPPPKEEEEEEDESEDESEDDEQGAVCGACGDNYGTDEFWICCDACEKWFHGKCVKITPAKAEHIKHYKCPTCSNKRARP

SEQ ID NO: 24590 - protein, 172 aa, Arabidopsis thaliana
  peptide (1)..(172): Ceres Seq. ID no. 15220489
MQEKDWVSLVAVHSDSWLLSVAFYFGARFGFGKNERKRLFQMINELPTIFEVVSGNAKQSKDLSVNNNNSKSKPSGVKSRQSESLTKVAKMSSPPPKEEEEEEDESEDESEDDEQGAVCGACGDNYGTDEFWICCDACEKWFHGKCVKITPAKAEHIKHYKCPTCSNKRARP

SEQ ID NO: 24591 - DNA, 1561 bp, Arabidopsis thaliana
  misc_feature (1)..(1561): Ceres Seq. ID no. 13491567
  misc_feature (1)..(1561): Ortholog of  Ceres SEQ ID NO 14307534 as cited in SEQ ID NO 55715
  misc_feature (1)..(1561): Ortholog of  Ceres SEQ ID NO 14307548 as cited in SEQ ID NO 58859
  misc_feature (1)..(1561): Ortholog of  Ceres SEQ ID NO 15172032 as cited in SEQ ID NO 59531
aaactaatacgcattgagtttcgttgctttctcggggaaaatctctttgtaactaaacttttatgtacctaccaaaaatcttatgatgagattcttcaagaccgaccatagattgttacatcgaatcattgggtacacaagaccattccacggtctagctaaaacccaaaacggtgagatcgctagaccaggtttggttgatccaagctcgcacccgtggcccgagtggctagatttaatggggatgctagcgaaaaaaggttactttgaagaaagcttgattccattgatgagttccaaggaatctaatcatattcgtacagcttgtctcaatttcgcccgccatcgtttcactctcgttagaaacctgtcaaagaaagatatcaaagtgattgctgggtgtggttgtccaagcactgataggaaggtcgtgaactcaggaaagcgtctaagagcttatgttggcattgatgaaagaaatgtgtgtggctcttgcaacttgagagggaaatgtgaaagggcgtatgcacaagcacgagatgatgaaggtgctcgaactatagatgtcatgcgtttactgctaacttacgggcttgattccatttctcctactgtggagaatcgtgcctgtcaaaccaaacttgttgaagattctgtgaggaagttgctcagagaaagtgtagcgtatagcttaacagattttgaatctgctgagactgagacagctggagatgagctccagccaaattcacaggacattgatgaaagagatccacgaaaaaggccaggggattggtattgtacagaatgcaagtttctaaattttgcgaaaaacataagatgcttgcgatgtgatgttttttctgaggaaaggcttaaacagttgaaggaagaacaaaaagatcatctcccactgaagaaaggagattggatttgtcaaacatgtaatttcctgaacttttcgaaaaacacgagatgcttaagatgcaaagacaagcctacattgcgtcaaatcaatcccggagagtgggaatgcgagtcgtgcaattacatcaattttagaagaaactctatatgtttgaagtgtgatcacaagagacaaaaggctgcaaacgtcactccggattcaaagacagttgctgatcgtcaaagcggagttacaaagacgtggagctttgtagaagaagagagtgtaaaacgatgcaatggcgaagaagaggaagaagaagatggtttcatgggatttccagtagagggagggagaagcaatgtttcaaagagcgcagaaaagagagagcaatggaagttggagatgacacagagaattagaagcaatgggactaaagcgaaaaaagatgataatacgaagaacgaaacagagtcaaaatgttatgatcggagaagaaatgaacttcttggtaacattagtgatgatggagagatggatgattggtttgtttcaaaacaagatagatcgacttaaattgaatttataaatttgtaaccacatccatctgtttgtttcttctagtgttttattattggttcattggttggtttg

SEQ ID NO: 24592 - protein, 466 aa, Arabidopsis thaliana
  peptide (1)..(466): Ceres Seq. ID no. 13491568
MMRFFKTDHRLLHRIIGYTRPFHGLAKTQNGEIARPGLVDPSSHPWPEWLDLMGMLAKKGYFEESLIPLMSSKESNHIRTACLNFARHRFTLVRNLSKKDIKVIAGCGCPSTDRKVVNSGKRLRAYVGIDERNVCGSCNLRGKCERAYAQARDDEGARTIDVMRLLLTYGLDSISPTVENRACQTKLVEDSVRKLLRESVAYSLTDFESAETETAGDELQPNSQDIDERDPRKRPGDWYCTECKFLNFAKNIRCLRCDVFSEERLKQLKEEQKDHLPLKKGDWICQTCNFLNFSKNTRCLRCKDKPTLRQINPGEWECESCNYINFRRNSICLKCDHKRQKAANVTPDSKTVADRQSGVTKTWSFVEEESVKRCNGEEEEEEDGFMGFPVEGGRSNVSKSAEKREQWKLEMTQRIRSNGTKAKKDDNTKNETESKCYDRRRNELLGNISDDGEMDDWFVSKQDRST

SEQ ID NO: 24593 - protein, 465 aa, Arabidopsis thaliana
  peptide (1)..(465): Ceres Seq. ID no. 13491569
MRFFKTDHRLLHRIIGYTRPFHGLAKTQNGEIARPGLVDPSSHPWPEWLDLMGMLAKKGYFEESLIPLMSSKESNHIRTACLNFARHRFTLVRNLSKKDIKVIAGCGCPSTDRKVVNSGKRLRAYVGIDERNVCGSCNLRGKCERAYAQARDDEGARTIDVMRLLLTYGLDSISPTVENRACQTKLVEDSVRKLLRESVAYSLTDFESAETETAGDELQPNSQDIDERDPRKRPGDWYCTECKFLNFAKNIRCLRCDVFSEERLKQLKEEQKDHLPLKKGDWICQTCNFLNFSKNTRCLRCKDKPTLRQINPGEWECESCNYINFRRNSICLKCDHKRQKAANVTPDSKTVADRQSGVTKTWSFVEEESVKRCNGEEEEEEDGFMGFPVEGGRSNVSKSAEKREQWKLEMTQRIRSNGTKAKKDDNTKNETESKCYDRRRNELLGNISDDGEMDDWFVSKQDRST

SEQ ID NO: 24594 - protein, 414 aa, Arabidopsis thaliana
  peptide (1)..(414): Ceres Seq. ID no. 13491570
MGMLAKKGYFEESLIPLMSSKESNHIRTACLNFARHRFTLVRNLSKKDIKVIAGCGCPSTDRKVVNSGKRLRAYVGIDERNVCGSCNLRGKCERAYAQARDDEGARTIDVMRLLLTYGLDSISPTVENRACQTKLVEDSVRKLLRESVAYSLTDFESAETETAGDELQPNSQDIDERDPRKRPGDWYCTECKFLNFAKNIRCLRCDVFSEERLKQLKEEQKDHLPLKKGDWICQTCNFLNFSKNTRCLRCKDKPTLRQINPGEWECESCNYINFRRNSICLKCDHKRQKAANVTPDSKTVADRQSGVTKTWSFVEEESVKRCNGEEEEEEDGFMGFPVEGGRSNVSKSAEKREQWKLEMTQRIRSNGTKAKKDDNTKNETESKCYDRRRNELLGNISDDGEMDDWFVSKQDRST

SEQ ID NO: 24595 - DNA, 1400 bp, Arabidopsis thaliana
  misc_feature (1)..(1400): Ceres Seq. ID no. 12322858
  misc_feature (1)..(1400): Ortholog of  Ceres SEQ ID NO 14314400 as cited in SEQ ID NO 57691
gggttcgagacgacgacaagagacaagctctgtctgtggtcgggaaatcgaaaccagagccttggactgtgtctctgctctgtggagtatccattttcgatttcttgaaggtgaatccagcgaatccttaatctcaagctccgagactgtgcaataaacaaaacagtagctagcagcagcagcaacacatgaactcgtgcaaatcccttatccgtgcctcaatctcttcctttccatttgttcctcttccaaaccctaatttctctatcaccttcatctccgttcgcgccttttctcctctctctgtccttcatccaaattcatcatgtattgtaacagctcgacgcacatttcatggagctgtggctctttcaccggagagcttaacggaagagtctcccaaggatactgtgaaaggattgttaacaaccaatcgtggtgaggcctcaagcttgatgaaaatggagcggaggtgtagcttaagcaatggtgagggtgattgtagaggatcttggtttccttacgaggataggttcaggtgtggtgaggtgcatcttagtagccgtgaggtgttggaggcggtgagtcctcatatgatggaagagaggacagataggttcaggcgtgtggtggagaatcgaagctactcggtgtgtcttgtggttgaaggtctctctgattttggaaacatctctgctgctttccgctcagctgatgcgttggggattcaatctgtacatgttgtttcctgtgacagctccaaaaggtgcccctttgaggtataacggaaatcgccatgtgagtatgggagctgagaaatggctggacattgagttttgggacacacctaaagaatgtttcaaagttttgaagtctcgcggttacagaatagctacaactcatttgggaatggacacggtttccatttacgatatggactggtcatgcccaacagcaatagttgttggaaacgagggcaggggaataagtgacgaagcgttggagttatcagatctgcgttgcagtattccgatgaatggaatggttgattcgtttaatgtctcagtggctgcagggattctgatgcaccacgcagtctctgatagaaccactcgtctgggaagccatggagatctgtcggaagcagagaaagagatattgatggctgagttctcacttcgtcacagtagaagctcaatttgcattgcttacgagttcgctaaacgtaaacaacaacactctacctcctcctaattttgaaaccgttgtcttattctctcgctgttttgcgtgttataggcttcgaatgacgcctataaaaactctttcgaactctttttttggtacgacgcttgcttcatgtacaactcttaaattctataaaagacatccttctgtcg

SEQ ID NO: 24596 - protein, 198 aa, Arabidopsis thaliana
  peptide (1)..(198): Ceres Seq. ID no. 12322859
MNSCKSLIRASISSFPFVPLPNPNFSITFISVRAFSPLSVLHPNSSCIVTARRTFHGAVALSPESLTEESPKDTVKGLLTTNRGEASSLMKMERRCSLSNGEGDCRGSWFPYEDRFRCGEVHLSSREVLEAVSPHMMEERTDRFRRVVENRSYSVCLVVEGLSDFGNISAAFRSADALGIQSVHVVSCDSSKRCPFEV

SEQ ID NO: 24597 - protein, 179 aa, Arabidopsis thaliana
  peptide (1)..(179): Ceres Seq. ID no. 12322860
MRWGFNLYMLFPVTAPKGAPLRYNGNRHVSMGAEKWLDIEFWDTPKECFKVLKSRGYRIATTHLGMDTVSIYDMDWSCPTAIVVGNEGRGISDEALELSDLRCSIPMNGMVDSFNVSVAAGILMHHAVSDRTTRLGSHGDLSEAEKEILMAEFSLRHSRSSICIAYEFAKRKQQHSTSS

SEQ ID NO: 24598 - protein, 171 aa, Arabidopsis thaliana
  peptide (1)..(171): Ceres Seq. ID no. 12322861
MLFPVTAPKGAPLRYNGNRHVSMGAEKWLDIEFWDTPKECFKVLKSRGYRIATTHLGMDTVSIYDMDWSCPTAIVVGNEGRGISDEALELSDLRCSIPMNGMVDSFNVSVAAGILMHHAVSDRTTRLGSHGDLSEAEKEILMAEFSLRHSRSSICIAYEFAKRKQQHSTSS

SEQ ID NO: 24599 - DNA, 1526 bp, Arabidopsis thaliana
  misc_feature (1)..(1526): Ceres Seq. ID no. 12325036
  misc_feature (1)..(1526): Ortholog of  Ceres SEQ ID NO 13596392 as cited in SEQ ID NO 62136
  misc_feature (1)..(1526): Ortholog of  Ceres SEQ ID NO 13654360 as cited in SEQ ID NO 67980
  misc_feature (1)..(1526): Ortholog of  Ceres SEQ ID NO 13596394 as cited in SEQ ID NO 68561
aagacaaaatagatttcttcttctctttgtttgacccacattttctctggaaaaaattcgtctactttctccgatcgtctcttcattgatcggaaaaccaacaacgacccattattcctctcctgtttctggcgcaaacccttgtagcaagttttgattttggtgagaaaatattttagggatctgaagagaaagaacacgatgatgacgagtatggaagggatggtggagaaaggagtattggatgatattataagaagattgttagaaggtaaaggaggcaaacaggttcagctttccgagagcgagattcgtcaactctgctttaacgctcgtcaaatcttcctctctcaacctaatctccttgatctccatgccccaattcgcatctgcggtgatattcatggtcaatatcaagatcttttgaggttgtttgaatacggaggttatcctccttcagcaaactatctattccttggtgattacgttgacagaggcaaacaaagtcttgagaccatatgtttgcttcttgcttacaagatacggtacccatcgaagatatatctgttgagagggaaccatgaggatgctaagatcaacaggatttacgggttttatgacgagtgcaaacggagattcaatgtacgactctggaaggtgtttactgattgcttcaactgtttacctgtagctgcacttattgatgagaagatactgtgtatgcacggtggtttgtcaccagatttggataatttgaatcagattcgagagattcaaaggcctattgagattccagacagtggtcttctttgtgatttactttggtcagatcctgatcagaagattgaaggttgggctgatagtgatcgaggtatctcttgcacttttggagctgataaagtcgctgagttcttggataagaatgatcttgacctcatttgccgaggccatcaggtagtagaagacgggtatgagtttttcgcaaaacggagattagtcacgatattctcagctccaaactatggtggggagtttgacaacgctggtgcgttattaagcgttgacgagtctcttgtatgttcctttgagattatgaaaccagccccagcttcaagcagtcatcctctcaagaaggactttcacaacagaaccttaggttataatttgagtgcttagcatggacttcaaagtgtacaatcttaagcagtgggagcactattgcaatttggtaccgaagatggggaagtcttgaatatctagtcctctctatgtcaatatcacggttccacagctcaagctaggctcaagattctgagtgtcattacaactgtgtctgtgtctccaattatgggttgaatgcaatgaagaacccaaagggtacttacttagtcatcaaacaacttctgtaaaaaaacaaaaaaagtgagaaaacaaaaacacactttgttttctttgtatagatgcagaaaatgatctgtcttctgcttctggagattttatctccttattagtctctcttttctttc

SEQ ID NO: 24600 - protein, 324 aa, Arabidopsis thaliana
  peptide (1)..(324): Ceres Seq. ID no. 12325037
MMTSMEGMVEKGVLDDIIRRLLEGKGGKQVQLSESEIRQLCFNARQIFLSQPNLLDLHAPIRICGDIHGQYQDLLRLFEYGGYPPSANYLFLGDYVDRGKQSLETICLLLAYKIRYPSKIYLLRGNHEDAKINRIYGFYDECKRRFNVRLWKVFTDCFNCLPVAALIDEKILCMHGGLSPDLDNLNQIREIQRPIEIPDSGLLCDLLWSDPDQKIEGWADSDRGISCTFGADKVAEFLDKNDLDLICRGHQVVEDGYEFFAKRRLVTIFSAPNYGGEFDNAGALLSVDESLVCSFEIMKPAPASSSHPLKKDFHNRTLGYNLSA

SEQ ID NO: 24601 - protein, 323 aa, Arabidopsis thaliana
  peptide (1)..(323): Ceres Seq. ID no. 12325038
MTSMEGMVEKGVLDDIIRRLLEGKGGKQVQLSESEIRQLCFNARQIFLSQPNLLDLHAPIRICGDIHGQYQDLLRLFEYGGYPPSANYLFLGDYVDRGKQSLETICLLLAYKIRYPSKIYLLRGNHEDAKINRIYGFYDECKRRFNVRLWKVFTDCFNCLPVAALIDEKILCMHGGLSPDLDNLNQIREIQRPIEIPDSGLLCDLLWSDPDQKIEGWADSDRGISCTFGADKVAEFLDKNDLDLICRGHQVVEDGYEFFAKRRLVTIFSAPNYGGEFDNAGALLSVDESLVCSFEIMKPAPASSSHPLKKDFHNRTLGYNLSA

SEQ ID NO: 24602 - protein, 320 aa, Arabidopsis thaliana
  peptide (1)..(320): Ceres Seq. ID no. 12325039
MEGMVEKGVLDDIIRRLLEGKGGKQVQLSESEIRQLCFNARQIFLSQPNLLDLHAPIRICGDIHGQYQDLLRLFEYGGYPPSANYLFLGDYVDRGKQSLETICLLLAYKIRYPSKIYLLRGNHEDAKINRIYGFYDECKRRFNVRLWKVFTDCFNCLPVAALIDEKILCMHGGLSPDLDNLNQIREIQRPIEIPDSGLLCDLLWSDPDQKIEGWADSDRGISCTFGADKVAEFLDKNDLDLICRGHQVVEDGYEFFAKRRLVTIFSAPNYGGEFDNAGALLSVDESLVCSFEIMKPAPASSSHPLKKDFHNRTLGYNLSA

SEQ ID NO: 24603 - DNA, 1105 bp, Arabidopsis thaliana
  misc_feature (1)..(1105): Ceres Seq. ID no. 13503936
  misc_feature (1)..(1105): Ortholog of  Ceres SEQ ID NO 13596039 as cited in SEQ ID NO 62117
aacaattcagatttcaatttctcaaaatcttaaaaactttctctcaattctctctaccgtgatcaagatgcagatctttgttaagactctcaccggaaagacaatcaccctcgaggtggaaagctccgacaccatcgacaacgttaaggccaagatccaggataaggagggcattcctccggatcagcagaggcttattttcgccggcaagcagctagaggatggccgtacgttggctgattacaatatccagaaggaatccaccctccacttggtcctcaggctccgtggtggtatgcagattttcgttaaaaccctaacgggaaagacgattactcttgaggtggagagttctgacaccatcgacaacgtcaaggccaagatccaagacaaagagggtattcctccggaccagcagaggctgatcttcgccggaaagcagttggaggatggcagaactcttgctgactacaayatycagaaggagtccacmcttcatcttgktcttgcagkctscgtggwggtatgcagatyttcgtkaagactctcacyggaaagaccatcactttggaggtggagagttctgacaccattgataacgtgaaagccaagatccaggacaaagagggtatycctccggaccagcagagattgatcttcgccggaaagcaacttgargatgghagaactttggcbgactacaacattcagaaggagtccacmcttcacttggtcttgcgtctgcgtggaggtatgcagatcttcgtsaagactytbaccggaaagacyatcacyytkgargtrgaragctcygacaccattgacaacgtcaaggccaagatccaggacaaggaaggtattcctccggaccagcagcgtctcatcttcgctggaaagcagcttgaggatggacgtactttggccgactacaacatccagaaggagtctactcttcacttggtcctgcgtcttcgtggtggtttctaaatctcgtctctgttatgcttaagaagttcaatgtttcgtttcatgtaaaactttggtggtttgtgttttggggccttgtataatccctgatgaataagtgttctactatgtttccgtt

SEQ ID NO: 24604 - protein, 200 aa, Arabidopsis thaliana
  peptide (1)..(200): Ceres Seq. ID no. 15223254
  misc_feature (158)..(158): Xaa is any aa, unknown or other
  misc_feature (159)..(159): Xaa is any aa, unknown or other
  misc_feature (164)..(164): Xaa is any aa, unknown or other
  misc_feature (168)..(168): Xaa is any aa, unknown or other
  misc_feature (171)..(171): Xaa is any aa, unknown or other
  misc_feature (172)..(172): Xaa is any aa, unknown or other
  misc_feature (174)..(174): Xaa is any aa, unknown or other
  misc_feature (178)..(178): Xaa is any aa, unknown or other
  misc_feature (180)..(180): Xaa is any aa, unknown or other
  misc_feature (184)..(184): Xaa is any aa, unknown or other
TIQISISQNLKNFLSILSTVIKMQIFVKTLTGKTITLEVESSDTIDNVKAKIQDKEGIPPDQQRLIFAGKQLEDGRTLADYNIQKESTLHLVLRLRGGMQIFVKTLTGKTITLEVESSDTIDNVKAKIQDKEGIPPDQQRLIFAGKQLEDGRTLADYXXQKESXLHLXLAXXVXVCRXSXRLSXERPSLWRWRVLTPLIT

SEQ ID NO: 24605 - protein, 178 aa, Arabidopsis thaliana
  peptide (1)..(178): Ceres Seq. ID no. 15223255
  misc_feature (136)..(136): Xaa is any aa, unknown or other
  misc_feature (137)..(137): Xaa is any aa, unknown or other
  misc_feature (142)..(142): Xaa is any aa, unknown or other
  misc_feature (146)..(146): Xaa is any aa, unknown or other
  misc_feature (149)..(149): Xaa is any aa, unknown or other
  misc_feature (150)..(150): Xaa is any aa, unknown or other
  misc_feature (152)..(152): Xaa is any aa, unknown or other
  misc_feature (156)..(156): Xaa is any aa, unknown or other
  misc_feature (158)..(158): Xaa is any aa, unknown or other
  misc_feature (162)..(162): Xaa is any aa, unknown or other
MQIFVKTLTGKTITLEVESSDTIDNVKAKIQDKEGIPPDQQRLIFAGKQLEDGRTLADYNIQKESTLHLVLRLRGGMQIFVKTLTGKTITLEVESSDTIDNVKAKIQDKEGIPPDQQRLIFAGKQLEDGRTLADYXXQKESXLHLXLAXXVXVCRXSXRLSXERPSLWRWRVLTPLIT

SEQ ID NO: 24606 - protein, 153 aa, Arabidopsis thaliana
  peptide (1)..(153): Ceres Seq. ID no. 15223256
  misc_feature (3)..(3): Xaa is any aa, unknown or other
  misc_feature (5)..(5): Xaa is any aa, unknown or other
  misc_feature (9)..(9): Xaa is any aa, unknown or other
  misc_feature (36)..(36): Xaa is any aa, unknown or other
  misc_feature (51)..(51): Xaa is any aa, unknown or other
  misc_feature (53)..(53): Xaa is any aa, unknown or other
  misc_feature (57)..(57): Xaa is any aa, unknown or other
  misc_feature (66)..(66): Xaa is any aa, unknown or other
  misc_feature (81)..(81): Xaa is any aa, unknown or other
  misc_feature (84)..(84): Xaa is any aa, unknown or other
  misc_feature (88)..(88): Xaa is any aa, unknown or other
  misc_feature (90)..(90): Xaa is any aa, unknown or other
  misc_feature (91)..(91): Xaa is any aa, unknown or other
  misc_feature (92)..(92): Xaa is any aa, unknown or other
  misc_feature (93)..(93): Xaa is any aa, unknown or other
  misc_feature (94)..(94): Xaa is any aa, unknown or other
  misc_feature (96)..(96): Xaa is any aa, unknown or other
MQXFXKTLXGKTITLEVESSDTIDNVKAKIQDKEGXPPDQQRLIFAGKQLXDXRTLXDYNIQKESXLHLVLRLRGGMQIFXKTXTGKXIXXXXXSXDTIDNVKAKIQDKEGIPPDQQRLIFAGKQLEDGRTLADYNIQKESTLHLVLRLRGGF

SEQ ID NO: 24607 - DNA, 1156 bp, Arabidopsis thaliana
  misc_feature (1)..(1156): Ceres Seq. ID no. 12337904
  misc_feature (1)..(1156): Ortholog of  Ceres SEQ ID NO 13586635 as cited in SEQ ID NO 14217
  misc_feature (1)..(1156): Ortholog of  Ceres SEQ ID NO 12616285 as cited in SEQ ID NO 63483
acatcttaaaaagtaaaaacacattcatctatccaacaaaaaaaaaaaaaaaaaaggagaaatggaaggaatcgatcatagaatggtgagtgtcaatggcataactatgcacattgccgagaaaggtcccaaagaagggacctgtggtgcttctcctccatggattccctaatctctggtacacgtggcgtcaccagattagtgggttatcatctctaggttaccgcgctgtagctccagacctccgaggctacggagactctgattcgccagagtctttctccgagtacacgtgtcttaacgtcgttggggacctcgtagctcttctggacagtgttgctggaaatcaagagaaggtgtttctggtcggtcatgattggggagccattatcggatggtttctctgtttgtttcgacctgaaaagattaacggctttgtgtgtttgagtgtgccgtatagatcaagaaaccctaaagtcaagcccgttcaagggttcaaggctgtatttggagatgattactacatttgtagatttcaggaaccggggaagattgaaggagagattgcaagtgcagatccaagaatatttctgaggaacctcttcacagggaggacactcggtccgccgattttacctaaggataatccctttggggaaaaacctaaccctaatagcgaaaacattgaattgcctgaatggttttctaagaaagatctcgatttctatgtctccaaattcgagaaggcaggatttaccggtggattgaactactacagagccatggatctgaattgggagctcactgcaccatggaccggagctaagattcaagttccagtgaagttcatgacaggtgacttcgacatggtttacaccacaccagggatgaaagagtacattcacggtggtggatttgctgcagatgttccaactcttcaagagatagtggtgattgaagatgctggtcacttcgttaaccaagagaaacctcaagaggtcactgctcacatcaatgacttcttcaccaagcttcgggacaacaacaaaagcttttagagttctcgtttggttctattatgttggctctcaaaacaagttggttcttgcatgtgttgtttcgacaagattttgaataagacttggcattatgaagc

SEQ ID NO: 24608 - protein, 91 aa, Arabidopsis thaliana
  peptide (1)..(91): Ceres Seq. ID no. 12337905
MDLNWELTAPWTGAKIQVPVKFMTGDFDMVYTTPGMKEYIHGGGFAADVPTLQEIVVIEDAGHFVNQEKPQEVTAHINDFFTKLRDNNKSF

SEQ ID NO: 24609 - protein, 69 aa, Arabidopsis thaliana
  peptide (1)..(69): Ceres Seq. ID no. 12337906
MTGDFDMVYTTPGMKEYIHGGGFAADVPTLQEIVVIEDAGHFVNQEKPQEVTAHINDFFTKLRDNNKSF

SEQ ID NO: 24610 - protein, 63 aa, Arabidopsis thaliana
  peptide (1)..(63): Ceres Seq. ID no. 12337907
MVYTTPGMKEYIHGGGFAADVPTLQEIVVIEDAGHFVNQEKPQEVTAHINDFFTKLRDNNKSF

SEQ ID NO: 24611 - DNA, 1205 bp, Arabidopsis thaliana
  misc_feature (1)..(1205): Ceres Seq. ID no. 12322982
  misc_feature (1)..(1205): Ortholog of  Ceres SEQ ID NO 14308536 as cited in SEQ ID NO 55469
  misc_feature (1)..(1205): Ortholog of  Ceres SEQ ID NO 15179772 as cited in SEQ ID NO 64248
attcatttttgttctcttatttactttagtcctctcgaatcccataaagtccacaactctctccttgtagagagagagattttatggcggtggagctcatgactcggaattacatctccggcgtcggagctgatagcttcgccgttcaagaagcagctgcttcaggactcaaaagtatcgaaaatttcatcggtttaatgtctcgtgatagctttaactctgatcagccatcttcttcttccgcctccgcctccgcctccgccgccgcagatcttgaatcagctcgtaacacaacggcggacgcggctgtttcaaagtttaaaagagtcatatctctcttagatcgaactcgaaccggacacgcccggtttagacgtgctccggttcatgttatttctccggttcttttacaagaagaaccaaaaacgacgccgtttcagtctcctcttcctcctccgccgcaaatgatccgaaaaggttcgttttcttcatcgatgaaaacgattgatttctcatctctctcctctgtaacaacggaatcagacaaccagaagaagattcatcatcatcaacgtccctctgaaacggcgccgtttgcgtctcaaactcaaagcctctccacgacggtctcgtctttctcaaaatcaacaaagagaaaatgtaactctgagaatcttctcaccggaaaatgcgcttccgcttcttcctccggtcgttgtcattgctcgaagaaaagaaagataaaacagaggagaataattagggttccggcgataagtgcaaaaatgtccgatgtaccaccggacgattattcatggaggaaatacggacaaaaaccaattaaaggatctccacatccaagaggatattataagtgtagtagcgtaagaggttgtccagcacgtaaacatgttgagagagcagctgatgattcgtccatgttgattgttacttatgaaggagatcataatcattctctctccgccgctgatctcgccggagccgccgttgctgatcttattttggaatcgtcttgaaaagaacaaatctttatttaaggcttttataatataaatttagatccttacttagtgaagtactcttttttttttctattatcaaacgatagaaactatgaatgaaatcaatgtaatcaaaaagcttttgctaaattgtaattgtgatatattcatcatgtttacttg

SEQ ID NO: 24612 - protein, 317 aa, Arabidopsis thaliana
  peptide (1)..(317): Ceres Seq. ID no. 12322983
MAVELMTRNYISGVGADSFAVQEAAASGLKSIENFIGLMSRDSFNSDQPSSSSASASASAAADLESARNTTADAAVSKFKRVISLLDRTRTGHARFRRAPVHVISPVLLQEEPKTTPFQSPLPPPPQMIRKGSFSSSMKTIDFSSLSSVTTESDNQKKIHHHQRPSETAPFASQTQSLSTTVSSFSKSTKRKCNSENLLTGKCASASSSGRCHCSKKRKIKQRRIIRVPAISAKMSDVPPDDYSWRKYGQKPIKGSPHPRGYYKCSSVRGCPARKHVERAADDSSMLIVTYEGDHNHSLSAADLAGAAVADLILESS

SEQ ID NO: 24613 - protein, 312 aa, Arabidopsis thaliana
  peptide (1)..(312): Ceres Seq. ID no. 12322984
MTRNYISGVGADSFAVQEAAASGLKSIENFIGLMSRDSFNSDQPSSSSASASASAAADLESARNTTADAAVSKFKRVISLLDRTRTGHARFRRAPVHVISPVLLQEEPKTTPFQSPLPPPPQMIRKGSFSSSMKTIDFSSLSSVTTESDNQKKIHHHQRPSETAPFASQTQSLSTTVSSFSKSTKRKCNSENLLTGKCASASSSGRCHCSKKRKIKQRRIIRVPAISAKMSDVPPDDYSWRKYGQKPIKGSPHPRGYYKCSSVRGCPARKHVERAADDSSMLIVTYEGDHNHSLSAADLAGAAVADLILESS

SEQ ID NO: 24614 - protein, 279 aa, Arabidopsis thaliana
  peptide (1)..(279): Ceres Seq. ID no. 12322985
MSRDSFNSDQPSSSSASASASAAADLESARNTTADAAVSKFKRVISLLDRTRTGHARFRRAPVHVISPVLLQEEPKTTPFQSPLPPPPQMIRKGSFSSSMKTIDFSSLSSVTTESDNQKKIHHHQRPSETAPFASQTQSLSTTVSSFSKSTKRKCNSENLLTGKCASASSSGRCHCSKKRKIKQRRIIRVPAISAKMSDVPPDDYSWRKYGQKPIKGSPHPRGYYKCSSVRGCPARKHVERAADDSSMLIVTYEGDHNHSLSAADLAGAAVADLILESS

SEQ ID NO: 24615 - DNA, 735 bp, Arabidopsis thaliana
  misc_feature (1)..(735): Ceres Seq. ID no. 12602648
  misc_feature (1)..(735): Ortholog of  Ceres SEQ ID NO 12556889 as cited in SEQ ID NO 125
  misc_feature (1)..(735): Ortholog of  Ceres SEQ ID NO 15172982 as cited in SEQ ID NO 51725
aaaataaaggagatcagtttgggagaaagcagcaaagaagaaaaatggcagcaacatttgcaacaccatcgacggtgataggcctcggaggatcatccatcaccaccaaacccttctcttcatcctttttaaaaccaacattaagcgccaagaaccctttgagactcgccggtgcatcgggaggaagagtcacttgctttgagaggaactggttgaggagagatttgaacgtggtaggatttgggctgatcggatggctagtacggctacatcgctccagaatatgcatatacactgagaatagacgagaagagcgatgtgtacagcttcggagtagtgttattggagctgattacgggtcgaaaaccagtagataattttggggaagaagggatagacattgtgcaatggtcaaagatccaaacaaactgtaacagacaaggtgtggtgaagatcattgaccagagattgagcaatattccattagcagaggccatggaactgttctttgtggcaatgctatgtgtgcaagaacatagtgttgagagaccgaccatgagagaggttgtccagatgatctctcaggctaaacagcctaatactttctaaatgcagtgatgttatatatataagagactaaatatatatttttctgttttatgtgtttcatagagttttgtttttagaatttgtaatgatggtttggtggtgatatgagtctatattgaaattgag

SEQ ID NO: 24616 - protein, 124 aa, Arabidopsis thaliana
  peptide (1)..(124): Ceres Seq. ID no. 12602649
NKGDQFGRKQQRRKMAATFATPSTVIGLGGSSITTKPFSSSFLKPTLSAKNPLRLAGASGGRVTCFERNWLRRDLNVVGFGLIGWLVRLHRSRICIYTENRREERCVQLRSSVIGADYGSKTSR

SEQ ID NO: 24617 - protein, 110 aa, Arabidopsis thaliana
  peptide (1)..(110): Ceres Seq. ID no. 12602650
MAATFATPSTVIGLGGSSITTKPFSSSFLKPTLSAKNPLRLAGASGGRVTCFERNWLRRDLNVVGFGLIGWLVRLHRSRICIYTENRREERCVQLRSSVIGADYGSKTSR

SEQ ID NO: 24618 - DNA, 969 bp, Arabidopsis thaliana
  misc_feature (1)..(969): Ceres Seq. ID no. 12323016
  misc_feature (1)..(969): Ortholog of  Ceres SEQ ID NO 13656286 as cited in SEQ ID NO 69168
  misc_feature (1)..(969): Ortholog of  Ceres SEQ ID NO 15174351 as cited in SEQ ID NO 0
aattgacaatctctttctttcatcttcatcttattcttctttatctctctctctctctcaggactattgagcttctttcttttttcctgagtcttttagtctgatctcttacaagaaacaacaagaatggctttcgcaggaacaacccagaaatgcatggcctgtgacaaaacagtttatcttgtcgacaagttaaccgccgataaccgggtctaccacaaagcttgtttccgatgtcaccattgcaaaggaactctcaagcttagcaattacaactcctttgaaggagttctctactgcagaccacatttcgatcaaaacttcaagagaactggaagtcttgagaaaagcttcgaagggacaccaaagattgggaaacctgataggcctttggagggagagagacctgctggaaccaaagtttcgaatatgtttggtggaacacgagagaaatgcgttggttgcgacaaaaccgtgtatccaattgagaaggtatcggtgaatggaacattgtaccacaagagctgcttcaagtgtacacatggaggctgcacgataagcccttcgaattacatagctcacgagggtaagctatattgcaagcatcatcatattcagctgatcaaggagaaaggaaacttgagccagctcgaaggaggaggagagaatgccgccaaggacaaagtcgtcgctgcttaaagaaacaattcaatctctctgggatgattttgactatcgaagaatcaaaagagtcactacttctccatcgatcgataacatatattggttttgtttcttcctacgtttgtgtttttctttttggtctttaatatgttttttttttttgggacctttgttcactcttttattgggtttcttgaaatgaaactagagaaacaaagaaataatggatgtttgcttatgagatatatatgtattacgttcatatgatataaattaattttcgcg

SEQ ID NO: 24619 - protein, 190 aa, Arabidopsis thaliana
  peptide (1)..(190): Ceres Seq. ID no. 12323017
MAFAGTTQKCMACDKTVYLVDKLTADNRVYHKACFRCHHCKGTLKLSNYNSFEGVLYCRPHFDQNFKRTGSLEKSFEGTPKIGKPDRPLEGERPAGTKVSNMFGGTREKCVGCDKTVYPIEKVSVNGTLYHKSCFKCTHGGCTISPSNYIAHEGKLYCKHHHIQLIKEKGNLSQLEGGGENAAKDKVVAA

SEQ ID NO: 24620 - protein, 180 aa, Arabidopsis thaliana
  peptide (1)..(180): Ceres Seq. ID no. 12323018
MACDKTVYLVDKLTADNRVYHKACFRCHHCKGTLKLSNYNSFEGVLYCRPHFDQNFKRTGSLEKSFEGTPKIGKPDRPLEGERPAGTKVSNMFGGTREKCVGCDKTVYPIEKVSVNGTLYHKSCFKCTHGGCTISPSNYIAHEGKLYCKHHHIQLIKEKGNLSQLEGGGENAAKDKVVAA

SEQ ID NO: 24621 - DNA, 1941 bp, Arabidopsis thaliana
  misc_feature (1)..(1941): Ceres Seq. ID no. 12339071
  misc_feature (1)..(1941): Ortholog of  Ceres SEQ ID NO 15176822 as cited in SEQ ID NO 1160
  misc_feature (1)..(1941): Ortholog of  Ceres SEQ ID NO 13593889 as cited in SEQ ID NO 53305
  misc_feature (1)..(1941): Ortholog of  Ceres SEQ ID NO 13581959 as cited in SEQ ID NO 56156
agactttcttaccgaccagcttagtcttctccattacggcatcattcacctataaatttcgccgctgggtttaattctctattcattcagaaccaaaaaagaagaaacctttttgattctctttgcgatttctttgttcaatctcttctcagattgtgtgaatcgggtttaaatcggggttttagggtctctgttttcaaaagggtaccaaaaagtttggagctttactgtagaaagatttgatttttcgttgacccactccgagattttcggatacaaatcagggttttagggtttttgttggaatggaagaggattatcaacagccgaggtttacgattggtaggcaatcatcaatggcgccggagaagattccggagccgtcggttcactcagaagaagaggtgtttgaggatggagaagagatcgatggtggtgtgagactaatgtatttggctaatgaaggtgacattgaagggattaaggagcttattgattcagggattgatgctaattacagagacattgatgatcggactgctttacacgtggcggcttgtcaaggattgaaagatgttgttgagcttcttcttgatcggaaagctgaggttgatcctaaagatcgttggggaagcactccatttgcagatgcgatattttacaagaacattgatgttatcaagattcttgagatacatggagctaaacatccgatggctccaatgcacgttaagactgctcgtgaagtccctgagtatgaaataaatcctagtgagcttgatttcactcaaagcaaagagataacaaagggaacttactgtatggcaatgtggcgtggtattcaagttgcggtgaaaaagctggatgatgaagttttgagcgatgacgatcaagtgaggaagttccatgatgagcttgcattgctccaaaggcttaggcatccaaacattgtgcagtttcttggtgctgtaacccaaagtaacccaatgatgattgtgactgaatatttgcccaggggggatttgcgtgaattgctcaaacgaaaaggacaattgaaaccagctactgctgttagatatgcccttgatattgctaggggaatgagctatcttcatgagatcaaaggagaccctataatccaccgcgatcttgaaccttcaaacattctgcgggatgattcagggcatctgaaagttgcagactttggagtaagcaagcttgttactgttaaagaagacaagccttttacatgtcaagacatttcttgtcgatatatagctcccgaggttttcactagtgaagaatacgatacaaaagctgatgttttctcatttgcattgatcgttcaggagatgatcgaaggccgaatgccgtttgctgaaaaggaagacagtgaagcttctgaagcttatgctggcaaacatcggccattattcaaagctccatcaaagaattacccacatggtcttaaaacgttgatagaagaatgctggcatgagaaacctgcaaagcgaccaactttcagagagatcattaaacgacttgagtccattcttcaccacatgggtcacaagcgacaatggaggatgaggccattgacatgctttcagaatttcgagcacaagaagaaacataattgggatttgagcagccatgacggctcatcatccggttcacatttgtgattctttaaacggttaaagaaaccattcttttgtatccattccttccggtttagtttgggtttccccaaagcaaccgaatttgactttgtatatttgttgtacactgaagaactcaagaaagtcttcgtgtatacaaaaactgcattttttttattctagtatacaaaattgttgtaagatctatgattttaaccgcaatatatatttgctgttgtaatctaaaaaattggtttaagaatatttatgatttttcccc

SEQ ID NO: 24622 - protein, 459 aa, Arabidopsis thaliana
  peptide (1)..(459): Ceres Seq. ID no. 12339072
MEEDYQQPRFTIGRQSSMAPEKIPEPSVHSEEEVFEDGEEIDGGVRLMYLANEGDIEGIKELIDSGIDANYRDIDDRTALHVAACQGLKDVVELLLDRKAEVDPKDRWGSTPFADAIFYKNIDVIKILEIHGAKHPMAPMHVKTAREVPEYEINPSELDFTQSKEITKGTYCMAMWRGIQVAVKKLDDEVLSDDDQVRKFHDELALLQRLRHPNIVQFLGAVTQSNPMMIVTEYLPRGDLRELLKRKGQLKPATAVRYALDIARGMSYLHEIKGDPIIHRDLEPSNILRDDSGHLKVADFGVSKLVTVKEDKPFTCQDISCRYIAPEVFTSEEYDTKADVFSFALIVQEMIEGRMPFAEKEDSEASEAYAGKHRPLFKAPSKNYPHGLKTLIEECWHEKPAKRPTFREIIKRLESILHHMGHKRQWRMRPLTCFQNFEHKKKHNWDLSSHDGSSSGSHL

SEQ ID NO: 24623 - protein, 442 aa, Arabidopsis thaliana
  peptide (1)..(442): Ceres Seq. ID no. 12339074
MAPEKIPEPSVHSEEEVFEDGEEIDGGVRLMYLANEGDIEGIKELIDSGIDANYRDIDDRTALHVAACQGLKDVVELLLDRKAEVDPKDRWGSTPFADAIFYKNIDVIKILEIHGAKHPMAPMHVKTAREVPEYEINPSELDFTQSKEITKGTYCMAMWRGIQVAVKKLDDEVLSDDDQVRKFHDELALLQRLRHPNIVQFLGAVTQSNPMMIVTEYLPRGDLRELLKRKGQLKPATAVRYALDIARGMSYLHEIKGDPIIHRDLEPSNILRDDSGHLKVADFGVSKLVTVKEDKPFTCQDISCRYIAPEVFTSEEYDTKADVFSFALIVQEMIEGRMPFAEKEDSEASEAYAGKHRPLFKAPSKNYPHGLKTLIEECWHEKPAKRPTFREIIKRLESILHHMGHKRQWRMRPLTCFQNFEHKKKHNWDLSSHDGSSSGSHL

SEQ ID NO: 24624 - protein, 412 aa, Arabidopsis thaliana
  peptide (1)..(412): Ceres Seq. ID no. 12339075
MYLANEGDIEGIKELIDSGIDANYRDIDDRTALHVAACQGLKDVVELLLDRKAEVDPKDRWGSTPFADAIFYKNIDVIKILEIHGAKHPMAPMHVKTAREVPEYEINPSELDFTQSKEITKGTYCMAMWRGIQVAVKKLDDEVLSDDDQVRKFHDELALLQRLRHPNIVQFLGAVTQSNPMMIVTEYLPRGDLRELLKRKGQLKPATAVRYALDIARGMSYLHEIKGDPIIHRDLEPSNILRDDSGHLKVADFGVSKLVTVKEDKPFTCQDISCRYIAPEVFTSEEYDTKADVFSFALIVQEMIEGRMPFAEKEDSEASEAYAGKHRPLFKAPSKNYPHGLKTLIEECWHEKPAKRPTFREIIKRLESILHHMGHKRQWRMRPLTCFQNFEHKKKHNWDLSSHDGSSSGSHL

SEQ ID NO: 24625 - DNA, 1218 bp, Arabidopsis thaliana
  misc_feature (1)..(1218): Ceres Seq. ID no. 12340206
  misc_feature (1)..(1218): Ortholog of  Ceres SEQ ID NO 13595414 as cited in SEQ ID NO 56539
acttatttcaattcccaaaatcctctgcctcatcatcttcaaactgttaccacgtccatagggttgtcgaagagctaggaagagccttaccaagagcttcttcttcccctaacatttaggttggtaggagaagcaaaggaagagatcatttataatggctcctgcattcggaaaatgtttcatgttctgctgcgctaaaacctccccggaaaaagacgaaatggcaacggaatcgtacgaagccgccattaaaggactcaatgatcttctcagtacgaaagcggatctcggaaacgtcgccgccgcgaagatcaaagcgttgacggcggagctaaaggagcttgactcaagcaattcagacgcaattgaacgaatcaagaccggttttactcaattcaaaaccgagaaatatttgaagaatagtactttgttcaatcatcttgccaagactcagaccccaaagtttctggtgtttgcttgctctgattctcgagtttgtccatctcacatcttgaatttccaacctggtgaggcttttgttgtcagaaacatagccaatatggttccaccttttgaccagaagagacactctggagttggcgccgccgttgaatacgcagttgtacatctcaaggtggagaacattttggtgataggccatagctgctgtggtggtattaagggactcatgtccattgaagatgatgctgccccaactcaaagtgacttcattgaaaattgggtgaagataggcgcatcagcgaggaacaagatcaaggaggaacataaagacttgagctacgatgatcaatgcaacaagtgtgagaaggaagctgtgaacgtatcgcttggaaacttgctttcgtacccattcgtgagagctgaggtggtgaagaacacacttgcaataagaggaggtcactacaatttcgtcaaaggaacgtttgatctctgggagctcgatttcaagaccactcctgcttttgccttctcttaagaaagaaagctaccggaacatataaaactcttttgagataaaaaaagacactttgactcatctttcttcattctctcatgttgatgattcctctccaacttctttgatttctttttgttaattcaaaacttcaactttgctgcttctatttcaaaagctcaaacaataaagctgtaaccaacgtttgaaacttctatatttgtctaattgatgtttgaacc

SEQ ID NO: 24626 - protein, 280 aa, Arabidopsis thaliana
  peptide (1)..(280): Ceres Seq. ID no. 12340207
MAPAFGKCFMFCCAKTSPEKDEMATESYEAAIKGLNDLLSTKADLGNVAAAKIKALTAELKELDSSNSDAIERIKTGFTQFKTEKYLKNSTLFNHLAKTQTPKFLVFACSDSRVCPSHILNFQPGEAFVVRNIANMVPPFDQKRHSGVGAAVEYAVVHLKVENILVIGHSCCGGIKGLMSIEDDAAPTQSDFIENWVKIGASARNKIKEEHKDLSYDDQCNKCEKEAVNVSLGNLLSYPFVRAEVVKNTLAIRGGHYNFVKGTFDLWELDFKTTPAFAFS

SEQ ID NO: 24627 - protein, 271 aa, Arabidopsis thaliana
  peptide (1)..(271): Ceres Seq. ID no. 12340208
MFCCAKTSPEKDEMATESYEAAIKGLNDLLSTKADLGNVAAAKIKALTAELKELDSSNSDAIERIKTGFTQFKTEKYLKNSTLFNHLAKTQTPKFLVFACSDSRVCPSHILNFQPGEAFVVRNIANMVPPFDQKRHSGVGAAVEYAVVHLKVENILVIGHSCCGGIKGLMSIEDDAAPTQSDFIENWVKIGASARNKIKEEHKDLSYDDQCNKCEKEAVNVSLGNLLSYPFVRAEVVKNTLAIRGGHYNFVKGTFDLWELDFKTTPAFAFS

SEQ ID NO: 24628 - protein, 258 aa, Arabidopsis thaliana; identical to SEQ ID NO: 21610
  peptide (1)..(258): Ceres Seq. ID no. 12340209

SEQ ID NO: 24629 - DNA, 894 bp, Arabidopsis thaliana
  misc_feature (1)..(894): Ceres Seq. ID no. 13497582
  misc_feature (1)..(894): Ortholog of  Ceres SEQ ID NO 13584899 as cited in SEQ ID NO 64830
  misc_feature (1)..(894): Ortholog of  Ceres SEQ ID NO 13654441 as cited in SEQ ID NO 67814
  misc_feature (1)..(894): Ortholog of  Ceres SEQ ID NO 13596128 as cited in SEQ ID NO 67831
  misc_feature (1)..(894): Ortholog of  Ceres SEQ ID NO 12585194 as cited in SEQ ID NO 68878
  misc_feature (1)..(894): Ortholog of  Ceres SEQ ID NO 12589186 as cited in SEQ ID NO 0
atttgtgtatagaatatagtaaactcaagtaatcaagcaagtaaacgaaacataaaaagaaaagtattgcaagaaacagaggagttagataccaaaaagtgagagatatcgaatggcggagaaagaagagagtgtgaagcttctagggttttgggcaagcccttttagtcgtcgagtcgagatggctctcaaactcaaaggcgtgccatacgaatacttggaagaagatttgcccaacaagacccctttgcttctggagctaaacccgcttcacaagaaagttccggttcttgtccacaatgacaaaatattactcgagtcacatctgattctcgaatacaccatcagacgtggaagaacaatccaattcttcctcaagatccttacgagaaggccatggctcgattttgggcaaagttcatcgatgaccagatcctaacactagggtttaggtcccttgtaaaagcagagaaaggaagagaggttgctattgaagagactcgggaactgcttacgtttcttgagaaagaattgactggaaaagatttcttcggtggcaagacaatcggattcttggacatgatcgcaggaagtattatcccattttgtctagctagactttgggaaggtataggaattgatatgattccagaggagaagtttccggaattaaatagatggatcaagaatttggaagaagttgagatcgtgagagaatgtattcctccaagagagaaacaaattgagcgcatgaccaaaattgcagaaacaattaagtctgcctaaattaaagatacttcttgcctccgaaaatatttgatttatatgcttgcattgttttttatttttatttttttaagtttttcgaaaaatagaatgacctaatatttaagc

SEQ ID NO: 24630 - protein, 129 aa, Arabidopsis thaliana
  peptide (1)..(129): Ceres Seq. ID no. 13497583
MARFWAKFIDDQILTLGFRSLVKAEKGREVAIEETRELLTFLEKELTGKDFFGGKTIGFLDMIAGSIIPFCLARLWEGIGIDMIPEEKFPELNRWIKNLEEVEIVRECIPPREKQIERMTKIAETIKSA

SEQ ID NO: 24631 - protein, 108 aa, Arabidopsis thaliana
  peptide (1)..(108): Ceres Seq. ID no. 13497584
MAEKEESVKLLGFWASPFSRRVEMALKLKGVPYEYLEEDLPNKTPLLLELNPLHKKVPVLVHNDKILLESHLILEYTIRRGRTIQFFLKILTRRPWLDFGQSSSMTRS

SEQ ID NO: 24632 - protein, 85 aa, Arabidopsis thaliana
  peptide (1)..(85): Ceres Seq. ID no. 13497585
MALKLKGVPYEYLEEDLPNKTPLLLELNPLHKKVPVLVHNDKILLESHLILEYTIRRGRTIQFFLKILTRRPWLDFGQSSSMTRS

SEQ ID NO: 24633 - DNA, 1305 bp, Arabidopsis thaliana
  misc_feature (1)..(1305): Ceres Seq. ID no. 12348615
  misc_feature (1)..(1305): Ortholog of  Ceres SEQ ID NO 15171080 as cited in SEQ ID NO 54266
atattggaggtaggaagaagaactctgcaaccaaaccaaccaaccccaaagccaaacaaagttttatagagaccttccatttctccctctcgtgacaaacgcaatttgcagagaagcaacagcaacaacaagaagaagaagaaaaagatttgagattactttgtatcgatttagctattcgagaaactcttgccgtttgaaagttttaattgttaaagatgtcgagttctatggaatgttctgagttcgtcggtagccggagatttactgggaagaagcctagcttctcacagacgtgtagtcgattgagtcagtatctaaaagagaacggtagctttggagatctgagcttaggaatggcatgcaagcctgatgtcaatggaactttaggcaactcacgtcagccgacaacaaccatgagtttattcccttgtgaagcttctaacatggattccatggttcaagatgttaaaccgacgaatctgtttcctaggcaaccaagcttttcttcctcatcttcctctcttccaaaggaagatgttttgaaaatgacacagactaccagatctgtgaaaccagagtctcaaactgcaccattgactatattctacgccgggcaagtgattgtattcaatgacttttctgctgagaaagccaaagaagtgatcaacttggcgagcaaaggcaccgctaatagcttagccaagaatcaaaccgatatcagaagcaacatcgctactatcgcaaaccaagttcctcatccaagaaaaaccacaacacaagagccaatccaatcctccccaacaccattgacagaacttcctattgctagaagagcttcacttcaccggttcttggagaagagaaaggacagagttacgtcaaaggcaccataccaattatgcgatccagccaaagcgtcttcaaaccctcaaaccacaggcaacatgtcgtggctcggtttagcagctgaaatatgaatgctaaccaccctcaagccgtaccaagaaattcttttgacgacgttgcttcaagacaagatataaaagctcctatcttcatgctttttgatttaagatacaaactactcaatgattaggaaacttcatatatttgtatgtattgattagtgatcaattattgttagtattcgttatagtctgtttttctactagttattgtcgcctgtctaaatccccttgctatgggttatctcaaaattagtttcgtatgtaactaattttgtaagaacaataatttttgttgacgaaccatactatcaaatactctaaattatatcttgat

SEQ ID NO: 24634 - protein, 253 aa, Arabidopsis thaliana
  peptide (1)..(253): Ceres Seq. ID no. 12348616
MSSSMECSEFVGSRRFTGKKPSFSQTCSRLSQYLKENGSFGDLSLGMACKPDVNGTLGNSRQPTTTMSLFPCEASNMDSMVQDVKPTNLFPRQPSFSSSSSSLPKEDVLKMTQTTRSVKPESQTAPLTIFYAGQVIVFNDFSAEKAKEVINLASKGTANSLAKNQTDIRSNIATIANQVPHPRKTTTQEPIQSSPTPLTELPIARRASLHRFLEKRKDRVTSKAPYQLCDPAKASSNPQTTGNMSWLGLAAEI

SEQ ID NO: 24635 - protein, 249 aa, Arabidopsis thaliana
  peptide (1)..(249): Ceres Seq. ID no. 12348617
MECSEFVGSRRFTGKKPSFSQTCSRLSQYLKENGSFGDLSLGMACKPDVNGTLGNSRQPTTTMSLFPCEASNMDSMVQDVKPTNLFPRQPSFSSSSSSLPKEDVLKMTQTTRSVKPESQTAPLTIFYAGQVIVFNDFSAEKAKEVINLASKGTANSLAKNQTDIRSNIATIANQVPHPRKTTTQEPIQSSPTPLTELPIARRASLHRFLEKRKDRVTSKAPYQLCDPAKASSNPQTTGNMSWLGLAAEI

SEQ ID NO: 24636 - protein, 207 aa, Arabidopsis thaliana
  peptide (1)..(207): Ceres Seq. ID no. 12348618
MACKPDVNGTLGNSRQPTTTMSLFPCEASNMDSMVQDVKPTNLFPRQPSFSSSSSSLPKEDVLKMTQTTRSVKPESQTAPLTIFYAGQVIVFNDFSAEKAKEVINLASKGTANSLAKNQTDIRSNIATIANQVPHPRKTTTQEPIQSSPTPLTELPIARRASLHRFLEKRKDRVTSKAPYQLCDPAKASSNPQTTGNMSWLGLAAEI

SEQ ID NO: 24637 - DNA, 750 bp, Arabidopsis thaliana
  misc_feature (1)..(750): Ceres Seq. ID no. 12393092
  misc_feature (1)..(750): Ortholog of  Ceres SEQ ID NO 15172691 as cited in SEQ ID NO 56148
  misc_feature (1)..(750): Ortholog of  Ceres SEQ ID NO 15226850 as cited in SEQ ID NO 62501
gttaaaagttacaaacgcgactctctgatcctaaatttcgttgtacagagaagaagcaaaagagagaaacatctgacccggaatctgacctgaaaacccggaagaatcgaaaaatggggaaagatggtctgagcgacgatcaggtctcgtcgatgaaggaagccttcatgctcttcgacaccgatggcgacggcaaaatcgcaccgtcagagctcgggatcctcatgcgatctctcggcggaaacccgacccaagcccagctgaaatccataatcgcatccgagaatctctcttcaccgtttgatttcaacagattcctcgatctcatggcgaaacatctgaagacggaacctttcgatcgccagctccgtgacgcattcaaagtgctcgataaggaaggtaccgggttcgttgctgtggcggatctgaggcatattctgaccagtatcggagagaagctggagcctaatgagttcgatgagtggatcaaggaggtggatgttggatccgatggaaagatccggtatgaagatttcatagcaaggatggttgctaagtgagatctaatcttttatgttttgaaagttgaaatttttaagaagagattctttgtgtttttttcacttgtttgtttgatttcgagcgaatcctagctagggtttgttttatcattgtggaatttgcttactaactttgtcttcttcatgtttgttttcatttttaatggaaatgttgtctgtgtgattcctt

SEQ ID NO: 24638 - protein, 148 aa, Arabidopsis thaliana
  peptide (1)..(148): Ceres Seq. ID no. 12393093
MGKDGLSDDQVSSMKEAFMLFDTDGDGKIAPSELGILMRSLGGNPTQAQLKSIIASENLSSPFDFNRFLDLMAKHLKTEPFDRQLRDAFKVLDKEGTGFVAVADLRHILTSIGEKLEPNEFDEWIKEVDVGSDGKIRYEDFIARMVAK

SEQ ID NO: 24639 - protein, 135 aa, Arabidopsis thaliana
  peptide (1)..(135): Ceres Seq. ID no. 12393094
MKEAFMLFDTDGDGKIAPSELGILMRSLGGNPTQAQLKSIIASENLSSPFDFNRFLDLMAKHLKTEPFDRQLRDAFKVLDKEGTGFVAVADLRHILTSIGEKLEPNEFDEWIKEVDVGSDGKIRYEDFIARMVAK

SEQ ID NO: 24640 - protein, 130 aa, Arabidopsis thaliana
  peptide (1)..(130): Ceres Seq. ID no. 12393095
MLFDTDGDGKIAPSELGILMRSLGGNPTQAQLKSIIASENLSSPFDFNRFLDLMAKHLKTEPFDRQLRDAFKVLDKEGTGFVAVADLRHILTSIGEKLEPNEFDEWIKEVDVGSDGKIRYEDFIARMVAK

SEQ ID NO: 24641 - DNA, 1622 bp, Arabidopsis thaliana
  misc_feature (1)..(1622): Ceres Seq. ID no. 12482499
  misc_feature (1)..(1622): Ortholog of  Ceres SEQ ID NO 13597269 as cited in SEQ ID NO 63932
ctctctccctccctccctcttccattaaatctttgtggttctcttttattgttttgatactgtgctctgcttcggagagtgtagaaagagacagagctaaagtctctgtgtttcttctcagcaggactaaaaggaaaaaaggaaatcgattgctaatgtcgggtgagaaacaagcggaggagtcaatagtagtctccggggaggatgaggtggccggtagaaaagtggaagattcagcggcggaggaggatattgacggcaacgggggcaatggatttagtatgaagagcttcctctggcatggcgggtccgcttgggacgcctggtttagctgtgcatcaaatcaagtggcacaagtgctgttgacgctgccgtattcgttctcgcagttgggaatgttatcaggaatattgcttcaaatattctatgggttaatgggatcttggactgcttatctcatcagtgttctttacgtcgagtatcgtgcccgtatggagaaacaagaagccaaatccttcaaaaaccacgttattcaatggtttgaagtgcttgatgggctgctgggtccgtactggaaagcagcggggctcgcatttaattgcaccttcttgttattcggatcagtcatccagctcattgcttgtgctagcaatatatattacataaacgataggttagacaagaggacatggacttatatatttggggcttgctgtgccacgaccgttttcataccatctttccacaattaccgtatttggtctttcctcggccttggcatgaccacctacaccgcttggtacctcaccatcgcctcttttctccatggtcaggcggagggtgtgacacattccggtccaaccaagcttgtgttgtactttaccggagccaccaacatcctctataccttcggtggacacgctgtgaccgtggaaataatgcatgcgatgtggaaaccaaggaagtttaagagcatctacttgatggcaactctgtacgtcttcacattaacgcttccgtcagcctccgccgtctactgggctttcggcgaccaacttctcaaccactcaaacgctttctctctcctccctaaaacgcgtttccgtgacaccgccgttatcctcatgctcatccatcagtttataacgttcgggtttgcgtgtacaccattgtacttcgtatgggaaaaagcgatcggaatgcaccacacaaagagcttatgtctaagagcgctggtgaggctaccggtggtggttccgatatggtttttggcaatcatctttccctttttcgggccaataaactcggcagttggagccttacttgttaccttcaccgtctatatcatccctgccttagcccacatgctcacgtaccgcaccgcctctgcccgccggaacgcggcggagaaaccaccgttttttatccctagctgggctggagtttacgtgataaacgctttcatagtggtttgggtcctagttctcgggttcgggtttggcggatgggccagtatgaccaacttcatcaggcaaattgatacttttggcctctttgccaaatgctaccaatgcaaaccacctccagctccgatcgccgccggagctcaccaccgccgttag

SEQ ID NO: 24642 - protein, 539 aa, Arabidopsis thaliana
  peptide (1)..(539): Ceres Seq. ID no. 12482500
LSLPPSSIKSLWFSFIVLILCSASESVERDRAKVSVFLLSRTKRKKGNRLLMSGEKQAEESIVVSGEDEVAGRKVEDSAAEEDIDGNGGNGFSMKSFLWHGGSAWDAWFSCASNQVAQVLLTLPYSFSQLGMLSGILLQIFYGLMGSWTAYLISVLYVEYRARMEKQEAKSFKNHVIQWFEVLDGLLGPYWKAAGLAFNCTFLLFGSVIQLIACASNIYYINDRLDKRTWTYIFGACCATTVFIPSFHNYRIWSFLGLGMTTYTAWYLTIASFLHGQAEGVTHSGPTKLVLYFTGATNILYTFGGHAVTVEIMHAMWKPRKFKSIYLMATLYVFTLTLPSASAVYWAFGDQLLNHSNAFSLLPKTRFRDTAVILMLIHQFITFGFACTPLYFVWEKAIGMHHTKSLCLRALVRLPVVVPIWFLAIIFPFFGPINSAVGALLVTFTVYIIPALAHMLTYRTASARRNAAEKPPFFIPSWAGVYVINAFIVVWVLVLGFGFGGWASMTNFIRQIDTFGLFAKCYQCKPPPAPIAAGAHHRR

SEQ ID NO: 24643 - protein, 488 aa, Arabidopsis thaliana
  peptide (1)..(488): Ceres Seq. ID no. 12482501
MSGEKQAEESIVVSGEDEVAGRKVEDSAAEEDIDGNGGNGFSMKSFLWHGGSAWDAWFSCASNQVAQVLLTLPYSFSQLGMLSGILLQIFYGLMGSWTAYLISVLYVEYRARMEKQEAKSFKNHVIQWFEVLDGLLGPYWKAAGLAFNCTFLLFGSVIQLIACASNIYYINDRLDKRTWTYIFGACCATTVFIPSFHNYRIWSFLGLGMTTYTAWYLTIASFLHGQAEGVTHSGPTKLVLYFTGATNILYTFGGHAVTVEIMHAMWKPRKFKSIYLMATLYVFTLTLPSASAVYWAFGDQLLNHSNAFSLLPKTRFRDTAVILMLIHQFITFGFACTPLYFVWEKAIGMHHTKSLCLRALVRLPVVVPIWFLAIIFPFFGPINSAVGALLVTFTVYIIPALAHMLTYRTASARRNAAEKPPFFIPSWAGVYVINAFIVVWVLVLGFGFGGWASMTNFIRQIDTFGLFAKCYQCKPPPAPIAAGAHHRR

SEQ ID NO: 24644 - protein, 446 aa, Arabidopsis thaliana
  peptide (1)..(446): Ceres Seq. ID no. 12482502
MKSFLWHGGSAWDAWFSCASNQVAQVLLTLPYSFSQLGMLSGILLQIFYGLMGSWTAYLISVLYVEYRARMEKQEAKSFKNHVIQWFEVLDGLLGPYWKAAGLAFNCTFLLFGSVIQLIACASNIYYINDRLDKRTWTYIFGACCATTVFIPSFHNYRIWSFLGLGMTTYTAWYLTIASFLHGQAEGVTHSGPTKLVLYFTGATNILYTFGGHAVTVEIMHAMWKPRKFKSIYLMATLYVFTLTLPSASAVYWAFGDQLLNHSNAFSLLPKTRFRDTAVILMLIHQFITFGFACTPLYFVWEKAIGMHHTKSLCLRALVRLPVVVPIWFLAIIFPFFGPINSAVGALLVTFTVYIIPALAHMLTYRTASARRNAAEKPPFFIPSWAGVYVINAFIVVWVLVLGFGFGGWASMTNFIRQIDTFGLFAKCYQCKPPPAPIAAGAHHRR

SEQ ID NO: 24645 - DNA, 1645 bp, Arabidopsis thaliana
  misc_feature (1)..(1645): Ceres Seq. ID no. 13494027
  misc_feature (1)..(1645): Ortholog of  Ceres SEQ ID NO 13647847 as cited in SEQ ID NO 20430
  misc_feature (1)..(1645): Ortholog of  Ceres SEQ ID NO 15171696 as cited in SEQ ID NO 59997
aaagaaaaaaaaaagaaagctttttgggaacataaacaccatcgaaggagggtgggaggtgttttatgttcatgggtggagcttcttggccaacctgaccccattcatcatatcattacccactttcttctcctaaattattctctcttatctctctctctctctttttattttctttctttcttaattcatctaaactctctctgcttttgcttttcgtaattccttacatttcactcaatattaatccccagaatctccgatccacccacaaatttagcaattttctgagatttgatcatttgggtcaccaaaaaatcttgtctttttgatctgggtttaacgccaataacatatgggaaacattagcagcagcggtggtgaaggtagacgccgtcgacggcgaaaccatacggcggctccaccaccacctcctcctcctccttcttcttctcttcctccaccacctctacctacagaaatccaagctaatcccatcgttttcgctgccgttactccctatcctaatcctaatcctaatccggtttaccagtaccctgcttcttactaccaccatcctcccccgggagccatgcctcttccgccgtacgaccaccacctccaacatcatccaccgcatccttaccacaaccactcttgggctcccgtggcgatggccagatacccttatgctggtcacatgatggctcaaccgactccttacgttgaacaccagaaagccgtcacgattcgtaacgacgttaatctcaagaaggagtctcttaggcttgaacccgacccggataatccgggtcgctttctcgtctcctttacgtttgatgcaaccgtctccggaaggattagtgtcattttctttgctaaagaatccgaagattgcaaactcacagcgacaaaggaagatatactgccacctatcactctagatttcgagaaaggacttggtcagaagtttaaacaatcatctggttctggtatagacttttcggtctttgaggacgttgagctgttcaaagcggccgcagacacagagatctatccattagcggttaaggcagaagcagctccctcaggtggtgagaatgaagaagaagaaaggtcggggtcgaagaatgcgcagattactcaagcggtttatgagaaggataaaggagagattaagattagagtggtgaagcagatactatgggttaatggaacgagatatgagttgcaggagatttatgggattgggaatacagttgagggggatgatgattcagctgatgatgctaatgatcctggtaaagaatgtgttatatgtttgtctgaaccacgagacaccactgttcttccatgtcgacatatgtgtatgtgtagcggatgtgctaaggtattgaggtttcagacaaatcgatgccccatttgcaggcaacctgttgaaaggcttttggagataaaagttcacggtaacaacggaagcgggaataacaccggacagggagaaacagttgaacaagagtagctaaacacggccgagtatggattgaaatgccatcgaaatattagtagtatatgcatgtttgatccttgtatgttaacaacaaaatgtgtgattgtcaattcataatatagagattacgaaacc

SEQ ID NO: 24646 - protein, 388 aa, Arabidopsis thaliana
  peptide (1)..(388): Ceres Seq. ID no. 13494028
MGNISSSGGEGRRRRRRNHTAAPPPPPPPPSSSLPPPPLPTEIQANPIVFAAVTPYPNPNPNPVYQYPASYYHHPPPGAMPLPPYDHHLQHHPPHPYHNHSWAPVAMARYPYAGHMMAQPTPYVEHQKAVTIRNDVNLKKESLRLEPDPDNPGRFLVSFTFDATVSGRISVIFFAKESEDCKLTATKEDILPPITLDFEKGLGQKFKQSSGSGIDFSVFEDVELFKAAADTEIYPLAVKAEAAPSGGENEEEERSGSKNAQITQAVYEKDKGEIKIRVVKQILWVNGTRYELQEIYGIGNTVEGDDDSADDANDPGKECVICLSEPRDTTVLPCRHMCMCSGCAKVLRFQTNRCPICRQPVERLLEIKVHGNNGSGNNTGQGETVEQE

SEQ ID NO: 24647 - protein, 309 aa, Arabidopsis thaliana
  peptide (1)..(309): Ceres Seq. ID no. 13494029
MPLPPYDHHLQHHPPHPYHNHSWAPVAMARYPYAGHMMAQPTPYVEHQKAVTIRNDVNLKKESLRLEPDPDNPGRFLVSFTFDATVSGRISVIFFAKESEDCKLTATKEDILPPITLDFEKGLGQKFKQSSGSGIDFSVFEDVELFKAAADTEIYPLAVKAEAAPSGGENEEEERSGSKNAQITQAVYEKDKGEIKIRVVKQILWVNGTRYELQEIYGIGNTVEGDDDSADDANDPGKECVICLSEPRDTTVLPCRHMCMCSGCAKVLRFQTNRCPICRQPVERLLEIKVHGNNGSGNNTGQGETVEQE

SEQ ID NO: 24648 - protein, 282 aa, Arabidopsis thaliana
  peptide (1)..(282): Ceres Seq. ID no. 13494030
MARYPYAGHMMAQPTPYVEHQKAVTIRNDVNLKKESLRLEPDPDNPGRFLVSFTFDATVSGRISVIFFAKESEDCKLTATKEDILPPITLDFEKGLGQKFKQSSGSGIDFSVFEDVELFKAAADTEIYPLAVKAEAAPSGGENEEEERSGSKNAQITQAVYEKDKGEIKIRVVKQILWVNGTRYELQEIYGIGNTVEGDDDSADDANDPGKECVICLSEPRDTTVLPCRHMCMCSGCAKVLRFQTNRCPICRQPVERLLEIKVHGNNGSGNNTGQGETVEQE

SEQ ID NO: 24649 - DNA, 1450 bp, Arabidopsis thaliana
  misc_feature (1)..(1450): Ceres Seq. ID no. 12682693
  misc_feature (1)..(1450): Ortholog of  Ceres SEQ ID NO 13654728 as cited in SEQ ID NO 62302
  misc_feature (1)..(1450): Ortholog of  Ceres SEQ ID NO 13597134 as cited in SEQ ID NO 64501
  misc_feature (1)..(1450): Ortholog of  Ceres SEQ ID NO 15174333 as cited in SEQ ID NO 0
  misc_feature (1)..(1450): Ortholog of  Ceres SEQ ID NO 15179047 as cited in SEQ ID NO 0
agttaattattggtgcgtctctcgaattagggttctaggatctctgctcttaaaactcttatcgccgctaaaactctctacccatcgcagagcctctctaaagaatggattctcagatcaagcacgctgttgtagtgaaagtgatgggaaggactggatcaaggggtcaagtgactcaggttagagtgaagttcactgactcggaccgttacatcatgaggaacgttaaaggacctgtcagagagggagatattctcaccttgctggagtccgagagagaagctagaagacttcgttgattctctttgcaaattgtttttggttgctttgaagaacaaatgttatatcgtttggataattaaattcttattatgatgttaaaaaatttaattatcaaagattgatgctttagactctaaatctatattatattaaaaaaaaaaaaaaaaaaaaaaaggacttgaaatattgaaatccctattctttacgcgtactcgagatttttcgctcttgagagaatcacttcgacaatgtcggtaacggctgctttcattgattcggatcaaactcagcacaacattcttatggattcccaatcaactgtctccggtgtgaaaactgtcaagattagcaatgtttcactaattgtttctaagaaagatgtcaaagagttcttttctttctctggtgacattcaatacgtcgagatgcgaagtgagacacaagagagtcaggtcgcatatgttacttttaaggattcacaaggagctgaaactgcaatgctcttaacgggagctgtcattgcagatcttcgtgttagtataactcctgctgttaactatcagctaccaccagaagcccttgcacttgactcggaacattcgtttaatggtttttctgtcaagaaagctgaagatgtggtgaacatcatggtgggaagaggttatgctcttggaaaagacgccatggagaaagccaaagcatttgatgacagacacaacttgatctcaaacgcttctgcaaccattgcatcgcttgacgataagatgggtctgagcgaaaagctaagcataggaacaactgtggttaatgagaagttgagagatatcgatgagcgatatcaggtgagggagataacgaaatctgctttagcagctgctgaagagacagcaatcagtgcaagaacggctttaatggcaaacccttatgtatcaagtggagcttcgtggttttcaaacgcgtttggcgcagtgacaaaggcggttaaagagaaagttgagaatggaggagaaggaagaaaggagatcatcacacttgatccctcttcacccaaagttcctgctgtagttcctgttaagctcggttgatgcagatctcatcaaaccaatcggatctcgactaaattctttgataggtttgttgttcatatatatgctttcgtatgctaaag

SEQ ID NO: 24650 - protein, 278 aa, Arabidopsis thaliana; identical to SEQ ID NO: 23413
  peptide (1)..(278): Ceres Seq. ID no. 12682694

SEQ ID NO: 24651 - protein, 260 aa, Arabidopsis thaliana; identical to SEQ ID NO: 23414
  peptide (1)..(260): Ceres Seq. ID no. 12682695

SEQ ID NO: 24652 - protein, 219 aa, Arabidopsis thaliana; identical to SEQ ID NO: 23415
  peptide (1)..(219): Ceres Seq. ID no. 12682696

SEQ ID NO: 24653 - DNA, 813 bp, Arabidopsis thaliana
  misc_feature (1)..(813): Ceres Seq. ID no. 12370365
  misc_feature (1)..(813): Ortholog of  Ceres SEQ ID NO 12609041 as cited in SEQ ID NO 51310
  misc_feature (1)..(813): Ortholog of  Ceres SEQ ID NO 14312140 as cited in SEQ ID NO 57002
  misc_feature (1)..(813): Ortholog of  Ceres SEQ ID NO 14312224 as cited in SEQ ID NO 57255
  misc_feature (1)..(813): Ortholog of  Ceres SEQ ID NO 13599144 as cited in SEQ ID NO 0
agaatcgtatttgtgggtatctagaagaggcgttaggattgtctccaagctgggtgttttttcatcttgatggccaactaatcgaatctcctactctaaagatatttttgtttatttctgtcatgtgtgatttggtcgcgcgtacgggtcgtctccagcagcggtacgaggatggctctcgtctcgtcgccgggtgtattccgtttaggtatgtaaattctgacaaagatggtaattctgaatctgggaaagtgattcaagtgttgatgatcagctcgtctagtggaccgggacttttgtttcccaagggaggatgggagaatgatgagacagtcagggaggctgcagcgagggaagcagtggaagaagcagttttttttttttttttttggggaattatgagttcaagagcaaatcacaccaagatgagtttagcccagaaggtttatgtaaagcggcaatgtacgcgttgtatgtgaaagaagagctagcgacgtggccggaacatgagacgagaacacggaaatggctgacaattgaagaagcggtagagagttgcaggcacccttggatgaaggacgcattggtggaaggattctgtaaatggcataaggagaagatggttaaaggagaggagataactggtgaacattgaagcaaatgtgcataaacctctgagcgttggtttcattcctttcgattttgtttttacctttttgtttttgtttttgaagtcttatgcatggataatctcttgtgactgcgaaacgtaatagtttcgaagatttaaagttcaattattgccctattttc

SEQ ID NO: 24654 - protein, 158 aa, Arabidopsis thaliana
  peptide (1)..(158): Ceres Seq. ID no. 12370366
NRICGYLEEALGLSPSWVFFHLDGQLIESPTLKIFLFISVMCDLVARTGRLQQRYEDGSRLVAGCIPFRYVNSDKDGNSESGKVIQVLMISSSSGPGLLFPKGGWENDETVREAAAREAVEEAVFFFFFWGIMSSRANHTKMSLAQKVYVKRQCTRCM

SEQ ID NO: 24655 - protein, 118 aa, Arabidopsis thaliana
  peptide (1)..(118): Ceres Seq. ID no. 12370367
MCDLVARTGRLQQRYEDGSRLVAGCIPFRYVNSDKDGNSESGKVIQVLMISSSSGPGLLFPKGGWENDETVREAAAREAVEEAVFFFFFWGIMSSRANHTKMSLAQKVYVKRQCTRCM

SEQ ID NO: 24656 - DNA, 1709 bp, Arabidopsis thaliana
  misc_feature (1)..(1709): Ceres Seq. ID no. 13490821
  misc_feature (1)..(1709): Ortholog of  Ceres SEQ ID NO 14307257 as cited in SEQ ID NO 54628
gttgattataattagacttcttcatttactctctctctgacttaaaacatttattttatcttcttcttgttctctctttctctttctctcatcactatgaagagtttcaacacagaaggacacaaccactccacggcggaatccggcgatgcctacaccgtgtcggacccgacaaagaacgtcgatgaagatggtcgagagaagcgtaccgggacgtggcttacggcgagtgcgcatattatcacggcggtgataggctccggagtgttgtctttagcatgggctatagctcagcttggttggatcgcagggacatcgatcttactcattttctcgttcattacttacttcacctccaccatgcttgccgattgctaccgtgcgccggatcccgtcaccggaaaacggaattacacttacatggacgttgttcgatcttacctcggtggtaggaaagtgcagctctgtggagtggcacaatatgggaatctgattggggtcactgttggttacaccatcactgcttctattagtttggtagcggtagggaaatcgaactgcttccacgataaagggcacactgcggattgtactatatcgaattatccgtatatggcggtttttggtatcattcaagttattcttagccagatcccaaatttccacaagctctcttttctttccattatggccgcagtcatgtcctttacttatgcaactattggaatcggtctagccatcgcaaccgtcgcaggtgggaaagtgggtaagacgagtatgacgggcacagcggttggagtagatgtaaccgcagctcaaaagatatggagatcgtttcaagcggttggggacatagcgttcgcctatgcttatgccacggttctcatcgagattcaggatacactaagatctagcccagctgagaacaaagccatgaaaagagcaagtcttgtgggagtatcaaccaccacttttttctacatcttatgtggatgcatcggctatgctgcatttggaaacaatgcccctggagatttcctcacagatttcgggtttttcgagcccttttggctcattgactttgcaaacgcttgcatcgctgtccaccttattggtgcctatcaggtgttcgcgcagccgatattccagtttgttgagaaaaaatgcaacagaaactatccagacaacaagttcatcacttctgaatattcagtaaacgtacctttccttggaaaattcaacattagcctcttcagattggtgtggaggacagcttatgtggttataaccactgttgtagctatgatattccctttcttcaacgcgatcttaggtcttatcggagcagcttccttctggcctttaacggtttatttccctgtggagatgcacattgcacaaaccaagattaagaagtactctgctagatggattgcgctgaaaacgatgtgctatgtttgcttgatcgtctcgctcttagctgcagccggatccatcgcaggacttataagtagtgtcaaaacctacaagcccttccggactatgcatgagtgagtttgagatcctcaagagagtcaaaaatatatgtagtagtttggtctttctgttaaactatctggtgtctaaatccaatgagaatgctttattgctaaaacttcatgaatctctctgtatctacatctttcaatctaatacatatgagctcttcc

SEQ ID NO: 24657 - protein, 485 aa, Arabidopsis thaliana
  peptide (1)..(485): Ceres Seq. ID no. 13490822
MKSFNTEGHNHSTAESGDAYTVSDPTKNVDEDGREKRTGTWLTASAHIITAVIGSGVLSLAWAIAQLGWIAGTSILLIFSFITYFTSTMLADCYRAPDPVTGKRNYTYMDVVRSYLGGRKVQLCGVAQYGNLIGVTVGYTITASISLVAVGKSNCFHDKGHTADCTISNYPYMAVFGIIQVILSQIPNFHKLSFLSIMAAVMSFTYATIGIGLAIATVAGGKVGKTSMTGTAVGVDVTAAQKIWRSFQAVGDIAFAYAYATVLIEIQDTLRSSPAENKAMKRASLVGVSTTTFFYILCGCIGYAAFGNNAPGDFLTDFGFFEPFWLIDFANACIAVHLIGAYQVFAQPIFQFVEKKCNRNYPDNKFITSEYSVNVPFLGKFNISLFRLVWRTAYVVITTVVAMIFPFFNAILGLIGAASFWPLTVYFPVEMHIAQTKIKKYSARWIALKTMCYVCLIVSLLAAAGSIAGLISSVKTYKPFRTMHE

SEQ ID NO: 24658 - protein, 397 aa, Arabidopsis thaliana
  peptide (1)..(397): Ceres Seq. ID no. 13490823
MLADCYRAPDPVTGKRNYTYMDVVRSYLGGRKVQLCGVAQYGNLIGVTVGYTITASISLVAVGKSNCFHDKGHTADCTISNYPYMAVFGIIQVILSQIPNFHKLSFLSIMAAVMSFTYATIGIGLAIATVAGGKVGKTSMTGTAVGVDVTAAQKIWRSFQAVGDIAFAYAYATVLIEIQDTLRSSPAENKAMKRASLVGVSTTTFFYILCGCIGYAAFGNNAPGDFLTDFGFFEPFWLIDFANACIAVHLIGAYQVFAQPIFQFVEKKCNRNYPDNKFITSEYSVNVPFLGKFNISLFRLVWRTAYVVITTVVAMIFPFFNAILGLIGAASFWPLTVYFPVEMHIAQTKIKKYSARWIALKTMCYVCLIVSLLAAAGSIAGLISSVKTYKPFRTMHE

SEQ ID NO: 24659 - protein, 377 aa, Arabidopsis thaliana
  peptide (1)..(377): Ceres Seq. ID no. 13490824
MDVVRSYLGGRKVQLCGVAQYGNLIGVTVGYTITASISLVAVGKSNCFHDKGHTADCTISNYPYMAVFGIIQVILSQIPNFHKLSFLSIMAAVMSFTYATIGIGLAIATVAGGKVGKTSMTGTAVGVDVTAAQKIWRSFQAVGDIAFAYAYATVLIEIQDTLRSSPAENKAMKRASLVGVSTTTFFYILCGCIGYAAFGNNAPGDFLTDFGFFEPFWLIDFANACIAVHLIGAYQVFAQPIFQFVEKKCNRNYPDNKFITSEYSVNVPFLGKFNISLFRLVWRTAYVVITTVVAMIFPFFNAILGLIGAASFWPLTVYFPVEMHIAQTKIKKYSARWIALKTMCYVCLIVSLLAAAGSIAGLISSVKTYKPFRTMHE

SEQ ID NO: 24660 - DNA, 882 bp, Arabidopsis thaliana
  misc_feature (1)..(882): Ceres Seq. ID no. 12335781
  misc_feature (1)..(882): Ortholog of  Ceres SEQ ID NO 13638595 as cited in SEQ ID NO 52050
  misc_feature (1)..(882): Ortholog of  Ceres SEQ ID NO 12623490 as cited in SEQ ID NO 61136
  misc_feature (1)..(882): Ortholog of  Ceres SEQ ID NO 14301870 as cited in SEQ ID NO 61501
  misc_feature (1)..(882): Ortholog of  Ceres SEQ ID NO 12583993 as cited in SEQ ID NO 68098
aataacttcaacaagagctcttatctataaaacattctaaagaaaaatgaagatgataatccaaattttcttcatcatctccctcatttcaaccatctcttttgcctctgttcaagacttttgtgtagctgatccaaagggtcctcaaagcccatcaggatactcttgcaagaaccctgaccaagtcaccgaaaatgactttgcatttaccggcctcggcaaagctggaaacacttccaacatcattaaagccgcagtgactccagcctttgctcctgcttacgcaggcatcaatggccttggcgtatctctggctcgtcttgacttagccggtggtggtgtcatccctctccacactcatcctggtgcttctgaggtccttgtagttattcaaggcaccatttgcgccgggtttatctcctctgctaacaaagtttacttaaagacacttaacagaggtgattctatggtgtttcctcaaggacttcttcattttcagctaaactctgggaaaggccctgccttagcctttgtcgcattcggaagctcctccccagggctccagattctaccatttgctctgtttgcaaacgatttgccttcagaacttgttgaagccacaacgttccttagcgatgcagaagttaagaagcttaagggtgtgcttggaggaactaattaagcttcacttagtttcattgttcattttttttcaaaaatgtggttgtgcgttttgttatttcgagttcctctagcattttgagtttgtttttctttatgagttgttattgttctcgaagttttcacttttatagtctctttggcttgaattgtaataactaataagcattacattgcagatttctaagtagcttctcaacc

SEQ ID NO: 24661 - protein, 211 aa, Arabidopsis thaliana
  peptide (1)..(211): Ceres Seq. ID no. 12335782
MKMIIQIFFIISLISTISFASVQDFCVADPKGPQSPSGYSCKNPDQVTENDFAFTGLGKAGNTSNIIKAAVTPAFAPAYAGINGLGVSLARLDLAGGGVIPLHTHPGASEVLVVIQGTICAGFISSANKVYLKTLNRGDSMVFPQGLLHFQLNSGKGPALAFVAFGSSSPGLQILPFALFANDLPSELVEATTFLSDAEVKKLKGVLGGTN

SEQ ID NO: 24662 - protein, 209 aa, Arabidopsis thaliana
  peptide (1)..(209): Ceres Seq. ID no. 12335783
MIIQIFFIISLISTISFASVQDFCVADPKGPQSPSGYSCKNPDQVTENDFAFTGLGKAGNTSNIIKAAVTPAFAPAYAGINGLGVSLARLDLAGGGVIPLHTHPGASEVLVVIQGTICAGFISSANKVYLKTLNRGDSMVFPQGLLHFQLNSGKGPALAFVAFGSSSPGLQILPFALFANDLPSELVEATTFLSDAEVKKLKGVLGGTN

SEQ ID NO: 24663 - DNA, 1453 bp, Arabidopsis thaliana
  misc_feature (1)..(1453): Ceres Seq. ID no. 13490734
  misc_feature (1)..(1453): Ortholog of  Ceres SEQ ID NO 14311667 as cited in SEQ ID NO 58070
atctgttttccagtttcgatttcgaatcaaatatgaagctgaaagagtttttctgaatctttgtctttgtatccgttatctgaattttattcgccatggaagctgtgcttctctgctcgaagcttgttcctagagcggcgtcgttggaagggaaccaaaagttttcgttcaggcatttgaacaaacaccttaagtgcaattcccttcgtgctgattccagagacactccgttgctccgaggttttgaagcgataaagagtccgtctatctggagttgtgcgccgttcccagtgagaaaaggttcatgggttccacccagatgctcgatttctagctcgactgtttccgattccgataaccctttccttagccaatttcgaaccttctcttttgggtcaatggtgaagaaagttcgtgagttgaaagtgaagcccatggatgttgtgaagttaactcttttgctatcgattttgactgtggctgcaaaaaagactttgactttggtcttggacccattcttctggatgtattttagctggacatggttgttctggccttggtttatcgctgtgggtcttgcgggttatggaatttactgtttccgtaagcattggcttggcgaagccaatgcctttgagcagcttggtattgtaacttcagtcttcacatggctaacacttgtgcctcctgcttatttcaatggttatcttgaaggctggccttatgtgttcttcttggcgtatcattacttctttttcttcaatgttagcgtgagaaaacgcctctatggagatttctatgctcgcactcatgatcccaaatgggatgtgaacacgcctctgtggtctcggattttgtttggtgttggcatcatggttggacattggcttgcagcttttgaagggcctgagcttcaccgattaccagggggttgggccaatgtagggatatggattttgattgtgattacaatgcttatgcattatgattcaacgctatatcttgctagatattctgaaaaggttgttgttccaacggctgttgtgcaatttggtccttatagatgggtcaggcatccgatatatgcttctacgatgcttcttttcgctgcatactgcactgctctgcgtgcgcctttgagtctgttgtttcttttagcggtttgtttggtttactacaacaagaaggcaaagatggaagaagaattgatggtggagagtttcggacaaagctattcggattatgctgataaggttaggcacaagttcattccttttgtttactagtagtggtatagaggaacctgtgttgtgtctaattttctggtatctatcagccaaagatgtatgaatgaagatgagttctcatttttattggaatgttaggcttgtgaaaaggatatgcttttatgctattcatggttctcttaaattctatttcaagttatttttcc

SEQ ID NO: 24664 - protein, 396 aa, Arabidopsis thaliana
  peptide (1)..(396): Ceres Seq. ID no. 13490735
MEAVLLCSKLVPRAASLEGNQKFSFRHLNKHLKCNSLRADSRDTPLLRGFEAIKSPSIWSCAPFPVRKGSWVPPRCSISSSTVSDSDNPFLSQFRTFSFGSMVKKVRELKVKPMDVVKLTLLLSILTVAAKKTLTLVLDPFFWMYFSWTWLFWPWFIAVGLAGYGIYCFRKHWLGEANAFEQLGIVTSVFTWLTLVPPAYFNGYLEGWPYVFFLAYHYFFFFNVSVRKRLYGDFYARTHDPKWDVNTPLWSRILFGVGIMVGHWLAAFEGPELHRLPGGWANVGIWILIVITMLMHYDSTLYLARYSEKVVVPTAVVQFGPYRWVRHPIYASTMLLFAAYCTALRAPLSLLFLLAVCLVYYNKKAKMEEELMVESFGQSYSDYADKVRHKFIPFVY

SEQ ID NO: 24665 - protein, 295 aa, Arabidopsis thaliana
  peptide (1)..(295): Ceres Seq. ID no. 13490736
MVKKVRELKVKPMDVVKLTLLLSILTVAAKKTLTLVLDPFFWMYFSWTWLFWPWFIAVGLAGYGIYCFRKHWLGEANAFEQLGIVTSVFTWLTLVPPAYFNGYLEGWPYVFFLAYHYFFFFNVSVRKRLYGDFYARTHDPKWDVNTPLWSRILFGVGIMVGHWLAAFEGPELHRLPGGWANVGIWILIVITMLMHYDSTLYLARYSEKVVVPTAVVQFGPYRWVRHPIYASTMLLFAAYCTALRAPLSLLFLLAVCLVYYNKKAKMEEELMVESFGQSYSDYADKVRHKFIPFVY

SEQ ID NO: 24666 - protein, 283 aa, Arabidopsis thaliana
  peptide (1)..(283): Ceres Seq. ID no. 13490737
MDVVKLTLLLSILTVAAKKTLTLVLDPFFWMYFSWTWLFWPWFIAVGLAGYGIYCFRKHWLGEANAFEQLGIVTSVFTWLTLVPPAYFNGYLEGWPYVFFLAYHYFFFFNVSVRKRLYGDFYARTHDPKWDVNTPLWSRILFGVGIMVGHWLAAFEGPELHRLPGGWANVGIWILIVITMLMHYDSTLYLARYSEKVVVPTAVVQFGPYRWVRHPIYASTMLLFAAYCTALRAPLSLLFLLAVCLVYYNKKAKMEEELMVESFGQSYSDYADKVRHKFIPFVY

SEQ ID NO: 24667 - DNA, 1019 bp, Arabidopsis thaliana
  misc_feature (1)..(1019): Ceres Seq. ID no. 12422372
  misc_feature (1)..(1019): Ortholog of  Ceres SEQ ID NO 13584616 as cited in SEQ ID NO 65234
atcggtcgggatatttggcgagccgacccgtcgcgtcgtgggtttaggtttaacgtattggcgcgccagtgaagaaaatagacgacgatggcgatgatgcatcctccgcagccgccgcaaggctcttatcaccatcctcagacgctcgaagaagttcgaactctttggattggtgatttgcagtactgggtcgacgaaaattacctcacttcctgcttctcccaaaccggcgagctcgtttctgtcaaggtaatacgtaacaagatcacgggacagccagaggggtatggttttatagagtttatatctcatgcagcagcagagagaactctgcagacgtacaatgggacacagatgcctggaactgagttaacttttcggttaaattgggcttcttttggttcaggacagaaagttgatgctggacctgatcattctatctttgttggagatttagcacctgatgttacagattatcttcttcaagagacattccgtgttcattattcttctgttagaggtgccaaggttgttactgatccaagtactggacgatcaaagggttatggatttgttaaatttgcagaggaaagtgaaaggaatcgggctatggctgaaatgaatggtttgtattgctcaacaaggcctatgcgtattagcgcagcaacacctaaaaaaaacgtcggtgtgcagcaacaatatgtcaccaaagttacagtcccatctgcagttgctgcaccagtccaagcatacgttgctccacctgaaagtgatgtcacctgtacaacgatttcagttgccaatttggaccaaaatgttacagaggaagagctgaagaaagcattctcccaattaggagaggttatttatgtcaaaatacctgcaacaaagggatatggttatgttcaattcaaaaccaggccttctgcagaagaagctgttcaaagaatgcagggacaagtgattggtcaacaagcagttcgcatctcttggagtaaaaatccaggacaggatggttg

SEQ ID NO: 24668 - protein, 310 aa, Arabidopsis thaliana
  peptide (1)..(310): Ceres Seq. ID no. 12422373
MAMMHPPQPPQGSYHHPQTLEEVRTLWIGDLQYWVDENYLTSCFSQTGELVSVKVIRNKITGQPEGYGFIEFISHAAAERTLQTYNGTQMPGTELTFRLNWASFGSGQKVDAGPDHSIFVGDLAPDVTDYLLQETFRVHYSSVRGAKVVTDPSTGRSKGYGFVKFAEESERNRAMAEMNGLYCSTRPMRISAATPKKNVGVQQQYVTKVTVPSAVAAPVQAYVAPPESDVTCTTISVANLDQNVTEEELKKAFSQLGEVIYVKIPATKGYGYVQFKTRPSAEEAVQRMQGQVIGQQAVRISWSKNPGQDG

SEQ ID NO: 24669 - protein, 308 aa, Arabidopsis thaliana
  peptide (1)..(308): Ceres Seq. ID no. 12422374
MMHPPQPPQGSYHHPQTLEEVRTLWIGDLQYWVDENYLTSCFSQTGELVSVKVIRNKITGQPEGYGFIEFISHAAAERTLQTYNGTQMPGTELTFRLNWASFGSGQKVDAGPDHSIFVGDLAPDVTDYLLQETFRVHYSSVRGAKVVTDPSTGRSKGYGFVKFAEESERNRAMAEMNGLYCSTRPMRISAATPKKNVGVQQQYVTKVTVPSAVAAPVQAYVAPPESDVTCTTISVANLDQNVTEEELKKAFSQLGEVIYVKIPATKGYGYVQFKTRPSAEEAVQRMQGQVIGQQAVRISWSKNPGQDG

SEQ ID NO: 24670 - protein, 307 aa, Arabidopsis thaliana
  peptide (1)..(307): Ceres Seq. ID no. 12422375
MHPPQPPQGSYHHPQTLEEVRTLWIGDLQYWVDENYLTSCFSQTGELVSVKVIRNKITGQPEGYGFIEFISHAAAERTLQTYNGTQMPGTELTFRLNWASFGSGQKVDAGPDHSIFVGDLAPDVTDYLLQETFRVHYSSVRGAKVVTDPSTGRSKGYGFVKFAEESERNRAMAEMNGLYCSTRPMRISAATPKKNVGVQQQYVTKVTVPSAVAAPVQAYVAPPESDVTCTTISVANLDQNVTEEELKKAFSQLGEVIYVKIPATKGYGYVQFKTRPSAEEAVQRMQGQVIGQQAVRISWSKNPGQDG

SEQ ID NO: 24671 - DNA, 1319 bp, Arabidopsis thaliana
  misc_feature (1)..(1319): Ceres Seq. ID no. 12322279
  misc_feature (1)..(1319): Ortholog of  Ceres SEQ ID NO 14311025 as cited in SEQ ID NO 53369
  misc_feature (1)..(1319): Ortholog of  Ceres SEQ ID NO 13596872 as cited in SEQ ID NO 62785
aactccgcaaaaacctctctttctctctctctccgacgatggcttccggtgaccagagcaagaagagaaaacagcattatcgccctcaaaacagaccagtgaagaagaagggatcttaccctttgaagccaggtgttcaaggttttttcatctcttgcgatggcggacgcgaattccaagctgctcaggaagctattaacgtcattgattcctttttcgaggagctaatacaagggactgactcgaaagtgaatcctggtttgtttggtaatccaataaacaaaaaagttacattttcgtatagcgaggatgaggatgaggaggaagatgagagtaataatggcgaggaagaggaaaacaaaggagatggggataaggcagtagtgagtgaaggcggtaatgatctagtgaatgagaaagaaatagctagtgaaggagttaatgatcaagtgaatgagaaagaaatagcaagtgaagggtcatgtgaagtcaaacaattggcagaaaatgagactgtaaaagaggaagaagataaagggaatcagaagaatggtggagatgaacctcctagaaagaagacgtgtacggaagaagcaaatcctttagcaaaagtaaacgaaaatgcagagaagtctattgataagttgattgaagctgaactaaaagaacttggagacaagagtaagagacggttcatgaagttagatccgggttgcaacggtctggtcttcatccaaatgaaaaagagagatggtgacccaagtcccaaagaaattgtacagcatgctatgacttctgctgctgcaacaaaaaagcatatgtcaaggttcatcctaagacttctaccaattgaagtgtcgtgttacccttcagaggaagaaatttcaagagccatcaagccgcttgtagaacagtacttccccattgagaccgaaaatccccggaaatttgctgtgttgtatggagcgcgtgctaacacagggcttgataggatgaaaataataaacacgatcgccaaatctattcctgcccctcacaaagttgatttgagcaatccggagatgacgatcgtggtggaaattattaagacagtgtgcttaattggagtggtagagaagtacaaggagctagcaaagtacaacctcaggcagctcacgtcgaccaattgacacatcttcttttatctttaactatgtttcgtttcttaagactgaagatgcttttgtgtttagtgttacagagtttctggcttaacttattaaaatggctgaagttgccctttatactctctttggtctgatcaataaagttttttcttt

SEQ ID NO: 24672 - protein, 388 aa, Arabidopsis thaliana
  peptide (1)..(388): Ceres Seq. ID no. 12322280
LRKNLSFSLSPTMASGDQSKKRKQHYRPQNRPVKKKGSYPLKPGVQGFFISCDGGREFQAAQEAINVIDSFFEELIQGTDSKVNPGLFGNPINKKVTFSYSEDEDEEEDESNNGEEEENKGDGDKAVVSEGGNDLVNEKEIASEGVNDQVNEKEIASEGSCEVKQLAENETVKEEEDKGNQKNGGDEPPRKKTCTEEANPLAKVNENAEKSIDKLIEAELKELGDKSKRRFMKLDPGCNGLVFIQMKKRDGDPSPKEIVQHAMTSAAATKKHMSRFILRLLPIEVSCYPSEEEISRAIKPLVEQYFPIETENPRKFAVLYGARANTGLDRMKIINTIAKSIPAPHKVDLSNPEMTIVVEIIKTVCLIGVVEKYKELAKYNLRQLTSTN

SEQ ID NO: 24673 - protein, 376 aa, Arabidopsis thaliana
  peptide (1)..(376): Ceres Seq. ID no. 12322281
MASGDQSKKRKQHYRPQNRPVKKKGSYPLKPGVQGFFISCDGGREFQAAQEAINVIDSFFEELIQGTDSKVNPGLFGNPINKKVTFSYSEDEDEEEDESNNGEEEENKGDGDKAVVSEGGNDLVNEKEIASEGVNDQVNEKEIASEGSCEVKQLAENETVKEEEDKGNQKNGGDEPPRKKTCTEEANPLAKVNENAEKSIDKLIEAELKELGDKSKRRFMKLDPGCNGLVFIQMKKRDGDPSPKEIVQHAMTSAAATKKHMSRFILRLLPIEVSCYPSEEEISRAIKPLVEQYFPIETENPRKFAVLYGARANTGLDRMKIINTIAKSIPAPHKVDLSNPEMTIVVEIIKTVCLIGVVEKYKELAKYNLRQLTSTN

SEQ ID NO: 24674 - DNA, 1181 bp, Arabidopsis thaliana
  misc_feature (1)..(1181): Ceres Seq. ID no. 13497345
  misc_feature (1)..(1181): Ortholog of  Ceres SEQ ID NO 12609146 as cited in SEQ ID NO 52118
  misc_feature (1)..(1181): Ortholog of  Ceres SEQ ID NO 13594056 as cited in SEQ ID NO 55691
  misc_feature (1)..(1181): Ortholog of  Ceres SEQ ID NO 13638136 as cited in SEQ ID NO 58644
  misc_feature (1)..(1181): Ortholog of  Ceres SEQ ID NO 13596868 as cited in SEQ ID NO 62806
  misc_feature (1)..(1181): Ortholog of  Ceres SEQ ID NO 13595885 as cited in SEQ ID NO 69265
  misc_feature (1)..(1181): Ortholog of  Ceres SEQ ID NO 12566239 as cited in SEQ ID NO 0
  misc_feature (1)..(1181): Ortholog of  Ceres SEQ ID NO 13599119 as cited in SEQ ID NO 0
aaaccagaattattaaatttgatttcagtggatataaatttctctcaagaaaacgacattaacgaaggagagccaaagcttcgtcgttgatcattcctccgtagttgcggaattgaacccaacttaggaatcaaatgcccaagatctgctgctctcgttccgctacacaagttgtggtagcacaaaaatcaaactcgggtaaaggaagaaacggtgaaggaggaatcaagtatggatttagtttgataaaagggaaatctaaccattcaatggaggattatcatgttgctaagtttaccaatttcaatggcaatgaattggggctttttgcaatctttgatggtcataaaggtgatcatgttgctgcttatctgcagaaacatctcttctctaatatccttaaagatggagagttcttggttgatcctcgaagagcaattgcgaaagcttatgagaatacagatcaaaagattttagcagataatagaacggatttagagagtggtggttcgactgctgtgactgcgattttgatcaatgggaaagctttgtggatagctaatgttggtgattcacgagctattgtttctagtcgaggtaaagcaaaacagatgagtgttgatcatgatcctgatgatgatactgagaggagtatgattgagagtaaaggtggatttgtgaccaacagaccgtgatgttcctcgagtgaacggtttgttagcggtctctcgtgtctttggagataaaaaccttaaagcatatttgaactcagagcctgagattaaggacgtaaccattgatagtcacacagattttcttattctggctagtgacggtatttcgaaggtgatgtcaaaccaagaagcagttgatgtagctaagaagttgaaagatccaaaggaagcggcgaggcaagtagttgctgaagcattgaaaagaaacagcaaggatgacatatcttgcattgttgtccggtttagatgataaccaagaagactcagcttatattggatttggagcttcctttgcttaccatgattcttttggggtccggtttagtttgattctgggtcttggttacttgtgcatttttaagaacatgagtttgaataggactattatatattactagtttgacaaaccagatattttatcatataaattacatgaaaagaatagcc

SEQ ID NO: 24675 - protein, 186 aa, Arabidopsis thaliana
  peptide (1)..(186): Ceres Seq. ID no. 13497346
MPKICCSRSATQVVVAQKSNSGKGRNGEGGIKYGFSLIKGKSNHSMEDYHVAKFTNFNGNELGLFAIFDGHKGDHVAAYLQKHLFSNILKDGEFLVDPRRAIAKAYENTDQKILADNRTDLESGGSTAVTAILINGKALWIANVGDSRAIVSSRGKAKQMSVDHDPDDDTERSMIESKGGFVTNRP

SEQ ID NO: 24676 - protein, 141 aa, Arabidopsis thaliana
  peptide (1)..(141): Ceres Seq. ID no. 13497347
MEDYHVAKFTNFNGNELGLFAIFDGHKGDHVAAYLQKHLFSNILKDGEFLVDPRRAIAKAYENTDQKILADNRTDLESGGSTAVTAILINGKALWIANVGDSRAIVSSRGKAKQMSVDHDPDDDTERSMIESKGGFVTNRP

SEQ ID NO: 24677 - DNA, 1076 bp, Arabidopsis thaliana
  misc_feature (1)..(1076): Ceres Seq. ID no. 12481800
  misc_feature (1)..(1076): Ortholog of  Ceres SEQ ID NO 15168314 as cited in SEQ ID NO 60142
atttctaatttcatgcttattagatcgttaattgaatctgcatcccgcagtgatcattctttgatttacgaatttgtttttttgttgtgattgaaaatcttgttgtcgatttttgtcaattttatggtttaatttacaaagtgtatattgtgattgaatcgactgggagggtattgagagttgtttgtttgaatctaacaaattcaagtgcaaatctattttatagccacttatcttctgctagtagatctacttgagttttaagagatgtgacttctttaataccattgtgaatttcatggctaactgataaaaaggtctcagctctgatcttttgattcaacggctcccggagacgacggaagcaatgcagttcttcggtggatctgagattagtccgtcgccgccagttccgacggcgagtggaaacaacgcgcacatgatgtacgttttcaatcgtaacggtgtatgtcttctctacaaagaatggaatcggcctcttcatacacttaatcctcagcaagatcacaagctcatgtttggtcttctcttctctctcaaatctctcaccgctaagatggatccagtcaatgcggataaaggaaatcttggggttccacagttgccaggacaaggttgctctttccatagtttccgtacgaatacttacaagctaagtttcatggagactccctctggtattaagattatcttagtaactcatccaaagaccggagatttacgcgaatccttgaagtacatctacagtttatacgttgaatatgtcgtaaaaaatcctatatacagcccaggatctccaatcaagtcggagttgttcaacactgcacttgaccagtacgtaaggagcatctcttagtgtgtgcattacagatttgtccattggaacttctctccttcaacagaactatcgtctgaacaatctctgaaaagaagagagaattgtagtagagagatttatcttgagttcgactgttttctctgcaaatctatgtttcgtttaccctttttattaactccactgtattggcttgctatcaatgatgttcatggtttac

SEQ ID NO: 24678 - protein, 169 aa, Arabidopsis thaliana
  peptide (1)..(169): Ceres Seq. ID no. 12481801
MQFFGGSEISPSPPVPTASGNNAHMMYVFNRNGVCLLYKEWNRPLHTLNPQQDHKLMFGLLFSLKSLTAKMDPVNADKGNLGVPQLPGQGCSFHSFRTNTYKLSFMETPSGIKIILVTHPKTGDLRESLKYIYSLYVEYVVKNPIYSPGSPIKSELFNTALDQYVRSIS

SEQ ID NO: 24679 - protein, 145 aa, Arabidopsis thaliana
  peptide (1)..(145): Ceres Seq. ID no. 12481802
MMYVFNRNGVCLLYKEWNRPLHTLNPQQDHKLMFGLLFSLKSLTAKMDPVNADKGNLGVPQLPGQGCSFHSFRTNTYKLSFMETPSGIKIILVTHPKTGDLRESLKYIYSLYVEYVVKNPIYSPGSPIKSELFNTALDQYVRSIS

SEQ ID NO: 24680 - protein, 144 aa, Arabidopsis thaliana
  peptide (1)..(144): Ceres Seq. ID no. 12481803
MYVFNRNGVCLLYKEWNRPLHTLNPQQDHKLMFGLLFSLKSLTAKMDPVNADKGNLGVPQLPGQGCSFHSFRTNTYKLSFMETPSGIKIILVTHPKTGDLRESLKYIYSLYVEYVVKNPIYSPGSPIKSELFNTALDQYVRSIS

SEQ ID NO: 24681 - DNA, 1272 bp, Arabidopsis thaliana
  misc_feature (1)..(1272): Ceres Seq. ID no. 12393055
  misc_feature (1)..(1272): Ortholog of  Ceres SEQ ID NO 12608620 as cited in SEQ ID NO 60192
  misc_feature (1)..(1272): Ortholog of  Ceres SEQ ID NO 13662898 as cited in SEQ ID NO 66199
  misc_feature (1)..(1272): Ortholog of  Ceres SEQ ID NO 14313358 as cited in SEQ ID NO 67347
  misc_feature (1)..(1272): Ortholog of  Ceres SEQ ID NO 13654314 as cited in SEQ ID NO 67914
atgaaataaaaagaagcatcttctagagagagacatatagagaaagagagagaaagctttagggtttcaaaaaaaaaaaaaaaagagaccctttagaaatctcctaacaggaaagttttctcaattgctatagaaaatgggagtcatgatcaatcaccatttcctcgcttttatcttcggcatcttaggaaacgtgatatccttccttgtattcctcgctccagtgccaactttttatagaatatacaagagaaaatcgacggaaagtttccagtcgctaccgtaccaagtgtcgctatttagctgcatgctatggctctactacgcattgattaagaaagacgcttttctcctaattaccatcaactcctttggctgcgtcgtggagactctctacatagccatgttcttcgcttacgccaccagggagaaaaggatatcggctatgaagttgttcatagcaatgaacgttgccttcttctcgttgattctaatggtaacacatttcgtggttaaaactcctcccctccaagtctctgtactcggctggatttgtgttgccatttctgtttctgttttcgctgcccctctaatgatcgtggctcgtgtgataaagacaaagagtgtggagtacatgcccttcacgctttctttcttcctcactataagcgccgttatgtggttcgcttatggtttattcctcaatgacatatgcatagcgattccaaacgtggtgggattcgtactagggctgttgcaaatggttttgtacttggtttacaggaactcaaatgagaaaccagagaagattaattcgtcagaacaacaacttaagagtattgtcgtgatgagtccgttaggtgtgtcggaagtgcacccagttgtgacggaatcggtggacccactctctgaagccgttcatcatgaggatctgtccaaagttactaaagtggaggagccgtcaattgaaaacggcaagtgctacgtggaggctactcgtcctgaaaccgtttgaagtgtcaatatgtgaagctcaaaatattgctctctctctctctctctttcactctctttctctcggctcgtcagggccggccaaaggaagaaattgtattatcggcggggtggtttgttaaatttccatttttgtttcgtatcttattgatgatgtactacttgcataaagttttgtgtttatttgaatatattatctttgtgtaagttgtaactagtgctctttggaaaatttgatataataaacctcaatagctt

SEQ ID NO: 24682 - protein, 292 aa, Arabidopsis thaliana
  peptide (1)..(292): Ceres Seq. ID no. 12393056
MGVMINHHFLAFIFGILGNVISFLVFLAPVPTFYRIYKRKSTESFQSLPYQVSLFSCMLWLYYALIKKDAFLLITINSFGCVVETLYIAMFFAYATREKRISAMKLFIAMNVAFFSLILMVTHFVVKTPPLQVSVLGWICVAISVSVFAAPLMIVARVIKTKSVEYMPFTLSFFLTISAVMWFAYGLFLNDICIAIPNVVGFVLGLLQMVLYLVYRNSNEKPEKINSSEQQLKSIVVMSPLGVSEVHPVVTESVDPLSEAVHHEDLSKVTKVEEPSIENGKCYVEATRPETV

SEQ ID NO: 24683 - protein, 289 aa, Arabidopsis thaliana
  peptide (1)..(289): Ceres Seq. ID no. 12393057
MINHHFLAFIFGILGNVISFLVFLAPVPTFYRIYKRKSTESFQSLPYQVSLFSCMLWLYYALIKKDAFLLITINSFGCVVETLYIAMFFAYATREKRISAMKLFIAMNVAFFSLILMVTHFVVKTPPLQVSVLGWICVAISVSVFAAPLMIVARVIKTKSVEYMPFTLSFFLTISAVMWFAYGLFLNDICIAIPNVVGFVLGLLQMVLYLVYRNSNEKPEKINSSEQQLKSIVVMSPLGVSEVHPVVTESVDPLSEAVHHEDLSKVTKVEEPSIENGKCYVEATRPETV

SEQ ID NO: 24684 - protein, 235 aa, Arabidopsis thaliana
  peptide (1)..(235): Ceres Seq. ID no. 12393058
MLWLYYALIKKDAFLLITINSFGCVVETLYIAMFFAYATREKRISAMKLFIAMNVAFFSLILMVTHFVVKTPPLQVSVLGWICVAISVSVFAAPLMIVARVIKTKSVEYMPFTLSFFLTISAVMWFAYGLFLNDICIAIPNVVGFVLGLLQMVLYLVYRNSNEKPEKINSSEQQLKSIVVMSPLGVSEVHPVVTESVDPLSEAVHHEDLSKVTKVEEPSIENGKCYVEATRPETV

SEQ ID NO: 24685 - DNA, 1447 bp, Arabidopsis thaliana
  misc_feature (1)..(1447): Ceres Seq. ID no. 12396376
  misc_feature (1)..(1447): Ortholog of  Ceres SEQ ID NO 15176440 as cited in SEQ ID NO 53697
  misc_feature (1)..(1447): Ortholog of  Ceres SEQ ID NO 14314717 as cited in SEQ ID NO 54224
  misc_feature (1)..(1447): Ortholog of  Ceres SEQ ID NO 14313429 as cited in SEQ ID NO 55662
actcagaatcatctttgtcaatatttctctaccatcttttgtctcatagccatgggtctagttcaagaagagggaagcggtcctgttcatggctttcggttatcaaccgtgagtgcgtccctgccgtcagagacaggtacgacccacgagcccaccggtttagacctcgccatgaagcttcactacctaaagacggtttacatttactcggccgagacagcacgtgacttgactgtgatggacgtgaaggggccgttgttttccgtgttcgaccagaacccatgcatcattggcaggttcaggcgacatgaatcgggacgtcccgtacctaaagtgcaacgactgtggcacacgtttcgtggaacgtcattgtgatctcactgtggaggagtggctccgtgtaccggaccggtccgttgatgagtctttggtttaccatcaaccagttggaccagatttggcattctctcctttgctctatattcagatgacccggtttagctgcggtggattagctttgggcttaagctgggctcatatcatgggagatccattctctctttctcatttcttcaacttatgggctcaagcctttgctggtgagaatatatactcccccaaaacctctgatttacaaagagtctttcaaaacccgacctcaacggtcaaacaaccggattcaatcaaacgggttgacccggttggagatctctgggtcgctccgaataacagcaaaatgacaacattctccttcaatttaacggttaacgatttaaaatcaaatttcccggtgaacggagacggcgaattcgaaattctcactggaatcatatggaaatgtgttgcgacggtgaggggagaatcagctccggtgacgattacggttatcagatcggatccgaagaagttgaagcctagagcggtgagaaatggtcagatgataagttccattcacgtcgatttctcggtggcggaggcgagtttggaggagattgtgaaatcgatcggtgaagcgaaagatgagagggttgtgatcgatgagattgttgatgatgtttcggattttattgtttacggagcgaatttaacgtttgtggatatgagtgaagttgatttttatgaggcgaaagttatggggaaatcgccggaatcggtttattgtaatgttcaggggattggggacgacggagcagtggtggttttaccgggggttgtggaggaggagagggttgtgacggtgacattaccggtggatgagattgagaaggtgaaatgggaaatgaagaaatgtggtttgatcacgccgttagtttaacggtgaatgaagaaatcattttatgcggttatcgttaatcgtgttttttattgtttgtttgggtttttattttatttggtgtgttttatataaaatcaaataaatgtcatttttataatttatgtttgtagc

SEQ ID NO: 24686 - protein, 335 aa, Arabidopsis thaliana
  peptide (1)..(335): Ceres Seq. ID no. 12396377
MNRDVPYLKCNDCGTRFVERHCDLTVEEWLRVPDRSVDESLVYHQPVGPDLAFSPLLYIQMTRFSCGGLALGLSWAHIMGDPFSLSHFFNLWAQAFAGENIYSPKTSDLQRVFQNPTSTVKQPDSIKRVDPVGDLWVAPNNSKMTTFSFNLTVNDLKSNFPVNGDGEFEILTGIIWKCVATVRGESAPVTITVIRSDPKKLKPRAVRNGQMISSIHVDFSVAEASLEEIVKSIGEAKDERVVIDEIVDDVSDFIVYGANLTFVDMSEVDFYEAKVMGKSPESVYCNVQGIGDDGAVVVLPGVVEEERVVTVTLPVDEIEKVKWEMKKCGLITPLV

SEQ ID NO: 24687 - protein, 275 aa, Arabidopsis thaliana
  peptide (1)..(275): Ceres Seq. ID no. 12396378
MTRFSCGGLALGLSWAHIMGDPFSLSHFFNLWAQAFAGENIYSPKTSDLQRVFQNPTSTVKQPDSIKRVDPVGDLWVAPNNSKMTTFSFNLTVNDLKSNFPVNGDGEFEILTGIIWKCVATVRGESAPVTITVIRSDPKKLKPRAVRNGQMISSIHVDFSVAEASLEEIVKSIGEAKDERVVIDEIVDDVSDFIVYGANLTFVDMSEVDFYEAKVMGKSPESVYCNVQGIGDDGAVVVLPGVVEEERVVTVTLPVDEIEKVKWEMKKCGLITPLV

SEQ ID NO: 24688 - protein, 257 aa, Arabidopsis thaliana
  peptide (1)..(257): Ceres Seq. ID no. 12396379
MGDPFSLSHFFNLWAQAFAGENIYSPKTSDLQRVFQNPTSTVKQPDSIKRVDPVGDLWVAPNNSKMTTFSFNLTVNDLKSNFPVNGDGEFEILTGIIWKCVATVRGESAPVTITVIRSDPKKLKPRAVRNGQMISSIHVDFSVAEASLEEIVKSIGEAKDERVVIDEIVDDVSDFIVYGANLTFVDMSEVDFYEAKVMGKSPESVYCNVQGIGDDGAVVVLPGVVEEERVVTVTLPVDEIEKVKWEMKKCGLITPLV

SEQ ID NO: 24689 - DNA, 1328 bp, Arabidopsis thaliana
  misc_feature (1)..(1328): Ceres Seq. ID no. 13490747
  misc_feature (1)..(1328): Ortholog of  Ceres SEQ ID NO 13660872 as cited in SEQ ID NO 60830
  misc_feature (1)..(1328): Ortholog of  Ceres SEQ ID NO 12616221 as cited in SEQ ID NO 63291
  misc_feature (1)..(1328): Ortholog of  Ceres SEQ ID NO 14302355 as cited in SEQ ID NO 65830
cttctcgcatcttatatgaaacacattcactctccaaaataatctatacttttcctacatattctcttgacgatcatgagactgatttcgtgaaaatatcgtcattatatcaaattagaagttgatggaaaacatgggggattcgagcatagggccgggccatccgcatctccctcccgggtttcggtttcacccgactgatgaggaactagtagttcattacctcaagaagaaagcagattctgttccacttccagtctcaatcatcgcagagattgatctttacaaatttgatccttgggagcttccaagcaaggcgagttttggagagcacgagtggtacttctttagtcctcgggatcggaagtatccaaatggggttaggccaaaccgggcagcaacttccggttattggaaagcaacgggaaccgataaaccgatatttacgtgcaatagtcacaaggttggtgtcaagaaagcgcttgttttttacggtggaaagcctcctaaagggataaaaacagattggatcatgcatgaatatcgcctcactgatggtaaccttagcactgcggctaagccgcctgacttaaccacgacaaggaaaaactcactacggctagacgattgggttctatgtaggatctataagaagaatagttcacaaagaccaacaatggagagagtattacttagagaggatctaatggaaggcatgctctcaaaatcatctgctaattcttcttctacatcagtactagacaacaacgacaacaataataacaataacgaagaacactttttcgacggtatggtcgtttcttcagacaaacgttccttgtgtggtcaataccgaatgggccacgaggcctcaggatcatcttcattcggatctttcttatcgagcaagaggtttcatcatacaggtgatctcaacaatgataactacaatgtctcttttgtttcgatgcttagtgagattcctcagagttcggggtttcatgcaaatggtgttatggatacgacgtcgtctctagctgatcatggggttttaagacaggcgtttcagcttcctaacatgaactggcactcataatctatatagatatatatgtgtgtatcatatatgtatctatgcaggcctaatatagtttacacataaatcatctgggaatatatatatacaagtacgcggtcttacaaatgtatacgtatctgtttaattacgtcaagaaaaagtgtatacgtttctttttactcaatggctgcaaagatgtgtactaataacagaagctgattaataaaaaatataaaagtatattttttcc

SEQ ID NO: 24690 - protein, 323 aa, Arabidopsis thaliana
  peptide (1)..(323): Ceres Seq. ID no. 13490748
MENMGDSSIGPGHPHLPPGFRFHPTDEELVVHYLKKKADSVPLPVSIIAEIDLYKFDPWELPSKASFGEHEWYFFSPRDRKYPNGVRPNRAATSGYWKATGTDKPIFTCNSHKVGVKKALVFYGGKPPKGIKTDWIMHEYRLTDGNLSTAAKPPDLTTTRKNSLRLDDWVLCRIYKKNSSQRPTMERVLLREDLMEGMLSKSSANSSSTSVLDNNDNNNNNNEEHFFDGMVVSSDKRSLCGQYRMGHEASGSSSFGSFLSSKRFHHTGDLNNDNYNVSFVSMLSEIPQSSGFHANGVMDTTSSLADHGVLRQAFQLPNMNWHS

SEQ ID NO: 24691 - protein, 320 aa, Arabidopsis thaliana
  peptide (1)..(320): Ceres Seq. ID no. 13490749
MGDSSIGPGHPHLPPGFRFHPTDEELVVHYLKKKADSVPLPVSIIAEIDLYKFDPWELPSKASFGEHEWYFFSPRDRKYPNGVRPNRAATSGYWKATGTDKPIFTCNSHKVGVKKALVFYGGKPPKGIKTDWIMHEYRLTDGNLSTAAKPPDLTTTRKNSLRLDDWVLCRIYKKNSSQRPTMERVLLREDLMEGMLSKSSANSSSTSVLDNNDNNNNNNEEHFFDGMVVSSDKRSLCGQYRMGHEASGSSSFGSFLSSKRFHHTGDLNNDNYNVSFVSMLSEIPQSSGFHANGVMDTTSSLADHGVLRQAFQLPNMNWHS

SEQ ID NO: 24692 - protein, 187 aa, Arabidopsis thaliana
  peptide (1)..(187): Ceres Seq. ID no. 13490750
MHEYRLTDGNLSTAAKPPDLTTTRKNSLRLDDWVLCRIYKKNSSQRPTMERVLLREDLMEGMLSKSSANSSSTSVLDNNDNNNNNNEEHFFDGMVVSSDKRSLCGQYRMGHEASGSSSFGSFLSSKRFHHTGDLNNDNYNVSFVSMLSEIPQSSGFHANGVMDTTSSLADHGVLRQAFQLPNMNWHS

SEQ ID NO: 24693 - DNA, 495 bp, Arabidopsis thaliana
  misc_feature (1)..(495): Ceres Seq. ID no. 12580486
  misc_feature (1)..(495): Ortholog of  Ceres SEQ ID NO 15179213 as cited in SEQ ID NO 0
atcagatcttaagaagaagaacctaaagctcactacgatatttttcgagaatatgacgactttttctgttccgattgataacggagattctatgaagatcgcagaagaagaatcacaaagaacactgtacccatatgttactggaacttcagttgttgcaatcaagtacaaagatggggttttgatggcttctgatatgggaggttcatatggatcaaccttaagatacaagaacatcgagagagtgaaggctattggtaagcattctcttcttggtgccagcggagaaatcagcgactttcaggagattctccgttatcttgatgagctcaccctgaatgataacatgtgggatgatggtaactctttgggaccaaaagagattcacaactatctgacccgtgtgatgtacaaccgtcgcaacaagtttaaccctctgtggaacactctcgtccttggaggcgtcaaaaatgggaaacatggttcgttgagctc

SEQ ID NO: 24694 - protein, 164 aa, Arabidopsis thaliana
  peptide (1)..(164): Ceres Seq. ID no. 12580487
SDLKKKNLKLTTIFFENMTTFSVPIDNGDSMKIAEEESQRTLYPYVTGTSVVAIKYKDGVLMASDMGGSYGSTLRYKNIERVKAIGKHSLLGASGEISDFQEILRYLDELTLNDNMWDDGNSLGPKEIHNYLTRVMYNRRNKFNPLWNTLVLGGVKNGKHGSLS

SEQ ID NO: 24695 - protein, 147 aa, Arabidopsis thaliana
  peptide (1)..(147): Ceres Seq. ID no. 12580488
MTTFSVPIDNGDSMKIAEEESQRTLYPYVTGTSVVAIKYKDGVLMASDMGGSYGSTLRYKNIERVKAIGKHSLLGASGEISDFQEILRYLDELTLNDNMWDDGNSLGPKEIHNYLTRVMYNRRNKFNPLWNTLVLGGVKNGKHGSLS

SEQ ID NO: 24696 - protein, 134 aa, Arabidopsis thaliana
  peptide (1)..(134): Ceres Seq. ID no. 12580489
MKIAEEESQRTLYPYVTGTSVVAIKYKDGVLMASDMGGSYGSTLRYKNIERVKAIGKHSLLGASGEISDFQEILRYLDELTLNDNMWDDGNSLGPKEIHNYLTRVMYNRRNKFNPLWNTLVLGGVKNGKHGSLS

SEQ ID NO: 24697 - DNA, 1122 bp, Arabidopsis thaliana
  misc_feature (1)..(1122): Ceres Seq. ID no. 12384839
  misc_feature (1)..(1122): Ortholog of  Ceres SEQ ID NO 13582388 as cited in SEQ ID NO 56812
gtcgatcacatcaataaacgcattttcccttttcgtatccgccggaaaaaaataacgtcttttttttttttccaatctctctgtctctctccccaattcccagattctcatttttgcagagattttaggaggaacatgattgtttgaattgggagagacattggttcttgtaaaatgcgggtgcttggtttgagctcaagcttatgctctggtgaggataaggaagaagaagagattaatggagaaggctctctcacgcctgtttatctcaacgtctatgatctaactcctgtcaacaattatctctattggttcggccttggcatatttcactctggcattgaggctcatggtttcgagtatggatatggagctcatgagtattcgagcagtggggtatttgaggttgaacctaggagctgtccaggtttcatctttaggcgctcagttttgttgggaaccaccagcatgtctcgctctgatttccgctcattcatggagaagctttcgagaaagtatcatggggacacataccatttgattgccaaaaactgtaaccatttcactgaagaagtatgcttgcaggtaacaggaaagcctattcctggatggattaatcggatggctcgagttggttctttctgtaactgtatccttccagaaagcatacagctctcatcggttaatcatccggaagccctcgagttctctgatgataacgatggatcagaagaatcagttgcatcttctgtgtcatacgaaacagatggagaaggatcggatcatcatctcataacagcaccaaacagcgacattgcgtatctacaggacagaccagtgagacttgcccgtgagctcctccaagaaccaactgatgatacatctccgcagtacttgttgaagcggtcctgatcatcacaagcatcaacaacttgtgttgtctgtaaacagtgaggcaatggtccatatattgagtattctttggatctatcaatgtaaaaaaagatttaaatcagaacccatctgagatgttggattgtagtgtaagatttagagacaaatggtgtgacaaaaattgtgccttcttcttcttctcccaatgtgagttaacatttcagtgtc

SEQ ID NO: 24698 - protein, 245 aa, Arabidopsis thaliana
  peptide (1)..(245): Ceres Seq. ID no. 12384840
MRVLGLSSSLCSGEDKEEEEINGEGSLTPVYLNVYDLTPVNNYLYWFGLGIFHSGIEAHGFEYGYGAHEYSSSGVFEVEPRSCPGFIFRRSVLLGTTSMSRSDFRSFMEKLSRKYHGDTYHLIAKNCNHFTEEVCLQVTGKPIPGWINRMARVGSFCNCILPESIQLSSVNHPEALEFSDDNDGSEESVASSVSYETDGEGSDHHLITAPNSDIAYLQDRPVRLARELLQEPTDDTSPQYLLKRS

SEQ ID NO: 24699 - protein, 147 aa, Arabidopsis thaliana
  peptide (1)..(147): Ceres Seq. ID no. 12384841
MSRSDFRSFMEKLSRKYHGDTYHLIAKNCNHFTEEVCLQVTGKPIPGWINRMARVGSFCNCILPESIQLSSVNHPEALEFSDDNDGSEESVASSVSYETDGEGSDHHLITAPNSDIAYLQDRPVRLARELLQEPTDDTSPQYLLKRS

SEQ ID NO: 24700 - protein, 138 aa, Arabidopsis thaliana
  peptide (1)..(138): Ceres Seq. ID no. 12384842
MEKLSRKYHGDTYHLIAKNCNHFTEEVCLQVTGKPIPGWINRMARVGSFCNCILPESIQLSSVNHPEALEFSDDNDGSEESVASSVSYETDGEGSDHHLITAPNSDIAYLQDRPVRLARELLQEPTDDTSPQYLLKRS

SEQ ID NO: 24701 - DNA, 1471 bp, Arabidopsis thaliana
  misc_feature (1)..(1471): Ceres Seq. ID no. 12335411
  misc_feature (1)..(1471): Ortholog of  Ceres SEQ ID NO 13659033 as cited in SEQ ID NO 66372
  misc_feature (1)..(1471): Ortholog of  Ceres SEQ ID NO 13655724 as cited in SEQ ID NO 68973
aatcgatggagttgggatccagacgaatctacacgacgatgccgtcgaagctccgatcttcttcttcacttcttccacgtattctgctcctttctctcttattactccttttctattccttaattctccgccgtccgattacttcaaacattgcctctcctccgccgtgcgatctcttctccggcagatgggttttcaatccagaaactccgaaaccgttgtacgacgagacttgtcctttccacagaaacgcttggaattgcttacggaacaagcgagataatatggatgttatcaattcatggagatgggagcccaatggatgtggattgagtcgaattgacccgacccggtttctagggatgatgaggaacaagaatgttgggtttgttggggattctctgaatgagaatttcttggtttcgttcttgtgtatacttagagtggctgatccaagtgctattaagtggaagaagaaaaaagcttggcgtggagcttacttccctaagttcaatgtcactgttgcttatcacagagctgttcttctcgctaaatatcagtggcaggcgagatcttctgctgaagctaatcaagacggagtgaaaggaacttatcgagttgatgttgatgttcctgcaaatgagtggatcaacgtcactagcttctatgatgttctcatatttaactctggccattggtggggttacgataagtttcctaaagagacacctcttgtcttctaccgaaagggaaagccgataaatcctcctcttgatatattaccaggatttgaactagttcttcaaaatatggtttcttatatccaaagagaagtccctgcgaagacccttaagttctggcgtttgcaatcaccaaggcatttctatggtggtgattggaaccagaatggaagttgtttgctcgataagccactcgaagaaaaccagcttgacttgtggtttgatcccaggaacaatggagtgaacaaagaagcaagaaagattaaccaaatcatcaagaatgagttgcaaacgacaaagatcaagttacttgatctgacccatctaagcgaattcagagcagatgcccacccagcgatctggttagggaagcaggacgcggtggcaatatggggacaagactgtatgcattggtgcctacccggtgttcctgacacatgggtcgatatattagcggaactcattctcactaacttaaaaacagagtgaagacgctatcaggagtcgagaacagagacttgcttgagcatatggaagctcaaatgtcggaaaggttccatcttttggttttaactgtaaatgattcatatctggatgaaattttgttcctttaccaagacatcttctcaaaacacaaacatttaacttgtattgtgtctcttgcttgtaactactgtttccatgaagttaatgtttttgcaattggggatctgcatatagaaagatgctct

SEQ ID NO: 24702 - protein, 408 aa, Arabidopsis thaliana
  peptide (1)..(408): Ceres Seq. ID no. 12335412
SMELGSRRIYTTMPSKLRSSSSLLPRILLLSLLLLLFYSLILRRPITSNIASPPPCDLFSGRWVFNPETPKPLYDETCPFHRNAWNCLRNKRDNMDVINSWRWEPNGCGLSRIDPTRFLGMMRNKNVGFVGDSLNENFLVSFLCILRVADPSAIKWKKKKAWRGAYFPKFNVTVAYHRAVLLAKYQWQARSSAEANQDGVKGTYRVDVDVPANEWINVTSFYDVLIFNSGHWWGYDKFPKETPLVFYRKGKPINPPLDILPGFELVLQNMVSYIQREVPAKTLKFWRLQSPRHFYGGDWNQNGSCLLDKPLEENQLDLWFDPRNNGVNKEARKINQIIKNELQTTKIKLLDLTHLSEFRADAHPAIWLGKQDAVAIWGQDCMHWCLPGVPDTWVDILAELILTNLKTE

SEQ ID NO: 24703 - protein, 407 aa, Arabidopsis thaliana
  peptide (1)..(407): Ceres Seq. ID no. 12335413
MELGSRRIYTTMPSKLRSSSSLLPRILLLSLLLLLFYSLILRRPITSNIASPPPCDLFSGRWVFNPETPKPLYDETCPFHRNAWNCLRNKRDNMDVINSWRWEPNGCGLSRIDPTRFLGMMRNKNVGFVGDSLNENFLVSFLCILRVADPSAIKWKKKKAWRGAYFPKFNVTVAYHRAVLLAKYQWQARSSAEANQDGVKGTYRVDVDVPANEWINVTSFYDVLIFNSGHWWGYDKFPKETPLVFYRKGKPINPPLDILPGFELVLQNMVSYIQREVPAKTLKFWRLQSPRHFYGGDWNQNGSCLLDKPLEENQLDLWFDPRNNGVNKEARKINQIIKNELQTTKIKLLDLTHLSEFRADAHPAIWLGKQDAVAIWGQDCMHWCLPGVPDTWVDILAELILTNLKTE

SEQ ID NO: 24704 - protein, 396 aa, Arabidopsis thaliana
  peptide (1)..(396): Ceres Seq. ID no. 12335414
MPSKLRSSSSLLPRILLLSLLLLLFYSLILRRPITSNIASPPPCDLFSGRWVFNPETPKPLYDETCPFHRNAWNCLRNKRDNMDVINSWRWEPNGCGLSRIDPTRFLGMMRNKNVGFVGDSLNENFLVSFLCILRVADPSAIKWKKKKAWRGAYFPKFNVTVAYHRAVLLAKYQWQARSSAEANQDGVKGTYRVDVDVPANEWINVTSFYDVLIFNSGHWWGYDKFPKETPLVFYRKGKPINPPLDILPGFELVLQNMVSYIQREVPAKTLKFWRLQSPRHFYGGDWNQNGSCLLDKPLEENQLDLWFDPRNNGVNKEARKINQIIKNELQTTKIKLLDLTHLSEFRADAHPAIWLGKQDAVAIWGQDCMHWCLPGVPDTWVDILAELILTNLKTE

SEQ ID NO: 24705 - DNA, 1086 bp, Arabidopsis thaliana
  misc_feature (1)..(1086): Ceres Seq. ID no. 12377337
  misc_feature (1)..(1086): Ortholog of  Ceres SEQ ID NO 13594298 as cited in SEQ ID NO 57803
  misc_feature (1)..(1086): Ortholog of  Ceres SEQ ID NO 13503476 as cited in SEQ ID NO 61978
  misc_feature (1)..(1086): Ortholog of  Ceres SEQ ID NO 12578438 as cited in SEQ ID NO 62201
  misc_feature (1)..(1086): Ortholog of  Ceres SEQ ID NO 12617675 as cited in SEQ ID NO 64656
acaacaaaaattaaatcaaagatggactatatgagaatctttagtgtttttgtagtaacgttatggatcataagggttgatgctagggttttcggaggacgaggaatcgaaaaatttgtaactttcggtcagaattatattgttacgtggggacaaagtcatgtttctacactccattctggcgaagaagttgatctttacatggatcaatcttcaggtggtgggttcgaatccaaggacgcctacggatcaggtctctttgaaatgagaatcaaagtgccttcaggaaatactggcggcatcgtcaccgctttttacttgacgtcgaaaggaggtggtcacgacgagattgacttcgagtttctagggaacaacaacggaaaaccggtaacgttacagacaaatctgtttctaaatggagaaggaaacagagaagagaggtttttgctttggttcaatccaaccaaacactaccacacttatgggcttctttggaacccttaccaaattgtgttttacgtggacaacatcccaataagagtatacaaaaacgaaaacggcgtaagttatccatcaaagcctatgcaagtcgaggctagtctctggaacggtgacgattgggcgactgatggtggtcggactaaggttaactggtcatactctcctttcattgcacatttccgagacttcgccttatccggctgcaacatagatggtcggagtaataatgtcggcgcttgtgaatcctccaactactggtggaatgcaggcaactatcaaagattaagcggaaacgaacagaaactttatgaacatgtgaggagcaagtacatgaactatgactattgtactgatcgctctaagtaccaaactcctcctagagaatgttattgaagtaacatatatacgttaattatcatatacgtataggggatttttaaatctactttttctaattaagaaacaaaaaaattactgcttacgagttacaagagaagagagttaagttatagtgaaaatataattgtgtatgctcaaaatgtttttatatgattgcagaagataaataagatatgtttcttaact

SEQ ID NO: 24706 - protein, 297 aa, Arabidopsis thaliana
  peptide (1)..(297): Ceres Seq. ID no. 12377338
TTKIKSKMDYMRIFSVFVVTLWIIRVDARVFGGRGIEKFVTFGQNYIVTWGQSHVSTLHSGEEVDLYMDQSSGGGFESKDAYGSGLFEMRIKVPSGNTGGIVTAFYLTSKGGGHDEIDFEFLGNNNGKPVTLQTNLFLNGEGNREERFLLWFNPTKHYHTYGLLWNPYQIVFYVDNIPIRVYKNENGVSYPSKPMQVEASLWNGDDWATDGGRTKVNWSYSPFIAHFRDFALSGCNIDGRSNNVGACESSNYWWNAGNYQRLSGNEQKLYEHVRSKYMNYDYCTDRSKYQTPPRECY

SEQ ID NO: 24707 - protein, 290 aa, Arabidopsis thaliana
  peptide (1)..(290): Ceres Seq. ID no. 12377339
MDYMRIFSVFVVTLWIIRVDARVFGGRGIEKFVTFGQNYIVTWGQSHVSTLHSGEEVDLYMDQSSGGGFESKDAYGSGLFEMRIKVPSGNTGGIVTAFYLTSKGGGHDEIDFEFLGNNNGKPVTLQTNLFLNGEGNREERFLLWFNPTKHYHTYGLLWNPYQIVFYVDNIPIRVYKNENGVSYPSKPMQVEASLWNGDDWATDGGRTKVNWSYSPFIAHFRDFALSGCNIDGRSNNVGACESSNYWWNAGNYQRLSGNEQKLYEHVRSKYMNYDYCTDRSKYQTPPRECY

SEQ ID NO: 24708 - protein, 287 aa, Arabidopsis thaliana
  peptide (1)..(287): Ceres Seq. ID no. 12377340
MRIFSVFVVTLWIIRVDARVFGGRGIEKFVTFGQNYIVTWGQSHVSTLHSGEEVDLYMDQSSGGGFESKDAYGSGLFEMRIKVPSGNTGGIVTAFYLTSKGGGHDEIDFEFLGNNNGKPVTLQTNLFLNGEGNREERFLLWFNPTKHYHTYGLLWNPYQIVFYVDNIPIRVYKNENGVSYPSKPMQVEASLWNGDDWATDGGRTKVNWSYSPFIAHFRDFALSGCNIDGRSNNVGACESSNYWWNAGNYQRLSGNEQKLYEHVRSKYMNYDYCTDRSKYQTPPRECY

SEQ ID NO: 24709 - DNA, 1320 bp, Arabidopsis thaliana
  misc_feature (1)..(1320): Ceres Seq. ID no. 12370359
  misc_feature (1)..(1320): Ortholog of  Ceres SEQ ID NO 13655812 as cited in SEQ ID NO 64743
aaatgtgcctctttggttccaaagtcgctctgtaacttaagaaagagtgactgttccgttgacagagcaaaatggcccaaacctattgaaaaccccaaaacccttagtttggaatctcatctcattttgcttctgttcttttccatgtaatttcaacaaagtttgaaactttgtttctatagcaactcaattacatggaaattcttaaaagtctactctttaagtcgccctcttggctgaaactcttagcttcttgttataaaacctgaagttcgaaatcattccaataccacaaataactcaactttcttcaagcatggacaatgaagatcaggagtcccttttacttcaaggggttccagataattatggaggtgttaaggtgaacttgacagaaccaatgactattgaggattttgtcccaaagctgagagcttcacttgtgtattggagcaatcaggggacgaaggggatatggttaaagcttgccgatgggcttgacaatcttattgcacctgcaaaagcagaagggtttgtgtgccaccatgccgagagggaatacaccatgcttacatcttggatcgctgatgttcctagtactcttcctgccaatgcgtctcatcgtattggagttggtgcctttgtcctaaacaagaagaccaaagaggtgcttgtggtccaggagattgatggtcatttcaaaggtacaggagtgtggaaactgcctaccggtgttgttaaagagggtgagaatatttgggaaggagcacttagggaagtggaagaagaaactggtattaagacaaaatttgtagaagtcctggctttcagggaaagccaccaagcattcttggaaataaaaacggatatatttttcctctgtgagttagaaccaaccacttttgaaatcaagaaacaagactctgagatcttagctgctaagtggatgccaattgaagaatacgtaaaccaaccctggaaccagaagaaagaactgtttaggttcatggcgaacctctgcttgaagagattgcaggagatggaatacatgggtttctccaaagtccttactacgacttcatctgggaaagagagctatctttactgcaacaccgatcacgccaacctcctcaacgcaacgcggcctagcctccacctctggttgaaaaacccttcttcagaacgtgtttatgtttcgttgtttcatgtccattgttcaataaaagcaccagtctcgtgtgtacaacgattggagacttctttatgtaatttaccatcatttcctcactacaacttcatatataatatatttctttggct

SEQ ID NO: 24710 - protein, 334 aa, Arabidopsis thaliana
  peptide (1)..(334): Ceres Seq. ID no. 12370360
MDNEDQESLLLQGVPDNYGGVKVNLTEPMTIEDFVPKLRASLVYWSNQGTKGIWLKLADGLDNLIAPAKAEGFVCHHAEREYTMLTSWIADVPSTLPANASHRIGVGAFVLNKKTKEVLVVQEIDGHFKGTGVWKLPTGVVKEGENIWEGALREVEEETGIKTKFVEVLAFRESHQAFLEIKTDIFFLCELEPTTFEIKKQDSEILAAKWMPIEEYVNQPWNQKKELFRFMANLCLKRLQEMEYMGFSKVLTTTSSGKESYLYCNTDHANLLNATRPSLHLWLKNPSSERVYVSLFHVHCSIKAPVSCVQRLETSLCNLPSFPHYNFIYNIFLW

SEQ ID NO: 24711 - protein, 306 aa, Arabidopsis thaliana
  peptide (1)..(306): Ceres Seq. ID no. 12370361
MTIEDFVPKLRASLVYWSNQGTKGIWLKLADGLDNLIAPAKAEGFVCHHAEREYTMLTSWIADVPSTLPANASHRIGVGAFVLNKKTKEVLVVQEIDGHFKGTGVWKLPTGVVKEGENIWEGALREVEEETGIKTKFVEVLAFRESHQAFLEIKTDIFFLCELEPTTFEIKKQDSEILAAKWMPIEEYVNQPWNQKKELFRFMANLCLKRLQEMEYMGFSKVLTTTSSGKESYLYCNTDHANLLNATRPSLHLWLKNPSSERVYVSLFHVHCSIKAPVSCVQRLETSLCNLPSFPHYNFIYNIFLW

SEQ ID NO: 24712 - protein, 251 aa, Arabidopsis thaliana
  peptide (1)..(251): Ceres Seq. ID no. 12370362
MLTSWIADVPSTLPANASHRIGVGAFVLNKKTKEVLVVQEIDGHFKGTGVWKLPTGVVKEGENIWEGALREVEEETGIKTKFVEVLAFRESHQAFLEIKTDIFFLCELEPTTFEIKKQDSEILAAKWMPIEEYVNQPWNQKKELFRFMANLCLKRLQEMEYMGFSKVLTTTSSGKESYLYCNTDHANLLNATRPSLHLWLKNPSSERVYVSLFHVHCSIKAPVSCVQRLETSLCNLPSFPHYNFIYNIFLW

SEQ ID NO: 24713 - DNA, 1475 bp, Arabidopsis thaliana
  misc_feature (1)..(1475): Ceres Seq. ID no. 12371859
  misc_feature (1)..(1475): Ortholog of  Ceres SEQ ID NO 15172426 as cited in SEQ ID NO 59156
aaaagcaatttagaacttataaaaaggaaagccatttcttcggcatcctcttcaccaactggcataagcagaagaagaagaagacaacgacgacgactttgaagaagaacaaactcttccttcaatctcaatctctcaatctctctctcagatgggttgtggtggaactttgttctacccacttctcataactctctccgttgctctaatcacttacaacatcatcatctccgctaatgctcctctcaaacaaggcttcccaggccgatcttcttcctccgatatctccattgacccagtcatcgaattgccacgtggcggcggatccagaaacaacgatggtaaaaggataagacttttccacacgtcggtgacggcgtctgattccgtctacaacacttggcaatgtagagttatgtactattggttcaaaaagattcaagcttctgctggacccggttctgaaatgggtgggtttactcggatcttacattccggtaaaccggatcagtatatggatgagattcctacttttgttgctcagcctttaccttctgggatggatcagggttatgttgtgttgaataggccatgggcatttgtacaatggcttcaacaaacagatattaaagaagattatattttgatgtctgagcctgatcatatcattgttaaacctataccaaatttggctaaagatgggcttggagctgcatttcctttcttttacattgaaccgaaaaagtatgagaaggtgttgaggaagtattatcctgaagtgagaggaccggttactaatatcgatccgataggaaactctcctgtcattgttggaaaggatgctttgaagaagattgctccaacttggatgaatgtttctttggctatgaagaaggatcctgaagcagacaaggcttttggatgggttcttgaaatgtatgcttatgctgtctcatctgcattgcatggtgttagcaatattctacacaaagacttcatgattcagcctccatgggatatagaggttggtgacaagtacatcatacactacacttatggatgtgattatgatatgaagggtaaattaacttatgggaaaatcggggaatggagatttgacaaaagatcgtatgatagcaaaccaccaccaaggaaccttacaatgcctccacctggtgtttcacaaagtgtggtaacactagtgaagatgataaatgaagccacggccaacataccaaactggggatcataaagagacagagagagagaaaccgtaatctatatgtacctgtgagttgctcctttcttttcaaaataccttgtcctgctctttagtttctcctttggttgtggctaggtttgtaacatatatagtgattcaaacaaagcctttctttggcatcttacttctctaattcggtctagtctccactagactctgatgtcctctagcatctcaaaggataaattacaat

SEQ ID NO: 24714 - protein, 366 aa, Arabidopsis thaliana
  peptide (1)..(366): Ceres Seq. ID no. 12371860
MGCGGTLFYPLLITLSVALITYNIIISANAPLKQGFPGRSSSSDISIDPVIELPRGGGSRNNDGKRIRLFHTSVTASDSVYNTWQCRVMYYWFKKIQASAGPGSEMGGFTRILHSGKPDQYMDEIPTFVAQPLPSGMDQGYVVLNRPWAFVQWLQQTDIKEDYILMSEPDHIIVKPIPNLAKDGLGAAFPFFYIEPKKYEKVLRKYYPEVRGPVTNIDPIGNSPVIVGKDALKKIAPTWMNVSLAMKKDPEADKAFGWVLEMYAYAVSSALHGVSNILHKDFMIQPPWDIEVGDKYIIHYTYGCDYDMKGKLTYGKIGEWRFDKRSYDSKPPPRNLTMPPPGVSQSVVTLVKMINEATANIPNWGS

SEQ ID NO: 24715 - protein, 278 aa, Arabidopsis thaliana
  peptide (1)..(278): Ceres Seq. ID no. 12371861
MYYWFKKIQASAGPGSEMGGFTRILHSGKPDQYMDEIPTFVAQPLPSGMDQGYVVLNRPWAFVQWLQQTDIKEDYILMSEPDHIIVKPIPNLAKDGLGAAFPFFYIEPKKYEKVLRKYYPEVRGPVTNIDPIGNSPVIVGKDALKKIAPTWMNVSLAMKKDPEADKAFGWVLEMYAYAVSSALHGVSNILHKDFMIQPPWDIEVGDKYIIHYTYGCDYDMKGKLTYGKIGEWRFDKRSYDSKPPPRNLTMPPPGVSQSVVTLVKMINEATANIPNWGS

SEQ ID NO: 24716 - protein, 261 aa, Arabidopsis thaliana
  peptide (1)..(261): Ceres Seq. ID no. 12371862
MGGFTRILHSGKPDQYMDEIPTFVAQPLPSGMDQGYVVLNRPWAFVQWLQQTDIKEDYILMSEPDHIIVKPIPNLAKDGLGAAFPFFYIEPKKYEKVLRKYYPEVRGPVTNIDPIGNSPVIVGKDALKKIAPTWMNVSLAMKKDPEADKAFGWVLEMYAYAVSSALHGVSNILHKDFMIQPPWDIEVGDKYIIHYTYGCDYDMKGKLTYGKIGEWRFDKRSYDSKPPPRNLTMPPPGVSQSVVTLVKMINEATANIPNWGS

SEQ ID NO: 24717 - DNA, 1351 bp, Arabidopsis thaliana
  misc_feature (1)..(1351): Ceres Seq. ID no. 12334222
  misc_feature (1)..(1351): Ortholog of  Ceres SEQ ID NO 13502858 as cited in SEQ ID NO 65109
aagctgaagaaaacccttacttctctttctcttgttccatttcgtcccattttgttctttctactgtcgccgtaaaggatattcaaaagcggtagaggcggcgatggcggatcttttaccacctcttacggcggcacaagtcgatgctaagactaaagtcgatgagaaagtcgattactcgaacctcccttctcctgttccctatgaggaactccaccgtgaagctctcatgtctttaaagtcggacaattttgagggtttacgcttcgactttaccagggcgttgaatcagaagttttctctcagtcatagtgtaatgatggggccaaccgaagttcctgctcagtcacctgaaactactatcaaaattccaacagcccattatgagtttggtgccaattattatgacccaaagttgctgctcatcggaagggtaatgactgatggtagactaaatgcgagactgaaagcagatttaactgataagttagttgtgaaggcgaatgctctgataacaaatgaggaacatatgtcacaagcaatgttcaactttgattacatgggatcagactacagagctcagcttcaacttggacagagtgccctaattggagcaacttatatccagagtgttacaaaccatttatccttgggtggtgaaattttctgggctggtgtgcctcggaagtcgggaataggctatgctgctagatacgagacagataaaatggttgcttctggtcaagttgctagcacgggtgctgttgttatgaactatgttcagaagatttcagataaggtgtcacttgccactgatttcatgtacaactacttttcaagagatgtaacagctagtgtgggttatgactatatgcttagacaggctcgtgtgcggggtaagatcgattcaaacggtgttgcatccgctctccttgaagaaagattgagtatgggactcaattttcttctttctgcagagctggatcataagaagaaggactacaagtttggtttcggattaacagttggttaaaagaccgaataaaaaccggcacacaataagcctggcgcacagagcagattgcagcagtagtggtttcagctgcgaggatttcggttaaaatttattctatttcagtttaggctttttggtgaagttgggaagataaacggtaacgatgttgtgttgttatttgaggtttaggatttgtttccaagaaccattttataaaagaagaagaagcaaatgaggtttttgttttacttccttgctctaagatctcgtgaacttccgagagaggtgtatcatttcatttccttgccataaaaaaaaacgaattctttttttctt

SEQ ID NO: 24718 - protein, 309 aa, Arabidopsis thaliana
  peptide (1)..(309): Ceres Seq. ID no. 12334223
MADLLPPLTAAQVDAKTKVDEKVDYSNLPSPVPYEELHREALMSLKSDNFEGLRFDFTRALNQKFSLSHSVMMGPTEVPAQSPETTIKIPTAHYEFGANYYDPKLLLIGRVMTDGRLNARLKADLTDKLVVKANALITNEEHMSQAMFNFDYMGSDYRAQLQLGQSALIGATYIQSVTNHLSLGGEIFWAGVPRKSGIGYAARYETDKMVASGQVASTGAVVMNYVQKISDKVSLATDFMYNYFSRDVTASVGYDYMLRQARVRGKIDSNGVASALLEERLSMGLNFLLSAELDHKKKDYKFGFGLTVG

SEQ ID NO: 24719 - protein, 267 aa, Arabidopsis thaliana
  peptide (1)..(267): Ceres Seq. ID no. 12334224
MSLKSDNFEGLRFDFTRALNQKFSLSHSVMMGPTEVPAQSPETTIKIPTAHYEFGANYYDPKLLLIGRVMTDGRLNARLKADLTDKLVVKANALITNEEHMSQAMFNFDYMGSDYRAQLQLGQSALIGATYIQSVTNHLSLGGEIFWAGVPRKSGIGYAARYETDKMVASGQVASTGAVVMNYVQKISDKVSLATDFMYNYFSRDVTASVGYDYMLRQARVRGKIDSNGVASALLEERLSMGLNFLLSAELDHKKKDYKFGFGLTVG

SEQ ID NO: 24720 - protein, 238 aa, Arabidopsis thaliana
  peptide (1)..(238): Ceres Seq. ID no. 12334225
MMGPTEVPAQSPETTIKIPTAHYEFGANYYDPKLLLIGRVMTDGRLNARLKADLTDKLVVKANALITNEEHMSQAMFNFDYMGSDYRAQLQLGQSALIGATYIQSVTNHLSLGGEIFWAGVPRKSGIGYAARYETDKMVASGQVASTGAVVMNYVQKISDKVSLATDFMYNYFSRDVTASVGYDYMLRQARVRGKIDSNGVASALLEERLSMGLNFLLSAELDHKKKDYKFGFGLTVG

SEQ ID NO: 24721 - DNA, 1549 bp, Arabidopsis thaliana
  misc_feature (1)..(1549): Ceres Seq. ID no. 13488566
  misc_feature (1)..(1549): Ortholog of  Ceres SEQ ID NO 15177862 as cited in SEQ ID NO 56033
  misc_feature (1)..(1549): Ortholog of  Ceres SEQ ID NO 13661430 as cited in SEQ ID NO 61258
  misc_feature (1)..(1549): Ortholog of  Ceres SEQ ID NO 13590940 as cited in SEQ ID NO 68653
  misc_feature (1)..(1549): Ortholog of  Ceres SEQ ID NO 14301982 as cited in SEQ ID NO 0
cccccccccccccggcagaacccttaaaccttatctcttcaccaccagcttctcaaagctttagcctcgagagcaaaattctctcaagctttagccatgtctgcctctgcttcttccctctctgctttcaatcctaaatcccttcctctctgcgtctccagacccgcttccgtctccgtcttacctccttccctctccttcaaacttcactccgaccacctcgtctctatcttcgcttcctccgccctcaaatgctcatcccccgccgagtacccgtcgcgtttcgttagaaacgttgctgtatcttcggattttgaggtggaggaagatgatatgttcgctgacggtgacgattcagcgcctgtggagcgtaactccttctctcctgaccttaagctctttgttggtaacctttcttttaacgttgatagcgctcagcttgctcagctctttgagagcgctggaaatgttgagatggttgaggttatctatgacaaagtgactggccggagcaggggtttcggatttgtgacaatgtcaaccgcagcggaagttgaagcagcagctcaacagttcaatggctatgaatttgaaggcagacctttgagagtcaatgctggccctcctccacctaaaagagaggaatccttctccagaggaccaagaagtggaggttacggttctgagcgtggtggaggttacggttccgagcgtggtggtggttatggttccgagcgtggtggtggttatggttccgagcgtggtggtggatacggttctcaacgtagtggtggtggttacggagggtctcaacgttccagttatggttcggggtcagggtccggttcgggctcaggttcaggaaaccgtctctacgtgggcaacctttcttggggtgttgatgacatggcacttgagaacttgtttaacgagcaaggaaaggtagttgaagctagggttatctacgacagggacagcggtagatccaagggttttggatttgtgacacttagctcttcccaagaggttcagaaggcgatcaattccttgaatggagcagatttggatggaagacaaataagagtctcagaggctgaggctaggccaccaagaggccaattttgagcggtcacacctctttcatattctcaaaaaatgcaaattctggagggttctttgaagcatatagggttagtggaaaatggcggtttcagacagtaactaaaactcactgctggtgcacgctaggctttatccgcctttgatgcatgaaggtcgttaaggaatggtctttttttgagaaagataacaattagattaaagcagagaacccatgtttcttgtctgttcgaatcctgcgagattggttgtagttgaagttgcattttcttcttgtcttttttgttggtattttgacacaatttggctttttggcatatgagagtgactgtagcagtctgttttatttgatgttcgtgatcttcttatgttctgaaaaccagttttcctaaaacttaacaaatttcgatatggaacaagaaattttttg

SEQ ID NO: 24722 - protein, 342 aa, Arabidopsis thaliana
  peptide (1)..(342): Ceres Seq. ID no. 13488567
MSASASSLSAFNPKSLPLCVSRPASVSVLPPSLSFKLHSDHLVSIFASSALKCSSPAEYPSRFVRNVAVSSDFEVEEDDMFADGDDSAPVERNSFSPDLKLFVGNLSFNVDSAQLAQLFESAGNVEMVEVIYDKVTGRSRGFGFVTMSTAAEVEAAAQQFNGYEFEGRPLRVNAGPPPPKREESFSRGPRSGGYGSERGGGYGSERGGGYGSERGGGYGSERGGGYGSQRSGGGYGGSQRSSYGSGSGSGSGSGSGNRLYVGNLSWGVDDMALENLFNEQGKVVEARVIYDRDSGRSKGFGFVTLSSSQEVQKAINSLNGADLDGRQIRVSEAEARPPRGQF

SEQ ID NO: 24723 - protein, 263 aa, Arabidopsis thaliana
  peptide (1)..(263): Ceres Seq. ID no. 13488568
MFADGDDSAPVERNSFSPDLKLFVGNLSFNVDSAQLAQLFESAGNVEMVEVIYDKVTGRSRGFGFVTMSTAAEVEAAAQQFNGYEFEGRPLRVNAGPPPPKREESFSRGPRSGGYGSERGGGYGSERGGGYGSERGGGYGSERGGGYGSQRSGGGYGGSQRSSYGSGSGSGSGSGSGNRLYVGNLSWGVDDMALENLFNEQGKVVEARVIYDRDSGRSKGFGFVTLSSSQEVQKAINSLNGADLDGRQIRVSEAEARPPRGQF

SEQ ID NO: 24724 - protein, 216 aa, Arabidopsis thaliana
  peptide (1)..(216): Ceres Seq. ID no. 13488569
MVEVIYDKVTGRSRGFGFVTMSTAAEVEAAAQQFNGYEFEGRPLRVNAGPPPPKREESFSRGPRSGGYGSERGGGYGSERGGGYGSERGGGYGSERGGGYGSQRSGGGYGGSQRSSYGSGSGSGSGSGSGNRLYVGNLSWGVDDMALENLFNEQGKVVEARVIYDRDSGRSKGFGFVTLSSSQEVQKAINSLNGADLDGRQIRVSEAEARPPRGQF

SEQ ID NO: 24725 - DNA, 1461 bp, Arabidopsis thaliana
  misc_feature (1)..(1461): Ceres Seq. ID no. 12396151
  misc_feature (1)..(1461): Ortholog of  Ceres SEQ ID NO 13659033 as cited in SEQ ID NO 66372
  misc_feature (1)..(1461): Ortholog of  Ceres SEQ ID NO 13655724 as cited in SEQ ID NO 68973
  misc_feature (1)..(1461): Ortholog of  Ceres SEQ ID NO 12625899 as cited in SEQ ID NO 69079
acgtattagtaagttccatgcaaaggacaaacatataataacaacaacttctcttctttactcgtttctctctcttttcttttcttttcttcaagcgcttctttaatggcggctgttcaatgtctcactttcctcttcttgtttcttctccaaaacgcgacgtcagcttcacctctccctctcttccggcggccgatccaaagcaaccacagcaacttcgtgaagcatcctcgccgaagtcaggtggttttcccggtgaatcatagtagttgtgatctgttcgccggcgagtgggtgcgggatgagacttacccactttaccggtctaaagaatgcggccgaggaatcatagatccgggattcgactgccagacttacggcagacctgactccgactatctcaagttccggtggaaacctttcaactgcaatgtccctagattcaatggagtgaagtttctacaagaaatgagagacaaaaccataatgttcgttggtgattcgttgggtagaaaccaatgggagtcgttgatatgtatgatctcttcatcagcaccgtccattaatactcacatcattcatgaagatcctctctctaccttcaagatccttgactacaacgtgaaggtatcattctatagagctccttatcttgtagacatcgacaaaattaacggaaagacaactcttaaactcgacgaaatctctgtggatgcatcgaatgcttggcgcacagccgacgttctattgttcaacactggtcactggtggagccacacaggttctttacgagggtgggagcagatggagacaggtgggagatattacggcgacatggataggttagtggcgttgagaaaaggactaggaacgtggtctagttgggtccttcgttatatcaattctcctctcactagagttttcttcctctcggtctcacccacacactacaacccaaatgagtggacttcaagatcaaaaacttcaacaataactcaaggaggtaaaagctgctacggacaaacgacaccgtttagtggaacaacgtatccaacaagttcatacgtgaaccagaagaaagtgatagacgacgtggttaaagagatgaagtctcatgtctcattgatggatataactatgctctctgctcttcgtgtcgacggtcatccttcgatatatagtggagatctcaacccttctttgaaaagaaatcctgaccgttcatctgattgtagccattggtgtcttccgggtcttcccgacacttggaaccaattgttttatgctgctttgttgtactgaagatttgattaaccaagatcaaacaaaatgtatctattgaattatatagtttcctaatttttatttgtaagttcactaagttgttacgtttaatcaaacatataattgtgaagttgaggatcttgttacgtttaatcaaacatataagttgttacgttc

SEQ ID NO: 24726 - protein, 398 aa, Arabidopsis thaliana
  peptide (1)..(398): Ceres Seq. ID no. 12396152
MAAVQCLTFLFLFLLQNATSASPLPLFRRPIQSNHSNFVKHPRRSQVVFPVNHSSCDLFAGEWVRDETYPLYRSKECGRGIIDPGFDCQTYGRPDSDYLKFRWKPFNCNVPRFNGVKFLQEMRDKTIMFVGDSLGRNQWESLICMISSSAPSINTHIIHEDPLSTFKILDYNVKVSFYRAPYLVDIDKINGKTTLKLDEISVDASNAWRTADVLLFNTGHWWSHTGSLRGWEQMETGGRYYGDMDRLVALRKGLGTWSSWVLRYINSPLTRVFFLSVSPTHYNPNEWTSRSKTSTITQGGKSCYGQTTPFSGTTYPTSSYVNQKKVIDDVVKEMKSHVSLMDITMLSALRVDGHPSIYSGDLNPSLKRNPDRSSDCSHWCLPGLPDTWNQLFYAALLY

SEQ ID NO: 24727 - protein, 277 aa, Arabidopsis thaliana
  peptide (1)..(277): Ceres Seq. ID no. 12396153
MRDKTIMFVGDSLGRNQWESLICMISSSAPSINTHIIHEDPLSTFKILDYNVKVSFYRAPYLVDIDKINGKTTLKLDEISVDASNAWRTADVLLFNTGHWWSHTGSLRGWEQMETGGRYYGDMDRLVALRKGLGTWSSWVLRYINSPLTRVFFLSVSPTHYNPNEWTSRSKTSTITQGGKSCYGQTTPFSGTTYPTSSYVNQKKVIDDVVKEMKSHVSLMDITMLSALRVDGHPSIYSGDLNPSLKRNPDRSSDCSHWCLPGLPDTWNQLFYAALLY

SEQ ID NO: 24728 - protein, 271 aa, Arabidopsis thaliana
  peptide (1)..(271): Ceres Seq. ID no. 12396154
MFVGDSLGRNQWESLICMISSSAPSINTHIIHEDPLSTFKILDYNVKVSFYRAPYLVDIDKINGKTTLKLDEISVDASNAWRTADVLLFNTGHWWSHTGSLRGWEQMETGGRYYGDMDRLVALRKGLGTWSSWVLRYINSPLTRVFFLSVSPTHYNPNEWTSRSKTSTITQGGKSCYGQTTPFSGTTYPTSSYVNQKKVIDDVVKEMKSHVSLMDITMLSALRVDGHPSIYSGDLNPSLKRNPDRSSDCSHWCLPGLPDTWNQLFYAALLY

SEQ ID NO: 24729 - DNA, 1571 bp, Arabidopsis thaliana
  misc_feature (1)..(1571): Ceres Seq. ID no. 12421870
  misc_feature (1)..(1571): Ortholog of  Ceres SEQ ID NO 14304502 as cited in SEQ ID NO 53212
aagtagatccaacatcattcatatctctctctctatctctgcataagctacggagcgatgtcggcgtgcatcaatggcttatgcagagccgtgactgtctctcttcttcttcttcttctttctttctctttttcctcagcttgctccaatggaaattgccagctgctggattcatgctcctcggctactgattgtgtctctggtttatactgtggagactgtcctgccgttggaagaagtaaacccgtctgcacaagaggccaagccacaagtccaacttccattatcaatggattgccttttaacaagtatacatggttgatgactcataatgcctttagcaatgcaaatgcaccacttttgccaggtgttgagaggattacattttacaatcaagaagatactattactaatcagctacaaaatggagttagagggctaatgctggatatgtatgacttcaacaatgatatctggctttgccattcgcttcgagggcaatgtttcaacttcaccgcttttcaacctgcaattaacatactgagggaagttgaggcatttctgagtcaaaacccaacagagattgttaccatcataatagaggattatgtgcacagacctaaaggcttatcaacactgtttgccaacgctggtttggacaaatactggttccctgtttcgaaaatgcctagaaagggagaagattggcctactgtgactgacatggtgcaagagaatcataggctcctggttttcacttctgttgctgccaaagaagatgaagaaggcgttgcgtatcagtggagatacatggttgaaaatgaatctggggatcccggagtgaagcgaggttcttgtcctaacagaaaagagtctcaacctttaaattcaaaaagttcttcgctattcttgatgaattacttcccgacatatccggttgagaaagacgcttgcaaggagcactcagctccacttgctgagatggttgggacttgtctcaagtcaggagggaatagaatgccaaactttcttgctgttaacttctacatgagaagtgatggaggcggcgttttcgaaattctggatagaatgaatggaccggtactttgcggttgtgaaactctttctgcttgccagccaggagcagcttatggttcatgcaaaaatgttactgtacagacaagaactccaagcatggattcaacggctggaagcaactcaggtggaagctactcaggttcagttcagttctcaagatctttagcttctgtggcccaactaaacaacattgttgtcttctgcttctcattgcttccgttgctgatatttctactatgacacaaccaatcaaaccacgtggagagattcttaggttagagaatcttgatcacttctttagaacgaatgagagagcctaagttgacatgaattgccttagaaagagtttctgatttgattcttgtattgtagactgcagagctataggcagaaatcttgtgtatgtgtgtcttcagcttctgttgattgttatgcaacttatatatatatatatatagacacaattctactcc

SEQ ID NO: 24730 - protein, 426 aa, Arabidopsis thaliana
  peptide (1)..(426): Ceres Seq. ID no. 12421871
MSACINGLCRAVTVSLLLLLLSFSFSSACSNGNCQLLDSCSSATDCVSGLYCGDCPAVGRSKPVCTRGQATSPTSIINGLPFNKYTWLMTHNAFSNANAPLLPGVERITFYNQEDTITNQLQNGVRGLMLDMYDFNNDIWLCHSLRGQCFNFTAFQPAINILREVEAFLSQNPTEIVTIIIEDYVHRPKGLSTLFANAGLDKYWFPVSKMPRKGEDWPTVTDMVQENHRLLVFTSVAAKEDEEGVAYQWRYMVENESGDPGVKRGSCPNRKESQPLNSKSSSLFLMNYFPTYPVEKDACKEHSAPLAEMVGTCLKSGGNRMPNFLAVNFYMRSDGGGVFEILDRMNGPVLCGCETLSACQPGAAYGSCKNVTVQTRTPSMDSTAGSNSGGSYSGSVQFSRSLASVAQLNNIVVFCFSLLPLLIFLL

SEQ ID NO: 24731 - protein, 338 aa, Arabidopsis thaliana
  peptide (1)..(338): Ceres Seq. ID no. 12421872
MTHNAFSNANAPLLPGVERITFYNQEDTITNQLQNGVRGLMLDMYDFNNDIWLCHSLRGQCFNFTAFQPAINILREVEAFLSQNPTEIVTIIIEDYVHRPKGLSTLFANAGLDKYWFPVSKMPRKGEDWPTVTDMVQENHRLLVFTSVAAKEDEEGVAYQWRYMVENESGDPGVKRGSCPNRKESQPLNSKSSSLFLMNYFPTYPVEKDACKEHSAPLAEMVGTCLKSGGNRMPNFLAVNFYMRSDGGGVFEILDRMNGPVLCGCETLSACQPGAAYGSCKNVTVQTRTPSMDSTAGSNSGGSYSGSVQFSRSLASVAQLNNIVVFCFSLLPLLIFLL

SEQ ID NO: 24732 - protein, 298 aa, Arabidopsis thaliana
  peptide (1)..(298): Ceres Seq. ID no. 12421873
MLDMYDFNNDIWLCHSLRGQCFNFTAFQPAINILREVEAFLSQNPTEIVTIIIEDYVHRPKGLSTLFANAGLDKYWFPVSKMPRKGEDWPTVTDMVQENHRLLVFTSVAAKEDEEGVAYQWRYMVENESGDPGVKRGSCPNRKESQPLNSKSSSLFLMNYFPTYPVEKDACKEHSAPLAEMVGTCLKSGGNRMPNFLAVNFYMRSDGGGVFEILDRMNGPVLCGCETLSACQPGAAYGSCKNVTVQTRTPSMDSTAGSNSGGSYSGSVQFSRSLASVAQLNNIVVFCFSLLPLLIFLL

SEQ ID NO: 24733 - DNA, 1512 bp, Arabidopsis thaliana
  misc_feature (1)..(1512): Ceres Seq. ID no. 12335241
  misc_feature (1)..(1512): Ortholog of  Ceres SEQ ID NO 15179926 as cited in SEQ ID NO 57010
  misc_feature (1)..(1512): Ortholog of  Ceres SEQ ID NO 14316075 as cited in SEQ ID NO 60059
ttcgctttcaacttcaccttcccttctccgccattgttactttctcagaagcttccaagtcaaccaatagagacttacttgtttgacttcttcctcacttacctcataatcctccttttggacttttcaataaaaccgcctacttgaatctgtacgacttcttctcatttttccattctttaagtcttcccgttgattcattccgatctgaaatctctctctagatttctctatttttcgaattttaaatgaacgatttgttttccagctcattctctcgcttccgcagcggagaaccatcccctcgccgagacgttgccggcggtggcgacggagttcagatggcgaatcccgcgggatcaaccggtggtgtgaacctcgacaagttcttcgaagatgttgaatctgtgaaagaagagctaaaggagctagatcggctcaacgaaacactctcttcatgtcacgagcagagcaagacgcttcacaatgctaaagccgttaaagatctccggtctaaaatggacggtgacgttggagtcgcgttgaagaaggcgaagatgattaaagttaaactcgaggcgctagatcgtgccaatgctgctaatcggagtctccctggctgtggacctggttcttcctccgatcgaaccaggacctctgtcctcaatggtctcaggaagaaattgatggactctatggatagtttcaaccgattgagggagcttatctcgtccgagtatagagaaactgtacagaggaggtacttcaccgtcaccggcgagaatccggatgaacgaaccctagatcgactgatttccactggagagagtgagagattcttgcagaaagcaatacaagaacaaggaagaggaagggtgttagacaccattaacgagattcaagaaaggcatgatgcggttaaagacattgagaagaatctcagggagcttcaccaggtgtttctagacatggccgtgctggtagagcaccagggagctcagcttgatgacatcgagagtcatgtgggtcgagctagctcctttatcagaggcggaactgaccagctacaaaccgctcgggtttaccagaagaacacgcgaaaatggacatgtattgccattattattctcatcatcatcataactgttgtggttcttgctgttttaaaaccgtggaacaacagcagtggcggcggcggcggtggtggtggtgggggtaccactggaggaagtcaaccaaattcagggacaccaccaaatcctcctcaggcaaggcgtctattgcgttgaagttgaagttgaagttgagtttcgttatttgcatatatattctttctttgaaaaaccttattatcaaaccagctttgtgttactactttctactgctggtttgttgttaatctcccgtttatttggtttttgtgaaagaatttaaaatgtgggttagatgagaaaattagtacaacattctcttgtatctatgtttgctatatgggttatatttacttgatgt

SEQ ID NO: 24734 - protein, 346 aa, Arabidopsis thaliana
  peptide (1)..(346): Ceres Seq. ID no. 12335242
MNDLFSSSFSRFRSGEPSPRRDVAGGGDGVQMANPAGSTGGVNLDKFFEDVESVKEELKELDRLNETLSSCHEQSKTLHNAKAVKDLRSKMDGDVGVALKKAKMIKVKLEALDRANAANRSLPGCGPGSSSDRTRTSVLNGLRKKLMDSMDSFNRLRELISSEYRETVQRRYFTVTGENPDERTLDRLISTGESERFLQKAIQEQGRGRVLDTINEIQERHDAVKDIEKNLRELHQVFLDMAVLVEHQGAQLDDIESHVGRASSFIRGGTDQLQTARVYQKNTRKWTCIAIIILIIIITVVVLAVLKPWNNSSGGGGGGGGGGTTGGSQPNSGTPPNPPQARRLLR

SEQ ID NO: 24735 - protein, 315 aa, Arabidopsis thaliana
  peptide (1)..(315): Ceres Seq. ID no. 12335243
MANPAGSTGGVNLDKFFEDVESVKEELKELDRLNETLSSCHEQSKTLHNAKAVKDLRSKMDGDVGVALKKAKMIKVKLEALDRANAANRSLPGCGPGSSSDRTRTSVLNGLRKKLMDSMDSFNRLRELISSEYRETVQRRYFTVTGENPDERTLDRLISTGESERFLQKAIQEQGRGRVLDTINEIQERHDAVKDIEKNLRELHQVFLDMAVLVEHQGAQLDDIESHVGRASSFIRGGTDQLQTARVYQKNTRKWTCIAIIILIIIITVVVLAVLKPWNNSSGGGGGGGGGGTTGGSQPNSGTPPNPPQARRLLR

SEQ ID NO: 24736 - protein, 256 aa, Arabidopsis thaliana
  peptide (1)..(256): Ceres Seq. ID no. 12335244
MDGDVGVALKKAKMIKVKLEALDRANAANRSLPGCGPGSSSDRTRTSVLNGLRKKLMDSMDSFNRLRELISSEYRETVQRRYFTVTGENPDERTLDRLISTGESERFLQKAIQEQGRGRVLDTINEIQERHDAVKDIEKNLRELHQVFLDMAVLVEHQGAQLDDIESHVGRASSFIRGGTDQLQTARVYQKNTRKWTCIAIIILIIIITVVVLAVLKPWNNSSGGGGGGGGGGTTGGSQPNSGTPPNPPQARRLLR

SEQ ID NO: 24737 - DNA, 1403 bp, Arabidopsis thaliana
  misc_feature (1)..(1403): Ceres Seq. ID no. 12337010
  misc_feature (1)..(1403): Ortholog of  Ceres SEQ ID NO 13582332 as cited in SEQ ID NO 59890
aaattaaatcaaaaataggttctgttttttgtgggaagatatgagattttcttcaagcaaaaagggagttatgagatgattggtcgtcctcgccggagaaaagatacgagacttgtctctcaatcctgaagcagactcgattcatccatcagtcaacaaatcttccttcacaatggatgaagaagaagcaatgttactgctaaaggaagaagatgaaggaacaagaagaactagtgttcctacacaactcatgaaactaaaacgaacccattggtggattcttgtctttataagtatcttcttcctcatctctgcacaagccattgctgttcttcttggtcggttttattacaacgaaggtggaaacagtaaatggatctctactcttgtccaaacttgtggttttccgattctctatctccctctttgtttccttcctgcttcacactcttcttcatcttcttgttctttcaagactctggtttggatttatctttctcttggttttgctattggtttagacaatcttttatactcttttggtcttttgtatctctctgcttcaacttattcgattctttgttcttcacagttagctttcaatggtgtcttctcttattacatcaattctcagaaaatcacttgtttgattctcttctctgtgttgtttctctctgtctctgctgtgttggtttctcttgacgatgattccaatagcccatcaggagattctaagtggagttacttgattggttgtttatgtactgtttttgcttctcttatctattctcttcagctctctcttatgcagttttctttcgagaatgttctcaagagtgagacgttctctatggttctcgagatgcaaatctatacgtcgcttgtggcttcttgtgttgcggttatcgggttgtttgcgagcggggaatggatgttgttgagtgtggagatggaagagtttcacgagggtcaagtcatttatgttttgactttggttgggaccgcggtttcgtggcaattgggttctgtaggagccgtggcgcttatatttctggtttcttcgctgttttcgaaccttattggtacactctcactcattgttacgcctcttgcagccattgcggtgttccacgacaagctgactgaggttaagatggtcgcgatgctcattgccttcatggggttcgggttttatatctaccagaattatcttgatgacctgaaagtacaaagagcacgagaagctcaggctgaatagttctgctgtgttttattagttaattttgttagtaacctttcttagaacaagctagctacaagtgttgtattgtatatagtagagttcataatccggtgataatatacataatactaattgcatatggagcttgtttttacgggtc

SEQ ID NO: 24738 - protein, 361 aa, Arabidopsis thaliana
  peptide (1)..(361): Ceres Seq. ID no. 12337011
MDEEEAMLLLKEEDEGTRRTSVPTQLMKLKRTHWWILVFISIFFLISAQAIAVLLGRFYYNEGGNSKWISTLVQTCGFPILYLPLCFLPASHSSSSSCSFKTLVWIYLSLGFAIGLDNLLYSFGLLYLSASTYSILCSSQLAFNGVFSYYINSQKITCLILFSVLFLSVSAVLVSLDDDSNSPSGDSKWSYLIGCLCTVFASLIYSLQLSLMQFSFENVLKSETFSMVLEMQIYTSLVASCVAVIGLFASGEWMLLSVEMEEFHEGQVIYVLTLVGTAVSWQLGSVGAVALIFLVSSLFSNLIGTLSLIVTPLAAIAVFHDKLTEVKMVAMLIAFMGFGFYIYQNYLDDLKVQRAREAQAE

SEQ ID NO: 24739 - protein, 355 aa, Arabidopsis thaliana
  peptide (1)..(355): Ceres Seq. ID no. 12337012
MLLLKEEDEGTRRTSVPTQLMKLKRTHWWILVFISIFFLISAQAIAVLLGRFYYNEGGNSKWISTLVQTCGFPILYLPLCFLPASHSSSSSCSFKTLVWIYLSLGFAIGLDNLLYSFGLLYLSASTYSILCSSQLAFNGVFSYYINSQKITCLILFSVLFLSVSAVLVSLDDDSNSPSGDSKWSYLIGCLCTVFASLIYSLQLSLMQFSFENVLKSETFSMVLEMQIYTSLVASCVAVIGLFASGEWMLLSVEMEEFHEGQVIYVLTLVGTAVSWQLGSVGAVALIFLVSSLFSNLIGTLSLIVTPLAAIAVFHDKLTEVKMVAMLIAFMGFGFYIYQNYLDDLKVQRAREAQAE

SEQ ID NO: 24740 - protein, 335 aa, Arabidopsis thaliana
  peptide (1)..(335): Ceres Seq. ID no. 12337013
MKLKRTHWWILVFISIFFLISAQAIAVLLGRFYYNEGGNSKWISTLVQTCGFPILYLPLCFLPASHSSSSSCSFKTLVWIYLSLGFAIGLDNLLYSFGLLYLSASTYSILCSSQLAFNGVFSYYINSQKITCLILFSVLFLSVSAVLVSLDDDSNSPSGDSKWSYLIGCLCTVFASLIYSLQLSLMQFSFENVLKSETFSMVLEMQIYTSLVASCVAVIGLFASGEWMLLSVEMEEFHEGQVIYVLTLVGTAVSWQLGSVGAVALIFLVSSLFSNLIGTLSLIVTPLAAIAVFHDKLTEVKMVAMLIAFMGFGFYIYQNYLDDLKVQRAREAQAE

SEQ ID NO: 24741 - DNA, 815 bp, Arabidopsis thaliana
  misc_feature (1)..(815): Ceres Seq. ID no. 13492861
  misc_feature (1)..(815): Ortholog of  Ceres SEQ ID NO 14315388 as cited in SEQ ID NO 54357
  misc_feature (1)..(815): Ortholog of  Ceres SEQ ID NO 14312886 as cited in SEQ ID NO 57142
gtacatttgtttttaaccagttagcaacttcttcttccggaatctttaaaccaacaaaaaaaagttatcattcgggttaagatggagaaaccgggtcatgaaacggatattgcgggttcaagacgaacccatctgaagaaatcattcaaatccactcttcgacatcttctcactgcttgctccaaacaggattttgttgatattttctcgaaattcagtggggctgagcaagaactgctttttcagttgtatactcgggttgttgtgaatttgcatcagacaatagaggaagagtttgatgaacaatgtcacgaaactcaggtcggaccaattcttgatacagtcgaggagctggtcgaagaacagagtttggatcccttgttttctgataagactgatgtaatggcaatagcatatgatcttacaacatctaagaagaacgagatacaaaagttaacagttttgctccaaagggctgaagaacagaatcgccagaaggaagcccggatcagcatgctcaaaaaacaaacacaagatctctcaggcacagcggacagaatcgaaaagctgaatgccggggtctccggctactttgaaggaaaagacaagctacctccaatatagtttcgagaaaattgcaatgaagaagcgtgtcatttccattccctgcatttgtatatactttattatagagtcttaacaatctagtcagtagtcacaataacttgcttcatgtgtaaaccactgagaatctgaatgagtttgtactttggtattggtttgacgacaattcatgcaaaatattttccaaggtt

SEQ ID NO: 24742 - protein, 180 aa, Arabidopsis thaliana
  peptide (1)..(180): Ceres Seq. ID no. 13492862
MEKPGHETDIAGSRRTHLKKSFKSTLRHLLTACSKQDFVDIFSKFSGAEQELLFQLYTRVVVNLHQTIEEEFDEQCHETQVGPILDTVEELVEEQSLDPLFSDKTDVMAIAYDLTTSKKNEIQKLTVLLQRAEEQNRQKEARISMLKKQTQDLSGTADRIEKLNAGVSGYFEGKDKLPPI

SEQ ID NO: 24743 - DNA, 1059 bp, Arabidopsis thaliana
  misc_feature (1)..(1059): Ceres Seq. ID no. 12421562
  misc_feature (1)..(1059): Ortholog of  Ceres SEQ ID NO 15226238 as cited in SEQ ID NO 68840
  misc_feature (1)..(1059): Ortholog of  Ceres SEQ ID NO 12635175 as cited in SEQ ID NO 0
  misc_feature (1)..(1059): Ortholog of  Ceres SEQ ID NO 14306100 as cited in SEQ ID NO 0
attcatcgcatcccccacacacctcattaacattataattgtttttttagttattcttcaatttcaagaaaatgctgcaaggctttctcttcctcctctcagtcgtactcctcttctcctcatctgcagccgcctgcgaccgatgtcttcacagttctaaggcagcttatttctcctctgcatctgctctctcctctggagcttgtgcatatggctctatggctaccggtttcttcgccggacacattgctgcggctctgccttccatctacaaagacggctccggctgcggagcttgcttccaggtcagatgcaagaacccgacgctttgcagcagcaaaggaaccacggtgattgtcacagacttgaacaagaccaaccaaaccgatcttgtccttagcagcagagcctttagggccatggctaagcctgttgttggcgccgacagagatcttctcaaacaaggcattgtcgatattgaatacaggagagttccttgcgattacggtaacaagaagatgaacgtgagagttgaagaatcaagcaaaaatccaaactacttggcgataaagctcttgtaccaaggaggccaaactgaagtggtagccatttacattgctcaggttggttcgtcacattggagttacatgaccagaagccacggagccgtgtgggttactgacaaagtacccaacggagctctgcagttcaggttcgtggtgaccgcaggctacgacggcaaaatggtctggtcgcagagggtccttccagctaactgggaagctggaaagtcctatgacgccggcgttcagatcacagacattgctcaggaaggttgtgatccatgcgacgatcacatctggaactgagtctctctgctttccttctaatgtgtaagtaacagacttgtttattagatgagaggaagaatcaacgggaatgcataatctgacgatttcataagaatgaatgaaacaaaacaagagagagctaagaagaagaaaaaggattgtatatgtatgtacaaaaggtctatatatgtacaccattattcttttc

SEQ ID NO: 24744 - protein, 265 aa, Arabidopsis thaliana
  peptide (1)..(265): Ceres Seq. ID no. 12421563
MLQGFLFLLSVVLLFSSSAAACDRCLHSSKAAYFSSASALSSGACAYGSMATGFFAGHIAAALPSIYKDGSGCGACFQVRCKNPTLCSSKGTTVIVTDLNKTNQTDLVLSSRAFRAMAKPVVGADRDLLKQGIVDIEYRRVPCDYGNKKMNVRVEESSKNPNYLAIKLLYQGGQTEVVAIYIAQVGSSHWSYMTRSHGAVWVTDKVPNGALQFRFVVTAGYDGKMVWSQRVLPANWEAGKSYDAGVQITDIAQEGCDPCDDHIWN

SEQ ID NO: 24745 - protein, 216 aa, Arabidopsis thaliana
  peptide (1)..(216): Ceres Seq. ID no. 12421564
MATGFFAGHIAAALPSIYKDGSGCGACFQVRCKNPTLCSSKGTTVIVTDLNKTNQTDLVLSSRAFRAMAKPVVGADRDLLKQGIVDIEYRRVPCDYGNKKMNVRVEESSKNPNYLAIKLLYQGGQTEVVAIYIAQVGSSHWSYMTRSHGAVWVTDKVPNGALQFRFVVTAGYDGKMVWSQRVLPANWEAGKSYDAGVQITDIAQEGCDPCDDHIWN

SEQ ID NO: 24746 - protein, 149 aa, Arabidopsis thaliana
  peptide (1)..(149): Ceres Seq. ID no. 12421565
MAKPVVGADRDLLKQGIVDIEYRRVPCDYGNKKMNVRVEESSKNPNYLAIKLLYQGGQTEVVAIYIAQVGSSHWSYMTRSHGAVWVTDKVPNGALQFRFVVTAGYDGKMVWSQRVLPANWEAGKSYDAGVQITDIAQEGCDPCDDHIWN

SEQ ID NO: 24747 - DNA, 1149 bp, Arabidopsis thaliana
  misc_feature (1)..(1149): Ceres Seq. ID no. 12324726
  misc_feature (1)..(1149): Ortholog of  Ceres SEQ ID NO 15180047 as cited in SEQ ID NO 0
actactaacagatccacaaatttcataaggttcagagcaaatcggagagagagagatggtgacgaaaacggaggagatacagttaaaccaactcgagaatcaagttgagaatggaggaggaggtgtttgggagtatctgtgcctcgttcgtaagctcaaggttcgccgatcagagattgtgctcaagcatggtctctcgatcttgaacgattcgggaaagcgatccgctcttggtccagatgaatggaccctgtatgagcaggtagcaattgcagctatggactgtcaatctctcggtgttgcacagaattgcatcaaggttctaaagaagaaatttccggagagcaaacgtgttggcaagctggaggctctgctgctagaagcaaagggaatgtgggaagaggctgaaaaagcatatacaagccttttggaggataatccacttgatcaagtaattcacaaaagaaaggtggctatggccaaggcacaaggcaaatcttccttagccattgaacatctgaacaagtatcttgaagtattcatggctgatcatgatgcctggagagaacttgcagaaatttatgtttccttgcaaatgtacaagcaagcagctttctgctacgaggagctcatactaactcagcctactcttccattgtaccacttagcatatgccgatgttctctacacaataggtggactagaaaacctcatcgcagcaagaaagtactatgcagcaactatagacttgacaggtggtaaaagcacaagagcacttctcggaatatgcttgtgtggatcagcaatcgcacagatctcaaaaggcaggaacaaagaggacaaggacatggctgcaccagagcttcagtctttggctgcaactgcattggagcgagagtacaagcaaaaagctcccgctaagctcaacctcctcacttctgccttgagaaacttgaaaatcgcttagttcaaagcactagagcccaaacaattttttggtattttggtattgtttaaacttttttacagtcagacttttgttcattccttttcttttacccttataatttttttcttattcacttggctatattgttgaatcactgatacggtttactaaggtgtgtttaatcaaataataaattaaac

SEQ ID NO: 24748 - protein, 303 aa, Arabidopsis thaliana
  peptide (1)..(303): Ceres Seq. ID no. 12324727
MVTKTEEIQLNQLENQVENGGGGVWEYLCLVRKLKVRRSEIVLKHGLSILNDSGKRSALGPDEWTLYEQVAIAAMDCQSLGVAQNCIKVLKKKFPESKRVGKLEALLLEAKGMWEEAEKAYTSLLEDNPLDQVIHKRKVAMAKAQGKSSLAIEHLNKYLEVFMADHDAWRELAEIYVSLQMYKQAAFCYEELILTQPTLPLYHLAYADVLYTIGGLENLIAARKYYAATIDLTGGKSTRALLGICLCGSAIAQISKGRNKEDKDMAAPELQSLAATALEREYKQKAPAKLNLLTSALRNLKIA

SEQ ID NO: 24749 - protein, 229 aa, Arabidopsis thaliana
  peptide (1)..(229): Ceres Seq. ID no. 12324728
MDCQSLGVAQNCIKVLKKKFPESKRVGKLEALLLEAKGMWEEAEKAYTSLLEDNPLDQVIHKRKVAMAKAQGKSSLAIEHLNKYLEVFMADHDAWRELAEIYVSLQMYKQAAFCYEELILTQPTLPLYHLAYADVLYTIGGLENLIAARKYYAATIDLTGGKSTRALLGICLCGSAIAQISKGRNKEDKDMAAPELQSLAATALEREYKQKAPAKLNLLTSALRNLKIA

SEQ ID NO: 24750 - protein, 191 aa, Arabidopsis thaliana
  peptide (1)..(191): Ceres Seq. ID no. 12324729
MWEEAEKAYTSLLEDNPLDQVIHKRKVAMAKAQGKSSLAIEHLNKYLEVFMADHDAWRELAEIYVSLQMYKQAAFCYEELILTQPTLPLYHLAYADVLYTIGGLENLIAARKYYAATIDLTGGKSTRALLGICLCGSAIAQISKGRNKEDKDMAAPELQSLAATALEREYKQKAPAKLNLLTSALRNLKIA

SEQ ID NO: 24751 - DNA, 1172 bp, Arabidopsis thaliana
  misc_feature (1)..(1172): Ceres Seq. ID no. 12717216
  misc_feature (1)..(1172): Ortholog of  Ceres SEQ ID NO 13594482 as cited in SEQ ID NO 51285
  misc_feature (1)..(1172): Ortholog of  Ceres SEQ ID NO 13655381 as cited in SEQ ID NO 63359
  misc_feature (1)..(1172): Ortholog of  Ceres SEQ ID NO 12617583 as cited in SEQ ID NO 64897
aaacaatgccacttctcctccgtcgatttccctctccctccgtcgtctcctccttcttcctccgtcgctcaatggcttcctcaacaatctcctcggatataatcactccatcaaacaccaaaatcggatggatcggaaccggagtcatgggccgatcaatgtgtggacacttaatcaaagccggttacacagtcaccgtcttcaatcgaaccatctccaaagctcaaactctcatcgacatgggtgctaacgtcgccgactcaccaaactcagtcgctgaacaatccgacgtcgttttcaccatcgttggttatccttccgatgtccgtcacgtccttctcgatccaaagtccggagctttatctggtctccgtcaaggaggtgttctcgttgatatgactacttctgagccttctttagcagaggagatagctaaagctgcttcctttaagaattgtttctcaatagacgctcctgtctcaggtggagatttaggagctaagaatgggaagctatctatattcgccggaggtgatgaaaccaccgtgaaacgtttagatccgttgttttcgttaatgggtaaagtcaacttcatgggaacaagtgggaaaggtcaatttgcgaaattggctaatcagataactattgcttcgactatgttaggacttgtggaaggtttgatttatgctcataaagctggacttgatgttaagaagtttcttgaagcgatttctactggtgctgctggttctaagtctatagatttgtatggagataggattctgaagagggattttgatcctggtttttatgtgaatcattttgtgaaagatttagggatttgtttgaatgaatgtcagaggatgggtttggctttgcctggtttagctcttgctcaacagctttacttgtctcttaaggctcatggtgaaggtgatcttggtactcaagctcttctcttggctcttgaacgtctcaacaatgtctctgttcaatcatctgactcttgatttaggttctgttccactttctgataatgcatctgttggagattttatgttgttatgaagtaaagatttgatcttttgtgtacccatttgttggtaaaacatgatttgaagtaaacttttgtgtacgcatatgagattcatacacagtagttttatgtgtac

SEQ ID NO: 24752 - protein, 335 aa, Arabidopsis thaliana; identical to SEQ ID NO: 24401
  peptide (1)..(335): Ceres Seq. ID no. 12717217

SEQ ID NO: 24753 - protein, 334 aa, Arabidopsis thaliana; identical to SEQ ID NO: 24402
  peptide (1)..(334): Ceres Seq. ID no. 12717218

SEQ ID NO: 24754 - protein, 312 aa, Arabidopsis thaliana; identical to SEQ ID NO: 24403
  peptide (1)..(312): Ceres Seq. ID no. 12717219

SEQ ID NO: 24755 - DNA, 1595 bp, Arabidopsis thaliana
  misc_feature (1)..(1595): Ceres Seq. ID no. 12678189
  misc_feature (1)..(1595): Ortholog of  Ceres SEQ ID NO 15169358 as cited in SEQ ID NO 53739
  misc_feature (1)..(1595): Ortholog of  Ceres SEQ ID NO 14313591 as cited in SEQ ID NO 60400
acacaaaaaaaaaaaaccatcggacctgaaatctttgtaagctcttcctccttgctcaagcaaacctctttttatatatttgctctctctctctcagatccgattcaagctttccgatttgcgatggacggtggagcggaaggatctcagcagcctcaccttattctagccaacaagctcttcctcctcactcatccagatgttccagacatcgagaaagtccagctcaagtctgaggttttggatttcatcagatcccatggtatggctcctttgtacgaaaccctaattgcctcttcggtgctggatttggatcaaagcttgttagagtctatgcgggccgctaatgaagaggagcttaagaagctcgacgagaagattgcagatgcagaagaaaatttgggtgaaagtgaagttcgtgaagctcatcttgctaaggctctgtatttcatcaggattagtgataaggagaaagctttggagcagctaaaactcactgaagggaaaactgttgctgttggacaaaaaatggacgtggtgttttatacgttacaacttgcttttttctatatggactttgatctggtatcaaagagcattgacaaagcaaaaaaattgtttgaagagggtggtgactgggagaggaagaaccggctaaaggtctatgaaggtttgtactgcatgtccaccagaaattttaagaaggctgccagcttattcctggattctatatcaaccttcacaacatatgaaatttttccatatgagaccttcatattctacaccgtcctgacaagcatcataactttggacagagtttcccttaagcaaaaggtcgttgatgcacctgagatcttaaccgtgcttgggaagattccattcctttctgagtttctgaactccttgtatgagtgccagtacaaggcgtttttctcagcatttgctggaatggcggtgcagataaagtatgaccgttacttgtacccgcatttccggttctacatgagggaagtcagaacagtggtgtactctcagtttttggaatcttacaaaagtgtgacagttgaagcaatggcaaaggcctttggcgtttctgtcgatttcatagaccaggagttgtcgcgcttcattgctgctgggaagcttcactgtaagatagacaaggttgcaggtgttttggagacaaaccgtcctgatgcaaagaatgcactttaccaggcaacaatcaagcaaggggatttcttgctaaaccgaatccagaagctgtctcgtgtgatcgatctgtgagcatgctacatgtttctgtttcactctttcgtcaagctttgcaacttggaaactccgaacggtagaatcttaaggtctgagaaacgatatgaactttggattttgagatgaatggctgtagtttctttcatcaactctagttggtttgtcagtggtgaatttcccaagaacaaagagcaagtttaatctccaatgttcattttattcttcctcgcatatggcttttgaatctgttgttttcatcgcatctatctagtatctaagagaaaacgaccaccatacctcttacaaaataaagcttttgtttc

SEQ ID NO: 24756 - protein, 428 aa, Arabidopsis thaliana
  peptide (1)..(428): Ceres Seq. ID no. 12678190
TQKKKTIGPEIFVSSSSLLKQTSFYIFALSLSDPIQAFRFAMDGGAEGSQQPHLILANKLFLLTHPDVPDIEKVQLKSEVLDFIRSHGMAPLYETLIASSVLDLDQSLLESMRAANEEELKKLDEKIADAEENLGESEVREAHLAKALYFIRISDKEKALEQLKLTEGKTVAVGQKMDVVFYTLQLAFFYMDFDLVSKSIDKAKKLFEEGGDWERKNRLKVYEGLYCMSTRNFKKAASLFLDSISTFTTYEIFPYETFIFYTVLTSIITLDRVSLKQKVVDAPEILTVLGKIPFLSEFLNSLYECQYKAFFSAFAGMAVQIKYDRYLYPHFRFYMREVRTVVYSQFLESYKSVTVEAMAKAFGVSVDFIDQELSRFIAAGKLHCKIDKVAGVLETNRPDAKNALYQATIKQGDFLLNRIQKLSRVIDL

SEQ ID NO: 24757 - protein, 387 aa, Arabidopsis thaliana
  peptide (1)..(387): Ceres Seq. ID no. 12678191
MDGGAEGSQQPHLILANKLFLLTHPDVPDIEKVQLKSEVLDFIRSHGMAPLYETLIASSVLDLDQSLLESMRAANEEELKKLDEKIADAEENLGESEVREAHLAKALYFIRISDKEKALEQLKLTEGKTVAVGQKMDVVFYTLQLAFFYMDFDLVSKSIDKAKKLFEEGGDWERKNRLKVYEGLYCMSTRNFKKAASLFLDSISTFTTYEIFPYETFIFYTVLTSIITLDRVSLKQKVVDAPEILTVLGKIPFLSEFLNSLYECQYKAFFSAFAGMAVQIKYDRYLYPHFRFYMREVRTVVYSQFLESYKSVTVEAMAKAFGVSVDFIDQELSRFIAAGKLHCKIDKVAGVLETNRPDAKNALYQATIKQGDFLLNRIQKLSRVIDL

SEQ ID NO: 24758 - protein, 340 aa, Arabidopsis thaliana
  peptide (1)..(340): Ceres Seq. ID no. 12678192
MAPLYETLIASSVLDLDQSLLESMRAANEEELKKLDEKIADAEENLGESEVREAHLAKALYFIRISDKEKALEQLKLTEGKTVAVGQKMDVVFYTLQLAFFYMDFDLVSKSIDKAKKLFEEGGDWERKNRLKVYEGLYCMSTRNFKKAASLFLDSISTFTTYEIFPYETFIFYTVLTSIITLDRVSLKQKVVDAPEILTVLGKIPFLSEFLNSLYECQYKAFFSAFAGMAVQIKYDRYLYPHFRFYMREVRTVVYSQFLESYKSVTVEAMAKAFGVSVDFIDQELSRFIAAGKLHCKIDKVAGVLETNRPDAKNALYQATIKQGDFLLNRIQKLSRVIDL

SEQ ID NO: 24759 - DNA, 1109 bp, Arabidopsis thaliana
  misc_feature (1)..(1109): Ceres Seq. ID no. 12650562
  misc_feature (1)..(1109): Ortholog of  Ceres SEQ ID NO 13595414 as cited in SEQ ID NO 56539
  misc_feature (1)..(1109): Ortholog of  Ceres SEQ ID NO 14314396 as cited in SEQ ID NO 60048
gcattaactgatttcacattcttcgataaggattttactctccagagaaagaaaaaaaaaacctcctctgcttttgtgatcctttaaggaaaaagacgaaatggcaacggaatcgtacgaagccgccattaaaggactcaatgatcttctcagtacgaaagcggatctcggaaacgtcgccgccgcgaagatcaaagcgttgacggcggagctaaaggagcttgactcaagcaattcagacgcaattgaacgaatcaagaccggttttactcaattcaaaaccgagaaatatttgaagaatagtactttgttcaatcatcttgccaagactcagaccccaaagtttctggtgtttgcttgctctgattctcgagtttgtccatctcacatcttgaatttccaacctggtgaggcttttgttgtcagaaacatagccaatatggttccaccttttgaccagaagagacactctggagttggcgccgccgttgaatacgcagttgtacatctcaaggtggagaacattttggtgataggccatagctgctgtggtggtattaagggactcatgtccattgaagatgatgctgccccaactcaaagtgacttcattgaaaattgggtgaagataggcgcatcagcgaggaacaagatcaaggaggaacataaagacttgagctacgatgatcaatgcaacaagtgtgagaaggaagctgtgaacgtatcgcttggaaacttgctttcgtacccattcgtgagagctgaggtggtgaagaacacacttgcaataagaggaggtcactacaatttcgtcaaaggaacgtttgatctctgggagctcgatttcaagaccactcctgcttttgccttctcttaagaaagaaagctaccggaacatataaaactcttttgagataaaaaaagacactttgactcatctttcttcattctctcatgttgatgattcctctccaacttctttgatttctttttgttaattcaaaacttcaactttgctgcttctatttcaaaagctcaaacaataaagctgtaaccaacgtttgaaacttctatatttgtctaattgatgtttgaacgaagatttgaac

SEQ ID NO: 24760 - protein, 258 aa, Arabidopsis thaliana; identical to SEQ ID NO: 21610
  peptide (1)..(258): Ceres Seq. ID no. 12650563

SEQ ID NO: 24761 - protein, 145 aa, Arabidopsis thaliana; identical to SEQ ID NO: 21611
  peptide (1)..(145): Ceres Seq. ID no. 12650564

SEQ ID NO: 24762 - DNA, 1601 bp, Arabidopsis thaliana
  misc_feature (1)..(1601): Ceres Seq. ID no. 12371791
  misc_feature (1)..(1601): Ortholog of  Ceres SEQ ID NO 14315993 as cited in SEQ ID NO 57788
agaaaaattcaaagattgagtcaccaccaccatagtaatatacgcgtatgagttcccagatgtgatctccatccaacgttgtatttctttcgttttggttatcttcttcggttccatcgaattccaacaattctcatcgaggaatttggttacgaatcttttgatctgactaaacctagggagcttgatcacaaggagactgaaaccaatgctaggaggagtctcttcaggttagtagaatgagtagaaaaagaacggaaaatggcagtgaatcaggaccagccacttctcatgttcctgtggatagattcgggtttctcaagcaagaacatgccaattcgcctgagcgttttagcaagtctaaaactacatcatccactgatcatgacagagaggagagaaaggtgagaaaatggaggaagatgattggggttggagggagtgattggaagcattatgttaggagaaaacctaatgttgtcagaaggcgtatacgaaaagggatccctgattgcttacgaggtcttgtttggcagttaatctcaggaagtcgagaccttttgcttatgaatcctggtgtttatgagcaattggtgatttatgaaacatctgcatcagagcttgatatcattcgagacatatcccgtactttcccatcacatgttttctttcagaagagacatggacctgggcaaagatccttgtacaatgtccttaaggcatactcagtttatgacagagatgtcggatatgttcaggggatggggtttatagccggtttgttgcttctctatatgagcgaagaagatgccttctggttattagttgcattacttaaaggagctgttcatgctccaatggaaggattgtatcatgcagggcttccccttgtacagcaatacctttttcagttagaaagcttggtaaaagagctaattccgaagctcggagaacattttactcaagaaatgattaatccgagtatgtatgcaagtcaatggttcatcaccgtcttctcatactcatttcctttccctttggctctacggatatgggatgtgtttctctccgagggtgttaaaatcgtgttcaaagtgggcttagcattgctcaagtattgccaagatgagttggtaaagttaccgtttgagaaactaatacatgctctgaaaactttcccggaagacgcaatgaatccggataccttgcttccattggcttactctatcaaggtatcaaagcgtttggaagaactgacactggagtatcagaagactaatgccaaaccggttcaaccgtaggaaatccggttggcaataacctgaacctgaaccagaagttggattcgaattcgttttctcatcttatcttttcttgttggaatatattcttttttcatcatattgtcaagttgggtgggaatttcttatcagaagctctctgattgtttttagcaatttcgtggaaaagaagaaggcatgctccagctgatgtatagatagagagagagaccagtgttcctagagagatctcactaatgtgaaaagtaaatcatattgtttaaaggtatttttattctttaaggttcatggtaccaaacc

SEQ ID NO: 24763 - protein, 353 aa, Arabidopsis thaliana
  peptide (1)..(353): Ceres Seq. ID no. 12371792
MSRKRTENGSESGPATSHVPVDRFGFLKQEHANSPERFSKSKTTSSTDHDREERKVRKWRKMIGVGGSDWKHYVRRKPNVVRRRIRKGIPDCLRGLVWQLISGSRDLLLMNPGVYEQLVIYETSASELDIIRDISRTFPSHVFFQKRHGPGQRSLYNVLKAYSVYDRDVGYVQGMGFIAGLLLLYMSEEDAFWLLVALLKGAVHAPMEGLYHAGLPLVQQYLFQLESLVKELIPKLGEHFTQEMINPSMYASQWFITVFSYSFPFPLALRIWDVFLSEGVKIVFKVGLALLKYCQDELVKLPFEKLIHALKTFPEDAMNPDTLLPLAYSIKVSKRLEELTLEYQKTNAKPVQP

SEQ ID NO: 24764 - protein, 292 aa, Arabidopsis thaliana
  peptide (1)..(292): Ceres Seq. ID no. 12371793
MIGVGGSDWKHYVRRKPNVVRRRIRKGIPDCLRGLVWQLISGSRDLLLMNPGVYEQLVIYETSASELDIIRDISRTFPSHVFFQKRHGPGQRSLYNVLKAYSVYDRDVGYVQGMGFIAGLLLLYMSEEDAFWLLVALLKGAVHAPMEGLYHAGLPLVQQYLFQLESLVKELIPKLGEHFTQEMINPSMYASQWFITVFSYSFPFPLALRIWDVFLSEGVKIVFKVGLALLKYCQDELVKLPFEKLIHALKTFPEDAMNPDTLLPLAYSIKVSKRLEELTLEYQKTNAKPVQP

SEQ ID NO: 24765 - protein, 244 aa, Arabidopsis thaliana
  peptide (1)..(244): Ceres Seq. ID no. 12371794
MNPGVYEQLVIYETSASELDIIRDISRTFPSHVFFQKRHGPGQRSLYNVLKAYSVYDRDVGYVQGMGFIAGLLLLYMSEEDAFWLLVALLKGAVHAPMEGLYHAGLPLVQQYLFQLESLVKELIPKLGEHFTQEMINPSMYASQWFITVFSYSFPFPLALRIWDVFLSEGVKIVFKVGLALLKYCQDELVKLPFEKLIHALKTFPEDAMNPDTLLPLAYSIKVSKRLEELTLEYQKTNAKPVQP

SEQ ID NO: 24766 - DNA, 1267 bp, Arabidopsis thaliana
  misc_feature (1)..(1267): Ceres Seq. ID no. 13487838
  misc_feature (1)..(1267): Ortholog of  Ceres SEQ ID NO 14311961 as cited in SEQ ID NO 51512
aaattggcatgttcaccatttttccacaaactcaaatttgctccaatgcctgtacttttctcctctcgttctctcatactctccattattgtccccttacttatatctatcgctctctacaaactcgacacattcgaccccgctattgttccttccgatgcattcacatcctctgctacttcactcccgccgcttataaacgacgaatttctcaccggagctgagtttatcggtgtcggtcttctcaatatacccgaagatatcgcctaccataaggaatctaatctcatctacactggttgtgttgatggatgggtgaaacgagtcaaggtcgccgactcggttaatgactcagtcgttgaggattgggtcaatactggtggtagaccgctcggaatcgcgttcggaatccacggcgaagtcattgtcgcagacgtacacaagggactgttgaatataagcggtgacggaaagaagacggaattgttgacggacgaagcggacggtgtgaagtttaagctgacggatgcagttaccgttgcagataacggcgttttgtatttcacagatgcttcttacaagtacactctcaatcaattgagtttagacatgttagaagggaaaccttttggacgactcttgagctttgatcccaccacacgtgttacaaaagtacttctcaaagacctctacttcgctaatggcatcaccatctctcctgatcaaactcatctcatcttctgtgaaactccaatgaaaaggtgcagcaagtattacatcagtgaggagcgtgtggaggtattcactcaaagcttaccaggttatccagataacattcgttacgatggagatggacattactggattgcattgccttcgggagtcacgacattgtggaatatctcgttgaaataccctttcttgaggaaactcacagcaatggtggctaagtacggcgtggatcttatgtttatggagaatgcaggcgttttacaggtggatttggatggaaatcccatcgcgtactaccatgatccaaaactctctcacatagccacatgtgacaagattgggaaatatctctattgtggaagtctctcgcaatcacatatcctccgacttgatctcctgaaatatcctgcacagaacaagaaactttgaaatattatgttttcacaaataaggaaagtttccattttaggaaggagcattcactgtcacaaaaaatgtaaactcatttcctgagaatgaatgatgattgtatctc

SEQ ID NO: 24767 - protein, 386 aa, Arabidopsis thaliana
  peptide (1)..(386): Ceres Seq. ID no. 13487839
KLACSPFFHKLKFAPMPVLFSSRSLILSIIVPLLISIALYKLDTFDPAIVPSDAFTSSATSLPPLINDEFLTGAEFIGVGLLNIPEDIAYHKESNLIYTGCVDGWVKRVKVADSVNDSVVEDWVNTGGRPLGIAFGIHGEVIVADVHKGLLNISGDGKKTELLTDEADGVKFKLTDAVTVADNGVLYFTDASYKYTLNQLSLDMLEGKPFGRLLSFDPTTRVTKVLLKDLYFANGITISPDQTHLIFCETPMKRCSKYYISEERVEVFTQSLPGYPDNIRYDGDGHYWIALPSGVTTLWNISLKYPFLRKLTAMVAKYGVDLMFMENAGVLQVDLDGNPIAYYHDPKLSHIATCDKIGKYLYCGSLSQSHILRLDLLKYPAQNKKL

SEQ ID NO: 24768 - protein, 371 aa, Arabidopsis thaliana
  peptide (1)..(371): Ceres Seq. ID no. 13487840
MPVLFSSRSLILSIIVPLLISIALYKLDTFDPAIVPSDAFTSSATSLPPLINDEFLTGAEFIGVGLLNIPEDIAYHKESNLIYTGCVDGWVKRVKVADSVNDSVVEDWVNTGGRPLGIAFGIHGEVIVADVHKGLLNISGDGKKTELLTDEADGVKFKLTDAVTVADNGVLYFTDASYKYTLNQLSLDMLEGKPFGRLLSFDPTTRVTKVLLKDLYFANGITISPDQTHLIFCETPMKRCSKYYISEERVEVFTQSLPGYPDNIRYDGDGHYWIALPSGVTTLWNISLKYPFLRKLTAMVAKYGVDLMFMENAGVLQVDLDGNPIAYYHDPKLSHIATCDKIGKYLYCGSLSQSHILRLDLLKYPAQNKKL

SEQ ID NO: 24769 - DNA, 1352 bp, Arabidopsis thaliana
  misc_feature (1)..(1352): Ceres Seq. ID no. 13495889
  misc_feature (1)..(1352): Ortholog of  Ceres SEQ ID NO 15170760 as cited in SEQ ID NO 52747
  misc_feature (1)..(1352): Ortholog of  Ceres SEQ ID NO 15168549 as cited in SEQ ID NO 56976
  misc_feature (1)..(1352): Ortholog of  Ceres SEQ ID NO 14314335 as cited in SEQ ID NO 57305
  misc_feature (1)..(1352): Ortholog of  Ceres SEQ ID NO 15177588 as cited in SEQ ID NO 60367
aaaatatccaattttttcattgaaaatacaaactttcattccaaaaaaaaacctcaatacacaaaaaaccaaaaaaacatataacgttggcaaaaatactaaaaacattttttaaaagataaagcaataaaaaagtatacaaacaaattaacaagaaggagagctctcactataaaacagagcacatgttcttctcactaaccactcaacagagaagcaaaagaaaaaaaagctattgtttgaaagaagaagaagttaactatggcaaaggatgtggaagccgttcccggagaaggatttcagacaagagactatcaagatccgccaccagctccgtttattgatggagcggagctaaagaagtggtctttctacagagcagttatcgccgagttcgtagccactctcctcttcttatacatcaccgttttgacagtcatcggttacaagattcagtccgatactgatgccggtggcgtagattgcggcggagttggaatcctcggtatcgcttgggcctttggtggtatgatcttcatcctcgtctactgcaccgccggtatctctggtggtcacattaacccagcggtgacatttgggctattcttggcacgtaaagtgtcgttacctagggccctattgtacataatcgctcagtgtttgggtgcgatttgtggagttggttttgtcaaagccttccaaagctcttactacacccgttacggaggtggagccaactctctagccgatggctacagcacagggaccggtttagccgcagagatcattggtactttcgttcttgtctacactgtcttctctgccactgaccccaaacgtagtgctagagactcccacgttccggtgttggcgccacttccaatcggatttgccgtgttcatggtacatttggctaccattcccattaccggaaccggaattaacccggcaaggagtttcggagctgccgtaatctacaacaagagcaagccatgggatgaccactggatattttgggttggaccattcattggagctgcgatagctgcattctaccaccaattcgttctgagagcttcaggttctaagtctctcggatcattcagaagtgctgccaacgtctaaacacaccaaaccagatttctcaagaataaatgaagttgtaatctctctgtacaaaatctaaatcagtcactttgcagttttcatttccctttcttatatttgtgttgtccacttgctcttttgtgaattttccttcggtgtaattgttttttctttcgcttttaatcgagtgattggaattataatcaatgaaatcaaagaggttcttattgccttgtgtttacatt

SEQ ID NO: 24770 - protein, 287 aa, Arabidopsis thaliana
  peptide (1)..(287): Ceres Seq. ID no. 15222965
MAKDVEAVPGEGFQTRDYQDPPPAPFIDGAELKKWSFYRAVIAEFVATLLFLYITVLTVIGYKIQSDTDAGGVDCGGVGILGIAWAFGGMIFILVYCTAGISGGHINPAVTFGLFLARKVSLPRALLYIIAQCLGAICGVGFVKAFQSSYYTRYGGGANSLADGYSTGTGLAAEIIGTFVLVYTVFSATDPKRSARDSHVPVLAPLPIGFAVFMVHLATIPITGTGINPARSFGAAVIYNKSKPWDDHWIFWVGPFIGAAIAAFYHQFVLRASGSKSLGSFRSAANV

SEQ ID NO: 24771 - protein, 198 aa, Arabidopsis thaliana
  peptide (1)..(198): Ceres Seq. ID no. 15222966
MIFILVYCTAGISGGHINPAVTFGLFLARKVSLPRALLYIIAQCLGAICGVGFVKAFQSSYYTRYGGGANSLADGYSTGTGLAAEIIGTFVLVYTVFSATDPKRSARDSHVPVLAPLPIGFAVFMVHLATIPITGTGINPARSFGAAVIYNKSKPWDDHWIFWVGPFIGAAIAAFYHQFVLRASGSKSLGSFRSAANV

SEQ ID NO: 24772 - DNA, 1203 bp, Arabidopsis thaliana
  misc_feature (1)..(1203): Ceres Seq. ID no. 12394770
  misc_feature (1)..(1203): Ortholog of  Ceres SEQ ID NO 12613953 as cited in SEQ ID NO 68388
tttttgccctctcccatttttgtcgccgaaaccctaaatctcgacctcaaaccctgaaccatggctgaaggactcgtgttgaaaggcacaatgtgtgcccacactgatatggtcaccgccattgctacaccggtcgataactccgacgtgattgtaacttcgtcgcgtgacaaatcaatcatcctctggaaactcacaaaggaagacaagtcatacggtgttgctcagcggaggatgactggtcactctcacttcgttcaagacgttgttctctcctccgatggacaattcgctctctccggatcttgggacggtgagcttcgtctctgggatctcgctaccggagaatctactcgtcgtttcgttggtcacacgaaagatgttctctctgttgctttctctaccgataaccgtcagatcgtctctgcttctcgtgatcgtacgattaagctttggaacacgcttggtgagtgtaagtataccatctctgaagctgatggtcacaaggaatgggttagttgtgttaggtttagtcctaatactcttgtgccaactattgtatctgcttcttgggataaaactgtgaaggtctggaatcttcagaattgtaagcttaggaacactcttgctggtcactctggttacttgaacactgtggctgtgtcacctgatggttcgttgtgtgccagtggtggcaaagatggtgtgatcttgctttgggatttggctgaagggaagaagttgtattctcttgaagctggctctattattcattcactttgcttcagtcccaataggtactggttgtgtgcagcaacagagaatagcattaggatttgggatctcgagagtaagtctgttgttgaggatttgaaggttgatcttaaggctgaggctgaaaagactgatggttctactggaatcggaaacaagaccaaggtgatctactgcacaagcttgaactggagtgcagatggaaacactttgttcagtggatacactcatggagttatcagggtttggggtattggtcgttactagagagacaagaagtttctttattctctccaaatttttccatcgactctaaagtcttctcttctgaattagtgttttgaggatttattttttgttcttttctattttcagaatccacaaatgtgatattttgatacattgattttgtttcatatttgttttctc

SEQ ID NO: 24773 - protein, 326 aa, Arabidopsis thaliana
  peptide (1)..(326): Ceres Seq. ID no. 12394771
MAEGLVLKGTMCAHTDMVTAIATPVDNSDVIVTSSRDKSIILWKLTKEDKSYGVAQRRMTGHSHFVQDVVLSSDGQFALSGSWDGELRLWDLATGESTRRFVGHTKDVLSVAFSTDNRQIVSASRDRTIKLWNTLGECKYTISEADGHKEWVSCVRFSPNTLVPTIVSASWDKTVKVWNLQNCKLRNTLAGHSGYLNTVAVSPDGSLCASGGKDGVILLWDLAEGKKLYSLEAGSIIHSLCFSPNRYWLCAATENSIRIWDLESKSVVEDLKVDLKAEAEKTDGSTGIGNKTKVIYCTSLNWSADGNTLFSGYTHGVIRVWGIGRY

SEQ ID NO: 24774 - protein, 316 aa, Arabidopsis thaliana
  peptide (1)..(316): Ceres Seq. ID no. 12394772
MCAHTDMVTAIATPVDNSDVIVTSSRDKSIILWKLTKEDKSYGVAQRRMTGHSHFVQDVVLSSDGQFALSGSWDGELRLWDLATGESTRRFVGHTKDVLSVAFSTDNRQIVSASRDRTIKLWNTLGECKYTISEADGHKEWVSCVRFSPNTLVPTIVSASWDKTVKVWNLQNCKLRNTLAGHSGYLNTVAVSPDGSLCASGGKDGVILLWDLAEGKKLYSLEAGSIIHSLCFSPNRYWLCAATENSIRIWDLESKSVVEDLKVDLKAEAEKTDGSTGIGNKTKVIYCTSLNWSADGNTLFSGYTHGVIRVWGIGRY

SEQ ID NO: 24775 - protein, 310 aa, Arabidopsis thaliana
  peptide (1)..(310): Ceres Seq. ID no. 12394773
MVTAIATPVDNSDVIVTSSRDKSIILWKLTKEDKSYGVAQRRMTGHSHFVQDVVLSSDGQFALSGSWDGELRLWDLATGESTRRFVGHTKDVLSVAFSTDNRQIVSASRDRTIKLWNTLGECKYTISEADGHKEWVSCVRFSPNTLVPTIVSASWDKTVKVWNLQNCKLRNTLAGHSGYLNTVAVSPDGSLCASGGKDGVILLWDLAEGKKLYSLEAGSIIHSLCFSPNRYWLCAATENSIRIWDLESKSVVEDLKVDLKAEAEKTDGSTGIGNKTKVIYCTSLNWSADGNTLFSGYTHGVIRVWGIGRY

SEQ ID NO: 24776 - DNA, 873 bp, Arabidopsis thaliana; identical to SEQ ID NO: 22479
  misc_feature (1)..(873): Ceres Seq. ID no. 13493860
  misc_feature (1)..(873): Ortholog of  Ceres SEQ ID NO 14301396 as cited in SEQ ID NO 51789
  misc_feature (1)..(873): Ortholog of  Ceres SEQ ID NO 12610031 as cited in SEQ ID NO 55811
  misc_feature (1)..(873): Ortholog of  Ceres SEQ ID NO 12610896 as cited in SEQ ID NO 55861
  misc_feature (1)..(873): Ortholog of  Ceres SEQ ID NO 12619664 as cited in SEQ ID NO 66048
  misc_feature (1)..(873): Ortholog of  Ceres SEQ ID NO 12635952 as cited in SEQ ID NO 0

SEQ ID NO: 24777 - protein, 215 aa, Arabidopsis thaliana; identical to SEQ ID NO: 22480
  peptide (1)..(215): Ceres Seq. ID no. 13493861

SEQ ID NO: 24778 - protein, 181 aa, Arabidopsis thaliana; identical to SEQ ID NO: 22481
  peptide (1)..(181): Ceres Seq. ID no. 13493862

SEQ ID NO: 24779 - protein, 146 aa, Arabidopsis thaliana; identical to SEQ ID NO: 22482
  peptide (1)..(146): Ceres Seq. ID no. 13493863

SEQ ID NO: 24780 - DNA, 1516 bp, Arabidopsis thaliana
  misc_feature (1)..(1516): Ceres Seq. ID no. 12335216
  misc_feature (1)..(1516): Ortholog of  Ceres SEQ ID NO 13595965 as cited in SEQ ID NO 68231
aacttctagaaaaatcgccagaagtgacgaaattgaaaatctcagatttctcttaatcggcgacggagtaacgaaacaaggagaagaagaagaagaagaaaatgacgactcgaatcgctcctggtgttggagctaatcttctcggccaacactccgctgagaggaaccaagacgccactgtttacgtcggtggtctcgatgctcagctttctgaagaattgctttgggaattgttcgttcaagctggacctgttgttaatgtctatgtaccgaaagatagagtgacaaatcttcatcagaactatggattcattgaatatcgtagtgaggaagatgctgattatgcgattaaggttcttaacatgattaagctccacgggaagcctatacgtgttaacaaggcatctcaagataagaagagcctggatgttggtgctaaccttttcattggaaaccttgaccctgatgtggatgagaagctcttgtatgatactttcagtgcatttggtgtgattgcttctaatcctaagataatgagagatcccgatactggaaactcacgaggttttggtttcatcagctatgactcctttgaagcatctgatgctgctattgagtcaatgactggacaatatctcagtaatcgtcaaatcacagtctcttacgcatacaagaaagacaccaaaggagagcgccatggtactccagcagagaggcttttggcagccacaaatccaactgcccagaaaagcagaccccatacgctattcgcaatgggccctccatccagtgctcctcaagttaatggtctaccacgtccgtttgctaacggcagcatgcaacctgtcccgattcccgctccccgtcaaccaccaccacctcctccacaagtatatcaaactcagccaccatcctggccatctcagccacaacaacacagcatggtcccaccacccatgcaattccgtccacctcagggtatgcctccgccaccacctcctcagtttctaaatcaccaacaaggtttcggtggtccgaggccgccgccaccacctcaagccatgggaatgcaccaacatggaggatggccaccgcaacacatgcagcagcaaggtggaccaccacaacaacaacaaccaccataccaacaccatcacatgtctatgcctccaccaccaccacaccaaggttgataataatcatcgcctcagtttcggaccaattcaactatatgtaaaccctttctttactggcaagtaatcccgaggattttccgttttagattcaatgaaacctaatagggagagagagaaagagaaagagagagggtgagagagagatcacaattaatattctatattgtcttgtctgcagagaatctcttatcttcggtttagagagagagagagcgtagaaattagtgccaatgtgtgtctggtttttagtgatgttatttcttgtttgtgttgcagaatctctgatgccgtgtgctttaatatttaccaaaactgtgctg

SEQ ID NO: 24781 - protein, 363 aa, Arabidopsis thaliana
  peptide (1)..(363): Ceres Seq. ID no. 12335217
MTTRIAPGVGANLLGQHSAERNQDATVYVGGLDAQLSEELLWELFVQAGPVVNVYVPKDRVTNLHQNYGFIEYRSEEDADYAIKVLNMIKLHGKPIRVNKASQDKKSLDVGANLFIGNLDPDVDEKLLYDTFSAFGVIASNPKIMRDPDTGNSRGFGFISYDSFEASDAAIESMTGQYLSNRQITVSYAYKKDTKGERHGTPAERLLAATNPTAQKSRPHTLFAMGPPSSAPQVNGLPRPFANGSMQPVPIPAPRQPPPPPPQVYQTQPPSWPSQPQQHSMVPPPMQFRPPQGMPPPPPPQFLNHQQGFGGPRPPPPPQAMGMHQHGGWPPQHMQQQGGPPQQQQPPYQHHHMSMPPPPPHQG

SEQ ID NO: 24782 - protein, 276 aa, Arabidopsis thaliana
  peptide (1)..(276): Ceres Seq. ID no. 12335218
MIKLHGKPIRVNKASQDKKSLDVGANLFIGNLDPDVDEKLLYDTFSAFGVIASNPKIMRDPDTGNSRGFGFISYDSFEASDAAIESMTGQYLSNRQITVSYAYKKDTKGERHGTPAERLLAATNPTAQKSRPHTLFAMGPPSSAPQVNGLPRPFANGSMQPVPIPAPRQPPPPPPQVYQTQPPSWPSQPQQHSMVPPPMQFRPPQGMPPPPPPQFLNHQQGFGGPRPPPPPQAMGMHQHGGWPPQHMQQQGGPPQQQQPPYQHHHMSMPPPPPHQG

SEQ ID NO: 24783 - protein, 219 aa, Arabidopsis thaliana
  peptide (1)..(219): Ceres Seq. ID no. 12335219
MRDPDTGNSRGFGFISYDSFEASDAAIESMTGQYLSNRQITVSYAYKKDTKGERHGTPAERLLAATNPTAQKSRPHTLFAMGPPSSAPQVNGLPRPFANGSMQPVPIPAPRQPPPPPPQVYQTQPPSWPSQPQQHSMVPPPMQFRPPQGMPPPPPPQFLNHQQGFGGPRPPPPPQAMGMHQHGGWPPQHMQQQGGPPQQQQPPYQHHHMSMPPPPPHQG

SEQ ID NO: 24784 - DNA, 1234 bp, Arabidopsis thaliana
  misc_feature (1)..(1234): Ceres Seq. ID no. 12336108
  misc_feature (1)..(1234): Ortholog of  Ceres SEQ ID NO 14314272 as cited in SEQ ID NO 57461
  misc_feature (1)..(1234): Ortholog of  Ceres SEQ ID NO 15170602 as cited in SEQ ID NO 57485
gacatcttctctctctctttctgaagtgaactgttgttgttgtgctctttggtttcatcgagagagaacctaaacccgatctgaaccaataacaataagaagacgaatggcgtcttcgtcgttctcagtcacatctccagctgctgctgcttccgtctatgcagtcactcaaacctcctcgcacttcccaatccaaaaccgctctcgcagagtttctttccgtctctctgctaagcccaagcttcgctttctctccaagcctagtcgcagtagctaccctgtggtgaaagcacaatctaacaaggttagtactggtgcatcatcaaatgctgccaaagttgatgggccatcatcagctgaaggaaaggagaaaaactcattgaaggagtcgtctgcttcttctcctgaattagctacagaagagtctatttctgagttccttacccaagtaacaactcttgtcaagcttgtggattcaagagacattgttgagttgcagttgaaacaactcgactgtgaactagtcattcgaaaaaaagaagccttacctcaacctcaagctcctgcatcttatgttatgatgcagcaaccaaatcaaccatcttatgcccagcaaatggctcctcctgctgcacctgctgctgccgcaccagccccttctacgccagcctctctgcctccaccatccccacctactccagccaaatcgtcacttcctactgttaaaagccccatggctggcacattctaccgtagtcctgcacctggtgaaccaccctttattaaggttggagacaaagtgcagaaggggcaagttctatgcattgttgaagccatgaagttaatgaatgaaatagagtctgaccataccggaaccgtagtcgatattgtcgcagaagacggcaagcctgtcagcctcgacactcctctgtttgtggttcaacccgtagaatcggcaccatgagaaatggagaaaagaagctctactaaattcattctctgtgctttggtaatacaaaatttgctgagacttctaaaaacgtttccccttcgctgtcactgttaaagtctgttaggtttgttagtttggtgaggaagaattgagttttctttagtttctctattcgttaaaaaaaaaaagatgagacatttttttccataagctctgtttttatttctttcctatatacacgaactcttcttgttctgttctatttgcaaattatccaatttc

SEQ ID NO: 24785 - protein, 285 aa, Arabidopsis thaliana
  peptide (1)..(285): Ceres Seq. ID no. 12336109
MASSSFSVTSPAAAASVYAVTQTSSHFPIQNRSRRVSFRLSAKPKLRFLSKPSRSSYPVVKAQSNKVSTGASSNAAKVDGPSSAEGKEKNSLKESSASSPELATEESISEFLTQVTTLVKLVDSRDIVELQLKQLDCELVIRKKEALPQPQAPASYVMMQQPNQPSYAQQMAPPAAPAAAAPAPSTPASLPPPSPPTPAKSSLPTVKSPMAGTFYRSPAPGEPPFIKVGDKVQKGQVLCIVEAMKLMNEIESDHTGTVVDIVAEDGKPVSLDTPLFVVQPVESAP

SEQ ID NO: 24786 - DNA, 1410 bp, Arabidopsis thaliana
  misc_feature (1)..(1410): Ceres Seq. ID no. 13500138
  misc_feature (1)..(1410): Ortholog of  Ceres SEQ ID NO 13656404 as cited in SEQ ID NO 65806
  misc_feature (1)..(1410): Ortholog of  Ceres SEQ ID NO 12779935 as cited in SEQ ID NO 66774
  misc_feature (1)..(1410): Ortholog of  Ceres SEQ ID NO 13598695 as cited in SEQ ID NO 67368
  misc_feature (1)..(1410): Ortholog of  Ceres SEQ ID NO 13591174 as cited in SEQ ID NO 68289
gaacttgtaaaccttactctcgaagagtcctctgttactcatttttacattgtaaaaaaaaacttcttttcttctctacgtgaataagaatctgaagagtcattttctcaagaatgacgtggctaaaacaaatgtggtcaagcattttagtgctagccgtggtggtgatcggagccagagctgtgcccatcacgtatcttgaatctgcagtggctaaaggagctgtgtgtttggatggtagcgcgccagcataccatttcgataagggatcgggctcaggagtgaacaattggatcgttcatatggaaggaggaggatggtgcactgatatagctacatgcgttcaacgtaaaagtacaatgaagggttcttctaagcttatgaacaaagactttggtttctccggtatcttgggtggcaagcaaagcaccaatccagacttttacaattggaatagaatcaaagttcggtattgcgatggttcatctttcaccggtgatatagaagctgttgatccgacgcacaagctgttctttcgcggtgctagggtttggcgtgcggtgatcgatgatcttatggctaagggaatgagcaacgctcaaaacgctatactctccggttgttcagctggagcattggctgcgattctacattgcgaccagttcaagtccactctccctaaaacggctaaggtcaaatgtgtttctgacgctggttacttcatccacggtaaggatatcactggaggatcttacatccaatcctactacgccaaagtcgtagcgacccacggatctgcaaagagtctacctgcttcttgcacctcaagtatgaagcctgatttgtgtttcttccctcaatacgttgctaagaccttacaaacaccgcttttcgtcatcaatgccgccttcgattcttggcagatcaagaatgtattggcaccaacctctgttgataaaagcaaagcatggaagacttgtaagcttgatcttaagaagtgtacggccgctcagcttcaaaccgttcaaggatatagagaccaagtgttggctgcgttggcgcctgttcgatccgcgacgacgaacggattgttcttggactcgtgccatgctcattgccaaggtggaagcgctgccacttggtccggcgacaaaggtcccacagtcgcgaatacgaaaatggctaaggcggttggagattggttctttgagaggagtacgtttcagaacgtagattgttcatcgcttaattgcaaccctacttgccctgcagtatctactgaagactaaaatttattcattgatgtcttaaaatttattcatctttggaatattgttcttgaaatttaaaagtaaaataatataattgatacaatttcattcgaataaataaaatcctttgcccttctgc

SEQ ID NO: 24787 - protein, 391 aa, Arabidopsis thaliana
  peptide (1)..(391): Ceres Seq. ID no. 13500139
MTWLKQMWSSILVLAVVVIGARAVPITYLESAVAKGAVCLDGSAPAYHFDKGSGSGVNNWIVHMEGGGWCTDIATCVQRKSTMKGSSKLMNKDFGFSGILGGKQSTNPDFYNWNRIKVRYCDGSSFTGDIEAVDPTHKLFFRGARVWRAVIDDLMAKGMSNAQNAILSGCSAGALAAILHCDQFKSTLPKTAKVKCVSDAGYFIHGKDITGGSYIQSYYAKVVATHGSAKSLPASCTSSMKPDLCFFPQYVAKTLQTPLFVINAAFDSWQIKNVLAPTSVDKSKAWKTCKLDLKKCTAAQLQTVQGYRDQVLAALAPVRSATTNGLFLDSCHAHCQGGSAATWSGDKGPTVANTKMAKAVGDWFFERSTFQNVDCSSLNCNPTCPAVSTED

SEQ ID NO: 24788 - protein, 385 aa, Arabidopsis thaliana
  peptide (1)..(385): Ceres Seq. ID no. 13500140
MWSSILVLAVVVIGARAVPITYLESAVAKGAVCLDGSAPAYHFDKGSGSGVNNWIVHMEGGGWCTDIATCVQRKSTMKGSSKLMNKDFGFSGILGGKQSTNPDFYNWNRIKVRYCDGSSFTGDIEAVDPTHKLFFRGARVWRAVIDDLMAKGMSNAQNAILSGCSAGALAAILHCDQFKSTLPKTAKVKCVSDAGYFIHGKDITGGSYIQSYYAKVVATHGSAKSLPASCTSSMKPDLCFFPQYVAKTLQTPLFVINAAFDSWQIKNVLAPTSVDKSKAWKTCKLDLKKCTAAQLQTVQGYRDQVLAALAPVRSATTNGLFLDSCHAHCQGGSAATWSGDKGPTVANTKMAKAVGDWFFERSTFQNVDCSSLNCNPTCPAVSTED

SEQ ID NO: 24789 - protein, 328 aa, Arabidopsis thaliana
  peptide (1)..(328): Ceres Seq. ID no. 13500141
MEGGGWCTDIATCVQRKSTMKGSSKLMNKDFGFSGILGGKQSTNPDFYNWNRIKVRYCDGSSFTGDIEAVDPTHKLFFRGARVWRAVIDDLMAKGMSNAQNAILSGCSAGALAAILHCDQFKSTLPKTAKVKCVSDAGYFIHGKDITGGSYIQSYYAKVVATHGSAKSLPASCTSSMKPDLCFFPQYVAKTLQTPLFVINAAFDSWQIKNVLAPTSVDKSKAWKTCKLDLKKCTAAQLQTVQGYRDQVLAALAPVRSATTNGLFLDSCHAHCQGGSAATWSGDKGPTVANTKMAKAVGDWFFERSTFQNVDCSSLNCNPTCPAVSTED

SEQ ID NO: 24790 - DNA, 1112 bp, Arabidopsis thaliana
  misc_feature (1)..(1112): Ceres Seq. ID no. 12329914
  misc_feature (1)..(1112): Ortholog of  Ceres SEQ ID NO 13639514 as cited in SEQ ID NO 55736
  misc_feature (1)..(1112): Ortholog of  Ceres SEQ ID NO 13595560 as cited in SEQ ID NO 56738
  misc_feature (1)..(1112): Ortholog of  Ceres SEQ ID NO 14312254 as cited in SEQ ID NO 59148
  misc_feature (1)..(1112): Ortholog of  Ceres SEQ ID NO 13662804 as cited in SEQ ID NO 65394
  misc_feature (1)..(1112): Ortholog of  Ceres SEQ ID NO 13656519 as cited in SEQ ID NO 69226
gactcttcgctcttctttttacacgaacacttctctctctctctcctcactctctttcctctttctctcactaaagaaaaaactagcgatcgaagagaatcatcatcaagaagctactatcagagaaatcaaagccctacaacacaagaatcaacatgggagctgaagaagaaaccaataagacatatcctcattggctaaaacctctgctacgagaaaagttctttgtacaatgcaaattacacgcagattcacataagagtgaatgtaacatgtactgtttagaccgtaccaatggtcctctctgttctctctgcttatctttccacaaagaccatcacgccattcagataagaagatcatcatatcacgatgttataagagtgtcggagattcagaagtttctggacataacaggagttcagacatatgtgatcaacagtgctaaggttgtgttcttgaacgagagacctcagcctcgaccaggcaaaggtgtgatcaatacttgtgaagtctgttatcgaagcctcgttgattccttcagattctgctctcttggttgcaagatctctggaatatcgaagaagaagagaaaggaatggacgaacaatctttcggattctgatgattcgtatagcagtacgagtatcggaaggctcaagaagaatgatgacattatgaataatagtttcacaccatcaacaccgcctttatcagccgtgaatcgtcgaattgcaaagcgaaggaagggaatcccgcatcgtgctcctttcggaggactaatcatagaatactaagaaatggtaatgtatagtcttatgctaataaccatcactagtagtttcggggtacatatatgtatatatatatatatctataatggtatataaagcaatgtaaaataaaagcttaacatcatagtattgtgtagatattaaaggggtaaaaaatgttgggaagatgatagaatgaggcatgaaatgaatacttgtgcctgtatattttgagctcaatggacaaatatgtaaatgtagaatagtgttgtggacaagacaatagtgataagtatgtgatgaatgtgaatggaataaaggtcattttactttcgatgc

SEQ ID NO: 24791 - protein, 213 aa, Arabidopsis thaliana
  peptide (1)..(213): Ceres Seq. ID no. 12329915
MGAEEETNKTYPHWLKPLLREKFFVQCKLHADSHKSECNMYCLDRTNGPLCSLCLSFHKDHHAIQIRRSSYHDVIRVSEIQKFLDITGVQTYVINSAKVVFLNERPQPRPGKGVINTCEVCYRSLVDSFRFCSLGCKISGISKKKRKEWTNNLSDSDDSYSSTSIGRLKKNDDIMNNSFTPSTPPLSAVNRRIAKRRKGIPHRAPFGGLIIEY

SEQ ID NO: 24792 - protein, 174 aa, Arabidopsis thaliana
  peptide (1)..(174): Ceres Seq. ID no. 12329916
MYCLDRTNGPLCSLCLSFHKDHHAIQIRRSSYHDVIRVSEIQKFLDITGVQTYVINSAKVVFLNERPQPRPGKGVINTCEVCYRSLVDSFRFCSLGCKISGISKKKRKEWTNNLSDSDDSYSSTSIGRLKKNDDIMNNSFTPSTPPLSAVNRRIAKRRKGIPHRAPFGGLIIEY

SEQ ID NO: 24793 - DNA, 601 bp, Arabidopsis thaliana
  misc_feature (1)..(601): Ceres Seq. ID no. 12337477
  misc_feature (1)..(601): Ortholog of  Ceres SEQ ID NO 14309328 as cited in SEQ ID NO 0
caggaaacctagttatgggaggtctgatgatcaggtggagagttacattaagcctagctatggaagatctgaggaacaggaggagggaagttacaggaagcctagttatgggaggtctgaggaacaggaagaggggagttacaggaagcagcctagctatggccgtggcaatgacgatgatgatgatgagcagcgtaggaaccgttctggttctggtgatgatgaggaagggagctatggccgcaagaaatatggtggcaatgactctgatgaggatgaggagaagaagaagcaccgtcacaagcatcaccaccagaagcgtcgtgaagaagacgatgagtaaactaaaccctctctgtgctagagagtgtaatgagaatgtgtgtttgcttagcctcaaaaatctactaaataaagagctaagtcacatacctttctacataatatcttccgacgttggtgttgtgtttgtttgaatctctgtattattactacagagtcttcgtactggttcataataagacctttaagtggtattgggtcaccatgtaactgttgctactctgtttcgttttctatctatcgttttgtgttatgattc

SEQ ID NO: 24794 - protein, 157 aa, Arabidopsis thaliana
  peptide (1)..(157): Ceres Seq. ID no. 12337478
GNLVMGGLMIRWRVTLSLAMEDLRNRRREVTGSLVMGGLRNRKRGVTGSSLAMAVAMTMMMMSSVGTVLVLVMMRKGAMAARNMVAMTLMRMRRRRSTVTSITTRSVVKKTMSKLNPLCARECNENVCLLSLKNLLNKELSHIPFYIISSDVGVVFV

SEQ ID NO: 24795 - protein, 153 aa, Arabidopsis thaliana
  peptide (1)..(153): Ceres Seq. ID no. 12337479
MGGLMIRWRVTLSLAMEDLRNRRREVTGSLVMGGLRNRKRGVTGSSLAMAVAMTMMMMSSVGTVLVLVMMRKGAMAARNMVAMTLMRMRRRRSTVTSITTRSVVKKTMSKLNPLCARECNENVCLLSLKNLLNKELSHIPFYIISSDVGVVFV

SEQ ID NO: 24796 - protein, 149 aa, Arabidopsis thaliana
  peptide (1)..(149): Ceres Seq. ID no. 12337480
MIRWRVTLSLAMEDLRNRRREVTGSLVMGGLRNRKRGVTGSSLAMAVAMTMMMMSSVGTVLVLVMMRKGAMAARNMVAMTLMRMRRRRSTVTSITTRSVVKKTMSKLNPLCARECNENVCLLSLKNLLNKELSHIPFYIISSDVGVVFV

SEQ ID NO: 24797 - protein, 113 aa, Arabidopsis thaliana
  peptide (1)..(113): Ceres Seq. ID no. 12337481
RKPSYGRSDDQVESYIKPSYGRSEEQEEGSYRKPSYGRSEEQEEGSYRKQPSYGRGNDDDDDEQRRNRSGSGDDEEGSYGRKKYGGNDSDEDEEKKKHRHKHHHQKRREEDDE

SEQ ID NO: 24798 - DNA, 994 bp, Arabidopsis thaliana
  misc_feature (1)..(994): Ceres Seq. ID no. 12482732
  misc_feature (1)..(994): Ortholog of  Ceres SEQ ID NO 13595093 as cited in SEQ ID NO 56132
  misc_feature (1)..(994): Ortholog of  Ceres SEQ ID NO 13661727 as cited in SEQ ID NO 61376
aacacaacacaaaacacatcactgatccttctctcatcctcagaaagaatggctcaaaccatgctgcttacttcaggcgtcaccgccggccattttttgaggaacaagagccctttggctcagcccaaagttcaccatctcttcctctctggaaactctccggttgcactaccatctaggagacaatcattcgttcctctcgctctcttcaaacccaaaaccaaagctgctcctaaaaaggttgagaagccgaagagcaaggttgaggatggcatctttggaacgtctggtgggattggtttcacaaaggcgaatgagctattcgttggtcgtgttgctatgatcggtttcgctgcatcgttgcttggtgaggcgttgacgggaaaagggatattagctcagctgaatctggagacagggataccgatttacgaagcagagccattgcttctcttcttcatcttgttcactctgttgggagccattggagctctcggagacagaggaaaattcgtcgacgatcctcccaccgggctcgagaaagccgtcattcctcccggcaaaaacgtccgatctgccctcggtctcaaagaacaaggtccattgtttgggttcacgaaggcgaacgagttattcgtaggaagattggcacagttgggaatagcattttcactgataggagagattattaccgggaaaggagcattagctcaactcaacattgagaccggtataccaattcaagatatcgaaccacttgtcctcttaaacgttgctttcttcttcttcgctgccattaatcctggtaatggaaaattcatcaccgatgatggtgaagaaagctaaattatcatgtacttaaatttagtagagagtgtgtgaccttctcttcatgttgagacaaaaggaaatggacagcttaaattgttgtaatacttatatccttttgtttttaacttggaattttctgattatatatagttttattacacct

SEQ ID NO: 24799 - protein, 281 aa, Arabidopsis thaliana
  peptide (1)..(281): Ceres Seq. ID no. 12482733
NTTQNTSLILLSSSERMAQTMLLTSGVTAGHFLRNKSPLAQPKVHHLFLSGNSPVALPSRRQSFVPLALFKPKTKAAPKKVEKPKSKVEDGIFGTSGGIGFTKANELFVGRVAMIGFAASLLGEALTGKGILAQLNLETGIPIYEAEPLLLFFILFTLLGAIGALGDRGKFVDDPPTGLEKAVIPPGKNVRSALGLKEQGPLFGFTKANELFVGRLAQLGIAFSLIGEIITGKGALAQLNIETGIPIQDIEPLVLLNVAFFFFAAINPGNGKFITDDGEES

SEQ ID NO: 24800 - protein, 265 aa, Arabidopsis thaliana
  peptide (1)..(265): Ceres Seq. ID no. 12482734
MAQTMLLTSGVTAGHFLRNKSPLAQPKVHHLFLSGNSPVALPSRRQSFVPLALFKPKTKAAPKKVEKPKSKVEDGIFGTSGGIGFTKANELFVGRVAMIGFAASLLGEALTGKGILAQLNLETGIPIYEAEPLLLFFILFTLLGAIGALGDRGKFVDDPPTGLEKAVIPPGKNVRSALGLKEQGPLFGFTKANELFVGRLAQLGIAFSLIGEIITGKGALAQLNIETGIPIQDIEPLVLLNVAFFFFAAINPGNGKFITDDGEES

SEQ ID NO: 24801 - protein, 261 aa, Arabidopsis thaliana
  peptide (1)..(261): Ceres Seq. ID no. 12482735
MLLTSGVTAGHFLRNKSPLAQPKVHHLFLSGNSPVALPSRRQSFVPLALFKPKTKAAPKKVEKPKSKVEDGIFGTSGGIGFTKANELFVGRVAMIGFAASLLGEALTGKGILAQLNLETGIPIYEAEPLLLFFILFTLLGAIGALGDRGKFVDDPPTGLEKAVIPPGKNVRSALGLKEQGPLFGFTKANELFVGRLAQLGIAFSLIGEIITGKGALAQLNIETGIPIQDIEPLVLLNVAFFFFAAINPGNGKFITDDGEES

SEQ ID NO: 24802 - DNA, 1565 bp, Arabidopsis thaliana
  misc_feature (1)..(1565): Ceres Seq. ID no. 12389093
  misc_feature (1)..(1565): Ortholog of  Ceres SEQ ID NO 14315063 as cited in SEQ ID NO 52256
  misc_feature (1)..(1565): Ortholog of  Ceres SEQ ID NO 13597574 as cited in SEQ ID NO 64677
  misc_feature (1)..(1565): Ortholog of  Ceres SEQ ID NO 13662880 as cited in SEQ ID NO 65422
  misc_feature (1)..(1565): Ortholog of  Ceres SEQ ID NO 14302071 as cited in SEQ ID NO 66585
  misc_feature (1)..(1565): Ortholog of  Ceres SEQ ID NO 14316013 as cited in SEQ ID NO 67181
  misc_feature (1)..(1565): Ortholog of  Ceres SEQ ID NO 12779098 as cited in SEQ ID NO 67698
  misc_feature (1)..(1565): Ortholog of  Ceres SEQ ID NO 13596180 as cited in SEQ ID NO 67941
  misc_feature (1)..(1565): Ortholog of  Ceres SEQ ID NO 13591190 as cited in SEQ ID NO 68044
  misc_feature (1)..(1565): Ortholog of  Ceres SEQ ID NO 13595961 as cited in SEQ ID NO 68223
  misc_feature (1)..(1565): Ortholog of  Ceres SEQ ID NO 13596089 as cited in SEQ ID NO 68373
aacgacaaattaattaaacttctccaaaactcttttcctctaaaaaatctcccaaatacagaaaaaaaaacaaagtcagtaagaaaaatggaagagagaaaagggaggagaataatcatgttccctcttccatttccagggcacttcaaccccatgatcgagctcgctggaatattccaccaccgtggcttctccgtgacgatcctccacacttcctacaacttccccgatccttctcgccacccacacttcacttttcgaaccatctctcacaacaaagaaggagaagaagatcctctgtctcagtcagaaacttcgagtatggacctaatcgttctcgttcgtcggctgaaacaacgctacgccgaaccgtttcgtaagtctgtggcggcggaagtaggtggaggagagacggtgtgttgtttggtctccgacgctatatgggggaagaacacggaggttgtagcggaagagattggagttcgtagggtggtgttgaggacaggtggtgcgtcgtcgttttgtgcttttgccgctttccctctccttagggataagggttacctccctatacaagattctagattagatgagccagtgacagagcttccacctttgaaagtgaaggatcttccggtaatggaaacgaatgagccggaggaactttaccgggtagttaacgacatggtggaaggagccaagtcttcttcaggagtcatatggaacacatttgaagatcttgaaagactatcacttatgaattgtagcagcaaattacaagttccatttttcccgatcggaccgtttcacaaatatagcgaagatcctacaccgaagacagagaacaaggaagataccgattggctcgacaagcaagacccacagtcggtggtctatgcgagtttcggaagccttgcagctatagaagagaaggagtttctcgagattgcttggggtctaagaaacagtgaacgaccgtttttgtgggtggttaggccggggtctgtcagggggaccgagtggctcgagtcattgcctttagggtttatggaaaacattggagataagggaaaaatcgtgaaatggacgaatcagttagaggtattggcgcatcctgccattggagcgttttggacacattgtggatggaactcgacactagagagcatatgtgaaggtgttcctatgatatgtacgtcatgtttcacggaccagcatgtgaacgcgagatacatcgttgatgtatggcgagtcgggatgttgttagagagaagtaagatggaaaagaaggagattgaaaaggtgctaagaagtgtaatgatggagaagggagatggattgagggaaaggagtttgaagttgaaagagagagctgatttttgcttaagtaaagatgggtcttcttccaagtatttagacaaatttgtgagtcatgtcctgtcttttgattcttatgcttttgcaagttaagaaaacttatgaatgactaatgtattctaagcactctccaaaagttccaaaaccattggatgttttgtttcttcaaataataatgttcttgagtc

SEQ ID NO: 24803 - protein, 489 aa, Arabidopsis thaliana
  peptide (1)..(489): Ceres Seq. ID no. 12389094
NDKLIKLLQNSFPLKNLPNTEKKTKSVRKMEERKGRRIIMFPLPFPGHFNPMIELAGIFHHRGFSVTILHTSYNFPDPSRHPHFTFRTISHNKEGEEDPLSQSETSSMDLIVLVRRLKQRYAEPFRKSVAAEVGGGETVCCLVSDAIWGKNTEVVAEEIGVRRVVLRTGGASSFCAFAAFPLLRDKGYLPIQDSRLDEPVTELPPLKVKDLPVMETNEPEELYRVVNDMVEGAKSSSGVIWNTFEDLERLSLMNCSSKLQVPFFPIGPFHKYSEDPTPKTENKEDTDWLDKQDPQSVVYASFGSLAAIEEKEFLEIAWGLRNSERPFLWVVRPGSVRGTEWLESLPLGFMENIGDKGKIVKWTNQLEVLAHPAIGAFWTHCGWNSTLESICEGVPMICTSCFTDQHVNARYIVDVWRVGMLLERSKMEKKEIEKVLRSVMMEKGDGLRERSLKLKERADFCLSKDGSSSKYLDKFVSHVLSFDSYAFAS

SEQ ID NO: 24804 - protein, 460 aa, Arabidopsis thaliana
  peptide (1)..(460): Ceres Seq. ID no. 12389095
MEERKGRRIIMFPLPFPGHFNPMIELAGIFHHRGFSVTILHTSYNFPDPSRHPHFTFRTISHNKEGEEDPLSQSETSSMDLIVLVRRLKQRYAEPFRKSVAAEVGGGETVCCLVSDAIWGKNTEVVAEEIGVRRVVLRTGGASSFCAFAAFPLLRDKGYLPIQDSRLDEPVTELPPLKVKDLPVMETNEPEELYRVVNDMVEGAKSSSGVIWNTFEDLERLSLMNCSSKLQVPFFPIGPFHKYSEDPTPKTENKEDTDWLDKQDPQSVVYASFGSLAAIEEKEFLEIAWGLRNSERPFLWVVRPGSVRGTEWLESLPLGFMENIGDKGKIVKWTNQLEVLAHPAIGAFWTHCGWNSTLESICEGVPMICTSCFTDQHVNARYIVDVWRVGMLLERSKMEKKEIEKVLRSVMMEKGDGLRERSLKLKERADFCLSKDGSSSKYLDKFVSHVLSFDSYAFAS

SEQ ID NO: 24805 - protein, 450 aa, Arabidopsis thaliana
  peptide (1)..(450): Ceres Seq. ID no. 12389096
MFPLPFPGHFNPMIELAGIFHHRGFSVTILHTSYNFPDPSRHPHFTFRTISHNKEGEEDPLSQSETSSMDLIVLVRRLKQRYAEPFRKSVAAEVGGGETVCCLVSDAIWGKNTEVVAEEIGVRRVVLRTGGASSFCAFAAFPLLRDKGYLPIQDSRLDEPVTELPPLKVKDLPVMETNEPEELYRVVNDMVEGAKSSSGVIWNTFEDLERLSLMNCSSKLQVPFFPIGPFHKYSEDPTPKTENKEDTDWLDKQDPQSVVYASFGSLAAIEEKEFLEIAWGLRNSERPFLWVVRPGSVRGTEWLESLPLGFMENIGDKGKIVKWTNQLEVLAHPAIGAFWTHCGWNSTLESICEGVPMICTSCFTDQHVNARYIVDVWRVGMLLERSKMEKKEIEKVLRSVMMEKGDGLRERSLKLKERADFCLSKDGSSSKYLDKFVSHVLSFDSYAFAS

SEQ ID NO: 24806 - DNA, 1682 bp, Arabidopsis thaliana
  misc_feature (1)..(1682): Ceres Seq. ID no. 12340241
  misc_feature (1)..(1682): Ortholog of  Ceres SEQ ID NO 15177285 as cited in SEQ ID NO 52481
  misc_feature (1)..(1682): Ortholog of  Ceres SEQ ID NO 13594068 as cited in SEQ ID NO 58624
aattagattgtttttgttttgtttaacatcagttgcgaatcgagctggattcttgggctcgctttttctttcaatcaaaagtttcgatattagtgaaggataaaattcgctaaaaaaagagaattttttttgttaaaaaaattataaaagctggctttctcaaaatttctccatgtggtcgacgaagaagacgaagaagacgaagaagaaagagaaagtctcttagcaaacatgaccgccaccgaagctaagaatcgcaaaatcaatgtcggagatggagatgacgttgttgatatcgaaatccctgacactgctcatcaaattagtagcgattcatggtttcaggtggcgttcgttttgaccaccggtataaacagcgcgtatgtgttgggatattcaggaacaattatggttcctttaggttggattggtggtgtggttggtcttcttattgctactgcaatctctctttatacaaacactctaatagctaagcttcatgagtttggtggcagaagacacattcgctatagagaccttgctggattcatttacggtaggaaggcttatcatcttacatggggattgcaatatgttaatcttttcatgattaattgtggattcattatcctagctggttccgccttaaaggctgtttatgtgcttttcagggatgatcataccatgaaactacctcattttatagccattgctggtttgatttgtgcgattttcgctattgggattcctcatttatcggctcttggggtctggcttggagtttcgaccttcctcagtctcatctatattgttgtggcaatcgtgctatcggttagagatggagtaaaaacaccttcaagagattacgagatacaaggatcatcattgagcaaactttttaccatcacaggagcagccgcaaatctggttttcgcattcaacaccgggatgcttccagaaattcaggcaacagtgaggcaaccagttgttaaaaacatgatgaaggctctatactttcaattcacagcgggtgttttaccgatgtacgcagttacattcatcggatattgggcttatggatcctcaacctcgacctatctactaaacagtgttaatggcccactctgggtcaaagcccttgctaacgtctctgctatccttcaatctgttatctctttgcacatatttgcgagtccaacatatgagtacatggacacaaagtatgggatcaaaggaaacccatttgcgataaagaacttgctgtttaggatcatggcgagaggagggtacatagcggtaagcacgcttatctcagcgctgttgccgttcctcggtgacttcatgagcctaactggtgcagtgagcacattccctctcacattcattctagccaaccacatgtactataaggcaaagaacaataagctgaatgctatgcaaaagctatggcattggcttaacgttgtcttctttagtttgatgtctgttgctgcagccattgcagctgtcagactcatcgccgttgattccaaaaatttccatgtttttgcagatttgtaattcattatattatatagtcaattgtgtatccttcattcttaggcaggtttatttctcctgtaagcttgtattctctctctctttgtcttaccattagagcctaaataaataaatcaagttcc

SEQ ID NO: 24807 - protein, 442 aa, Arabidopsis thaliana
  peptide (1)..(442): Ceres Seq. ID no. 12340242
MTATEAKNRKINVGDGDDVVDIEIPDTAHQISSDSWFQVAFVLTTGINSAYVLGYSGTIMVPLGWIGGVVGLLIATAISLYTNTLIAKLHEFGGRRHIRYRDLAGFIYGRKAYHLTWGLQYVNLFMINCGFIILAGSALKAVYVLFRDDHTMKLPHFIAIAGLICAIFAIGIPHLSALGVWLGVSTFLSLIYIVVAIVLSVRDGVKTPSRDYEIQGSSLSKLFTITGAAANLVFAFNTGMLPEIQATVRQPVVKNMMKALYFQFTAGVLPMYAVTFIGYWAYGSSTSTYLLNSVNGPLWVKALANVSAILQSVISLHIFASPTYEYMDTKYGIKGNPFAIKNLLFRIMARGGYIAVSTLISALLPFLGDFMSLTGAVSTFPLTFILANHMYYKAKNNKLNAMQKLWHWLNVVFFSLMSVAAAIAAVRLIAVDSKNFHVFADL

SEQ ID NO: 24808 - protein, 383 aa, Arabidopsis thaliana
  peptide (1)..(383): Ceres Seq. ID no. 12340243
MVPLGWIGGVVGLLIATAISLYTNTLIAKLHEFGGRRHIRYRDLAGFIYGRKAYHLTWGLQYVNLFMINCGFIILAGSALKAVYVLFRDDHTMKLPHFIAIAGLICAIFAIGIPHLSALGVWLGVSTFLSLIYIVVAIVLSVRDGVKTPSRDYEIQGSSLSKLFTITGAAANLVFAFNTGMLPEIQATVRQPVVKNMMKALYFQFTAGVLPMYAVTFIGYWAYGSSTSTYLLNSVNGPLWVKALANVSAILQSVISLHIFASPTYEYMDTKYGIKGNPFAIKNLLFRIMARGGYIAVSTLISALLPFLGDFMSLTGAVSTFPLTFILANHMYYKAKNNKLNAMQKLWHWLNVVFFSLMSVAAAIAAVRLIAVDSKNFHVFADL

SEQ ID NO: 24809 - protein, 317 aa, Arabidopsis thaliana
  peptide (1)..(317): Ceres Seq. ID no. 12340244
MINCGFIILAGSALKAVYVLFRDDHTMKLPHFIAIAGLICAIFAIGIPHLSALGVWLGVSTFLSLIYIVVAIVLSVRDGVKTPSRDYEIQGSSLSKLFTITGAAANLVFAFNTGMLPEIQATVRQPVVKNMMKALYFQFTAGVLPMYAVTFIGYWAYGSSTSTYLLNSVNGPLWVKALANVSAILQSVISLHIFASPTYEYMDTKYGIKGNPFAIKNLLFRIMARGGYIAVSTLISALLPFLGDFMSLTGAVSTFPLTFILANHMYYKAKNNKLNAMQKLWHWLNVVFFSLMSVAAAIAAVRLIAVDSKNFHVFADL

SEQ ID NO: 24810 - DNA, 1386 bp, Arabidopsis thaliana
  misc_feature (1)..(1386): Ceres Seq. ID no. 12738842
  misc_feature (1)..(1386): Ortholog of  Ceres SEQ ID NO 14308813 as cited in SEQ ID NO 55485
  misc_feature (1)..(1386): Ortholog of  Ceres SEQ ID NO 13590394 as cited in SEQ ID NO 66581
attttctctacttgtccacttttctacagccgcatcatccttctcccttgtgcgatatcgtttgcgtgagatttgtctgaaaagtagctaaccatgggtaaagagaagtttcacatcaacattgtggtcattggccacgtcgattctggaaagtcgacaaccactggacacttgatctacaagttgggtggtattgacaagcgtgtgatcgagaggttcgagaaggaggctgctgagatgaacaagaggtccttcaagtacgcatgggtgttggacaaacttaaggctgagcgtgagcgtggtatcaccattgacattgctctctggaagttcgagaccaccaagtactactgcactgtcattgatgctcctggtcatcgtgatttcatcaagaacatgatcactggtacctcccaggctgattgtgctgtccttatcatcgactccaccactggtggttttgaggctggtatctccaaggatggtcagacccgtgagcacgctctccttgctttcacccttggtgtcaagcagatgatctgctgttgtaacaagatggatgccactacccccaagtactccaaggccaggtacgatgaaatcatcaaggaggtgtcttcctacttgaagaaggttggttacaaccccgacaaaatcccatttgtgcccatctctggatttgagggtgacaacatgattgagaggtccaccaaccttgactggtacaagggaccaactctccttgaggctcttgaccagatcaacgagcccaagaggccgtcagacaagccccttcgtctcccacttcaggatgtctacaagattggtggtattggaacggtgccattgggacgtgttgagactggtatgatcaagcctggtatggttgtgacctttgctcccacaggattgaccactgaggtcaagtctgttgagatgcaccacgagtctcttcttgaggcacttccaggtgacaacgttgggttcaatgttaagaatgttgccgtgaaggatcttaagagagggtacgtcgcatccaactccaaggatgaccctgccaagggtgctgctaacttcacctcccaggtcatcatcatgaaccaccctggtcagattggtaacggttacgccccagtcttggattgccacacctctcacattgcagtcaagttctctgagatcttgaccaagattgacaggcgttctggtaaggagattgagaaggagcccaaattcttgaagaatggtgatgctggtatggtgaagatgactccaaccaagcccatggttgtggagaccttctctgagtacccaccacttggacgtttcgctgttagggacatgaggcagactgttgcagtcggtgttatcaagagtgttgacaag

SEQ ID NO: 24811 - protein, 431 aa, Arabidopsis thaliana
  peptide (1)..(431): Ceres Seq. ID no. 12738843
MGKEKFHINIVVIGHVDSGKSTTTGHLIYKLGGIDKRVIERFEKEAAEMNKRSFKYAWVLDKLKAERERGITIDIALWKFETTKYYCTVIDAPGHRDFIKNMITGTSQADCAVLIIDSTTGGFEAGISKDGQTREHALLAFTLGVKQMICCCNKMDATTPKYSKARYDEIIKEVSSYLKKVGYNPDKIPFVPISGFEGDNMIERSTNLDWYKGPTLLEALDQINEPKRPSDKPLRLPLQDVYKIGGIGTVPLGRVETGMIKPGMVVTFAPTGLTTEVKSVEMHHESLLEALPGDNVGFNVKNVAVKDLKRGYVASNSKDDPAKGAANFTSQVIIMNHPGQIGNGYAPVLDCHTSHIAVKFSEILTKIDRRSGKEIEKEPKFLKNGDAGMVKMTPTKPMVVETFSEYPPLGRFAVRDMRQTVAVGVIKSVDK

SEQ ID NO: 24812 - protein, 383 aa, Arabidopsis thaliana
  peptide (1)..(383): Ceres Seq. ID no. 12738844
MNKRSFKYAWVLDKLKAERERGITIDIALWKFETTKYYCTVIDAPGHRDFIKNMITGTSQADCAVLIIDSTTGGFEAGISKDGQTREHALLAFTLGVKQMICCCNKMDATTPKYSKARYDEIIKEVSSYLKKVGYNPDKIPFVPISGFEGDNMIERSTNLDWYKGPTLLEALDQINEPKRPSDKPLRLPLQDVYKIGGIGTVPLGRVETGMIKPGMVVTFAPTGLTTEVKSVEMHHESLLEALPGDNVGFNVKNVAVKDLKRGYVASNSKDDPAKGAANFTSQVIIMNHPGQIGNGYAPVLDCHTSHIAVKFSEILTKIDRRSGKEIEKEPKFLKNGDAGMVKMTPTKPMVVETFSEYPPLGRFAVRDMRQTVAVGVIKSVDK

SEQ ID NO: 24813 - protein, 330 aa, Arabidopsis thaliana
  peptide (1)..(330): Ceres Seq. ID no. 12738845
MITGTSQADCAVLIIDSTTGGFEAGISKDGQTREHALLAFTLGVKQMICCCNKMDATTPKYSKARYDEIIKEVSSYLKKVGYNPDKIPFVPISGFEGDNMIERSTNLDWYKGPTLLEALDQINEPKRPSDKPLRLPLQDVYKIGGIGTVPLGRVETGMIKPGMVVTFAPTGLTTEVKSVEMHHESLLEALPGDNVGFNVKNVAVKDLKRGYVASNSKDDPAKGAANFTSQVIIMNHPGQIGNGYAPVLDCHTSHIAVKFSEILTKIDRRSGKEIEKEPKFLKNGDAGMVKMTPTKPMVVETFSEYPPLGRFAVRDMRQTVAVGVIKSVDK

SEQ ID NO: 24814 - DNA, 1319 bp, Arabidopsis thaliana
  misc_feature (1)..(1319): Ceres Seq. ID no. 13491755
  misc_feature (1)..(1319): Ortholog of  Ceres SEQ ID NO 14311493 as cited in SEQ ID NO 51440
  misc_feature (1)..(1319): Ortholog of  Ceres SEQ ID NO 15177312 as cited in SEQ ID NO 52762
ccctctcccccaatttcctcacttctctctctctctcttcataatcttttcattgatcatcgaccaaccaaaaacaaaaaaaactcaaaaaaatccaaaaaaatcagatctttgaaagcttttcttttgtaacactcgaaaaatggatccgtcctgtgcaaactcagtgaacggattctactcatttctaaacagatcaatggaagatctcgaaagagtttatctttcaaacaatttcatgtccgtacacttcttacagagagctctctgtcttctccgtacctctcactctcatctcactctcttagttcaaaaacttcaacttcccgtcggtgacaaatggctcgatgagtatatggacgaaagctccaaactttgggaagcttgtctcgtcatcaaatccgccgtctcctccgtcgaaaacttctcctccgccggaatttcgatcgcttccaccctcgaccgtcgtctctctcctcagctttctcgtcaggtgataagggcgatatcaggatgtagaagagaagcgatagggatagaggaagaaaacagagcattaatggagaacagagttcaaaggtttccgttttggtcggaacaaacgtcggcgacggcgatggagtcgtcgacgaagttacaaaacgggttcagtggttttcgcggcgtgctttacgcgacgaggaacatgagttcgcttctccttatggttttaatgaacggtctcgtctactgttttcccggagacgcggcaacgcaaacgcagacgcagataacgcaaacgcagagtcaagtcggaggtttcgccggagcaatggggaggttgcagcagagagtggcggctgaggttgggaggatggggataaggaaaggaatattgatgcacgagtatcgccggagcaaagcggcgttggaggagcttaaagcggagctggagcggcggttctgcggtggcggtggtggtgggggagagagggaggaggaggaggaggacgagagggagctgagagagagagttgagaatctgaaagggtattttggtaatttaaggaatgggacagagagtatagtggcgcaaatcgatgatttcttcgatgagattgttgaaggaaggaaaaagcttttggatttctgcagccatagatgatgaaatatcaaaagctgacattttgttttttatgtttacatgaaaaaaaaaaaaaaaagttgggttaggctttaggctctagatgaatcagttggtagggagttgttgtaattttttcttttttactttgttgttatgaaaaaaaataatttgaaatttgagaatttttgtcaag

SEQ ID NO: 24815 - protein, 333 aa, Arabidopsis thaliana
  peptide (1)..(333): Ceres Seq. ID no. 13491756
MDPSCANSVNGFYSFLNRSMEDLERVYLSNNFMSVHFLQRALCLLRTSHSHLTLLVQKLQLPVGDKWLDEYMDESSKLWEACLVIKSAVSSVENFSSAGISIASTLDRRLSPQLSRQVIRAISGCRREAIGIEEENRALMENRVQRFPFWSEQTSATAMESSTKLQNGFSGFRGVLYATRNMSSLLLMVLMNGLVYCFPGDAATQTQTQITQTQSQVGGFAGAMGRLQQRVAAEVGRMGIRKGILMHEYRRSKAALEELKAELERRFCGGGGGGGEREEEEEDERELRERVENLKGYFGNLRNGTESIVAQIDDFFDEIVEGRKKLLDFCSHR

SEQ ID NO: 24816 - protein, 314 aa, Arabidopsis thaliana
  peptide (1)..(314): Ceres Seq. ID no. 13491757
MEDLERVYLSNNFMSVHFLQRALCLLRTSHSHLTLLVQKLQLPVGDKWLDEYMDESSKLWEACLVIKSAVSSVENFSSAGISIASTLDRRLSPQLSRQVIRAISGCRREAIGIEEENRALMENRVQRFPFWSEQTSATAMESSTKLQNGFSGFRGVLYATRNMSSLLLMVLMNGLVYCFPGDAATQTQTQITQTQSQVGGFAGAMGRLQQRVAAEVGRMGIRKGILMHEYRRSKAALEELKAELERRFCGGGGGGGEREEEEEDERELRERVENLKGYFGNLRNGTESIVAQIDDFFDEIVEGRKKLLDFCSHR

SEQ ID NO: 24817 - protein, 301 aa, Arabidopsis thaliana
  peptide (1)..(301): Ceres Seq. ID no. 13491758
MSVHFLQRALCLLRTSHSHLTLLVQKLQLPVGDKWLDEYMDESSKLWEACLVIKSAVSSVENFSSAGISIASTLDRRLSPQLSRQVIRAISGCRREAIGIEEENRALMENRVQRFPFWSEQTSATAMESSTKLQNGFSGFRGVLYATRNMSSLLLMVLMNGLVYCFPGDAATQTQTQITQTQSQVGGFAGAMGRLQQRVAAEVGRMGIRKGILMHEYRRSKAALEELKAELERRFCGGGGGGGEREEEEEDERELRERVENLKGYFGNLRNGTESIVAQIDDFFDEIVEGRKKLLDFCSHR

SEQ ID NO: 24818 - DNA, 1498 bp, Arabidopsis thaliana
  misc_feature (1)..(1498): Ceres Seq. ID no. 13487577
  misc_feature (1)..(1498): Ortholog of  Ceres SEQ ID NO 13597334 as cited in SEQ ID NO 64244
tggcccagaattaaacgcaatccacttcaatccaaaatcccatactaaattaaaaccaacacacaggaagaaagaagaaacctctcatcttcccctctcttctgttgaagaaagcttaaacctttctgggtttcttttaactatggcgacaagggttagtttcttcttagctctggtaatgacggtggtgattcttgctccttctgtcgtctctggagaaaatgggttttccgatcttaaaatccgtactcacttgaaacgactcaacaagccagctctcaaatcgattaagagcccagatggagatatgattgactgtgttccaatcactgaccaaccagcttttgctcatcctctgctcattaatcacactgtccagatgtggccaagtttgaacccagaaagtgtatttagtgagagtaaagtttcatcaaaaaccaagaatcagcagtctaatgctatacatcagctttggcatgtgaatgggaaatgtccaaagaacacaattcccatcagaagaacgagaagacaagatctttacagagcgagttccgttgagaattacggtatgaagaatcagaagagtatccctaaacctaaatcttctgagccacctaatgtccttacacaaaatggtcatcagcacgcgataatgtatgtcgaagatggggttttctacggggctaaagcgaagataaatgtatggaagccggatgttgaaatgcctaatgagtttagcttagctcagatttgggttttaggtggaaatttcaactctgatcttaatagtattgaagctggctggcaggtcagcccacaattgtatggtgataataggaccagactcttcacttattggactagtgatgcataccaaggcacaggctgctataatcttctatgctcaggatttgttcaaatcaatagagaaatcgcaatgggtggatcaatctctcctttatcaaactatggaaactctcaatatgacatcaccatactcatctggaaggatccaaaagaaggacattggtggttacagtttggagagaaatacataataggatactggccagcttcactcttctcttacttatcagaaagtgcatcgatgatcgaatggggaggcgaagtggttaactcgcagtccgaggaaggacaacacacaaccactcagatgggaagtgggaggtttgcagaggaaggttggggaaaagcgagttacttcaagaacgttcaagtagttgatggatcgaatgaactgagaaacccggagaatcttcaagtgtttactgatcaagagaactgttacaatgtgaaaagtgggaatggaggttcttggggaagttacttctactatggtggtcctggtcgaaaccctaattgcccttaaagatttggtcgacttactcacattgcagatcattccaaatcaattgtataaaaaacatataatatatatatatacacattcttaagtatattattaatttcaggtttg

SEQ ID NO: 24819 - protein, 462 aa, Arabidopsis thaliana
  peptide (1)..(462): Ceres Seq. ID no. 13487578
GPELNAIHFNPKSHTKLKPTHRKKEETSHLPLSSVEESLNLSGFLLTMATRVSFFLALVMTVVILAPSVVSGENGFSDLKIRTHLKRLNKPALKSIKSPDGDMIDCVPITDQPAFAHPLLINHTVQMWPSLNPESVFSESKVSSKTKNQQSNAIHQLWHVNGKCPKNTIPIRRTRRQDLYRASSVENYGMKNQKSIPKPKSSEPPNVLTQNGHQHAIMYVEDGVFYGAKAKINVWKPDVEMPNEFSLAQIWVLGGNFNSDLNSIEAGWQVSPQLYGDNRTRLFTYWTSDAYQGTGCYNLLCSGFVQINREIAMGGSISPLSNYGNSQYDITILIWKDPKEGHWWLQFGEKYIIGYWPASLFSYLSESASMIEWGGEVVNSQSEEGQHTTTQMGSGRFAEEGWGKASYFKNVQVVDGSNELRNPENLQVFTDQENCYNVKSGNGGSWGSYFYYGGPGRNPNCP

SEQ ID NO: 24820 - protein, 415 aa, Arabidopsis thaliana
  peptide (1)..(415): Ceres Seq. ID no. 13487579
MATRVSFFLALVMTVVILAPSVVSGENGFSDLKIRTHLKRLNKPALKSIKSPDGDMIDCVPITDQPAFAHPLLINHTVQMWPSLNPESVFSESKVSSKTKNQQSNAIHQLWHVNGKCPKNTIPIRRTRRQDLYRASSVENYGMKNQKSIPKPKSSEPPNVLTQNGHQHAIMYVEDGVFYGAKAKINVWKPDVEMPNEFSLAQIWVLGGNFNSDLNSIEAGWQVSPQLYGDNRTRLFTYWTSDAYQGTGCYNLLCSGFVQINREIAMGGSISPLSNYGNSQYDITILIWKDPKEGHWWLQFGEKYIIGYWPASLFSYLSESASMIEWGGEVVNSQSEEGQHTTTQMGSGRFAEEGWGKASYFKNVQVVDGSNELRNPENLQVFTDQENCYNVKSGNGGSWGSYFYYGGPGRNPNCP

SEQ ID NO: 24821 - protein, 403 aa, Arabidopsis thaliana
  peptide (1)..(403): Ceres Seq. ID no. 13487580
MTVVILAPSVVSGENGFSDLKIRTHLKRLNKPALKSIKSPDGDMIDCVPITDQPAFAHPLLINHTVQMWPSLNPESVFSESKVSSKTKNQQSNAIHQLWHVNGKCPKNTIPIRRTRRQDLYRASSVENYGMKNQKSIPKPKSSEPPNVLTQNGHQHAIMYVEDGVFYGAKAKINVWKPDVEMPNEFSLAQIWVLGGNFNSDLNSIEAGWQVSPQLYGDNRTRLFTYWTSDAYQGTGCYNLLCSGFVQINREIAMGGSISPLSNYGNSQYDITILIWKDPKEGHWWLQFGEKYIIGYWPASLFSYLSESASMIEWGGEVVNSQSEEGQHTTTQMGSGRFAEEGWGKASYFKNVQVVDGSNELRNPENLQVFTDQENCYNVKSGNGGSWGSYFYYGGPGRNPNCP

SEQ ID NO: 24822 - DNA, 1248 bp, Arabidopsis thaliana
  misc_feature (1)..(1248): Ceres Seq. ID no. 12370355
  misc_feature (1)..(1248): Ortholog of  Ceres SEQ ID NO 15169053 as cited in SEQ ID NO 53926
acacaaaaaaaaagctgaaacaagagttcgagaaaaatttcgattctcttgctcgtaaaagcttcttttgattctctttgactctgttttgtggatagctcctgaagaagaagaagatgatggtagtgaacagctttgatctatggcaaaaagatgttttcttctctgcagctgaagaggttcaaaaatctacagatataatggagtctgcttatagattgtggattagagagaagaaagatgagatttgtaaggaacttcaagcagctttaggtacagctaaatggcagttggaggagtttgagaaggcagtgagattgagtcataaacggtgtggggatgatgattcttcatccacacggcataaacagtttgttaccgctattgaaaaccagattcatcgcgtagaaacttctctgcaagaagcttatagtgaaaatgggaaaaagcctctccgttgggttgatcttaatgaagaagagcgtgatgacttagcaatgtttctctctggatcttctcgaacttcacagagttttagtggtgagagcagcatcaagtcgagagagtctactaatagttctctagttgaaaacgttatggaagtttcagctaaagtaacattcaagaaagctaaagtttatggtgatggctctgagtgtgtcatagacattgaagaaagagtgacacctggccaagcagagaaatcagttgggctgagaagaatatggagttcaccaaatttcaattctttgagaattatagttcctggtggtgataatgaagaagaaaaggagacattggtggcacaaatagaagcgacgcctaaagttaaaggaactaagtctgtattgtggatgcagagacttcctgatcataatcagctctttgacaagaccggttgctttcaaaatccgatacgcttaccgtttaatcacccgatcaagtttattgtttccttaatgctaatggtgtttctactattacccttcgtagtgtatttgtcttgagaattttaccacggttcgaaactgtcaagaagctgctaaagagatcagctttcgcgtctaatggttaggattcataatcccacaagaacaaacagagattaaaaagctttacatatgttacttttaacttgttgctttggttcttcagggaacgtatagaaacattgaaacttgtaagattaagtaaagggattagagtttatattacggctttggctgccgttgataaagatggaaatgc

SEQ ID NO: 24823 - protein, 296 aa, Arabidopsis thaliana
  peptide (1)..(296): Ceres Seq. ID no. 12370356
MMVVNSFDLWQKDVFFSAAEEVQKSTDIMESAYRLWIREKKDEICKELQAALGTAKWQLEEFEKAVRLSHKRCGDDDSSSTRHKQFVTAIENQIHRVETSLQEAYSENGKKPLRWVDLNEEERDDLAMFLSGSSRTSQSFSGESSIKSRESTNSSLVENVMEVSAKVTFKKAKVYGDGSECVIDIEERVTPGQAEKSVGLRRIWSSPNFNSLRIIVPGGDNEEEKETLVAQIEATPKVKGTKSVLWMQRLPDHNQLFDKTGCFQNPIRLPFNHPIKFIVSLMLMVFLLLPFVVYLS

SEQ ID NO: 24824 - protein, 295 aa, Arabidopsis thaliana
  peptide (1)..(295): Ceres Seq. ID no. 12370357
MVVNSFDLWQKDVFFSAAEEVQKSTDIMESAYRLWIREKKDEICKELQAALGTAKWQLEEFEKAVRLSHKRCGDDDSSSTRHKQFVTAIENQIHRVETSLQEAYSENGKKPLRWVDLNEEERDDLAMFLSGSSRTSQSFSGESSIKSRESTNSSLVENVMEVSAKVTFKKAKVYGDGSECVIDIEERVTPGQAEKSVGLRRIWSSPNFNSLRIIVPGGDNEEEKETLVAQIEATPKVKGTKSVLWMQRLPDHNQLFDKTGCFQNPIRLPFNHPIKFIVSLMLMVFLLLPFVVYLS

SEQ ID NO: 24825 - protein, 268 aa, Arabidopsis thaliana
  peptide (1)..(268): Ceres Seq. ID no. 12370358
MESAYRLWIREKKDEICKELQAALGTAKWQLEEFEKAVRLSHKRCGDDDSSSTRHKQFVTAIENQIHRVETSLQEAYSENGKKPLRWVDLNEEERDDLAMFLSGSSRTSQSFSGESSIKSRESTNSSLVENVMEVSAKVTFKKAKVYGDGSECVIDIEERVTPGQAEKSVGLRRIWSSPNFNSLRIIVPGGDNEEEKETLVAQIEATPKVKGTKSVLWMQRLPDHNQLFDKTGCFQNPIRLPFNHPIKFIVSLMLMVFLLLPFVVYLS

SEQ ID NO: 24826 - DNA, 1216 bp, Arabidopsis thaliana
  misc_feature (1)..(1216): Ceres Seq. ID no. 12726208
  misc_feature (1)..(1216): Ortholog of  Ceres SEQ ID NO 15177104 as cited in SEQ ID NO 56048
aacaatgactggattactcacctactcgagagtggtttagcttttttgtaccgtacatcttcttcccagctgaatcaagttttcttctttctagaaacatggctgaggcttctgatttgttggaatggcctaagaaggataaccgtcgttttctccatgttgtctaccgcgttggtgatcttgatcgcaccattgagttttacactgaggtctttggtatgaagctgttgaggaaaagagatatccctgaggagaagtattctaatgcttttcttggttttggacctgaaacatctaactttgttgtggagctcacatataactatggtgttagctcatatgatattggaactggctttgggcattttgccatttcaactcaagatgtttccaaactggttgagaacgtccgtgccaagggtggaaatgtgactagggaacctggtccagtcaaaggtggaggcagtgtcattgcgtttgtgaaggaccctgatggctacacttttgagctcatccagagaggtccaactcctgaacctttctgccaagtcatgcttcgtgttggtgatctcgaccgtgccatcaaattctatgaaaaggccctcgggatgagactcttgagaaagattgagagacctgagtacaagtacaccataggcatgatggggtatgctgaagaatacgagtcgatagttttggagctgacctataactacgacgtgactgagtacacaaagggcaatgcatatgcacagattgcaataggcacagatgatgtgtacaaaagcggtgaagttattaagatagtcaaccaagagctaggaggaaagatcactagagaagccggacctcttcctggactcggcaccaagattgtctcattccttgatccagatggctggaaaacggttttggtggacaacaaagattttctcaaggaactggaatgagaagagcgatgaatgaaggtcgagatcacaaaaccataataataaaaatgtgatcataaaataaaaggaagacttagagtttgatctaaaataagaagatgtggtttagtttgtgtcgtgctatgtgtgtgtgctcgtttcttttgtctttgagcttaaaagttaaaactctagtctatatggacctgaataaaaatatttccaccaccttgaggttttggtgtttgcggttatggacggtttattgaatgtaatattttcgtacc

SEQ ID NO: 24827 - protein, 283 aa, Arabidopsis thaliana; identical to SEQ ID NO: 22714
  peptide (1)..(283): Ceres Seq. ID no. 12726209

SEQ ID NO: 24828 - protein, 243 aa, Arabidopsis thaliana; identical to SEQ ID NO: 22715
  peptide (1)..(243): Ceres Seq. ID no. 12726210

SEQ ID NO: 24829 - DNA, 1032 bp, Arabidopsis thaliana
  misc_feature (1)..(1032): Ceres Seq. ID no. 12385678
  misc_feature (1)..(1032): Ortholog of  Ceres SEQ ID NO 15178299 as cited in SEQ ID NO 0
  misc_feature (1)..(1032): Ortholog of  Ceres SEQ ID NO 15226331 as cited in SEQ ID NO 0
aacctcccttaggcactttctacagagcagctaatcaaaaaaaaaaaaaaaaaaccttgttcttctcttcttcttcttcctctctcacaaatttgactttcatagaagaaaaaaatggtgactacatcgtcacgaaccaagtcaaacggaccggtgcttcgttcacaatcaccgtcaggtcgattttgcggtggttactcaagagccgttccgtcatcttcttcatcagctttcgcttcatcaacgagttctagcttttcatctccgtcgtcagcttttttcagcaatcaccgtcatcacgagagcaatcacagtcaccaccgatctgcgtcaccgactcgtgtgaatctctacacagcgcaaccgatgtctcagtcgtttcgttactctctcgatagcagatctatatctccgactaacaaatcgatctccgtttcgaagaatcagccaccgagccataatcacaagatctcaaggagatgtatgtgttctccgacgacgcatccaggatctttcagatgcagtctacataagaacgtagcgaatccacatggtcaaggtacagcttcgtatacaacgaatggattgaatatgcgtcgatctgcgatgactaattcgctggtgagaattggtggtgttgaaggagagtgggtgagaagagctttgactactttgattcgaccttcttcgcatcatctgaaaagacgagctgcttatcagccacgtcctagtcgactctcaatcatggcgaaagctgatgagaattgattttgatctggattttggttaattcaggtttgttttgtttgttgttcttctctctttaaacgaaaaccaccacaggatttagtagatccggcgaagaagtcttgttatgaagctaaggtctgcgaagaagaatcatcctcgagaaatcgagattttgtaaaaggaagaaacacacacctatcataatttttttgttgttgggtgaaagaagatgctagaatgcattgtacatacgttctcttttttactgtttttgttgctccc

SEQ ID NO: 24830 - protein, 217 aa, Arabidopsis thaliana; identical to SEQ ID NO: 22246
  peptide (1)..(217): Ceres Seq. ID no. 12385679

SEQ ID NO: 24831 - protein, 133 aa, Arabidopsis thaliana; identical to SEQ ID NO: 22247
  peptide (1)..(133): Ceres Seq. ID no. 12385680

SEQ ID NO: 24832 - DNA, 1205 bp, Arabidopsis thaliana
  misc_feature (1)..(1205): Ceres Seq. ID no. 12396070
  misc_feature (1)..(1205): Ortholog of  Ceres SEQ ID NO 14307351 as cited in SEQ ID NO 54892
atctctcttcttctctctctgcttcttcttgtgggacaaaccctaattattttacttcgatctctctccacttttcccgctcaatcatctgatctttccctctctcagcaatgcatgatcttcgattttctatcagtgttcaaagctgaaaaaaatcgaactgggtctgttgatttcttcaggtctaaaatcagattagattagagaagaagaagaagaatgctggaagctgtagatagctcaggagtggtgaatggaggattcccgcagattcagagcttttacggcgattgcagtagtgaagaagagttatcggtattgccacgtcatacaaaagtggtggtcaccggaaacaaccggacgaaatcggtgcttgttggtcttcaaggtgttgtcaaaaaagctgtcggtctcggtggttggcattggctggttttgacaaatggaatagaagtaaagttgcagaggaatgcgcttagtgtccttgaacctcctactggaaacgaagaagacgatgatcttgatttcgaaaacacacagaggaatggctctgatatgacatctgaggacacactgaagcctcataagtctaagctaagagggcagagatcatctcggtcatctcacaagacgatgagcaggtctctatcatctgactcgcaatcaaaaagttcgggttttactcctcctgaaaacatgaaggttgatcttagcaaattggaaatgcctgctttactgaattattggcgacattttaaccttgtggatgcaattccaaatccatcaaaggagcaactaattgacattgttcaaaggcacttcatgtctcagcaaatggatgagcttcaggttattgtggggtttgtccaagctgcaaagagaatgaagaaggcttgcaagtttcaatccaaagaatccagaaacactgatcttaactgcatcagctaaagaaaagccctgactcttaacaaatcctgtatgtacggtacatcaacttgtttaaccatttgtggcttgctaagtttagttcttctagtgatgtttggctaaagggtagatgttgtttcttctttgcttctgttgtttagccaatgtaagtaccatcaaaaaacccaaataactctctaaagctccctattggaaactatcttgtctgatacgatctggagtgaccggtatgttgttagaatgtaaatatgtttggc

SEQ ID NO: 24833 - protein, 242 aa, Arabidopsis thaliana
  peptide (1)..(242): Ceres Seq. ID no. 12396071
MLEAVDSSGVVNGGFPQIQSFYGDCSSEEELSVLPRHTKVVVTGNNRTKSVLVGLQGVVKKAVGLGGWHWLVLTNGIEVKLQRNALSVLEPPTGNEEDDDLDFENTQRNGSDMTSEDTLKPHKSKLRGQRSSRSSHKTMSRSLSSDSQSKSSGFTPPENMKVDLSKLEMPALLNYWRHFNLVDAIPNPSKEQLIDIVQRHFMSQQMDELQVIVGFVQAAKRMKKACKFQSKESRNTDLNCIS

SEQ ID NO: 24834 - protein, 130 aa, Arabidopsis thaliana
  peptide (1)..(130): Ceres Seq. ID no. 12396072
MTSEDTLKPHKSKLRGQRSSRSSHKTMSRSLSSDSQSKSSGFTPPENMKVDLSKLEMPALLNYWRHFNLVDAIPNPSKEQLIDIVQRHFMSQQMDELQVIVGFVQAAKRMKKACKFQSKESRNTDLNCIS

SEQ ID NO: 24835 - DNA, 1285 bp, Arabidopsis thaliana
  misc_feature (1)..(1285): Ceres Seq. ID no. 12561971
  misc_feature (1)..(1285): Ortholog of  Ceres SEQ ID NO 15176230 as cited in SEQ ID NO 58796
  misc_feature (1)..(1285): Ortholog of  Ceres SEQ ID NO 14308156 as cited in SEQ ID NO 59006
  misc_feature (1)..(1285): Ortholog of  Ceres SEQ ID NO 13596321 as cited in SEQ ID NO 67976
gcagacgaatgtttttggtttcgagaatttgctgaaatctattcaacgtatacagaggctggagctggggaagaaaaggattgtctatggagggagacgtcggaataggtttggtatgccagaatactatggatgggaaggcgagtaatggaaatggtttagagaagactgtaccttcttgttgccttaaggctatggcatgtgtacctgaggatgatgctaagtgtcactccactgttgtttctgggtggttttcggaacctcaccctcgctctgggaaaaaaggcggcaaagcagtctatttcaacaaccctatgtggccaggagaagcacactcactgaaagttgagaaagttctgttcaaagacaagtcggattttcaggaagtcctagtgttcgagtcagccacgtacggaaaggtgcttgttctagatggtatcgtacagctgaccgaaaaagatgaatgtgcatatcaggagatgatagcccatctgcctttatgctctatatcttcccctaaaaatgttcttgttgttggtggaggtgatggtggtgttcttcgagagatttctcgccatagttctgttgaggttattgatatctgtgagatagacaagatggttatagatgtgtctaagaagttcttccccgagttagcggttgggtttgacgatcctcgtgttcaacttcacattggtgatgctgctgagttcctccgtaaatcccctgaagggaagtatgatgccatcattgttgattcttcagatcccgtaggtcctgctcttgcgcttgttgagaagcctttcttcgagacactggctagagcgttgaagcctgggggagttctttgtaacatggcagaaagtatgtggctccatactcatcttattgaagatatgatctccatttgccgtcaaacattcaaaagtgttcactatgcgtggagcagcgtccccacatatccaagcggcgtgattggtttcgtcttgtgctctactgaaggaccagctgttgacttcaagaacccaatcaaccctattgagaaactagacggtgcgatgacccataaaagagaattgaagttctataactctgatatgcacagagccgcatttgctttgcccacattcctgcggagagaagtagcttcacttctggcttcttgacttctgtttggctctaccatatccctcatatcaaactttgtagaactcttgaagaggaataataaatcattgaaggctttgtatctctaagtttactcctttataaaaagacttatatt

SEQ ID NO: 24836 - protein, 359 aa, Arabidopsis thaliana
  peptide (1)..(359): Ceres Seq. ID no. 12561972
MEGDVGIGLVCQNTMDGKASNGNGLEKTVPSCCLKAMACVPEDDAKCHSTVVSGWFSEPHPRSGKKGGKAVYFNNPMWPGEAHSLKVEKVLFKDKSDFQEVLVFESATYGKVLVLDGIVQLTEKDECAYQEMIAHLPLCSISSPKNVLVVGGGDGGVLREISRHSSVEVIDICEIDKMVIDVSKKFFPELAVGFDDPRVQLHIGDAAEFLRKSPEGKYDAIIVDSSDPVGPALALVEKPFFETLARALKPGGVLCNMAESMWLHTHLIEDMISICRQTFKSVHYAWSSVPTYPSGVIGFVLCSTEGPAVDFKNPINPIEKLDGAMTHKRELKFYNSDMHRAAFALPTFLRREVASLLAS

SEQ ID NO: 24837 - protein, 345 aa, Arabidopsis thaliana
  peptide (1)..(345): Ceres Seq. ID no. 12561973
MDGKASNGNGLEKTVPSCCLKAMACVPEDDAKCHSTVVSGWFSEPHPRSGKKGGKAVYFNNPMWPGEAHSLKVEKVLFKDKSDFQEVLVFESATYGKVLVLDGIVQLTEKDECAYQEMIAHLPLCSISSPKNVLVVGGGDGGVLREISRHSSVEVIDICEIDKMVIDVSKKFFPELAVGFDDPRVQLHIGDAAEFLRKSPEGKYDAIIVDSSDPVGPALALVEKPFFETLARALKPGGVLCNMAESMWLHTHLIEDMISICRQTFKSVHYAWSSVPTYPSGVIGFVLCSTEGPAVDFKNPINPIEKLDGAMTHKRELKFYNSDMHRAAFALPTFLRREVASLLAS

SEQ ID NO: 24838 - protein, 323 aa, Arabidopsis thaliana
  peptide (1)..(323): Ceres Seq. ID no. 12561974
MACVPEDDAKCHSTVVSGWFSEPHPRSGKKGGKAVYFNNPMWPGEAHSLKVEKVLFKDKSDFQEVLVFESATYGKVLVLDGIVQLTEKDECAYQEMIAHLPLCSISSPKNVLVVGGGDGGVLREISRHSSVEVIDICEIDKMVIDVSKKFFPELAVGFDDPRVQLHIGDAAEFLRKSPEGKYDAIIVDSSDPVGPALALVEKPFFETLARALKPGGVLCNMAESMWLHTHLIEDMISICRQTFKSVHYAWSSVPTYPSGVIGFVLCSTEGPAVDFKNPINPIEKLDGAMTHKRELKFYNSDMHRAAFALPTFLRREVASLLAS

SEQ ID NO: 24839 - DNA, 971 bp, Arabidopsis thaliana
  misc_feature (1)..(971): Ceres Seq. ID no. 13486619
  misc_feature (1)..(971): Ortholog of  Ceres SEQ ID NO 15177004 as cited in SEQ ID NO 57554
  misc_feature (1)..(971): Ortholog of  Ceres SEQ ID NO 13662587 as cited in SEQ ID NO 63275
  misc_feature (1)..(971): Ortholog of  Ceres SEQ ID NO 13599500 as cited in SEQ ID NO 0
aaagaaattataactacaaactcttctgtttattattattattatagttagctttttaatataaaacggatattagaattttgtaacaaagaaatcggcgggagtcgtgtgctttagcccaaaaacattggcctcgttgtccaacgtgtgtatttggaggaaaacatcattagagggccacatatacatctctctaattacactttacgaatattaaacacatttaattgtacttaatcctcggcataacacttgtccattaagtcaccatgtacttgctataaatatggtcaagtccagtccataatatatgcatctctgatctttcttggtgagagtaatagacatgggagctcttgattctctttccgagtatatctccgactacttccgcgtcaccagaaaaaggaggaagcggaaagtcatgcagacggtgaatataaaggtgaaaatggactgcgatggttgtgaacgcagagtcaagaacgcggtttcctccatgaaaggtgtgaaatcggtggaggtgaatagaaagatacataaagtgacggtgagtggatacgtggaaccaaagaaggtattaaagagaatcgaaaggacagggaaaaaagcggagatatggccgtacgttccttacaacatggtcgcatatccatacgcggtcggaacttacgacaaaaaagctccggccggttatgtcaggaaatctgagcagtcgcagttgcagctgttgccgggagctcccgagaaccactacatttctctttttagcgacgagaatcccaacgcttgcaccgttatgtaataaataatttactctagtagtattatccacagcatgtaacgtttttatcaagcaattggctctctctctctctctctttttgttatgttaatgcagagaggaagaaccaactatagctagttgtgtaaaaatttcaatatttcaaaataagttagtggaatgtgta

SEQ ID NO: 24840 - protein, 152 aa, Arabidopsis thaliana
  peptide (1)..(152): Ceres Seq. ID no. 13486620
MGALDSLSEYISDYFRVTRKRRKRKVMQTVNIKVKMDCDGCERRVKNAVSSMKGVKSVEVNRKIHKVTVSGYVEPKKVLKRIERTGKKAEIWPYVPYNMVAYPYAVGTYDKKAPAGYVRKSEQSQLQLLPGAPENHYISLFSDENPNACTVM

SEQ ID NO: 24841 - protein, 126 aa, Arabidopsis thaliana
  peptide (1)..(126): Ceres Seq. ID no. 13486621
MQTVNIKVKMDCDGCERRVKNAVSSMKGVKSVEVNRKIHKVTVSGYVEPKKVLKRIERTGKKAEIWPYVPYNMVAYPYAVGTYDKKAPAGYVRKSEQSQLQLLPGAPENHYISLFSDENPNACTVM

SEQ ID NO: 24842 - protein, 117 aa, Arabidopsis thaliana
  peptide (1)..(117): Ceres Seq. ID no. 13486622
MDCDGCERRVKNAVSSMKGVKSVEVNRKIHKVTVSGYVEPKKVLKRIERTGKKAEIWPYVPYNMVAYPYAVGTYDKKAPAGYVRKSEQSQLQLLPGAPENHYISLFSDENPNACTVM

SEQ ID NO: 24843 - DNA, 815 bp, Arabidopsis thaliana
  misc_feature (1)..(815): Ceres Seq. ID no. 13619680
  misc_feature (1)..(815): Ortholog of  Ceres SEQ ID NO 13598227 as cited in SEQ ID NO 61591
  misc_feature (1)..(815): Ortholog of  Ceres SEQ ID NO 12584790 as cited in SEQ ID NO 62648
  misc_feature (1)..(815): Ortholog of  Ceres SEQ ID NO 15178116 as cited in SEQ ID NO 0
gtattcttcgtctttcgtccaccaccatctctattttcttcctttcccctaagtcttggttcttcttctctctaatacgagaagaaaaaggcgaaaacctcgccaatccgattacgcgaaaaatcaaaggtttttggatatggcgtcgaagcggatcttgaaggaattgaaggatctccagaaggatccacctacatcatgtagcgcaggtcctgttgctgaagacatgtttcactggcaggcaacgataatgggtccttcagagagtccttatgctggaggtgttttccttgtaaccatccatttccctccggattacccattcaagcctcctaaggtggcctttaggaccaaggtgttccatcccaacattaacagcaacggtagcatttgcctcgacatcttgaaggagcagtggagtcctgcgctcaccatttccaaggtgctgctatcgatctgttctttgttaaccgatccaaacccggatgatcctttggtgcccgagatagctcacatgtacaagactgacaagaacaagtacgagtccactgcacgaagctggactcagaagtatgccatgggctaaatggaaaatcccacctactaaattatctctttatgaagaaaaaaatctgccttaatttctatgtatgattcgatagacatctctttgtgtccttttaactttctgaagacaggaccaaatgaagtgggtcttgttttaaacgaaacaaaaaaaaacatcatctttgtgaaaactagaatctgatcatcttctgttgtttcttcttgtggtgaaattatgatttgatgtt

SEQ ID NO: 24844 - protein, 148 aa, Arabidopsis thaliana
  peptide (1)..(148): Ceres Seq. ID no. 13619681
MASKRILKELKDLQKDPPTSCSAGPVAEDMFHWQATIMGPSESPYAGGVFLVTIHFPPDYPFKPPKVAFRTKVFHPNINSNGSICLDILKEQWSPALTISKVLLSICSLLTDPNPDDPLVPEIAHMYKTDKNKYESTARSWTQKYAMG

SEQ ID NO: 24845 - protein, 119 aa, Arabidopsis thaliana
  peptide (1)..(119): Ceres Seq. ID no. 13619682
MFHWQATIMGPSESPYAGGVFLVTIHFPPDYPFKPPKVAFRTKVFHPNINSNGSICLDILKEQWSPALTISKVLLSICSLLTDPNPDDPLVPEIAHMYKTDKNKYESTARSWTQKYAMG

SEQ ID NO: 24846 - protein, 111 aa, Arabidopsis thaliana
  peptide (1)..(111): Ceres Seq. ID no. 13619683
MGPSESPYAGGVFLVTIHFPPDYPFKPPKVAFRTKVFHPNINSNGSICLDILKEQWSPALTISKVLLSICSLLTDPNPDDPLVPEIAHMYKTDKNKYESTARSWTQKYAMG

SEQ ID NO: 24847 - DNA, 1265 bp, Arabidopsis thaliana
  misc_feature (1)..(1265): Ceres Seq. ID no. 12321902
  misc_feature (1)..(1265): Ortholog of  Ceres SEQ ID NO 15170760 as cited in SEQ ID NO 52747
  misc_feature (1)..(1265): Ortholog of  Ceres SEQ ID NO 15168549 as cited in SEQ ID NO 56976
  misc_feature (1)..(1265): Ortholog of  Ceres SEQ ID NO 15177588 as cited in SEQ ID NO 60367
attaactatttaatcgtactaataatgattataagcagaattatgtagactatacaaatagtacgtaataccgaaagtacccttggtttatccctggcattacaagggtttcctttttcccctttaaaatggcagaagagatacactgtcgtcgtcacacagcaccacaaactccatagctagctagagagtaaaaagaacaaagatgtcgaaagaagtgagcgaagaaggcaaaacccaccatggaaaagactacgtggatcctccaccagctcctcttctcgacatgggtgagctcaaatcctggtctttctacagagctctcatcgctgagttcatcgctacactcctcttcctctacgtcaccgtcgctactgtcatcggccacaagaagcaaaccggtccttgtgacggcgttggtttacttggtatcgcttgggctttcggtggtatgatcttcgtcctcgtctactgcaccgccggtatctctggtggtcacattaacccagctgtgactttcggtctgttcttggcccgtaaggtctctttggtgcgagctcttggttacatgatagctcagtgtcttggagccatttgtggtgtgggtttcgtgaaagctttcatgaaaactccttacaacactcttggtggaggagctaacaccgtagctgacggttacagcaaaggaactgctctcggagctgagattattggaactttcgtccttgtttacaccgttttctctgcaactgaccctaagagaagcgctcgtgactctcacatccccgttttggctccacttccaattggatttgctgtgttcatggtgcatttggctactatccccattactggaactggtatcaacccagctagaagctttggtgctgctgttatctacaacaacgagaaggcgtgggatgaccaatggatcttttgggttggtccgttcttgggagcactagctgcagcagcttaccaccaatacatattgagagcttcagcaattaaggccttgggctcgttccgaagcaacgcaaccaattaatgaaggctttttttaagataatgtcaagaaacaactttaagatttatatgctttaattattatttgttgttcttttgtgtgtaatgagagagatggtggattgatgttaattatgaaatggctcagtgacttctatttccttctttagtttttgattgtctttgttaatcgtttgcctttggtttctcttagtagttacaaattcatgttttctctt

SEQ ID NO: 24848 - protein, 280 aa, Arabidopsis thaliana
  peptide (1)..(280): Ceres Seq. ID no. 12321903
MSKEVSEEGKTHHGKDYVDPPPAPLLDMGELKSWSFYRALIAEFIATLLFLYVTVATVIGHKKQTGPCDGVGLLGIAWAFGGMIFVLVYCTAGISGGHINPAVTFGLFLARKVSLVRALGYMIAQCLGAICGVGFVKAFMKTPYNTLGGGANTVADGYSKGTALGAEIIGTFVLVYTVFSATDPKRSARDSHIPVLAPLPIGFAVFMVHLATIPITGTGINPARSFGAAVIYNNEKAWDDQWIFWVGPFLGALAAAAYHQYILRASAIKALGSFRSNATN

SEQ ID NO: 24849 - protein, 253 aa, Arabidopsis thaliana
  peptide (1)..(253): Ceres Seq. ID no. 12321904
MGELKSWSFYRALIAEFIATLLFLYVTVATVIGHKKQTGPCDGVGLLGIAWAFGGMIFVLVYCTAGISGGHINPAVTFGLFLARKVSLVRALGYMIAQCLGAICGVGFVKAFMKTPYNTLGGGANTVADGYSKGTALGAEIIGTFVLVYTVFSATDPKRSARDSHIPVLAPLPIGFAVFMVHLATIPITGTGINPARSFGAAVIYNNEKAWDDQWIFWVGPFLGALAAAAYHQYILRASAIKALGSFRSNATN

SEQ ID NO: 24850 - protein, 198 aa, Arabidopsis thaliana
  peptide (1)..(198): Ceres Seq. ID no. 12321905
MIFVLVYCTAGISGGHINPAVTFGLFLARKVSLVRALGYMIAQCLGAICGVGFVKAFMKTPYNTLGGGANTVADGYSKGTALGAEIIGTFVLVYTVFSATDPKRSARDSHIPVLAPLPIGFAVFMVHLATIPITGTGINPARSFGAAVIYNNEKAWDDQWIFWVGPFLGALAAAAYHQYILRASAIKALGSFRSNATN

SEQ ID NO: 24851 - DNA, 967 bp, Arabidopsis thaliana
  misc_feature (1)..(967): Ceres Seq. ID no. 12580012
  misc_feature (1)..(967): Ortholog of  Ceres SEQ ID NO 13598761 as cited in SEQ ID NO 63673
  misc_feature (1)..(967): Ortholog of  Ceres SEQ ID NO 14305455 as cited in SEQ ID NO 0
actcattttactgttaagcaaacacaagataagaagaaacaaacaatggcgatttctttcatttagatattttcctcgattcttagcttctggattttggtgaaaggatttgaaatggcggtgtcgcttttatcgaaattacggtgtataacagtagatgttactggtacacttatagcttacaaaggagagcttggtgattactattgtatggctgctaaagccattggtttgccttgtcctgattataaacgagttcatgaaggttttaaactagcttatacagatatggcacaaaagtatccttgtttcggtttccatgccaaaatgccaaacattgtttggtggaaaacttgtgtgagagattcatttgtcaaggcaggatatgagtatgatgaggagacatttgagaagatatttaggagaatctattcgacgtttggttctgctgcaccttactctgtgtttcaagattctcaaccgtttttaagatgggcacgcaggaaaggtcttatagtcggacttgttagcaatgcggaataccgatatcaagaagttattttaccttccttcggtttgagcaaggcagagtgggattttggtgtattctctggaattgaagggatagagaaaccagatccgaggatttttacgctcgcgctagagagagccgggaataatattgcgcctgaagaggttttgcatattggagacagcatgcgcaaagattatgttccagcaaagagtattgggatgcatgctttgttggttgataggtttaagacggaagctgctaaagactggatagaagctggagccattgtgcttccagatttggttgctgttcaacaacttttggagtctgataagttgaaatgttagaaaacagacctctcttaagtatgaaatctaatgtattgtagtattgcacatttgagtaaaataagtttcaacggcttctttggtt

SEQ ID NO: 24852 - protein, 255 aa, Arabidopsis thaliana
  peptide (1)..(255): Ceres Seq. ID no. 12580013
MAVSLLSKLRCITVDVTGTLIAYKGELGDYYCMAAKAIGLPCPDYKRVHEGFKLAYTDMAQKYPCFGFHAKMPNIVWWKTCVRDSFVKAGYEYDEETFEKIFRRIYSTFGSAAPYSVFQDSQPFLRWARRKGLIVGLVSNAEYRYQEVILPSFGLSKAEWDFGVFSGIEGIEKPDPRIFTLALERAGNNIAPEEVLHIGDSMRKDYVPAKSIGMHALLVDRFKTEAAKDWIEAGAIVLPDLVAVQQLLESDKLKC

SEQ ID NO: 24853 - protein, 223 aa, Arabidopsis thaliana
  peptide (1)..(223): Ceres Seq. ID no. 12580014
MAAKAIGLPCPDYKRVHEGFKLAYTDMAQKYPCFGFHAKMPNIVWWKTCVRDSFVKAGYEYDEETFEKIFRRIYSTFGSAAPYSVFQDSQPFLRWARRKGLIVGLVSNAEYRYQEVILPSFGLSKAEWDFGVFSGIEGIEKPDPRIFTLALERAGNNIAPEEVLHIGDSMRKDYVPAKSIGMHALLVDRFKTEAAKDWIEAGAIVLPDLVAVQQLLESDKLKC

SEQ ID NO: 24854 - protein, 197 aa, Arabidopsis thaliana
  peptide (1)..(197): Ceres Seq. ID no. 12580015
MAQKYPCFGFHAKMPNIVWWKTCVRDSFVKAGYEYDEETFEKIFRRIYSTFGSAAPYSVFQDSQPFLRWARRKGLIVGLVSNAEYRYQEVILPSFGLSKAEWDFGVFSGIEGIEKPDPRIFTLALERAGNNIAPEEVLHIGDSMRKDYVPAKSIGMHALLVDRFKTEAAKDWIEAGAIVLPDLVAVQQLLESDKLKC

SEQ ID NO: 24855 - DNA, 1177 bp, Arabidopsis thaliana
  misc_feature (1)..(1177): Ceres Seq. ID no. 12738459
  misc_feature (1)..(1177): Ortholog of  Ceres SEQ ID NO 13594252 as cited in SEQ ID NO 57528
  misc_feature (1)..(1177): Ortholog of  Ceres SEQ ID NO 14305682 as cited in SEQ ID NO 59267
  misc_feature (1)..(1177): Ortholog of  Ceres SEQ ID NO 13594430 as cited in SEQ ID NO 60181
  misc_feature (1)..(1177): Ortholog of  Ceres SEQ ID NO 13597809 as cited in SEQ ID NO 64598
  misc_feature (1)..(1177): Ortholog of  Ceres SEQ ID NO 14313544 as cited in SEQ ID NO 68424
  misc_feature (1)..(1177): Ortholog of  Ceres SEQ ID NO 12617960 as cited in SEQ ID NO 69051
  misc_feature (1)..(1177): Ortholog of  Ceres SEQ ID NO 13589401 as cited in SEQ ID NO 0
  misc_feature (1)..(1177): Ortholog of  Ceres SEQ ID NO 15179361 as cited in SEQ ID NO 0
aaaaaggtaaaaactttgggaagcagctaaaatactgtgttctttatttcttccatcgaaatcgaaaaaagctaagatctttgcgttttgaaacgatggcggaagaacataagcatgatgaatctgtgatcgctcctgagccagctgttgaggttgtggagagagaatcgttgatggataagatatcggagaagatccatcacggtggtgattcttcttcgtcttcttcatcttctgatgatgaagacgagaagaagaagactaagaagccctcttctccttcgtcttctatgaaatcgaaagtttaccgcttgttcggacgagagcagcctgttcataaggttctcggcggtggaaagccggctgatatattcatgtggaagaacaagaagatgtctggtggtgtacttggtggtgctacagctgcttgggttgtgtttgaattgatggagtaccatcttctcactctgctttgccacgtgatgattgttgttctcgctgtgctgtttttgtggtctaatgccactatgttcattaacaagtccccaccaaagattcctgaagttcatatccctgaagaacctattcttcagcttgcgtctgggctcagaatcgagatcaaccgtggattctcttctctccgtgaaattgcatcaggaagggatctcaagaaattcctcattgctattgccgggttatgggttctctcaatcttgggcggttgcttcaacttcttgacattggcatacatagctcttgtgttgctcttcacggttcctcttgcctacgacaagtatgaagacaaagtcgacccattaggtgagaaagcaatgatcgagctcaagaagcagtatgcagtgttggatgagaaggtgttgagcaagatcccacttgggccgttgaagaacaagaagaaagattaggggtttacacaaggttgtccgtggctagcaaaacgggtgttgtgaaatggtatcgaagtaatgtgttttgggcgtttttttaggtggctctttcggttatgtgaatgaacttggaattttcctgactggtttgttctgttgtttatgtcattgttgatcagcgtcgagggataaaagtagtgatatttcttctctctctaagcctctatataactaagaatttcaagatatttgaattttgcaatctcgtggtc

SEQ ID NO: 24856 - protein, 306 aa, Arabidopsis thaliana
  peptide (1)..(306): Ceres Seq. ID no. 12738460
KGKNFGKQLKYCVLYFFHRNRKKLRSLRFETMAEEHKHDESVIAPEPAVEVVERESLMDKISEKIHHGGDSSSSSSSSDDEDEKKKTKKPSSPSSSMKSKVYRLFGREQPVHKVLGGGKPADIFMWKNKKMSGGVLGGATAAWVVFELMEYHLLTLLCHVMIVVLAVLFLWSNATMFINKSPPKIPEVHIPEEPILQLASGLRIEINRGFSSLREIASGRDLKKFLIAIAGLWVLSILGGCFNFLTLAYIALVLLFTVPLAYDKYEDKVDPLGEKAMIELKKQYAVLDEKVLSKIPLGPLKNKKKD

SEQ ID NO: 24857 - protein, 275 aa, Arabidopsis thaliana
  peptide (1)..(275): Ceres Seq. ID no. 12738461
MAEEHKHDESVIAPEPAVEVVERESLMDKISEKIHHGGDSSSSSSSSDDEDEKKKTKKPSSPSSSMKSKVYRLFGREQPVHKVLGGGKPADIFMWKNKKMSGGVLGGATAAWVVFELMEYHLLTLLCHVMIVVLAVLFLWSNATMFINKSPPKIPEVHIPEEPILQLASGLRIEINRGFSSLREIASGRDLKKFLIAIAGLWVLSILGGCFNFLTLAYIALVLLFTVPLAYDKYEDKVDPLGEKAMIELKKQYAVLDEKVLSKIPLGPLKNKKKD

SEQ ID NO: 24858 - protein, 249 aa, Arabidopsis thaliana
  peptide (1)..(249): Ceres Seq. ID no. 12738462
MDKISEKIHHGGDSSSSSSSSDDEDEKKKTKKPSSPSSSMKSKVYRLFGREQPVHKVLGGGKPADIFMWKNKKMSGGVLGGATAAWVVFELMEYHLLTLLCHVMIVVLAVLFLWSNATMFINKSPPKIPEVHIPEEPILQLASGLRIEINRGFSSLREIASGRDLKKFLIAIAGLWVLSILGGCFNFLTLAYIALVLLFTVPLAYDKYEDKVDPLGEKAMIELKKQYAVLDEKVLSKIPLGPLKNKKKD

SEQ ID NO: 24859 - DNA, 1274 bp, Arabidopsis thaliana
  misc_feature (1)..(1274): Ceres Seq. ID no. 12701672
  misc_feature (1)..(1274): Ortholog of  Ceres SEQ ID NO 13596969 as cited in SEQ ID NO 63375
  misc_feature (1)..(1274): Ortholog of  Ceres SEQ ID NO 13597519 as cited in SEQ ID NO 64759
  misc_feature (1)..(1274): Ortholog of  Ceres SEQ ID NO 13597870 as cited in SEQ ID NO 64982
  misc_feature (1)..(1274): Ortholog of  Ceres SEQ ID NO 13595926 as cited in SEQ ID NO 67778
acaaccctttccacaagaagttataaaccaatacatagaagaaaacttccaaccccaaaaaatgatgaagggtgccaagttttcatctcttcttgtgcttttctttatttttccgatcgcatttgctcaactgagagtcgggttttatagtcaatcatgccctcaagccgagactatcgtacgcaatctggtgcgccaacggtttggtgttaccccaaccgttaccgccgctttgctccgtatgcatttccacgactgtttcgttaagggctgtgacgcttctctcctcattgattcaaccaattccgagaaaactgctggaccaaacggaagcgtcagggaatttgacctgatagaccggatcaaggctcagctagaagctgcatgcccttccacagtctcatgtgctgacatcgtcacattggccacacgtgactcggtggccttagccggaggcccaagctacagcatccccacgggaaggcgtgacggtagggtctcaaacaatcttgatgtaaccttaccgggtccaacgatctccgtctctggagccgtgagtttattcacgaacaaagggatgaacacgttcgatgcagtagctcttttgggtgcacacactgttggtcaaggaaattgtggtctctttagtgacagaatcactagcttccaaggaactggacgaccggacccgtccatggaccccgctttggttaccagcctaaggaacacatgcagaaatagcgcgacggcggcactagaccagtcgagtccattgagattcgacaaccagttcttcaagcaaatccgtaaaaggagaggagtgttgcaagttgaccaacgcctcgcatccgacccacagactcgtgggattgtggctcggtatgctaataacaacgccttcttcaagcgtcagttcgttagagcaatggtgaagatgggagcagttgatgtgcttactggtcgtaacggtgagatcagaaggaactgcaggagattcaactaatgaactacagaagcgtggatataatattacatttgatacaatatatttcaaatcttctttatatttttactaattcatttttggttttggttggggttttcttgcataaataaggcttttcttaaattggatggtttcgattttcgagaaagattactatatattatattgttggtctgcatttggtggatgtatcttaagtttacaaataatttgtgatattgaaatattgatatgtatctttatcatggttaatcatatatatatatat

SEQ ID NO: 24860 - protein, 333 aa, Arabidopsis thaliana
  peptide (1)..(333): Ceres Seq. ID no. 12701673
QPFPQEVINQYIEENFQPQKMMKGAKFSSLLVLFFIFPIAFAQLRVGFYSQSCPQAETIVRNLVRQRFGVTPTVTAALLRMHFHDCFVKGCDASLLIDSTNSEKTAGPNGSVREFDLIDRIKAQLEAACPSTVSCADIVTLATRDSVALAGGPSYSIPTGRRDGRVSNNLDVTLPGPTISVSGAVSLFTNKGMNTFDAVALLGAHTVGQGNCGLFSDRITSFQGTGRPDPSMDPALVTSLRNTCRNSATAALDQSSPLRFDNQFFKQIRKRRGVLQVDQRLASDPQTRGIVARYANNNAFFKRQFVRAMVKMGAVDVLTGRNGEIRRNCRRFN

SEQ ID NO: 24861 - protein, 313 aa, Arabidopsis thaliana
  peptide (1)..(313): Ceres Seq. ID no. 12701674
MMKGAKFSSLLVLFFIFPIAFAQLRVGFYSQSCPQAETIVRNLVRQRFGVTPTVTAALLRMHFHDCFVKGCDASLLIDSTNSEKTAGPNGSVREFDLIDRIKAQLEAACPSTVSCADIVTLATRDSVALAGGPSYSIPTGRRDGRVSNNLDVTLPGPTISVSGAVSLFTNKGMNTFDAVALLGAHTVGQGNCGLFSDRITSFQGTGRPDPSMDPALVTSLRNTCRNSATAALDQSSPLRFDNQFFKQIRKRRGVLQVDQRLASDPQTRGIVARYANNNAFFKRQFVRAMVKMGAVDVLTGRNGEIRRNCRRFN

SEQ ID NO: 24862 - protein, 312 aa, Arabidopsis thaliana
  peptide (1)..(312): Ceres Seq. ID no. 12701675
MKGAKFSSLLVLFFIFPIAFAQLRVGFYSQSCPQAETIVRNLVRQRFGVTPTVTAALLRMHFHDCFVKGCDASLLIDSTNSEKTAGPNGSVREFDLIDRIKAQLEAACPSTVSCADIVTLATRDSVALAGGPSYSIPTGRRDGRVSNNLDVTLPGPTISVSGAVSLFTNKGMNTFDAVALLGAHTVGQGNCGLFSDRITSFQGTGRPDPSMDPALVTSLRNTCRNSATAALDQSSPLRFDNQFFKQIRKRRGVLQVDQRLASDPQTRGIVARYANNNAFFKRQFVRAMVKMGAVDVLTGRNGEIRRNCRRFN

SEQ ID NO: 24863 - DNA, 925 bp, Arabidopsis thaliana
  misc_feature (1)..(925): Ceres Seq. ID no. 12321898
  misc_feature (1)..(925): Ortholog of  Ceres SEQ ID NO 14316300 as cited in SEQ ID NO 59995
  misc_feature (1)..(925): Ortholog of  Ceres SEQ ID NO 13662758 as cited in SEQ ID NO 64912
  misc_feature (1)..(925): Ortholog of  Ceres SEQ ID NO 13595881 as cited in SEQ ID NO 67709
  misc_feature (1)..(925): Ortholog of  Ceres SEQ ID NO 12614145 as cited in SEQ ID NO 67937
actcacagaagaagagagaatcaatcaaatcaaatcaccatggctttagcttggtgcgttgtacgcaggtcagcatctaagtttgcttccgtttatggtggccgagtccgatctatctccgccgttgcgaaccgcgcctctctagctcgcaacccatcttcaattcgtccattcgtctctcgcgccttaaattactcgacggctattgatcgaattagctccgagcaaacgcttatccgagttattgactccgaaatcaactctgctttgcaatccgataatatcgattcggatgaagagatgactccaggaagctttccttttagaattgaagacaaacctggaaatcagaatgttacattgactagagactacaatggggaacatattaaagttgttgtaagcatgcctagtcttgtttcagatgaaaatgatgatgatgatgatgatgatgaaggtcctagtaatgaatcgagtattccactagttgtgactgttactaagaagagtggactcactctagagtttagctgtatggcttttcctgatgagattgctatagatgctttatctgtgaaacatcctggggactctttggaggatcaactggctaatgaagggcctgattttgaagacttggacgagaatctgaagaagacgttctacaagtttttggagatcagaggagtgaaagctagcacgacgaatttcctgcacgagtacatgacgaggaaagtgaaccgagagtactttttatggttgaagaatgttaaggagttcatggaacagtgaaacgttaggttgatagctaagtacctaagaatgagattgtgaggttcttttcttgtgttcattgttagctttcaaatgtagcacaatctttgagaatttatggttaagagtttccagttctgattcaacttgc

SEQ ID NO: 24864 - protein, 263 aa, Arabidopsis thaliana
  peptide (1)..(263): Ceres Seq. ID no. 12321899
THRRRENQSNQITMALAWCVVRRSASKFASVYGGRVRSISAVANRASLARNPSSIRPFVSRALNYSTAIDRISSEQTLIRVIDSEINSALQSDNIDSDEEMTPGSFPFRIEDKPGNQNVTLTRDYNGEHIKVVVSMPSLVSDENDDDDDDDEGPSNESSIPLVVTVTKKSGLTLEFSCMAFPDEIAIDALSVKHPGDSLEDQLANEGPDFEDLDENLKKTFYKFLEIRGVKASTTNFLHEYMTRKVNREYFLWLKNVKEFMEQ

SEQ ID NO: 24865 - protein, 250 aa, Arabidopsis thaliana
  peptide (1)..(250): Ceres Seq. ID no. 12321900
MALAWCVVRRSASKFASVYGGRVRSISAVANRASLARNPSSIRPFVSRALNYSTAIDRISSEQTLIRVIDSEINSALQSDNIDSDEEMTPGSFPFRIEDKPGNQNVTLTRDYNGEHIKVVVSMPSLVSDENDDDDDDDEGPSNESSIPLVVTVTKKSGLTLEFSCMAFPDEIAIDALSVKHPGDSLEDQLANEGPDFEDLDENLKKTFYKFLEIRGVKASTTNFLHEYMTRKVNREYFLWLKNVKEFMEQ

SEQ ID NO: 24866 - protein, 163 aa, Arabidopsis thaliana
  peptide (1)..(163): Ceres Seq. ID no. 12321901
MTPGSFPFRIEDKPGNQNVTLTRDYNGEHIKVVVSMPSLVSDENDDDDDDDEGPSNESSIPLVVTVTKKSGLTLEFSCMAFPDEIAIDALSVKHPGDSLEDQLANEGPDFEDLDENLKKTFYKFLEIRGVKASTTNFLHEYMTRKVNREYFLWLKNVKEFMEQ

SEQ ID NO: 24867 - DNA, 1635 bp, Arabidopsis thaliana
  misc_feature (1)..(1635): Ceres Seq. ID no. 12336117
  misc_feature (1)..(1635): Ortholog of  Ceres SEQ ID NO 14315241 as cited in SEQ ID NO 52516
  misc_feature (1)..(1635): Ortholog of  Ceres SEQ ID NO 13594349 as cited in SEQ ID NO 58161
  misc_feature (1)..(1635): Ortholog of  Ceres SEQ ID NO 13663419 as cited in SEQ ID NO 66561
  misc_feature (1)..(1635): Ortholog of  Ceres SEQ ID NO 15177892 as cited in SEQ ID NO 0
atctgctcttcatttcgataaataattgaaaagaacaaaagaaacaaaagagacgagaaagagttttggcgatgaagaagaacgcactttggctactgtgcattctggtgttaccggcgatagcctgtggtaggaaaccggagaagaaggtaacaatttcatcctctgggaggaaggaagatgaccttgtaaccggtttgcccggccaaccaccggttaacttcaaacactacgccggttacgtgaatctggggcctgaacagaagcaaaaggcacttttctattggttcttcgaagctcaacaaaactcttctcgtcgtcctctcgtcctttggctcaatggaggaccgggttgctcatcaatagcctatggagctgcacaagaactaggcccttttcttgttcacgacaacggtggcaaacttacctacaatcatttctcttggaacaaagaggccaatatgttgttcttggaagcgccggttggggttgggttctcgtataccaataactcaatggatcttcaaaagcttggagatgaagttactgcatcggactctcttgctttcctgatcaactggttcatgaaattccccgagttccgatccagcgagttctacatctctggcgagagttacgccggtcactatgttcctcagctcgcggaggtaatttacgacaggaacaagaaggttacgaaagactctagcattaatctcaagggattcatgatagggaacgcggtgatcaatgaggcaacagacatggcaggactagtggactacgcatggagccacgctataatatcggacgaggtccacaccagcatccatggctcgtgcagttttgaggaagataccaccaacaagaccgaacaatgctacaacaatttcaaagggttcatggatgcttacaatgatatcgatatatacagtatctacactcccgtttgcctctcctctttgttgtcatcttctccaagaaaacctaaaatcgtcgtgtctcctcgtctccttacttttgacgatttgtgggacaagtttccggccgggtacgatccatgcactgaaagttatgccgagaattactttaaccggaaagatgtgcaggttgcactccatgcgaacgtcaccaaccttccttatccgtactctccttgcagcggagtaataaagagatggagtgatgctccatccaccatgattcccatcatacaaaagcttttgacgggtggcctccgtatctggatctatagtggagatacggatgggagagttccggtaacatctacacgttatagcataaaaaagatgggacttaaggtcgagtcaccgtggaggtcatggttccacaagagtcaagtagctggatgggttgagacttatgccggtggactaaattttgtcacggtgagaggagccggtcaccaggttccggccttggctccggcgcaatctctcacattattctctcacttcatttcttctgtccccttgccttcaaaacggttctgatatcagtaccgtcaagtcatgatggcaagttgttgttgttgttttggaaccttcgtttagcactctcccaattgattttatgaatttcaattgatgaataaagattcttcaacttttagct

SEQ ID NO: 24868 - protein, 480 aa, Arabidopsis thaliana
  peptide (1)..(480): Ceres Seq. ID no. 12336118
MKKNALWLLCILVLPAIACGRKPEKKVTISSSGRKEDDLVTGLPGQPPVNFKHYAGYVNLGPEQKQKALFYWFFEAQQNSSRRPLVLWLNGGPGCSSIAYGAAQELGPFLVHDNGGKLTYNHFSWNKEANMLFLEAPVGVGFSYTNNSMDLQKLGDEVTASDSLAFLINWFMKFPEFRSSEFYISGESYAGHYVPQLAEVIYDRNKKVTKDSSINLKGFMIGNAVINEATDMAGLVDYAWSHAIISDEVHTSIHGSCSFEEDTTNKTEQCYNNFKGFMDAYNDIDIYSIYTPVCLSSLLSSSPRKPKIVVSPRLLTFDDLWDKFPAGYDPCTESYAENYFNRKDVQVALHANVTNLPYPYSPCSGVIKRWSDAPSTMIPIIQKLLTGGLRIWIYSGDTDGRVPVTSTRYSIKKMGLKVESPWRSWFHKSQVAGWVETYAGGLNFVTVRGAGHQVPALAPAQSLTLFSHFISSVPLPSKRF

SEQ ID NO: 24869 - protein, 350 aa, Arabidopsis thaliana
  peptide (1)..(350): Ceres Seq. ID no. 12336119
MLFLEAPVGVGFSYTNNSMDLQKLGDEVTASDSLAFLINWFMKFPEFRSSEFYISGESYAGHYVPQLAEVIYDRNKKVTKDSSINLKGFMIGNAVINEATDMAGLVDYAWSHAIISDEVHTSIHGSCSFEEDTTNKTEQCYNNFKGFMDAYNDIDIYSIYTPVCLSSLLSSSPRKPKIVVSPRLLTFDDLWDKFPAGYDPCTESYAENYFNRKDVQVALHANVTNLPYPYSPCSGVIKRWSDAPSTMIPIIQKLLTGGLRIWIYSGDTDGRVPVTSTRYSIKKMGLKVESPWRSWFHKSQVAGWVETYAGGLNFVTVRGAGHQVPALAPAQSLTLFSHFISSVPLPSKRF

SEQ ID NO: 24870 - protein, 332 aa, Arabidopsis thaliana
  peptide (1)..(332): Ceres Seq. ID no. 12336120
MDLQKLGDEVTASDSLAFLINWFMKFPEFRSSEFYISGESYAGHYVPQLAEVIYDRNKKVTKDSSINLKGFMIGNAVINEATDMAGLVDYAWSHAIISDEVHTSIHGSCSFEEDTTNKTEQCYNNFKGFMDAYNDIDIYSIYTPVCLSSLLSSSPRKPKIVVSPRLLTFDDLWDKFPAGYDPCTESYAENYFNRKDVQVALHANVTNLPYPYSPCSGVIKRWSDAPSTMIPIIQKLLTGGLRIWIYSGDTDGRVPVTSTRYSIKKMGLKVESPWRSWFHKSQVAGWVETYAGGLNFVTVRGAGHQVPALAPAQSLTLFSHFISSVPLPSKRF

SEQ ID NO: 24871 - DNA, 2824 bp, Arabidopsis thaliana
  misc_feature (1)..(2824): Ceres Seq. ID no. 12321906
  misc_feature (1)..(2824): Ortholog of  Ceres SEQ ID NO 12638191 as cited in SEQ ID NO 674
  misc_feature (1)..(2824): Ortholog of  Ceres SEQ ID NO 14303105 as cited in SEQ ID NO 66589
  misc_feature (1)..(2824): Ortholog of  Ceres SEQ ID NO 13584744 as cited in SEQ ID NO 69137
atgggtattgaaaagtttgaaactttcatcttgatttcaacgatttcgatcttgctttgtatctgccatggattcacacctgtggataattacttgatcaactgtggatcaccaaccaatggaacactaatgggtcgaatctttctgtctgataagctctcttcgaagttacttacttcgtccaaagagattctcgcaagcgtaggcggtaactctggctcagacatttaccacacggcaagagtcttcaccgaagtctctagctacaaattctcggtcactcgtggtcgtcattgggttcgtctctatttcaatccttttgactaccaaaacttcaaaatgggttcagctaaattcgcggtttcttcacaaagtcatgtccttttgagtgatttcactgttacgagttcaaaagttgtcaaagagtactctttgaacgtgactactaatgatttagtgctcacctttactccctctagtggttcgtttgcgtttgtgaatgctatcgaggttatatcgattccagatactttgattactggtagtccaaggtttgtaggcaaccctgcgcagtttccggatatgtcaatgcaaggtcttgaaaccattcatagagtcaacatgggtggtccgcttgttgcgtctaacaacgatacgttaacgagaacttgggtgcctgactcggagtttctgcttgagaagaatttagctaagagtatgtctaagttttcaactgttaactttgttccaggttatgcaacagaggactctgctccaagaactgtctatggtagttgtactgagatgaattccgctgataacccgaatagcattttcaatgtgacttgggagttcgatgttgacccgggttttcagtactatttccgctttcatttctgcgatatcgttagcttgtcgttaaaccagctatatttcaatctttatgttgactcaatggttgctgctacggatattgatcttagcactcttgtggataacactttggctggtgcatattcgatggactttgtcacgcagacgccaaagggtagtaataaagtccgtgtgagcatcggtccgtcgactgttcacaccgattatccaaacgcgattgtgaatggattggagattatgaagatgaataactctaagggtcagttaagcactgggacatttgtgcctggtagtagttcaagcagtaagagtaatctcgggttgattgtaggttcagccattggttcgttgctcgcggtagtcttcttgggaagttgctttgtgttgtataagaagcggaaacgtggccaagacggtcattcaaagacttggatgccgttttcgataaatggaacttcgatgggaagcaaatactccaatggaactacgcttacaagtataactaccaatgccaattaccgtattccctttgcagcggttaaagacgctacaaataactttgacgagagccgcaacatcggtgtaggcggttttggtaaagtctacaaaggagagcttaatgacggtacaaaggtagctgtgaaaagagggaacccaaaatctcagcaagggcttgcggaattcaggacagaaatcgagatgttatctcagtttcgtcaccgccatttggtttctctgatcggttattgtgacgagaacaatgagatgatactaatttacgagtatatggagaatggaacggtaaagagtcatctttatggctcaggtctacctagcttgacttggaaacaacggcttgagatctgcattggtgcagctagaggcttgcattaccttcacacgggtgactcgaaaccggtcattcacagagacgtgaaatctgcaaacatattgcttgacgagaacttcatggctaaagttgcagactttggactgtccaagactggacccgagcttgatcagactcatgtaagtactgctgtcaaaggaagttttggttatcttgaccccgagtacttcagaaggcaacagctcacagataaatccgatgtttattccttcggagttgttctcttcgaggttttatgtgctagacctgttatagacccaacacttccaagagagatggtgaatcttgcagaatgggctatgaaatggcagaagaaagggcaactggatcagatcatcgaccagtcgcttcgcggaaatatcagacccgattcgttaaggaaatttgcggaaacaggtgagaaatgtttagcggattatggagttgataggccatctatgggagatgtgttgtggaatcttgaatacgctctgcagcttcaagaagcagtcattgatggtgaaccagaagataatagcacgaatatgattggtgaattacctccgcagatcaataatttcagtcagggagacactagtgttaacgttccgggcacagcggggcgattcgaggaatctagtattgatgatctctctggcgtttccatgagtaaagtattctcacaactggtgaaatctgaaggaagatagtgaaagatttgagcaatgcagtgccaagaaaatccaaagatctgatctttttgatagaaacagagcaagcaaagtatgtaaccaggaaaaaagcatcaggttattttcagataggatctttgtctttgcttgatctgtttctactgcagatttttcatcagtgattaaacggttactttgaaaatttaccttattttgttcctctctcccttatcctgagtttgtattttattgatgttcattttgaaattgtctgaaatttgtttgttctttttactatatggatgtttaacactcttgttgtttcaattgtattgtaagtttagaagtt

SEQ ID NO: 24872 - protein, 830 aa, Arabidopsis thaliana
  peptide (1)..(830): Ceres Seq. ID no. 12321907
MGIEKFETFILISTISILLCICHGFTPVDNYLINCGSPTNGTLMGRIFLSDKLSSKLLTSSKEILASVGGNSGSDIYHTARVFTEVSSYKFSVTRGRHWVRLYFNPFDYQNFKMGSAKFAVSSQSHVLLSDFTVTSSKVVKEYSLNVTTNDLVLTFTPSSGSFAFVNAIEVISIPDTLITGSPRFVGNPAQFPDMSMQGLETIHRVNMGGPLVASNNDTLTRTWVPDSEFLLEKNLAKSMSKFSTVNFVPGYATEDSAPRTVYGSCTEMNSADNPNSIFNVTWEFDVDPGFQYYFRFHFCDIVSLSLNQLYFNLYVDSMVAATDIDLSTLVDNTLAGAYSMDFVTQTPKGSNKVRVSIGPSTVHTDYPNAIVNGLEIMKMNNSKGQLSTGTFVPGSSSSSKSNLGLIVGSAIGSLLAVVFLGSCFVLYKKRKRGQDGHSKTWMPFSINGTSMGSKYSNGTTLTSITTNANYRIPFAAVKDATNNFDESRNIGVGGFGKVYKGELNDGTKVAVKRGNPKSQQGLAEFRTEIEMLSQFRHRHLVSLIGYCDENNEMILIYEYMENGTVKSHLYGSGLPSLTWKQRLEICIGAARGLHYLHTGDSKPVIHRDVKSANILLDENFMAKVADFGLSKTGPELDQTHVSTAVKGSFGYLDPEYFRRQQLTDKSDVYSFGVVLFEVLCARPVIDPTLPREMVNLAEWAMKWQKKGQLDQIIDQSLRGNIRPDSLRKFAETGEKCLADYGVDRPSMGDVLWNLEYALQLQEAVIDGEPEDNSTNMIGELPPQINNFSQGDTSVNVPGTAGRFEESSIDDLSGVSMSKVFSQLVKSEGR

SEQ ID NO: 24873 - protein, 787 aa, Arabidopsis thaliana
  peptide (1)..(787): Ceres Seq. ID no. 12321908
MGRIFLSDKLSSKLLTSSKEILASVGGNSGSDIYHTARVFTEVSSYKFSVTRGRHWVRLYFNPFDYQNFKMGSAKFAVSSQSHVLLSDFTVTSSKVVKEYSLNVTTNDLVLTFTPSSGSFAFVNAIEVISIPDTLITGSPRFVGNPAQFPDMSMQGLETIHRVNMGGPLVASNNDTLTRTWVPDSEFLLEKNLAKSMSKFSTVNFVPGYATEDSAPRTVYGSCTEMNSADNPNSIFNVTWEFDVDPGFQYYFRFHFCDIVSLSLNQLYFNLYVDSMVAATDIDLSTLVDNTLAGAYSMDFVTQTPKGSNKVRVSIGPSTVHTDYPNAIVNGLEIMKMNNSKGQLSTGTFVPGSSSSSKSNLGLIVGSAIGSLLAVVFLGSCFVLYKKRKRGQDGHSKTWMPFSINGTSMGSKYSNGTTLTSITTNANYRIPFAAVKDATNNFDESRNIGVGGFGKVYKGELNDGTKVAVKRGNPKSQQGLAEFRTEIEMLSQFRHRHLVSLIGYCDENNEMILIYEYMENGTVKSHLYGSGLPSLTWKQRLEICIGAARGLHYLHTGDSKPVIHRDVKSANILLDENFMAKVADFGLSKTGPELDQTHVSTAVKGSFGYLDPEYFRRQQLTDKSDVYSFGVVLFEVLCARPVIDPTLPREMVNLAEWAMKWQKKGQLDQIIDQSLRGNIRPDSLRKFAETGEKCLADYGVDRPSMGDVLWNLEYALQLQEAVIDGEPEDNSTNMIGELPPQINNFSQGDTSVNVPGTAGRFEESSIDDLSGVSMSKVFSQLVKSEGR

SEQ ID NO: 24874 - protein, 717 aa, Arabidopsis thaliana
  peptide (1)..(717): Ceres Seq. ID no. 12321909
MGSAKFAVSSQSHVLLSDFTVTSSKVVKEYSLNVTTNDLVLTFTPSSGSFAFVNAIEVISIPDTLITGSPRFVGNPAQFPDMSMQGLETIHRVNMGGPLVASNNDTLTRTWVPDSEFLLEKNLAKSMSKFSTVNFVPGYATEDSAPRTVYGSCTEMNSADNPNSIFNVTWEFDVDPGFQYYFRFHFCDIVSLSLNQLYFNLYVDSMVAATDIDLSTLVDNTLAGAYSMDFVTQTPKGSNKVRVSIGPSTVHTDYPNAIVNGLEIMKMNNSKGQLSTGTFVPGSSSSSKSNLGLIVGSAIGSLLAVVFLGSCFVLYKKRKRGQDGHSKTWMPFSINGTSMGSKYSNGTTLTSITTNANYRIPFAAVKDATNNFDESRNIGVGGFGKVYKGELNDGTKVAVKRGNPKSQQGLAEFRTEIEMLSQFRHRHLVSLIGYCDENNEMILIYEYMENGTVKSHLYGSGLPSLTWKQRLEICIGAARGLHYLHTGDSKPVIHRDVKSANILLDENFMAKVADFGLSKTGPELDQTHVSTAVKGSFGYLDPEYFRRQQLTDKSDVYSFGVVLFEVLCARPVIDPTLPREMVNLAEWAMKWQKKGQLDQIIDQSLRGNIRPDSLRKFAETGEKCLADYGVDRPSMGDVLWNLEYALQLQEAVIDGEPEDNSTNMIGELPPQINNFSQGDTSVNVPGTAGRFEESSIDDLSGVSMSKVFSQLVKSEGR

SEQ ID NO: 24875 - DNA, 760 bp, Arabidopsis thaliana
  misc_feature (1)..(760): Ceres Seq. ID no. 12385459
  misc_feature (1)..(760): Ortholog of  Ceres SEQ ID NO 13597163 as cited in SEQ ID NO 63925
atttcccgattcctcgccgccgttcatcaatctctccgtcgtgtttctgccactagctctccaccaaactttctctctcgcattagttgtttagggataaacatggcaggagaaggtgaagaagatgtacctagagatgctaagattgtgaaatctctgcttaagtcgatgggtgtagaagactacgagcctcgtgtgatacatcagtttctggagttatggtaccggtatgtggtcgaagtgttgacagatgctcaggtttactcagagcatgctagcaaacccaacattgactgtgatgatgtgaagctcgctattcaatccaaagttaatttcagcttctcacagcctcctccaagagaggttctgcttgagcttgctgcaagtaggaacaagatacctctgccaaaatcgatagcaggacccggtgttccactcccacctgaacaggacacattgctgagcccaaattatcagctcgtgataccgaagaagtcggtttcaacagaacctgaagaaaccgaggacgatgaagaaatgacagatcctggacagtcctctcaagaacaacaacagcagcaacaacaaacctcagaccttccaagccaaactcctcaaagggtctctttcccactctctagacgacccaaataagtacccaaataagtagatagaccaaaaaatctataatatttatgtatcaacaagtagaaatgtaacacaatcaaaaattaatgaccagagccagtttttatggacc

SEQ ID NO: 24876 - protein, 217 aa, Arabidopsis thaliana
  peptide (1)..(217): Ceres Seq. ID no. 12385460
ISRFLAAVHQSLRRVSATSSPPNFLSRISCLGINMAGEGEEDVPRDAKIVKSLLKSMGVEDYEPRVIHQFLELWYRYVVEVLTDAQVYSEHASKPNIDCDDVKLAIQSKVNFSFSQPPPREVLLELAASRNKIPLPKSIAGPGVPLPPEQDTLLSPNYQLVIPKKSVSTEPEETEDDEEMTDPGQSSQEQQQQQQQTSDLPSQTPQRVSFPLSRRPK

SEQ ID NO: 24877 - protein, 183 aa, Arabidopsis thaliana
  peptide (1)..(183): Ceres Seq. ID no. 12385461
MAGEGEEDVPRDAKIVKSLLKSMGVEDYEPRVIHQFLELWYRYVVEVLTDAQVYSEHASKPNIDCDDVKLAIQSKVNFSFSQPPPREVLLELAASRNKIPLPKSIAGPGVPLPPEQDTLLSPNYQLVIPKKSVSTEPEETEDDEEMTDPGQSSQEQQQQQQQTSDLPSQTPQRVSFPLSRRPK

SEQ ID NO: 24878 - protein, 161 aa, Arabidopsis thaliana
  peptide (1)..(161): Ceres Seq. ID no. 12385462
MGVEDYEPRVIHQFLELWYRYVVEVLTDAQVYSEHASKPNIDCDDVKLAIQSKVNFSFSQPPPREVLLELAASRNKIPLPKSIAGPGVPLPPEQDTLLSPNYQLVIPKKSVSTEPEETEDDEEMTDPGQSSQEQQQQQQQTSDLPSQTPQRVSFPLSRRPK

SEQ ID NO: 24879 - DNA, 1190 bp, Arabidopsis thaliana
  misc_feature (1)..(1190): Ceres Seq. ID no. 12321145
  misc_feature (1)..(1190): Ortholog of  Ceres SEQ ID NO 13638877 as cited in SEQ ID NO 55794
  misc_feature (1)..(1190): Ortholog of  Ceres SEQ ID NO 13656156 as cited in SEQ ID NO 64620
gaaggaatcaaaacggtgcgttccggttacggagcacacacagataagataggaaaccctaaaagtgcttcttcttcttcgtcttcttcttcagttttaggttacgatcgaagcaaaagcggcgcatctgaatcccaaacgagtgacgatgacgatcgattcgcagcaaaaaacgagcaaattcagatggggggaaatggacgaagacgaagatctggatttcttgctccctcccaagcaggtgattggtccagatgagaatggtttgaagacgacgatcgagtacaaattcaacgatgaagaaaataaggttaagataacgactaggacacgtgtccgcaagctagcttctgctcgactcaacaaacgagccatggagaggaggaactggcctaagttcggagacgcagccaatgaggaagctggtagccatctcactatggtttctaccgaagagatccttctcgaacgaccccgagctcctggtaccaaagcggatgaatcaaaggcaacaggagatggcttgtctcagctgggtaaaggtggtgcagttctcatggtgtgcaggatatgccacaagaaaggagatcactggacatcaaaatgtccatacaaggatctagctgcaccaaccgatgtcttcattgacaagccacccacaggggaatcatctaccatgtctgctgcacctggaactggcaaggccgcgtatgtcccgcctagcatgagagcaggtgcagacagaagcgctgtgggttcagacatgaggaggaggaacgatgagaactctgtgcgtgtaaccaatctgtccgaggatacccgtgaacctgacttgatggagctgttccacccgtttggagctgtcacacgtgtctatgtggccattgatcagaaaactggagtgagcagaggatttggtttcgtcaatttcgtgagcagagaagacgctcaaagagcaatcaacaaattgaatggttatggttatgataacctcatcctcagggttgaatgggcaactccaagaccaacctagaaagaaatgtctgatgttgagaccttaaaactcttctcattctcgtctttcttgttatggatttttgtttatcgaccagtttgtttgttggtttggtttctgtatgaatagatgagaatttgttcaatttctctttaatacataaggcatgcttttt

SEQ ID NO: 24880 - protein, 294 aa, Arabidopsis thaliana
  peptide (1)..(294): Ceres Seq. ID no. 12321146
MTIDSQQKTSKFRWGEMDEDEDLDFLLPPKQVIGPDENGLKTTIEYKFNDEENKVKITTRTRVRKLASARLNKRAMERRNWPKFGDAANEEAGSHLTMVSTEEILLERPRAPGTKADESKATGDGLSQLGKGGAVLMVCRICHKKGDHWTSKCPYKDLAAPTDVFIDKPPTGESSTMSAAPGTGKAAYVPPSMRAGADRSAVGSDMRRRNDENSVRVTNLSEDTREPDLMELFHPFGAVTRVYVAIDQKTGVSRGFGFVNFVSREDAQRAINKLNGYGYDNLILRVEWATPRPT

SEQ ID NO: 24881 - protein, 278 aa, Arabidopsis thaliana
  peptide (1)..(278): Ceres Seq. ID no. 12321147
MDEDEDLDFLLPPKQVIGPDENGLKTTIEYKFNDEENKVKITTRTRVRKLASARLNKRAMERRNWPKFGDAANEEAGSHLTMVSTEEILLERPRAPGTKADESKATGDGLSQLGKGGAVLMVCRICHKKGDHWTSKCPYKDLAAPTDVFIDKPPTGESSTMSAAPGTGKAAYVPPSMRAGADRSAVGSDMRRRNDENSVRVTNLSEDTREPDLMELFHPFGAVTRVYVAIDQKTGVSRGFGFVNFVSREDAQRAINKLNGYGYDNLILRVEWATPRPT

SEQ ID NO: 24882 - protein, 219 aa, Arabidopsis thaliana
  peptide (1)..(219): Ceres Seq. ID no. 12321148
MERRNWPKFGDAANEEAGSHLTMVSTEEILLERPRAPGTKADESKATGDGLSQLGKGGAVLMVCRICHKKGDHWTSKCPYKDLAAPTDVFIDKPPTGESSTMSAAPGTGKAAYVPPSMRAGADRSAVGSDMRRRNDENSVRVTNLSEDTREPDLMELFHPFGAVTRVYVAIDQKTGVSRGFGFVNFVSREDAQRAINKLNGYGYDNLILRVEWATPRPT

SEQ ID NO: 24883 - DNA, 385 bp, Arabidopsis thaliana
  misc_feature (1)..(385): Ceres Seq. ID no. 12421931
  misc_feature (1)..(385): Ortholog of  Ceres SEQ ID NO 13662937 as cited in SEQ ID NO 64415
actttgtagtttgtgttttgtccttatcggcggagacatgacggcggcacaagaaactctaacgagactctgttttcttcttacaagatgggaagattcgatctctctcatcgagtggttctggcgccgatgacgcggtgcagggcgttgaacggagtaccaaacgcggcgttggcagagtattatgctcaacggaccactcccggcggttttctcatctccgaaggcaccatggtctctcccggatccgcagggttcccacatgtgcctggaatctattcagatgaacaagtagaagcatggaagcaagttgtggaagcagttcacgctaagggaggtttcatcttttgtcaattatggcatgttggacgtgcttctcatgcag

SEQ ID NO: 24884 - protein, 99 aa, Arabidopsis thaliana
  peptide (1)..(99): Ceres Seq. ID no. 12421932
MGRFDLSHRVVLAPMTRCRALNGVPNAALAEYYAQRTTPGGFLISEGTMVSPGSAGFPHVPGIYSDEQVEAWKQVVEAVHAKGGFIFCQLWHVGRASHA

SEQ ID NO: 24885 - protein, 85 aa, Arabidopsis thaliana
  peptide (1)..(85): Ceres Seq. ID no. 12421933
MTRCRALNGVPNAALAEYYAQRTTPGGFLISEGTMVSPGSAGFPHVPGIYSDEQVEAWKQVVEAVHAKGGFIFCQLWHVGRASHA

SEQ ID NO: 24886 - protein, 51 aa, Arabidopsis thaliana
  peptide (1)..(51): Ceres Seq. ID no. 12421934
MVSPGSAGFPHVPGIYSDEQVEAWKQVVEAVHAKGGFIFCQLWHVGRASHA

SEQ ID NO: 24887 - DNA, 1158 bp, Arabidopsis thaliana
  misc_feature (1)..(1158): Ceres Seq. ID no. 12324872
  misc_feature (1)..(1158): Ortholog of  Ceres SEQ ID NO 12612330 as cited in SEQ ID NO 56418
  misc_feature (1)..(1158): Ortholog of  Ceres SEQ ID NO 13664295 as cited in SEQ ID NO 61486
  misc_feature (1)..(1158): Ortholog of  Ceres SEQ ID NO 15179147 as cited in SEQ ID NO 0
gaagaacaaacacaaaaatggcgacggtaccattgttcacccagtttccctgcaaaaccctaaatccaagctcatcaaacactaaacaccaatcgaaatctccgatcctactaccgattaactcaataaatcgatcggagattggagtctctgttcatcggccagatttcaaaatccgagcgacggacatcgacgacgaatggggtcaagatggagtggagagagtatttgcctcatcttcaaccgtatcggtagcagataaagcaatcgaatccgtggaggagacggagaggctaaagagatcactagcggattcgttgtacggaacagatcgaggtttaagcgtatcgagtgatacgagagctgagatcagcgagctcatcacacagctcgagtctaagaaccctactccagctcctaacgaagctctgtttctcctcaacggcaaatggatcctcgcctacacgtcgttcgtggggttgttcccattgctctcacgaagaattgaaccgttggttaaagtggatgagatctcacaaaccattgattccgatagcttcaccgttcaaaactctgtccggttcgctggtccgttttccacaacgtcgtttagcaccaacgctaagtttgaaatccgaagtcctaaacgtgtccagattaagttcgagcaaggtgttatagggactcctcagctaacggattcgattgaaataccggaatccgtggaggttcttggtcagaaaatcgatctcaatcccattaaaggtttacttacatcagtccaagacactgcttcttcagtggctagaaccatttcaaaccaaccaccattgaagttttctctgcctagtgacaacacgcagtcgtggctgctcacaacttatctcgacaaggaccttcggatctcgagaggcgatggtggaagcgtctatgtgctcatcaaagaaggaagctctctcttaaacccttaaatcatcataactctcatcacatccatagtaacatatatacaagtatagacccatctgtctatgtttactagtgttgtaactgttatatagcttctttacctgttggagagttataaacttataatggatgttactcttggtatactgtactacaatacatatacataactacatacttgaacaggcc

SEQ ID NO: 24888 - protein, 322 aa, Arabidopsis thaliana
  peptide (1)..(322): Ceres Seq. ID no. 12324873
RTNTKMATVPLFTQFPCKTLNPSSSNTKHQSKSPILLPINSINRSEIGVSVHRPDFKIRATDIDDEWGQDGVERVFASSSTVSVADKAIESVEETERLKRSLADSLYGTDRGLSVSSDTRAEISELITQLESKNPTPAPNEALFLLNGKWILAYTSFVGLFPLLSRRIEPLVKVDEISQTIDSDSFTVQNSVRFAGPFSTTSFSTNAKFEIRSPKRVQIKFEQGVIGTPQLTDSIEIPESVEVLGQKIDLNPIKGLLTSVQDTASSVARTISNQPPLKFSLPSDNTQSWLLTTYLDKDLRISRGDGGSVYVLIKEGSSLLNP

SEQ ID NO: 24889 - protein, 317 aa, Arabidopsis thaliana
  peptide (1)..(317): Ceres Seq. ID no. 12324874
MATVPLFTQFPCKTLNPSSSNTKHQSKSPILLPINSINRSEIGVSVHRPDFKIRATDIDDEWGQDGVERVFASSSTVSVADKAIESVEETERLKRSLADSLYGTDRGLSVSSDTRAEISELITQLESKNPTPAPNEALFLLNGKWILAYTSFVGLFPLLSRRIEPLVKVDEISQTIDSDSFTVQNSVRFAGPFSTTSFSTNAKFEIRSPKRVQIKFEQGVIGTPQLTDSIEIPESVEVLGQKIDLNPIKGLLTSVQDTASSVARTISNQPPLKFSLPSDNTQSWLLTTYLDKDLRISRGDGGSVYVLIKEGSSLLNP

SEQ ID NO: 24890 - DNA, 933 bp, Arabidopsis thaliana
  misc_feature (1)..(933): Ceres Seq. ID no. 12327528
  misc_feature (1)..(933): Ortholog of  Ceres SEQ ID NO 12619999 as cited in SEQ ID NO 66123
  misc_feature (1)..(933): Ortholog of  Ceres SEQ ID NO 13656436 as cited in SEQ ID NO 69154
aaaaggcgttacagagaagaagaagaagaagaagaagaaggagaaatgtcagacgacgacgagagaggcgaagagtacctcttcaagattgttatcatcggtgattccgccgtcggcaaatccaatctcctcactcgctacgcccgtaacgagttcaatcccaattccaaagccactatcggcgtcgagtttcagactcagagcatgctcatcgacggcaaagaggtcaaagctcagatttgggataccgccggtcaggaacgcttccgcgccgttacatctgcttattaccgtggcgccgttggagccctcgtcgtctacgatatcactcgtagctccactttcgaaaacgtcggtcgctggctcgatgagctcaacactcattctgatacaacagtagcaaaaatgcttattgggaacaaatgtgatctcgagagcataagagcggtgagtgttgaggaaggcaagagtcttgctgagtctgaaggtttgtttttcatggagacctctgcgttggactcgaccaatgtaaagacggctttcgagatggttattcgggagatctatagcaacattagtcgaaagcaattgaactctgattcttacaaagaggagctgactgtgaatcgtgttagcttggttaagaacgagaacgaagggacaaagacattctcttgctgttcgaggtaacatctttgtaacggtttctctttgtcctgaggattggtttcgggttgaattgtgttcctggtaaacttatagaaaggcagagatatattcttatagttctcagttaaagtaaaagaagaagagagaaagatgttttgagtttctttgttacgcatacagaaaaagtttggttagtgtataagttatgttctcatttgtaacttttgtaaacttatgattgttaaatcaattttgatattttcc

SEQ ID NO: 24891 - protein, 229 aa, Arabidopsis thaliana
  peptide (1)..(229): Ceres Seq. ID no. 12327529
KRRYREEEEEEEEGEMSDDDERGEEYLFKIVIIGDSAVGKSNLLTRYARNEFNPNSKATIGVEFQTQSMLIDGKEVKAQIWDTAGQERFRAVTSAYYRGAVGALVVYDITRSSTFENVGRWLDELNTHSDTTVAKMLIGNKCDLESIRAVSVEEGKSLAESEGLFFMETSALDSTNVKTAFEMVIREIYSNISRKQLNSDSYKEELTVNRVSLVKNENEGTKTFSCCSR

SEQ ID NO: 24892 - protein, 214 aa, Arabidopsis thaliana
  peptide (1)..(214): Ceres Seq. ID no. 12327530
MSDDDERGEEYLFKIVIIGDSAVGKSNLLTRYARNEFNPNSKATIGVEFQTQSMLIDGKEVKAQIWDTAGQERFRAVTSAYYRGAVGALVVYDITRSSTFENVGRWLDELNTHSDTTVAKMLIGNKCDLESIRAVSVEEGKSLAESEGLFFMETSALDSTNVKTAFEMVIREIYSNISRKQLNSDSYKEELTVNRVSLVKNENEGTKTFSCCSR

SEQ ID NO: 24893 - protein, 161 aa, Arabidopsis thaliana
  peptide (1)..(161): Ceres Seq. ID no. 12327531
MLIDGKEVKAQIWDTAGQERFRAVTSAYYRGAVGALVVYDITRSSTFENVGRWLDELNTHSDTTVAKMLIGNKCDLESIRAVSVEEGKSLAESEGLFFMETSALDSTNVKTAFEMVIREIYSNISRKQLNSDSYKEELTVNRVSLVKNENEGTKTFSCCSR

SEQ ID NO: 24894 - DNA, 838 bp, Arabidopsis thaliana
  misc_feature (1)..(838): Ceres Seq. ID no. 12482922
  misc_feature (1)..(838): Ortholog of  Ceres SEQ ID NO 15168440 as cited in SEQ ID NO 57887
  misc_feature (1)..(838): Ortholog of  Ceres SEQ ID NO 13622703 as cited in SEQ ID NO 0
ttttttcgttcgactcatctccaaagagaagcttcaaaaaatggcttgcaaaacgattttgcgttccgttttcgtatcggaatcacgacggacttccggcgcacgtagatgcttctttctccctccttctccagcatcagttccagtccatggtttgttcccggcgccaaagagtctatgtttcaatggttttgcatctgttcccgagcgggctactcggcttaattgcagccataacgatcaatccgatcaaggtccgcctcaagaagctgttctcaaggcaatctcagaagtgtcaaagactgatgggagggttgggaaaactactaacatgattattggaggcactgtggctgatgattctgctaaagattggctcgaacttgaccaaaaggtcaatacatacccaacagaaagagggtttactgcaattgggactggtggcaatgactttgtgcatgctatggttgttgctgttgaatctgttattgaccgacaaattccagaggactgtgtaaagcagactttatcaagcaaaggaaaatatgtgtcggtgaatattggccctatccaagtcgtctctagtgagcaggttcaagctgtgtataatgcaatgaggagagacgaaagaatgaaatacttcttgtaggtttgaagtgtgtagaatcacgggtcttctcttttctatcttctccattgcgactatgtaaattatgcagtgtaaggccaccattaattattatttatacttatctacactaacttctgttagacactccttagacagtgtcttatgcatctgaaggaattagtggatatatcaaaaaatgacttatac

SEQ ID NO: 24895 - protein, 215 aa, Arabidopsis thaliana
  peptide (1)..(215): Ceres Seq. ID no. 12482923
FFVRLISKEKLQKMACKTILRSVFVSESRRTSGARRCFFLPPSPASVPVHGLFPAPKSLCFNGFASVPERATRLNCSHNDQSDQGPPQEAVLKAISEVSKTDGRVGKTTNMIIGGTVADDSAKDWLELDQKVNTYPTERGFTAIGTGGNDFVHAMVVAVESVIDRQIPEDCVKQTLSSKGKYVSVNIGPIQVVSSEQVQAVYNAMRRDERMKYFL

SEQ ID NO: 24896 - protein, 202 aa, Arabidopsis thaliana
  peptide (1)..(202): Ceres Seq. ID no. 12482924
MACKTILRSVFVSESRRTSGARRCFFLPPSPASVPVHGLFPAPKSLCFNGFASVPERATRLNCSHNDQSDQGPPQEAVLKAISEVSKTDGRVGKTTNMIIGGTVADDSAKDWLELDQKVNTYPTERGFTAIGTGGNDFVHAMVVAVESVIDRQIPEDCVKQTLSSKGKYVSVNIGPIQVVSSEQVQAVYNAMRRDERMKYFL

SEQ ID NO: 24897 - protein, 110 aa, Arabidopsis thaliana
  peptide (1)..(110): Ceres Seq. ID no. 12482925
FSFDSSPKRSFKKWLAKRFCVPFSYRNHDGLPAHVDASFSLLLQHQFQSMVCSRRQRVYVSMVLHLFPSGLLGLIAAITINPIKVRLKKLFSRQSQKCQRLMGGLGKLLT

SEQ ID NO: 24898 - DNA, 1232 bp, Arabidopsis thaliana
  misc_feature (1)..(1232): Ceres Seq. ID no. 12324850
  misc_feature (1)..(1232): Ortholog of  Ceres SEQ ID NO 13582619 as cited in SEQ ID NO 56520
  misc_feature (1)..(1232): Ortholog of  Ceres SEQ ID NO 12616221 as cited in SEQ ID NO 63291
atttgaacatggcatatcttataaagaaaaaaaattctcgttatgagattcattaaacttttctatttattttcaataatatcctacattttttttgttgattaaccaagttaagttttaaaagctaaatgtttctaaacaaaaggacaaaatttctactattgcgagcctttcgaaccaaaaagttggcgctaacatttaatcacatgatcagtttcattatcctgtagtgtataatacaactaagcgtgtttgtgtgtatgtttcaaacaaatgattagaaatggcatgcgtgggagggaaggattggtatttctacagccaaagagaccgaaaatacgcgacggggctgagaactaaccgagcaacggccaccggatattggaaagccaccggcaaagacagaaccattctaagaaagggtaagctagttgggatgaggaagacattggttttctatcaaggtcgagctcctcgaggccgtaaaaccgattgggtcatgcacgaattccgtctccaaggatctcatcatcctcccaatcattctctgagctctccaaaggaagactgggtcttgtgtagggtattccataagaatacggaaggagttatatgtagagacaacatgggaagctgttttgatgagacagcctctgcatcgcttcctccactgatggatccttacatcaactttgaccaagaaccctcttcttatctcagtgatgatcatcactacatcatcaatgagcacgtaccctgcttctccaatttgtcacagaaccaaaccttaaactcgaacctaaccaactcagtctctgaactcaagattccatgcaagaaccctaaccccttgtttactggtggttcagcctcagccacgctcacaggcctcgactcattctgttcttcagatcagatggttctcagagctctactcagtcagctcactaagattgatggaagcctcgggcctaaagaatcacagagttatggagaaggtagctcggagagcctcctgaccgacatcggtataccaagcactgtttggaattgctgatgatcgagtgtaacgagagttactattgctatattcctatccatgattggaacaattcttcggggggaaataacgtgtgcttgtctgattgtacaaacatttcctcactcttgtacccacggtagattcatgtaaaataccacttatgacgctagacatacatatatttcatcgc

SEQ ID NO: 24899 - protein, 257 aa, Arabidopsis thaliana
  peptide (1)..(257): Ceres Seq. ID no. 12324851
MACVGGKDWYFYSQRDRKYATGLRTNRATATGYWKATGKDRTILRKGKLVGMRKTLVFYQGRAPRGRKTDWVMHEFRLQGSHHPPNHSLSSPKEDWVLCRVFHKNTEGVICRDNMGSCFDETASASLPPLMDPYINFDQEPSSYLSDDHHYIINEHVPCFSNLSQNQTLNSNLTNSVSELKIPCKNPNPLFTGGSASATLTGLDSFCSSDQMVLRALLSQLTKIDGSLGPKESQSYGEGSSESLLTDIGIPSTVWNC

SEQ ID NO: 24900 - protein, 206 aa, Arabidopsis thaliana
  peptide (1)..(206): Ceres Seq. ID no. 12324852
MRKTLVFYQGRAPRGRKTDWVMHEFRLQGSHHPPNHSLSSPKEDWVLCRVFHKNTEGVICRDNMGSCFDETASASLPPLMDPYINFDQEPSSYLSDDHHYIINEHVPCFSNLSQNQTLNSNLTNSVSELKIPCKNPNPLFTGGSASATLTGLDSFCSSDQMVLRALLSQLTKIDGSLGPKESQSYGEGSSESLLTDIGIPSTVWNC

SEQ ID NO: 24901 - protein, 185 aa, Arabidopsis thaliana
  peptide (1)..(185): Ceres Seq. ID no. 12324853
MHEFRLQGSHHPPNHSLSSPKEDWVLCRVFHKNTEGVICRDNMGSCFDETASASLPPLMDPYINFDQEPSSYLSDDHHYIINEHVPCFSNLSQNQTLNSNLTNSVSELKIPCKNPNPLFTGGSASATLTGLDSFCSSDQMVLRALLSQLTKIDGSLGPKESQSYGEGSSESLLTDIGIPSTVWNC

SEQ ID NO: 24902 - DNA, 1684 bp, Arabidopsis thaliana
  misc_feature (1)..(1684): Ceres Seq. ID no. 12331203
  misc_feature (1)..(1684): Ortholog of  Ceres SEQ ID NO 14307253 as cited in SEQ ID NO 54783
  misc_feature (1)..(1684): Ortholog of  Ceres SEQ ID NO 14312300 as cited in SEQ ID NO 58632
  misc_feature (1)..(1684): Ortholog of  Ceres SEQ ID NO 13654989 as cited in SEQ ID NO 63117
  misc_feature (1)..(1684): Ortholog of  Ceres SEQ ID NO 13584744 as cited in SEQ ID NO 69137
gtttgtcactaagctctctctctctctccttctttttcgcaattcttctttcttcttcgacttttttttttcttcctctcttctctttggttttttggtgttgggttttatctgggttcctgatttcttcaacgaggaaggaaggaagaagaagagaaaagggacaagcgagaattactcttttctccttcaatttccgatgggttgtttcggatgcagtaagaaatcgagcaaacgatccgagactaacaaagatactgtcataaatagaaaaattgtcggtggtactacgagcgttgctaagagtgataagcgagacgatcagactcagcccagttcagattcaacaaaagtcagtccatatagagatgtaaacaatgaaggaggagttggtaaggaagatcagttatctttggatgtgaagggtttgaatctaaatgaccaagtcacagggaagaaagcacagacttttacttttcaagaacttgcagaagctacgggaaactttagatcggattgttttcttggtgaaggaggtttcggaaaagttttcaagggaactatagagaaattggatcaggttgttgcaatcaagcaacttgatcgtaatggggttcaaggaatcagggaatttgtggttgaggtattgactctaagtcttgctgaccatccgaatcttgtgaagcttattgggttttgtgctgagggtgatcagagactactggtgtacgagtatatgccgcaaggatcccttgaagatcatctacatgttctcccttctggtaaaaagcctcttgactggaacacccggatgaaaatagcagctggtgcagcaagaggtttagagtatctgcatgacagaatgacgccccctgtgatttaccgagatcttaaatgttcgaatattttgcttggtgaagactatcaaccgaaactatctgactttgggttggctaaagtaggaccaagcggggataaaacccatgtctcgacaagggttatgggaacgtacggatactgtgctcctgactacgctatgacgggtcagctcacatttaaatccgatatatacagttttggagtagtccttctcgagcttatcaccggaaggaaagcgattgacaatacaaaaacgcgtaaagatcagaatttggttggatgggcacgaccattgttcaaagacaggaggaacttcccaaaaatggttgatccattgcttcagggacaatacccagttagaggactgtaccaagcactagcaatatcagcaatgtgcgttcaagagcagcctaccatgagaccagtggtatctgatgtagtattggctctcaacttcttagcctcttctaaatatgatccgaatagccctagcagcagcagcgggaagaacccttcttttcacagagacagagatgatgaagagaaaagaccacacctcgtcaaggaaactgaatgtgaagggtcctcataggatatccaataagagagtggtaaaaaatcaaatctaattttggcttcaccaagaaattggggaaaaatataaaaccaactcaggtacatttttaacatctattgtggatgtaaatcttgactcggcttctttgtatgtagaatgtttctgttctgtagaaaaggagaaaaaaaaaaaccattttgttttgggacatatatacatatattgaac

SEQ ID NO: 24903 - protein, 489 aa, Arabidopsis thaliana
  peptide (1)..(489): Ceres Seq. ID no. 12331204
FVTKLSLSLLLFRNSSFFFDFFFSSSLLFGFLVLGFIWVPDFFNEEGRKKKRKGTSENYSFLLQFPMGCFGCSKKSSKRSETNKDTVINRKIVGGTTSVAKSDKRDDQTQPSSDSTKVSPYRDVNNEGGVGKEDQLSLDVKGLNLNDQVTGKKAQTFTFQELAEATGNFRSDCFLGEGGFGKVFKGTIEKLDQVVAIKQLDRNGVQGIREFVVEVLTLSLADHPNLVKLIGFCAEGDQRLLVYEYMPQGSLEDHLHVLPSGKKPLDWNTRMKIAAGAARGLEYLHDRMTPPVIYRDLKCSNILLGEDYQPKLSDFGLAKVGPSGDKTHVSTRVMGTYGYCAPDYAMTGQLTFKSDIYSFGVVLLELITGRKAIDNTKTRKDQNLVGWARPLFKDRRNFPKMVDPLLQGQYPVRGLYQALAISAMCVQEQPTMRPVVSDVVLALNFLASSKYDPNSPSSSSGKNPSFHRDRDDEEKRPHLVKETECEGSS

SEQ ID NO: 24904 - protein, 423 aa, Arabidopsis thaliana
  peptide (1)..(423): Ceres Seq. ID no. 12331205
MGCFGCSKKSSKRSETNKDTVINRKIVGGTTSVAKSDKRDDQTQPSSDSTKVSPYRDVNNEGGVGKEDQLSLDVKGLNLNDQVTGKKAQTFTFQELAEATGNFRSDCFLGEGGFGKVFKGTIEKLDQVVAIKQLDRNGVQGIREFVVEVLTLSLADHPNLVKLIGFCAEGDQRLLVYEYMPQGSLEDHLHVLPSGKKPLDWNTRMKIAAGAARGLEYLHDRMTPPVIYRDLKCSNILLGEDYQPKLSDFGLAKVGPSGDKTHVSTRVMGTYGYCAPDYAMTGQLTFKSDIYSFGVVLLELITGRKAIDNTKTRKDQNLVGWARPLFKDRRNFPKMVDPLLQGQYPVRGLYQALAISAMCVQEQPTMRPVVSDVVLALNFLASSKYDPNSPSSSSGKNPSFHRDRDDEEKRPHLVKETECEGSS

SEQ ID NO: 24905 - protein, 244 aa, Arabidopsis thaliana
  peptide (1)..(244): Ceres Seq. ID no. 12331206
MPQGSLEDHLHVLPSGKKPLDWNTRMKIAAGAARGLEYLHDRMTPPVIYRDLKCSNILLGEDYQPKLSDFGLAKVGPSGDKTHVSTRVMGTYGYCAPDYAMTGQLTFKSDIYSFGVVLLELITGRKAIDNTKTRKDQNLVGWARPLFKDRRNFPKMVDPLLQGQYPVRGLYQALAISAMCVQEQPTMRPVVSDVVLALNFLASSKYDPNSPSSSSGKNPSFHRDRDDEEKRPHLVKETECEGSS

SEQ ID NO: 24906 - DNA, 1381 bp, Arabidopsis thaliana
  misc_feature (1)..(1381): Ceres Seq. ID no. 12339948
  misc_feature (1)..(1381): Ortholog of  Ceres SEQ ID NO 15168502 as cited in SEQ ID NO 60095
atgtttaatctcggtttcatcgtcaagaagatcattaatcgaccgtactcttccgaaaaaccttccgagatccggttttcgattgagtcttcgacatgtggattccggtaaaaacctcaccaagatccaaaagattcagagagggattaaccgtggattccatagattaaacagattaggagctgtagctgttttagctgtagcctctaagcctgatgatactaataacattaaagcacctactcatggaggaagcggtgagtttcttatggagttgtctattggaaacccggcggttaaatactctgctattgttgataccggaagtgaccttatttggactcaatgcaagccttgcactgaatgttttgatcaaccaactccgatttttgacccggagaaatcttcctcttactcgaaagtaggatgctcttctggtctttgtaacgcattgcctcgatcaaactgtaacgaagataaagatgcttgtgagtatttgtatacttatggagattactcatctacaagaggggctcttggccacggaaacgttcactttcgaggacgagaactcgatttctggtatcgggtttgggtgtggggttgagaacgaaggcgacgggttctctcaagggtcaggtcttgtaggtcttggtcgcggaccgctctcgcttatttctcagctcaaagagactaagttttcttattgcttgacctcgattgaggatagtgaagcatctagctcgttgtttattggatctttagcctcgggtatcgtcaacaaaacaggtgcaagtttagatggtgaagtcaccaaaacgatgtctttgctacgaaatccagatcagccttcgttctattaccttgagttacaaggcatcaccgttggagcaaaacgcctttctgttgaaaagtctacttttgaactagccgaagatggaaccggaggtatgatcatagactcaggcacgaccatcacgtatctcgaggagaccgcgtttaaagtgttgaaggaagagtttacttctcggatgagtttaccagtagatgactctggatccacaggacttgacttgtgcttcaagttacctaatgcagccaagaatattgatgttcctaagctgatttttcattttaaaggtgctgattaggagcttcccggagagaactacatggtggcggataagcaccggcgttttgtgtttggccatgggaagttctaatgggatgtctattttcggaaatgttcaacagcagaattttaatgtacttcatgatcttgagaaagaaacggtgtcgtttgttcccacggaatgtggaaaattgtagatttttaatttgcttttttctcttattataaatgaaatttatactttgtggc

SEQ ID NO: 24907 - protein, 222 aa, Arabidopsis thaliana
  peptide (1)..(222): Ceres Seq. ID no. 12339949
MLVSICILMEITHLQEGLLATETFTFEDENSISGIGFGCGVENEGDGFSQGSGLVGLGRGPLSLISQLKETKFSYCLTSIEDSEASSSLFIGSLASGIVNKTGASLDGEVTKTMSLLRNPDQPSFYYLELQGITVGAKRLSVEKSTFELAEDGTGGMIIDSGTTITYLEETAFKVLKEEFTSRMSLPVDDSGSTGLDLCFKLPNAAKNIDVPKLIFHFKGAD

SEQ ID NO: 24908 - protein, 214 aa, Arabidopsis thaliana
  peptide (1)..(214): Ceres Seq. ID no. 12339950
MEITHLQEGLLATETFTFEDENSISGIGFGCGVENEGDGFSQGSGLVGLGRGPLSLISQLKETKFSYCLTSIEDSEASSSLFIGSLASGIVNKTGASLDGEVTKTMSLLRNPDQPSFYYLELQGITVGAKRLSVEKSTFELAEDGTGGMIIDSGTTITYLEETAFKVLKEEFTSRMSLPVDDSGSTGLDLCFKLPNAAKNIDVPKLIFHFKGAD

SEQ ID NO: 24909 - protein, 201 aa, Arabidopsis thaliana
  peptide (1)..(201): Ceres Seq. ID no. 12339951
CLISVSSSRRSLIDRTLPKNLPRSGFRLSLRHVDSGKNLTKIQKIQRGINRGFHRLNRLGAVAVLAVASKPDDTNNIKAPTHGGSGEFLMELSIGNPAVKYSAIVDTGSDLIWTQCKPCTECFDQPTPIFDPEKSSSYSKVGCSSGLCNALPRSNCNEDKDACEYLYTYGDYSSTRGALGHGNVHFRGRELDFWYRVWVWG

SEQ ID NO: 24910 - DNA, 1304 bp, Arabidopsis thaliana
  misc_feature (1)..(1304): Ceres Seq. ID no. 12602447
  misc_feature (1)..(1304): Ortholog of  Ceres SEQ ID NO 15177119 as cited in SEQ ID NO 51196
atctcctctgctaccttaagctgagagagtcacagtctcgtctctatctctcctctttgcctttttccactcactacacgccaaacccgacgacatggcagctacctctctcactgcccctccttctttctccggtctccgccgcatttctcccaagctcgacgctgccgccgtctcctcccaccaatccttcttccaccgcgtcaattcctctacccgtctcgtttcttcctcttcttcttctcatcgctcccccagaggtgttgttgccatggctggatccggaaagtttttcgttggaggaaactggaagtgtaacgggactaaggactccatcgccaagcttatctccgatctcaacagtgcaaccttggaagcagatgtagatgttgttgtgtcacctccatttgtctacatcgaccaggtcaaatcctcgttgacagaccgtattgacatatcaggtcagaactcttgggttgggaaaggtggagccttcactggtgaaatcagcgtggaacagctcaaagaccttggctgcaagtgggtcattcttgggcattccgaacggagacatgtcatcggagaaaaagatgagtttatcgggaagaaagctgcatatgcattgagtgagggtcttggagtgatagcttgtattggggaaaagctagaagagagggaagcaggcaagacgtttgatgtttgcttcgcgcaactgaaggcgtttgctgatgctgtgcctagctgggacaatatagttgttgcatacgagcctgtatgggcaattggaactggtaaagttgcatctcctcagcaagcacaagaagtccatgtagctgtccgcggttggctaaagaagaatgtctctgaggaagttgcttccaaaacgagaatcatatatggaggttctgtcaatggaggcaacagtgcagagcttgccaaagaagaagacattgatggatttcttgttggtggtgcctccttgaagggtcctgagtttgcaaccattgtgaactcagtcacgtcgaagaaagttgctgcttgattgagaactatcagtaacggaaatcgctagtctccatggaacagatgagatgagaaataaaagggaggttagcgaccttgttgttgttgttgtgttcttacatcttcttcttgaactaataatggaaaacagaaagaaaaaaaatgattcgtgagctctggtttgacagagagagataaaagggtctttgattaaagatctttgtaactaagctgtgattctttttttcaatttgagtaagcttgactcacgagtttcttct

SEQ ID NO: 24911 - protein, 315 aa, Arabidopsis thaliana
  peptide (1)..(315): Ceres Seq. ID no. 12602448
MAATSLTAPPSFSGLRRISPKLDAAAVSSHQSFFHRVNSSTRLVSSSSSSHRSPRGVVAMAGSGKFFVGGNWKCNGTKDSIAKLISDLNSATLEADVDVVVSPPFVYIDQVKSSLTDRIDISGQNSWVGKGGAFTGEISVEQLKDLGCKWVILGHSERRHVIGEKDEFIGKKAAYALSEGLGVIACIGEKLEEREAGKTFDVCFAQLKAFADAVPSWDNIVVAYEPVWAIGTGKVASPQQAQEVHVAVRGWLKKNVSEEVASKTRIIYGGSVNGGNSAELAKEEDIDGFLVGGASLKGPEFATIVNSVTSKKVAA

SEQ ID NO: 24912 - protein, 256 aa, Arabidopsis thaliana
  peptide (1)..(256): Ceres Seq. ID no. 12602449
MAGSGKFFVGGNWKCNGTKDSIAKLISDLNSATLEADVDVVVSPPFVYIDQVKSSLTDRIDISGQNSWVGKGGAFTGEISVEQLKDLGCKWVILGHSERRHVIGEKDEFIGKKAAYALSEGLGVIACIGEKLEEREAGKTFDVCFAQLKAFADAVPSWDNIVVAYEPVWAIGTGKVASPQQAQEVHVAVRGWLKKNVSEEVASKTRIIYGGSVNGGNSAELAKEEDIDGFLVGGASLKGPEFATIVNSVTSKKVAA

SEQ ID NO: 24913 - DNA, 1249 bp, Arabidopsis thaliana
  misc_feature (1)..(1249): Ceres Seq. ID no. 12371882
  misc_feature (1)..(1249): Ortholog of  Ceres SEQ ID NO 13654583 as cited in SEQ ID NO 68599
acgattgatatatactgatctcttgtcttcttcactctccaacggttctgtactatcttcagagcttcgagaatgtcgatgttaatggcggccaaatccacttcactctttagctcaaaccctacaatttcagctaaaatagggcaaaaccctcgcggcgtcagatcggtttatccgacggtgagaatgcagtcacgtgttcaccgtctgattgaagagcaaggtgctgtgcttattcccggagtctacgacgcattatctgcggctattgtgcagcagaccggattctccgccgcattaatctccggttacgccctctccgccgtaactttgggaaaaccagatttcggtttgataacacctccggagatggcagcaacggcgagatcagtgtgtgctgcggctccaaagattccaatcattgcagatgcagatactggtggaggaaatgctctcaatgttcaaagaaccgtcaaggacttaatcgcagcaggtgctgctggttgcttccttgaggaccaggcatggccaaagaggtgtggacatatgcgtggcaaagaggtcatacctgcggaggaacacgctgctaaaatagcatcagcaagagacgctattggagatgctgacttttttctaatcgctaggactgatgctcgtgcactttccgcaaaaacaggactttcagacgccattgaccgtgctaatctttatatggaggcaggagctgatgcttcctttgttgaggcaccgagggacgatgacgagcttaaggaaatcggaaggcgcacaaaaggttacagactgtgtaacatgcttgaaggtggacgcacgccattgcatacgcctgatgagcttaaagaaatgggttttcacttgatcgcacacccacttacctcgctctatgcgtcgactcgagctcttgtcgatgttcttaagattctcaaggagaaaggaaccaccaaagaccacttagaaaagatgataactttcgaagagtttaaccgtttggtgaacttggattcatggtatgagctcgaaaccaagtactctaacctcagaaacgctcttggggaaacaaaataatgagattctgattactctgtccacaatcgaagctcttgcaatgtatcatcaataatgttatcttcttttttcacttgtttgtatcaatattcaataattgtgtgttttgacatgtaaaaactcaaaaaaagttctaatttatttggaaagcttgttcttgctgctt

SEQ ID NO: 24914 - protein, 336 aa, Arabidopsis thaliana
  peptide (1)..(336): Ceres Seq. ID no. 12371883
MSMLMAAKSTSLFSSNPTISAKIGQNPRGVRSVYPTVRMQSRVHRLIEEQGAVLIPGVYDALSAAIVQQTGFSAALISGYALSAVTLGKPDFGLITPPEMAATARSVCAAAPKIPIIADADTGGGNALNVQRTVKDLIAAGAAGCFLEDQAWPKRCGHMRGKEVIPAEEHAAKIASARDAIGDADFFLIARTDARALSAKTGLSDAIDRANLYMEAGADASFVEAPRDDDELKEIGRRTKGYRLCNMLEGGRTPLHTPDELKEMGFHLIAHPLTSLYASTRALVDVLKILKEKGTTKDHLEKMITFEEFNRLVNLDSWYELETKYSNLRNALGETK

SEQ ID NO: 24915 - protein, 334 aa, Arabidopsis thaliana
  peptide (1)..(334): Ceres Seq. ID no. 12371884
MLMAAKSTSLFSSNPTISAKIGQNPRGVRSVYPTVRMQSRVHRLIEEQGAVLIPGVYDALSAAIVQQTGFSAALISGYALSAVTLGKPDFGLITPPEMAATARSVCAAAPKIPIIADADTGGGNALNVQRTVKDLIAAGAAGCFLEDQAWPKRCGHMRGKEVIPAEEHAAKIASARDAIGDADFFLIARTDARALSAKTGLSDAIDRANLYMEAGADASFVEAPRDDDELKEIGRRTKGYRLCNMLEGGRTPLHTPDELKEMGFHLIAHPLTSLYASTRALVDVLKILKEKGTTKDHLEKMITFEEFNRLVNLDSWYELETKYSNLRNALGETK

SEQ ID NO: 24916 - protein, 332 aa, Arabidopsis thaliana
  peptide (1)..(332): Ceres Seq. ID no. 12371885
MAAKSTSLFSSNPTISAKIGQNPRGVRSVYPTVRMQSRVHRLIEEQGAVLIPGVYDALSAAIVQQTGFSAALISGYALSAVTLGKPDFGLITPPEMAATARSVCAAAPKIPIIADADTGGGNALNVQRTVKDLIAAGAAGCFLEDQAWPKRCGHMRGKEVIPAEEHAAKIASARDAIGDADFFLIARTDARALSAKTGLSDAIDRANLYMEAGADASFVEAPRDDDELKEIGRRTKGYRLCNMLEGGRTPLHTPDELKEMGFHLIAHPLTSLYASTRALVDVLKILKEKGTTKDHLEKMITFEEFNRLVNLDSWYELETKYSNLRNALGETK

SEQ ID NO: 24917 - DNA, 1832 bp, Arabidopsis thaliana
  misc_feature (1)..(1832): Ceres Seq. ID no. 13494160
  misc_feature (1)..(1832): Ortholog of  Ceres SEQ ID NO 14314620 as cited in SEQ ID NO 56872
  misc_feature (1)..(1832): Ortholog of  Ceres SEQ ID NO 15178460 as cited in SEQ ID NO 66107
actttttttcttcttcttccatttttttgttctcacgtcgctctctctttttttcgagattcagctgtaaaaccctaactagcgccatagccaaggaagctttcctcagatcgtctctccgaaattttccggttaatcgtcagttaaggggaaaattaggctatggcgatgttaggtgcacagcaagttccagcagcagcttgtactccagatatggttgggaatgcttttgtgccccagtattatcacatattgcatcaatcacctgagcatgttcacagattttaccaagagattagcaagttaggtcgtcctgaagagaatggtttaatgagcatcacttctaccttgcaagctattgacaagaagataatggcgcttggttacggtgtaatcagtgcagagatagctactgtggacacacaagaatctcatggaggtggttatattgtactggtgactgggtatttgacgggaaaagacagtgtcaggaggacgtttagtcagaccttcttccttgctccacaggagacaggatactttgtcttgaatgatatgtttcgattcattgatgaaggcactgtcgtacatggaaatcagattccagtgaacaacgtccaagctcctgtcaacacttaccaggacacagctgctgcgaaggaaattccagatgactttgttcaggagaaatatgtccaagagaatcatgctgttaagcaaaccgaggtgttgtccaagagcattaatgagcctgaaaaagtgttcacgccctctgaagatgaacaagtatcagctgcagaagaagctctggtgactgaaacagttaatgaagcaccaattgaagtgcaaaaggttggagaatctgattctaggactggcgaaattccaaagagatcttatgcatcaattgtgaaggttatgaaagaaaatgctgcaccaatgtctgcttcgagaactccaacaaaggtggaaccaaagaaacaagaagatcaagccattcatatccctctaccaacaccattgtctgagaaatcagattcaggagcaaatgttgctgtaaatgagaacaatcaagagaatgaaagagctctaggtccatccatctatctaaagggtttaccccttgatgcaacacctgccttgcttgagaatgagttccagaaatttggacttattaggaccaatggaattcaagtgagaagccagaagggattctgttttggttttgttgagtttgaatccgcaagttccatgcaaagcgctatcgaggcatcacctgtcatgctcaatggacacaaagttgttgtggaggaaaagcgatctaccgcaagagggaactatagaggacgttcgacgtttggtgtaaacacaggctacagaaacgaaggaggaaggggtcgtgggagctttggaggtggaagaggaggatatggccggaccgatttcaacggatatggtaataacaggggaaacaatagaggcggatacgcaaaccgagcaaatggtgatggtggtgggttcccgagggccaatggtaacaatggacgagtaagacgtggtggcggaaatgatgctaacagagctacgaaacccgtggatgatgctccccgtgtgtctgttgctgcgtaaatgtgcttttgaaacaaaaagctctattggttttagagagtttaggcgtagagcaatggcaaaaaaaaacactattattttcttttcactgtgtcgccattttattaattggagtcaaaacttgagagcaagagagagtttcgtcggttcttgcttgtctattttttcttcactgctaatgaaatctctttcttcatgtggcc

SEQ ID NO: 24918 - protein, 488 aa, Arabidopsis thaliana
  peptide (1)..(488): Ceres Seq. ID no. 13494161
MAMLGAQQVPAAACTPDMVGNAFVPQYYHILHQSPEHVHRFYQEISKLGRPEENGLMSITSTLQAIDKKIMALGYGVISAEIATVDTQESHGGGYIVLVTGYLTGKDSVRRTFSQTFFLAPQETGYFVLNDMFRFIDEGTVVHGNQIPVNNVQAPVNTYQDTAAAKEIPDDFVQEKYVQENHAVKQTEVLSKSINEPEKVFTPSEDEQVSAAEEALVTETVNEAPIEVQKVGESDSRTGEIPKRSYASIVKVMKENAAPMSASRTPTKVEPKKQEDQAIHIPLPTPLSEKSDSGANVAVNENNQENERALGPSIYLKGLPLDATPALLENEFQKFGLIRTNGIQVRSQKGFCFGFVEFESASSMQSAIEASPVMLNGHKVVVEEKRSTARGNYRGRSTFGVNTGYRNEGGRGRGSFGGGRGGYGRTDFNGYGNNRGNNRGGYANRANGDGGGFPRANGNNGRVRRGGGNDANRATKPVDDAPRVSVAA

SEQ ID NO: 24919 - protein, 486 aa, Arabidopsis thaliana
  peptide (1)..(486): Ceres Seq. ID no. 13494162
MLGAQQVPAAACTPDMVGNAFVPQYYHILHQSPEHVHRFYQEISKLGRPEENGLMSITSTLQAIDKKIMALGYGVISAEIATVDTQESHGGGYIVLVTGYLTGKDSVRRTFSQTFFLAPQETGYFVLNDMFRFIDEGTVVHGNQIPVNNVQAPVNTYQDTAAAKEIPDDFVQEKYVQENHAVKQTEVLSKSINEPEKVFTPSEDEQVSAAEEALVTETVNEAPIEVQKVGESDSRTGEIPKRSYASIVKVMKENAAPMSASRTPTKVEPKKQEDQAIHIPLPTPLSEKSDSGANVAVNENNQENERALGPSIYLKGLPLDATPALLENEFQKFGLIRTNGIQVRSQKGFCFGFVEFESASSMQSAIEASPVMLNGHKVVVEEKRSTARGNYRGRSTFGVNTGYRNEGGRGRGSFGGGRGGYGRTDFNGYGNNRGNNRGGYANRANGDGGGFPRANGNNGRVRRGGGNDANRATKPVDDAPRVSVAA

SEQ ID NO: 24920 - protein, 471 aa, Arabidopsis thaliana
  peptide (1)..(471): Ceres Seq. ID no. 13494163
MVGNAFVPQYYHILHQSPEHVHRFYQEISKLGRPEENGLMSITSTLQAIDKKIMALGYGVISAEIATVDTQESHGGGYIVLVTGYLTGKDSVRRTFSQTFFLAPQETGYFVLNDMFRFIDEGTVVHGNQIPVNNVQAPVNTYQDTAAAKEIPDDFVQEKYVQENHAVKQTEVLSKSINEPEKVFTPSEDEQVSAAEEALVTETVNEAPIEVQKVGESDSRTGEIPKRSYASIVKVMKENAAPMSASRTPTKVEPKKQEDQAIHIPLPTPLSEKSDSGANVAVNENNQENERALGPSIYLKGLPLDATPALLENEFQKFGLIRTNGIQVRSQKGFCFGFVEFESASSMQSAIEASPVMLNGHKVVVEEKRSTARGNYRGRSTFGVNTGYRNEGGRGRGSFGGGRGGYGRTDFNGYGNNRGNNRGGYANRANGDGGGFPRANGNNGRVRRGGGNDANRATKPVDDAPRVSVAA

SEQ ID NO: 24921 - DNA, 1122 bp, Arabidopsis thaliana
  misc_feature (1)..(1122): Ceres Seq. ID no. 12327371
  misc_feature (1)..(1122): Ortholog of  Ceres SEQ ID NO 15171289 as cited in SEQ ID NO 51570
aaccaaaaagcttttcttcccaacacacacaaaaaaaaaactgtaacgaccaaaaaaaaagaggacgcgttagaagaaaaaaaagaacaatccgataaaaagatccggcgatgtcaaacccgacccgtaagaatatggagaggattaaaggtccatggagtccagaagaagatgatctgttgcagaggcttgttcagaaacatggtccgaggaactggtctttgattagcaaatcaatccctggacgttccggcaaatcttgtcgtctccggtggtgtaaccagctatctccggaggtagagcaccgtgctttttcgcaggaagaagacgagacgattattcgagctcacgctcggtttggtaacaagtgggctacgatctctcgtcttctcaatggacgaaccgataacgctatcaagaatcattggaactcgacgctgaagcgaaaatgcagcgtcgaagggcaaagttgtgattttggtggtaatggagggtatgatggtaatttaggagaagagcaaccgttgaaacgtacggcgagtggtggtggtggtgtctcgactggcttgtatatgagtcccggaagtccatcgggatctgacgtcagcgagcaatctagtggtggtgcacacgtgtttaaaccaacggttagatctgaggttacagcgtcatcgtctggtgaagatcctccaacttatcttagtttgtctcttccttggactgacgagacggttcgagtcaacgagccggttcaacttaaccagaatacggttatggacggtggttatacggcggagctgtttccggttagaaaggaagagcaagtggaagtagaagaagaagaagcgaaagggatatctggtggattcggtggtgagttcatgacggtggttcaggagatgataaggacggaggtgaggagttacatggcggatttacagcgaggaaacgtcggtggtagtagttctggcggcggaggtggcggttcgtgtatgccacaaagtgtaaacagccgtcgtgttgggtttagagagtttatagtgaaccaaatcggaattgggaagatggagtagagtgataagaacaagttttccctctgtttctcgggaaaataaaagtttc

SEQ ID NO: 24922 - protein, 320 aa, Arabidopsis thaliana
  peptide (1)..(320): Ceres Seq. ID no. 12327372
MSNPTRKNMERIKGPWSPEEDDLLQRLVQKHGPRNWSLISKSIPGRSGKSCRLRWCNQLSPEVEHRAFSQEEDETIIRAHARFGNKWATISRLLNGRTDNAIKNHWNSTLKRKCSVEGQSCDFGGNGGYDGNLGEEQPLKRTASGGGGVSTGLYMSPGSPSGSDVSEQSSGGAHVFKPTVRSEVTASSSGEDPPTYLSLSLPWTDETVRVNEPVQLNQNTVMDGGYTAELFPVRKEEQVEVEEEEAKGISGGFGGEFMTVVQEMIRTEVRSYMADLQRGNVGGSSSGGGGGGSCMPQSVNSRRVGFREFIVNQIGIGKME

SEQ ID NO: 24923 - protein, 312 aa, Arabidopsis thaliana
  peptide (1)..(312): Ceres Seq. ID no. 12327373
MERIKGPWSPEEDDLLQRLVQKHGPRNWSLISKSIPGRSGKSCRLRWCNQLSPEVEHRAFSQEEDETIIRAHARFGNKWATISRLLNGRTDNAIKNHWNSTLKRKCSVEGQSCDFGGNGGYDGNLGEEQPLKRTASGGGGVSTGLYMSPGSPSGSDVSEQSSGGAHVFKPTVRSEVTASSSGEDPPTYLSLSLPWTDETVRVNEPVQLNQNTVMDGGYTAELFPVRKEEQVEVEEEEAKGISGGFGGEFMTVVQEMIRTEVRSYMADLQRGNVGGSSSGGGGGGSCMPQSVNSRRVGFREFIVNQIGIGKME

SEQ ID NO: 24924 - protein, 166 aa, Arabidopsis thaliana
  peptide (1)..(166): Ceres Seq. ID no. 12327374
MSPGSPSGSDVSEQSSGGAHVFKPTVRSEVTASSSGEDPPTYLSLSLPWTDETVRVNEPVQLNQNTVMDGGYTAELFPVRKEEQVEVEEEEAKGISGGFGGEFMTVVQEMIRTEVRSYMADLQRGNVGGSSSGGGGGGSCMPQSVNSRRVGFREFIVNQIGIGKME

SEQ ID NO: 24925 - DNA, 1045 bp, Arabidopsis thaliana
  misc_feature (1)..(1045): Ceres Seq. ID no. 12397017
  misc_feature (1)..(1045): Ortholog of  Ceres SEQ ID NO 14311671 as cited in SEQ ID NO 51251
  misc_feature (1)..(1045): Ortholog of  Ceres SEQ ID NO 14307355 as cited in SEQ ID NO 54610
  misc_feature (1)..(1045): Ortholog of  Ceres SEQ ID NO 13594298 as cited in SEQ ID NO 57803
  misc_feature (1)..(1045): Ortholog of  Ceres SEQ ID NO 13503476 as cited in SEQ ID NO 61978
  misc_feature (1)..(1045): Ortholog of  Ceres SEQ ID NO 12578438 as cited in SEQ ID NO 62201
  misc_feature (1)..(1045): Ortholog of  Ceres SEQ ID NO 12617675 as cited in SEQ ID NO 64656
ctcacattcctcaccaaaccctctccaaaacacacccacacgtacgcacacacacaaagacaatgtctcctttcaaaatattcttcttcacgactcttctcgtggcggcgttttcagtgtcggctgctgatttcaacactgacgtcaacgtagctttgggaaatggccgtgggaagatactcaacaacggccagcttcttactctctccttagacaaatcctctggttccggttttcaatccaaaacagagtatttgtttggaaagattgatatgcagattaagcttgttcctggtaactctgcaggaacagtcacaactttttacctaaaatccgaaggatccacttgggatgagattgattttgagttcttgggtaatatgagtggagatccttatactttacacactaatgtttacactcaaggtaaaggtgacaaagagcaacaattccatctctggttcgacccaaccgccaatttccacacttactcaatcctctggaaccctcaaagaatcatattgaccgtcgatgacacacccattagagagtttaaaaactatgagtctctcggtgtcttgtttccaaagaacaagccgatgaggatgtacgcgagtttatggaacgcagacgattgggcaacaagaggcggtcttgttaaaactgattggtctaaagctccattcatggcttcttacagaaacattaagattgactcgaaaccaaactccaattggtacactcaagaaatggattcaacaagccaagctagactcaaatgggttcagaagaattacatgatctacaattattgtactgaccataggaggtttccacagggagctcctaaggaatgcacaacaagctcatagaatctcaaattatattctatttatttatctacacttcctctctttcttttatgtgaaaattgtgaatgctctgtttctagcttgtctattatgtccgagaatttctttttctgtttttgattcttttcgttgtatatctttgtccaataaaggaaatgatgtgtctttactcc

SEQ ID NO: 24926 - protein, 289 aa, Arabidopsis thaliana
  peptide (1)..(289): Ceres Seq. ID no. 12397018
HIPHQTLSKTHPHVRTHTKTMSPFKIFFFTTLLVAAFSVSAADFNTDVNVALGNGRGKILNNGQLLTLSLDKSSGSGFQSKTEYLFGKIDMQIKLVPGNSAGTVTTFYLKSEGSTWDEIDFEFLGNMSGDPYTLHTNVYTQGKGDKEQQFHLWFDPTANFHTYSILWNPQRIILTVDDTPIREFKNYESLGVLFPKNKPMRMYASLWNADDWATRGGLVKTDWSKAPFMASYRNIKIDSKPNSNWYTQEMDSTSQARLKWVQKNYMIYNYCTDHRRFPQGAPKECTTSS

SEQ ID NO: 24927 - protein, 269 aa, Arabidopsis thaliana
  peptide (1)..(269): Ceres Seq. ID no. 12397019
MSPFKIFFFTTLLVAAFSVSAADFNTDVNVALGNGRGKILNNGQLLTLSLDKSSGSGFQSKTEYLFGKIDMQIKLVPGNSAGTVTTFYLKSEGSTWDEIDFEFLGNMSGDPYTLHTNVYTQGKGDKEQQFHLWFDPTANFHTYSILWNPQRIILTVDDTPIREFKNYESLGVLFPKNKPMRMYASLWNADDWATRGGLVKTDWSKAPFMASYRNIKIDSKPNSNWYTQEMDSTSQARLKWVQKNYMIYNYCTDHRRFPQGAPKECTTSS

SEQ ID NO: 24928 - protein, 199 aa, Arabidopsis thaliana; identical to SEQ ID NO: 21035
  peptide (1)..(199): Ceres Seq. ID no. 12397020

SEQ ID NO: 24929 - DNA, 834 bp, Arabidopsis thaliana
  misc_feature (1)..(834): Ceres Seq. ID no. 12488276
  misc_feature (1)..(834): Ortholog of  Ceres SEQ ID NO 12592832 as cited in SEQ ID NO 62031
cattcgtctctttcgttcctctctgcgtgccctagttattcagatcgccgaatttgcagtaaggagacgaaaatatggtgcacgtttgctactaccgcaactatggaaagaccttcaagggaccacgtcgtccttacgagaaggagcgtcttgattctgaattgaagctggttggtgagtatggtctgcgtaacaagcgtgagctctggagagtgcagtactctcttagccgtatccgtaatgctgctagagatcttttgactcttgatgagaagagtccaagaaggatctttgaaggtgaggctttgctccgtaggatgaaccgttacgggcttcttgatgagagccagaacaagctcgattacgtcttggctttgactgttgagaactttcttgagcgtcgtcttcagactattgtgttcaagtctggtatggctaagtctatccatcactctcgtgtcctcatcaggcagaggcatatcagggttggaaagcaattggtgaacattccatcattcatggtgagacttgattcacagaagcacattgactttgccctcaccagtcccttcggtggtggccgtccaggaagagtgaagagaaggaacgagaagtctgcctccaagaaagcctcaggtggcggtgatgcagacggtgatgacgaagagtaaatctgaagtcgcaccgttttagctatgaatcaatctgctttttgatattttgtagtaagcaactttgttgttcgttttcagaggattgttttatggtttctttcttttactctcgagattgctaaacctttgggttatcatctatttctcacaattatctttt

SEQ ID NO: 24930 - protein, 198 aa, Arabidopsis thaliana
  peptide (1)..(198): Ceres Seq. ID no. 12488277
MVHVCYYRNYGKTFKGPRRPYEKERLDSELKLVGEYGLRNKRELWRVQYSLSRIRNAARDLLTLDEKSPRRIFEGEALLRRMNRYGLLDESQNKLDYVLALTVENFLERRLQTIVFKSGMAKSIHHSRVLIRQRHIRVGKQLVNIPSFMVRLDSQKHIDFALTSPFGGGRPGRVKRRNEKSASKKASGGGDADGDDEE

SEQ ID NO: 24931 - protein, 117 aa, Arabidopsis thaliana
  peptide (1)..(117): Ceres Seq. ID no. 12488278
MNRYGLLDESQNKLDYVLALTVENFLERRLQTIVFKSGMAKSIHHSRVLIRQRHIRVGKQLVNIPSFMVRLDSQKHIDFALTSPFGGGRPGRVKRRNEKSASKKASGGGDADGDDEE

SEQ ID NO: 24932 - DNA, 1507 bp, Arabidopsis thaliana
  misc_feature (1)..(1507): Ceres Seq. ID no. 12339912
  misc_feature (1)..(1507): Ortholog of  Ceres SEQ ID NO 13596816 as cited in SEQ ID NO 62287
atgtcgaatctgttggctctcgtcgtcggattcgtaatcgtaattggtcatttgggtattttggtaaatgggttgggtgtgaattggggaacaatggctacacataagctacctccaaagacagtggttcagatgcttaaagacaataacatcaacaaagttaagctttttgatgcggacgagacaaccatgggtgcactcgctggatcgggtcttgaagtgatggtcgctattcccaatgatcagcttaaggttatgactagttacgaccgagccaaagattgggttcgtaagaatgtcactcgttataacttcgatggtggtgtcaatatcacgtttgtagctgttgggaatgagccattcctcaaatcatacaatggatcgttcataaacctcacattccctgcacttgcgaacattcaaaacgctttaaatgaagccggactaggaaactctgtcaaagcaacagtccctttaaacgcggatgtatacgattcaccagcaagcaatcccgttccatctgcaggaagattccgtcccgatatcatcggtcaaatgactcagattgttgactttcttggcaagaacaatgctcccatcacaattaacatctaccctttcttaagtctctatgggaatgatgatttcccactcaactacgccttcttcgatggtgctgaaccgataaacgacaacggtattgattatacaaacgttttcgatgccaatttcgatactttggtgtcgtctttgaaagctgttggtcacggagatatgccaataatcgttggagaagttggttggccaacagagggtgacaaacacgctaatgcaggcagtgcttacagattctacaacgggcttttaccgaggcttggaacaaacaaaggaactccattgagaccaacctacattgaggtatacttgttcggattactcgacgaggatgcaaaaagtatagcaccgggaccgttcgaacgccattggggaatatttaaattcgacgggcaaccaaagtttcctatagatctttcaggtcaaggacagagtaagttcttgattggtgcacaaaacgtgccgtatctacccaacaagtggtgtacgtttaatccagaagccaaggacttgacaaaactcgcggctaatatagattacgcctgcactttctctgattgcacggcgcttggatacggatcttcttgcaatactcttgatgcaaatggaaacgcgtcgtatgcgtttaacatgttctttcaagtgaagaatcaagatgagagtgcttgctattttcaaggtttggccaccattacaacgcagaatatatctcaaggacaatgcaatttccctattcagattgtggcttcctcagcctcttctttttcttgttcgtcttattctttggttgtgttgatcgtttggtttctgttatcagggatgatgttttgaggttagattgaacttgttgaacttagtgagattttgtgagcctaattgttttcttacacat

SEQ ID NO: 24933 - protein, 481 aa, Arabidopsis thaliana
  peptide (1)..(481): Ceres Seq. ID no. 12339913
MSNLLALVVGFVIVIGHLGILVNGLGVNWGTMATHKLPPKTVVQMLKDNNINKVKLFDADETTMGALAGSGLEVMVAIPNDQLKVMTSYDRAKDWVRKNVTRYNFDGGVNITFVAVGNEPFLKSYNGSFINLTFPALANIQNALNEAGLGNSVKATVPLNADVYDSPASNPVPSAGRFRPDIIGQMTQIVDFLGKNNAPITINIYPFLSLYGNDDFPLNYAFFDGAEPINDNGIDYTNVFDANFDTLVSSLKAVGHGDMPIIVGEVGWPTEGDKHANAGSAYRFYNGLLPRLGTNKGTPLRPTYIEVYLFGLLDEDAKSIAPGPFERHWGIFKFDGQPKFPIDLSGQGQSKFLIGAQNVPYLPNKWCTFNPEAKDLTKLAANIDYACTFSDCTALGYGSSCNTLDANGNASYAFNMFFQVKNQDESACYFQGLATITTQNISQGQCNFPIQIVASSASSFSCSSYSLVVLIVWFLLSGMMF

SEQ ID NO: 24934 - protein, 450 aa, Arabidopsis thaliana
  peptide (1)..(450): Ceres Seq. ID no. 12339914
MATHKLPPKTVVQMLKDNNINKVKLFDADETTMGALAGSGLEVMVAIPNDQLKVMTSYDRAKDWVRKNVTRYNFDGGVNITFVAVGNEPFLKSYNGSFINLTFPALANIQNALNEAGLGNSVKATVPLNADVYDSPASNPVPSAGRFRPDIIGQMTQIVDFLGKNNAPITINIYPFLSLYGNDDFPLNYAFFDGAEPINDNGIDYTNVFDANFDTLVSSLKAVGHGDMPIIVGEVGWPTEGDKHANAGSAYRFYNGLLPRLGTNKGTPLRPTYIEVYLFGLLDEDAKSIAPGPFERHWGIFKFDGQPKFPIDLSGQGQSKFLIGAQNVPYLPNKWCTFNPEAKDLTKLAANIDYACTFSDCTALGYGSSCNTLDANGNASYAFNMFFQVKNQDESACYFQGLATITTQNISQGQCNFPIQIVASSASSFSCSSYSLVVLIVWFLLSGMMF

SEQ ID NO: 24935 - protein, 437 aa, Arabidopsis thaliana
  peptide (1)..(437): Ceres Seq. ID no. 12339915
MLKDNNINKVKLFDADETTMGALAGSGLEVMVAIPNDQLKVMTSYDRAKDWVRKNVTRYNFDGGVNITFVAVGNEPFLKSYNGSFINLTFPALANIQNALNEAGLGNSVKATVPLNADVYDSPASNPVPSAGRFRPDIIGQMTQIVDFLGKNNAPITINIYPFLSLYGNDDFPLNYAFFDGAEPINDNGIDYTNVFDANFDTLVSSLKAVGHGDMPIIVGEVGWPTEGDKHANAGSAYRFYNGLLPRLGTNKGTPLRPTYIEVYLFGLLDEDAKSIAPGPFERHWGIFKFDGQPKFPIDLSGQGQSKFLIGAQNVPYLPNKWCTFNPEAKDLTKLAANIDYACTFSDCTALGYGSSCNTLDANGNASYAFNMFFQVKNQDESACYFQGLATITTQNISQGQCNFPIQIVASSASSFSCSSYSLVVLIVWFLLSGMMF

SEQ ID NO: 24936 - DNA, 1401 bp, Arabidopsis thaliana
  misc_feature (1)..(1401): Ceres Seq. ID no. 12577138
  misc_feature (1)..(1401): Ortholog of  Ceres SEQ ID NO 14307678 as cited in SEQ ID NO 59456
  misc_feature (1)..(1401): Ortholog of  Ceres SEQ ID NO 13586716 as cited in SEQ ID NO 0
atactttttcgaaatatcaaaagaaggaacaaaaatgcaagccatcggtagcagccatggcaggaggctctgcttcaaccactatctctccgattccttctccaaattcctctctccttcttcttctccttcccttctccctcagagatgccattcgttctgtatccccaagcttggaagtagtagtaccaatgagaatggcagaggaagaagtgtaacagtgagagcttcaggagatgaagattctaatgagaactttgctcctcttgctcctgttgagcttgaatctcctgtaggacagcttttggagcagattcttagaactcatcctcatcttttacccgttactgtcgatgagcagctcgagaaattcgccgcggaaagcgagtctcgtaaagctgattcgtcttccacacaagacattctccaaaagaggatatctgaagttagagataaggaaagacgtaaaactttagcagagatcatttactgtttagtggtacacagatttgtggaaaaaggaatctctatgattcctcggattaaaccaacttcagacccagcaggacggatagacttatggccgaatcaagaagagaagctcgaagtcattcactctgcggatgcgttcgagatgatacagagtcacttgtcttcagttcttggagacggaccagcagttggtccgttaagctctatagttcagataggcaaaatcaagctaggaaaactctatgctgcttctgctatgtatggatattttctcagaagagtagaccaaagataccaacttgagagaaccatgaacacacttccgaaacgccctgagaaaaccagagaacggttcgaagaaccttcgcctccttacccgttatgggacccggattccttgatcaggattcaaccagaggaatatgatcccgatgaatacgcgatacaaagaaatgaagatgagtcatcgtcttatggattgagatcatatgttacgtatttggactcggatacgcttcagagatatgccacgatacgttctaaagaagccatgactctgattgagaagcagactcaggcgctctttggacgaccggatataaggatactcgaggatggaaagctcgatacttctaacgacgaggttctgtctctgagtgtctctggacttgcgatgttggttttggaagctgtggcttttgggtctttcttatgggattcagagagttacgttgaatccaaataccatttcctcaaggcttgagtttagtcctccttgacatttgtacctttttgagagtagtgaatgtaaatgttaaatctctcatgtgaaattggtagcaactcctattcgtaaaatgtaataaacttcacttcaaaactttagacttaaatcaagcatattagccc

SEQ ID NO: 24937 - protein, 417 aa, Arabidopsis thaliana
  peptide (1)..(417): Ceres Seq. ID no. 12577139
YFFEISKEGTKMQAIGSSHGRRLCFNHYLSDSFSKFLSPSSSPSLLPQRCHSFCIPKLGSSSTNENGRGRSVTVRASGDEDSNENFAPLAPVELESPVGQLLEQILRTHPHLLPVTVDEQLEKFAAESESRKADSSSTQDILQKRISEVRDKERRKTLAEIIYCLVVHRFVEKGISMIPRIKPTSDPAGRIDLWPNQEEKLEVIHSADAFEMIQSHLSSVLGDGPAVGPLSSIVQIGKIKLGKLYAASAMYGYFLRRVDQRYQLERTMNTLPKRPEKTRERFEEPSPPYPLWDPDSLIRIQPEEYDPDEYAIQRNEDESSSYGLRSYVTYLDSDTLQRYATIRSKEAMTLIEKQTQALFGRPDIRILEDGKLDTSNDEVLSLSVSGLAMLVLEAVAFGSFLWDSESYVESKYHFLKA

SEQ ID NO: 24938 - protein, 406 aa, Arabidopsis thaliana
  peptide (1)..(406): Ceres Seq. ID no. 12577140
MQAIGSSHGRRLCFNHYLSDSFSKFLSPSSSPSLLPQRCHSFCIPKLGSSSTNENGRGRSVTVRASGDEDSNENFAPLAPVELESPVGQLLEQILRTHPHLLPVTVDEQLEKFAAESESRKADSSSTQDILQKRISEVRDKERRKTLAEIIYCLVVHRFVEKGISMIPRIKPTSDPAGRIDLWPNQEEKLEVIHSADAFEMIQSHLSSVLGDGPAVGPLSSIVQIGKIKLGKLYAASAMYGYFLRRVDQRYQLERTMNTLPKRPEKTRERFEEPSPPYPLWDPDSLIRIQPEEYDPDEYAIQRNEDESSSYGLRSYVTYLDSDTLQRYATIRSKEAMTLIEKQTQALFGRPDIRILEDGKLDTSNDEVLSLSVSGLAMLVLEAVAFGSFLWDSESYVESKYHFLKA

SEQ ID NO: 24939 - protein, 241 aa, Arabidopsis thaliana
  peptide (1)..(241): Ceres Seq. ID no. 12577141
MIPRIKPTSDPAGRIDLWPNQEEKLEVIHSADAFEMIQSHLSSVLGDGPAVGPLSSIVQIGKIKLGKLYAASAMYGYFLRRVDQRYQLERTMNTLPKRPEKTRERFEEPSPPYPLWDPDSLIRIQPEEYDPDEYAIQRNEDESSSYGLRSYVTYLDSDTLQRYATIRSKEAMTLIEKQTQALFGRPDIRILEDGKLDTSNDEVLSLSVSGLAMLVLEAVAFGSFLWDSESYVESKYHFLKA

SEQ ID NO: 24940 - DNA, 857 bp, Arabidopsis thaliana
  misc_feature (1)..(857): Ceres Seq. ID no. 12322461
  misc_feature (1)..(857): Ortholog of  Ceres SEQ ID NO 14304228 as cited in SEQ ID NO 56358
ctctttcttgactctctctcctaaaaatgtctcgattgctctcaaaaaccctaattcccaacggaagattcctcctccgtcgtttcaacgagccggcgattacgacaccaccaaacgtcgtctgtttcagccgccgcttttcatccatcccacaagtcatcgagcttgaaatcgattctaaaaacgaagcggaagcagcaattctcaaaaagctaaacgaattcgtacgaaggatcatcgttcataattcgactccagattggcttccttttgcacctggctcttccttttgggtacctcctcatcagattacggctacaaagatcgccaatttggtcgataaggtgactaatccgttgacggaggaagagtctctttcgctttcgtctccttatggttggccttgttcctctttcttcattcctcctccagatggttcctcatctacacaagaggaagaagctagcgtggagttgaaaatcccggggaatgagatgttggaagtgaagctagcacattatccagatcctatttactcttttaaacctgaagatggtgaagagtgattcgataccttttccagcacgagagagcaggacaggattggaaaaaacagatgacgatcgaaactcaagcagtttgtacatacagttgaaaaccatgggagttatatgatctttgggtgactttatacaccttgtttactatgttttataattgacttaatataattagcttgggggcttcttccacttgccagagtttatggtgatgctcgggtaacttgacaatttcatttataatgacaattcttccctttgacacttgacctaagtgcatataaataatgtcttggc

SEQ ID NO: 24941 - protein, 179 aa, Arabidopsis thaliana
  peptide (1)..(179): Ceres Seq. ID no. 12322462
MSRLLSKTLIPNGRFLLRRFNEPAITTPPNVVCFSRRFSSIPQVIELEIDSKNEAEAAILKKLNEFVRRIIVHNSTPDWLPFAPGSSFWVPPHQITATKIANLVDKVTNPLTEEESLSLSSPYGWPCSSFFIPPPDGSSSTQEEEASVELKIPGNEMLEVKLAHYPDPIYSFKPEDGEE

SEQ ID NO: 24942 - DNA, 767 bp, Arabidopsis thaliana
  misc_feature (1)..(767): Ceres Seq. ID no. 12322512
  misc_feature (1)..(767): Ortholog of  Ceres SEQ ID NO 13595067 as cited in SEQ ID NO 55857
  misc_feature (1)..(767): Ortholog of  Ceres SEQ ID NO 12635516 as cited in SEQ ID NO 0
  misc_feature (1)..(767): Ortholog of  Ceres SEQ ID NO 15179376 as cited in SEQ ID NO 0
aagagatcatcgagagggcaagagagaaatgggaaaggcacgtacggtgggagtgggaatggactattctccgacgagcaaattagctctccggtgggcggcggagaatctccttgaagacggcgacaccgtcatcttgattcacgtccaaccacaaaacgcctatcatacccgcaaaatcctcttcgaggaaaccggttcacgtatttaacttactacatctctttaatatatattagtagagttaactccatattatgatcaaaatttgtattttgatcatttaaaagttacaaactaattattgcagcgctaattcctttggaggaatttagagaggttaatttgtctaaacagtatggacttgcttacgatcctgaggttcttgatgttcttgatactctctctagggctaaaaaggtgaaggttgtagcaaaggtgtattggggagatccaagggagaaactttgtgatgctgtcgaaaatctaaaactcgattccattgttcttggcagtcgaggtttgggttctctcaaaaggatcttgctgggtagtgtgagcaatcatgtggtgacaaatgcaacatgtcctgtcacagttgttaaggctaattaaagtgtctcttgttctttaattggacccagttaataacattagtagttacgtgtgtcactcatgcattgttttgacatttatacgtttgttgccttctacaaatttgtgtgaaactgattggtactgtttcattaataaatttcagttaaatg

SEQ ID NO: 24943 - protein, 69 aa, Arabidopsis thaliana
  peptide (1)..(69): Ceres Seq. ID no. 12322513
RDHREGKREMGKARTVGVGMDYSPTSKLALRWAAENLLEDGDTVILIHVQPQNAYHTRKILFEETGSRI

SEQ ID NO: 24944 - protein, 60 aa, Arabidopsis thaliana
  peptide (1)..(60): Ceres Seq. ID no. 12322514
MGKARTVGVGMDYSPTSKLALRWAAENLLEDGDTVILIHVQPQNAYHTRKILFEETGSRI

SEQ ID NO: 24945 - protein, 50 aa, Arabidopsis thaliana
  peptide (1)..(50): Ceres Seq. ID no. 12322515
MDYSPTSKLALRWAAENLLEDGDTVILIHVQPQNAYHTRKILFEETGSRI

SEQ ID NO: 24946 - DNA, 1433 bp, Arabidopsis thaliana
  misc_feature (1)..(1433): Ceres Seq. ID no. 12337854
  misc_feature (1)..(1433): Ortholog of  Ceres SEQ ID NO 15168537 as cited in SEQ ID NO 57100
  misc_feature (1)..(1433): Ortholog of  Ceres SEQ ID NO 15178681 as cited in SEQ ID NO 63192
  misc_feature (1)..(1433): Ortholog of  Ceres SEQ ID NO 13579918 as cited in SEQ ID NO 64644
  misc_feature (1)..(1433): Ortholog of  Ceres SEQ ID NO 13654122 as cited in SEQ ID NO 68192
gagaatcctacgttatttcttcacttttcatgatcccgaggacatcttagaccccaaatgttcttcgtcgatgttctttggaaactggttcctctatacttgttcggatcagaaacacagtctctttcagcaacagagtccattttgcagatagttcctgaggcaatggctgctacttcatctaacgtcctttgcaatgctagcgagtcagatctttgtcgtgatgattccgctgcatttctacttaaatttgtagccattgcttcgattctcttagctggagctgctggtgtaactataccactcattggcaggaaccgtcgtttccttcaaactgatggtaatctctttgtgactgctaaagcttttgcagctggtgtgattctcgccacgggttttgttcatatgttggcgggtggcacggaagctttgaagaacccgtgcttaccggatttcccttggtctaagtttcctttcccgggattctttgcgatgattgctgctttgatcactctgtttgtggatttcatggggactcagtactatgaacggaagcaagagagggaagctagtgagtctgttgaaccgtttggccgtgaacaatcaccgggtattgttgttcccatgattggagaaggaacgaatgatgggaaagtgtttggtgaagaagacagtggtaggattcacattgttggcattcatgctcatgctgctcatcatagacatagtcatcctcctggtcatgattcatgtgaaggacacagtaaaatcgacattggtcatgctcatgctcatgggcacggacatggacacggacatggacacgtacacgggggtttggatgctgttaatggagctaggcatatcgttgtttctcaggttctggagcttggaattgtgtcacattccataatcatcggtctatcccttggagtatctcagtctccttgcacaatccggcctctaatcgcagcactatccttccatcaattctttgaaggatttgcgctcggtggatgcatctcccaagcgcaattcaggaacaaatcagcgaccataatggcttgttttttcgccctcacaaccccgatagggatcgggattggaaccgcagtggcgtcgtctttcaattctcacagtgtcggagcattggtcactgaaggtatcttggactcgctctcagccggaattcttgtgtacatggctttagtggatctcatagctgctgatttcttgagtacaaaaatgaggtgtaactttaggcttcaaattgtatcttatgtaatgttgttcctaggagctggactcatgtcttctcttgccatttgggcttaattagagtataagattccatagtttcttctatagctacaaataacatgtatagttctttctagagaatttatcaatctaagatttcacaattgctcgcc

SEQ ID NO: 24947 - protein, 425 aa, Arabidopsis thaliana
  peptide (1)..(425): Ceres Seq. ID no. 12337855
MFFVDVLWKLVPLYLFGSETQSLSATESILQIVPEAMAATSSNVLCNASESDLCRDDSAAFLLKFVAIASILLAGAAGVTIPLIGRNRRFLQTDGNLFVTAKAFAAGVILATGFVHMLAGGTEALKNPCLPDFPWSKFPFPGFFAMIAALITLFVDFMGTQYYERKQEREASESVEPFGREQSPGIVVPMIGEGTNDGKVFGEEDSGRIHIVGIHAHAAHHRHSHPPGHDSCEGHSKIDIGHAHAHGHGHGHGHGHVHGGLDAVNGARHIVVSQVLELGIVSHSIIIGLSLGVSQSPCTIRPLIAALSFHQFFEGFALGGCISQAQFRNKSATIMACFFALTTPIGIGIGTAVASSFNSHSVGALVTEGILDSLSAGILVYMALVDLIAADFLSTKMRCNFRLQIVSYVMLFLGAGLMSSLAIWA

SEQ ID NO: 24948 - protein, 389 aa, Arabidopsis thaliana
  peptide (1)..(389): Ceres Seq. ID no. 12337856
MAATSSNVLCNASESDLCRDDSAAFLLKFVAIASILLAGAAGVTIPLIGRNRRFLQTDGNLFVTAKAFAAGVILATGFVHMLAGGTEALKNPCLPDFPWSKFPFPGFFAMIAALITLFVDFMGTQYYERKQEREASESVEPFGREQSPGIVVPMIGEGTNDGKVFGEEDSGRIHIVGIHAHAAHHRHSHPPGHDSCEGHSKIDIGHAHAHGHGHGHGHGHVHGGLDAVNGARHIVVSQVLELGIVSHSIIIGLSLGVSQSPCTIRPLIAALSFHQFFEGFALGGCISQAQFRNKSATIMACFFALTTPIGIGIGTAVASSFNSHSVGALVTEGILDSLSAGILVYMALVDLIAADFLSTKMRCNFRLQIVSYVMLFLGAGLMSSLAIWA

SEQ ID NO: 24949 - protein, 309 aa, Arabidopsis thaliana
  peptide (1)..(309): Ceres Seq. ID no. 12337857
MLAGGTEALKNPCLPDFPWSKFPFPGFFAMIAALITLFVDFMGTQYYERKQEREASESVEPFGREQSPGIVVPMIGEGTNDGKVFGEEDSGRIHIVGIHAHAAHHRHSHPPGHDSCEGHSKIDIGHAHAHGHGHGHGHGHVHGGLDAVNGARHIVVSQVLELGIVSHSIIIGLSLGVSQSPCTIRPLIAALSFHQFFEGFALGGCISQAQFRNKSATIMACFFALTTPIGIGIGTAVASSFNSHSVGALVTEGILDSLSAGILVYMALVDLIAADFLSTKMRCNFRLQIVSYVMLFLGAGLMSSLAIWA

SEQ ID NO: 24950 - DNA, 1451 bp, Arabidopsis thaliana
  misc_feature (1)..(1451): Ceres Seq. ID no. 12396450
  misc_feature (1)..(1451): Ortholog of  Ceres SEQ ID NO 14302514 as cited in SEQ ID NO 65814
atttcgctgaatagggttcagtacaaaattcggaatcgtaggtttaagaattttagatcattgaaacagccatgtctaggcaggtcacgagacttctcggatctcttcgccattccggcggcggctgcagcggcagctcaaaggtctgctctctcacttcattggtacagtctcgctccttcgggacaactcctccgcctcctgcggcggtctttgtcgacaaaaatacacgtgtcatctgccaaggtattaccggaaagaacgggaccttccacactgaacaagccattgaatacggcaccaaaatggtagcaggagtgacaccaaagaagggtggaacagaacatttggggctacctgttttcaacactgttgctgaagctaaggctgagactaaagccaatgcctctgtgatctacgtacctgcgcctttcgctgctgctgctatcatggaaggtttagctgctgagttagatcttattgtttgtatcactgaaggaattcctcaacatgacatggttcgtgtaaaggctgctcttaacagtcaatcaaaaactaggctgattggccctaattgtcctggtattatcaaacctggtgaatgcaagattgggatcatgccaggatacatacacaagccggggaagatagggattgtttctcgatctggaacattgacatatgaagctgttttccaaactactgcagtaggtttggggcaatctacttgtgtaggaattggtggggatccgtttaatgggacaaattttgttgactgcttggagaagttctttgttgacccccaaacagaaggtatcgttctcattggagaaatcggtgggactgcagaagaagatgccgctgctttgataaaggaaaatggtacagacaagcctgtagttgctttcatagccggacttactgcaccaccagggcgtcgtatgggtcatgcgggagccattgtttccggtggtaagggcacggctcaagacaagataaagagcctaagagacgcaggagttaaggtggttgagtcaccagctaagattggtgcggcgatgtttgagcttttccaagaaagaggtcttttgaagtgaaactgaagtaatatcataatacaatgagttgtttcaggaatcaacctctctaataacaacagtttgccaaaatagaagagtgaaacggaattcctaaaattccttaccatggagataattgcagagaaaaaaaaatagtcacttttttttttttgtctatgccattctatttttcaatttattgagccgttctatttttttttgtctttgttttggttaaggttacaaaaaatgagaacgaatcaattgcacaaatttcttcttttaagaatcaaaatcaactaatttagctatgttgattccaacttttgtctgctatgctatgagtattgttgtaaaacaaaccttttcttt

SEQ ID NO: 24951 - protein, 341 aa, Arabidopsis thaliana
  peptide (1)..(341): Ceres Seq. ID no. 12396451
MSRQVTRLLGSLRHSGGGCSGSSKVCSLTSLVQSRSFGTTPPPPAAVFVDKNTRVICQGITGKNGTFHTEQAIEYGTKMVAGVTPKKGGTEHLGLPVFNTVAEAKAETKANASVIYVPAPFAAAAIMEGLAAELDLIVCITEGIPQHDMVRVKAALNSQSKTRLIGPNCPGIIKPGECKIGIMPGYIHKPGKIGIVSRSGTLTYEAVFQTTAVGLGQSTCVGIGGDPFNGTNFVDCLEKFFVDPQTEGIVLIGEIGGTAEEDAAALIKENGTDKPVVAFIAGLTAPPGRRMGHAGAIVSGGKGTAQDKIKSLRDAGVKVVESPAKIGAAMFELFQERGLLK

SEQ ID NO: 24952 - protein, 263 aa, Arabidopsis thaliana
  peptide (1)..(263): Ceres Seq. ID no. 12396452
MVAGVTPKKGGTEHLGLPVFNTVAEAKAETKANASVIYVPAPFAAAAIMEGLAAELDLIVCITEGIPQHDMVRVKAALNSQSKTRLIGPNCPGIIKPGECKIGIMPGYIHKPGKIGIVSRSGTLTYEAVFQTTAVGLGQSTCVGIGGDPFNGTNFVDCLEKFFVDPQTEGIVLIGEIGGTAEEDAAALIKENGTDKPVVAFIAGLTAPPGRRMGHAGAIVSGGKGTAQDKIKSLRDAGVKVVESPAKIGAAMFELFQERGLLK

SEQ ID NO: 24953 - protein, 215 aa, Arabidopsis thaliana
  peptide (1)..(215): Ceres Seq. ID no. 12396453
MEGLAAELDLIVCITEGIPQHDMVRVKAALNSQSKTRLIGPNCPGIIKPGECKIGIMPGYIHKPGKIGIVSRSGTLTYEAVFQTTAVGLGQSTCVGIGGDPFNGTNFVDCLEKFFVDPQTEGIVLIGEIGGTAEEDAAALIKENGTDKPVVAFIAGLTAPPGRRMGHAGAIVSGGKGTAQDKIKSLRDAGVKVVESPAKIGAAMFELFQERGLLK

SEQ ID NO: 24954 - DNA, 1594 bp, Arabidopsis thaliana
  misc_feature (1)..(1594): Ceres Seq. ID no. 13500261
  misc_feature (1)..(1594): Ortholog of  Ceres SEQ ID NO 13596554 as cited in SEQ ID NO 62818
gaggagcggttgagttgaaatttgctggcgcgtactcgtcaacgtaacgcgcgtggagtgttttcgtgtccctcctcctcctcctcctcctcactaagacaaatattttgaggttctctttctcgtttgtgtgatctgtctgacaagctagaagaatcgtagatcgtgatcggattgatttgataattatggtgaaggagacggagttttacgatgtcctcggcgttagccccaccgctacggaggctgagattaagaaagcttattacatcaaggcacgccaagtgcatccagataaaaaccctaatgatcctcaggctgctcataatttccaggtattgggagaggcctaccaagtgctaagtgatccagggcaacgtcaggcctatgacacatctgggaagtcagggatttcaactgagatcattgatcctgcggctatatttgctatgctttttgggagtgaactctttgaagaatacatagggcagcttgctatggcatcaatggcttcacttgatatcttcactgaaggggatcagattgatactaaaaagattatagaaaaaatgagggctgttcagaaagaaagagaagacaaacttgctcagattcttaaggaccgcctcaacctatatatgacgaacaaagatgaatttactagcaatgctgaagctgaagtaacaagactctcaaatgcagcatacggggtggaaatgttgaacacaatcggatatatatatgtcagacaagcggcaaaagagcttgggaagaaagctatttatctcggtgtgccattcgtagctgaatggtttaggacgaaaggtcacttcatcaaatcccaagtaacagctgcaacaggtgcatacgctttattccagctgcaagaggaaatgaaaaggcaactaagtgctgaaggcaattataccgagaaggaacttgaagagtacatgaagacccataagaaagtaatgattgattctctgtggaagctcaatgttgctgatatcgaaagcactatctcccgtgtttgtgagcaggtacttcaagatcccactgccaagagagaggagcttcgtgcaagggccaaggggttaaaaactctgggaaagatcttccagaagaacaagatagccagtgagagtgatcctttagtaagagccgaacttcacaaactaaacggaaatggtcaagaacatgatcattcatccacatcaccaaaatctgatgaagcatctcgctctaccgttggacctcaggaaccgcaaagcccttatgtggaagcaccgaaacttggagaagagcaaatcaactattacttcccaaggcctgcgccgcctccaggagcacagagacactcttaaactggcaatggattgattcacagatgaacgaaaaggttattttttcctttttttgctatataatataagtctttatgcatatttgatatatttgcaggcgttggtattaccattatgtaatttttattattgttagaagaagaaattattggatctttgaaaaaagcacatgttatctcatcttagacaatgtataatgtttttattctatttatatatttgatgtttgg

SEQ ID NO: 24955 - protein, 391 aa, Arabidopsis thaliana
  peptide (1)..(391): Ceres Seq. ID no. 13500262
MVKETEFYDVLGVSPTATEAEIKKAYYIKARQVHPDKNPNDPQAAHNFQVLGEAYQVLSDPGQRQAYDTSGKSGISTEIIDPAAIFAMLFGSELFEEYIGQLAMASMASLDIFTEGDQIDTKKIIEKMRAVQKEREDKLAQILKDRLNLYMTNKDEFTSNAEAEVTRLSNAAYGVEMLNTIGYIYVRQAAKELGKKAIYLGVPFVAEWFRTKGHFIKSQVTAATGAYALFQLQEEMKRQLSAEGNYTEKELEEYMKTHKKVMIDSLWKLNVADIESTISRVCEQVLQDPTAKREELRARAKGLKTLGKIFQKNKIASESDPLVRAELHKLNGNGQEHDHSSTSPKSDEASRSTVGPQEPQSPYVEAPKLGEEQINYYFPRPAPPPGAQRHS

SEQ ID NO: 24956 - protein, 304 aa, Arabidopsis thaliana
  peptide (1)..(304): Ceres Seq. ID no. 13500263
MLFGSELFEEYIGQLAMASMASLDIFTEGDQIDTKKIIEKMRAVQKEREDKLAQILKDRLNLYMTNKDEFTSNAEAEVTRLSNAAYGVEMLNTIGYIYVRQAAKELGKKAIYLGVPFVAEWFRTKGHFIKSQVTAATGAYALFQLQEEMKRQLSAEGNYTEKELEEYMKTHKKVMIDSLWKLNVADIESTISRVCEQVLQDPTAKREELRARAKGLKTLGKIFQKNKIASESDPLVRAELHKLNGNGQEHDHSSTSPKSDEASRSTVGPQEPQSPYVEAPKLGEEQINYYFPRPAPPPGAQRHS

SEQ ID NO: 24957 - protein, 288 aa, Arabidopsis thaliana
  peptide (1)..(288): Ceres Seq. ID no. 13500264
MASMASLDIFTEGDQIDTKKIIEKMRAVQKEREDKLAQILKDRLNLYMTNKDEFTSNAEAEVTRLSNAAYGVEMLNTIGYIYVRQAAKELGKKAIYLGVPFVAEWFRTKGHFIKSQVTAATGAYALFQLQEEMKRQLSAEGNYTEKELEEYMKTHKKVMIDSLWKLNVADIESTISRVCEQVLQDPTAKREELRARAKGLKTLGKIFQKNKIASESDPLVRAELHKLNGNGQEHDHSSTSPKSDEASRSTVGPQEPQSPYVEAPKLGEEQINYYFPRPAPPPGAQRHS

SEQ ID NO: 24958 - DNA, 965 bp, Arabidopsis thaliana
  misc_feature (1)..(965): Ceres Seq. ID no. 12321910
  misc_feature (1)..(965): Ortholog of  Ceres SEQ ID NO 15174311 as cited in SEQ ID NO 0
aatcgtcttcgagaaaccacaaatctctctttctctcaaactctctcaacaacaacaatggcgtctcttcaacaaactctattctctcttcaatccaaactcccaccatcctccttccaaatcgccagatctctcccactccgaaaaaccttcccaatccgaatcaacaacggtggaaacgccgccggagcaagaatgtcagccaccgcagcatcaagctacgcgatggcattagcagacgtcgcgaaaagaaacgacacaatggaattaacagtcacagacatcgagaagctcgaacaagtcttctcagatccacaagtactaaacttcttcgcgaatccaacaatcaccgtcgagaagaaacgtcaagtcatcgacgacatagtgaaatcgtcgtctcttcaatctcacacatctaacttcctcaacgtcctcgtcgacgcgaatcggatcaatatcgtgacggagatcgttaaggagtttgagttggtttacaataagctaacggatacacaattggcggaggttaggtcggtggtgaaattggaagcgccgcaattagctcagattgcgaaacaggttcagaagttaaccggagctaagaatgttcgggttaagacggttattgatgcgagtcttgtggctggttttacgattcggtatggtgaatccggttcgaagcttattgatatgagtgtgaagaaacagcttgaagatattgcttctcagcttgaacttggtgagattcaattagctacttgagatttgggaaaaattgtataagagaaaaatttgagaatcttttttttttgtgcaagtttaattttttttctcctcatcttctttctctattaatcaatcatataatatacagtactgatgatataataatgattatgagtttattatctttgtaattgttaaatttagtgaattcgaaaacgaattcgaatagtatgtttgcg

SEQ ID NO: 24959 - protein, 253 aa, Arabidopsis thaliana
  peptide (1)..(253): Ceres Seq. ID no. 12321911
NRLRETTNLSFSQTLSTTTMASLQQTLFSLQSKLPPSSFQIARSLPLRKTFPIRINNGGNAAGARMSATAASSYAMALADVAKRNDTMELTVTDIEKLEQVFSDPQVLNFFANPTITVEKKRQVIDDIVKSSSLQSHTSNFLNVLVDANRINIVTEIVKEFELVYNKLTDTQLAEVRSVVKLEAPQLAQIAKQVQKLTGAKNVRVKTVIDASLVAGFTIRYGESGSKLIDMSVKKQLEDIASQLELGEIQLAT

SEQ ID NO: 24960 - protein, 234 aa, Arabidopsis thaliana
  peptide (1)..(234): Ceres Seq. ID no. 12321912
MASLQQTLFSLQSKLPPSSFQIARSLPLRKTFPIRINNGGNAAGARMSATAASSYAMALADVAKRNDTMELTVTDIEKLEQVFSDPQVLNFFANPTITVEKKRQVIDDIVKSSSLQSHTSNFLNVLVDANRINIVTEIVKEFELVYNKLTDTQLAEVRSVVKLEAPQLAQIAKQVQKLTGAKNVRVKTVIDASLVAGFTIRYGESGSKLIDMSVKKQLEDIASQLELGEIQLAT

SEQ ID NO: 24961 - protein, 188 aa, Arabidopsis thaliana
  peptide (1)..(188): Ceres Seq. ID no. 12321913
MSATAASSYAMALADVAKRNDTMELTVTDIEKLEQVFSDPQVLNFFANPTITVEKKRQVIDDIVKSSSLQSHTSNFLNVLVDANRINIVTEIVKEFELVYNKLTDTQLAEVRSVVKLEAPQLAQIAKQVQKLTGAKNVRVKTVIDASLVAGFTIRYGESGSKLIDMSVKKQLEDIASQLELGEIQLAT

SEQ ID NO: 24962 - DNA, 1483 bp, Arabidopsis thaliana
  misc_feature (1)..(1483): Ceres Seq. ID no. 12395989
  misc_feature (1)..(1483): Ortholog of  Ceres SEQ ID NO 15172560 as cited in SEQ ID NO 57325
  misc_feature (1)..(1483): Ortholog of  Ceres SEQ ID NO 13655716 as cited in SEQ ID NO 68965
aataattgttcctctttcactttctacatcctttcttcctcttcctcttctcttccttctccgttgcaaagctcaagaaaaactaaaggaatccaagtggtaaacctcagcgcaaatttcaagaagaagaaaagcagagaaaagttttcttctttttgacctttcttcccctaaattaaagatcctgttatggaatctccacattctgaggcatcaatcgtgaatggtagtatccatttgaatggcagtggtgaaaccaaaacaaagaatatagtcatgtcgtctgattcagacagtttcatcggtgtgcttgaggtttttgttcaccaagctagggacatccacaacatctgtatctatcataagcaagatgtgtatgctaagctttgtctcacaaatgatcccgaaaactccttgtccacaaagatcatcaatggtggagggcaaaaccctgtcttcgacgatacccttcagttcgacgttaagaacctggattgttcgcttaagtgtgagatatttatgatgagccgcgtgaagaattatcttgaggatcagttacttggattctctcttgtacctttgtctgaagtgattgtgaggaatgggaaattggagaaagagttctccctttcttcaaccgatttgtatcactctcctgcaggttttgtcgagttgtctctctcgtacgcaggagattcgcctgacgtgatgcatattcctgcggttccaactgcggatgagaccgagttggctcctatcgagtttgatgagagtgagtttttggatccaaagattgtctgtgaaaacaatcaaatggtgtctaagtacttctccactacgtgttctgattctgatgattttgcaagctctgaaactggctttgtggaagtaaacagcatcctgtctgcagttgttgaaactgctgttgacgaagcagcaccggccaatactgtctcaacaaatggaatctcatctccatcaactgcagttagctctggctcctcgagaactcatgatgtttcaaagcaatctagtgaaggaaacaactcagattcagaacaagaagcgaagaagccaacagatatcatcaagagtggtgatttagataagactgatgaagaagcagttgtgaaaccggttctgacagtgcacattgaaccagagcaaaaggtagtgcaacaagatattgttgacatgtacacaaaaagcttgcagcaattcactgagtcactggctaagatgaaacttcctttggacatcgatagcccaacccaatcagagaactcaagctcgtcccagcagacgccaaagagtgctagctcccgtgttttctacgggagtagagccttcttctgaagctcagaaatcatctcaagtttggcatcagaagtagcgagcatgtagtgaaagtgtaataagttaaaagtcgacactatctaaaatgtgtaactatcttcctttgaagcctttagcttttcttgtt

SEQ ID NO: 24963 - protein, 388 aa, Arabidopsis thaliana
  peptide (1)..(388): Ceres Seq. ID no. 12395990
MESPHSEASIVNGSIHLNGSGETKTKNIVMSSDSDSFIGVLEVFVHQARDIHNICIYHKQDVYAKLCLTNDPENSLSTKIINGGGQNPVFDDTLQFDVKNLDCSLKCEIFMMSRVKNYLEDQLLGFSLVPLSEVIVRNGKLEKEFSLSSTDLYHSPAGFVELSLSYAGDSPDVMHIPAVPTADETELAPIEFDESEFLDPKIVCENNQMVSKYFSTTCSDSDDFASSETGFVEVNSILSAVVETAVDEAAPANTVSTNGISSPSTAVSSGSSRTHDVSKQSSEGNNSDSEQEAKKPTDIIKSGDLDKTDEEAVVKPVLTVHIEPEQKVVQQDIVDMYTKSLQQFTESLAKMKLPLDIDSPTQSENSSSSQQTPKSASSRVFYGSRAFF

SEQ ID NO: 24964 - protein, 359 aa, Arabidopsis thaliana
  peptide (1)..(359): Ceres Seq. ID no. 12395991
MSSDSDSFIGVLEVFVHQARDIHNICIYHKQDVYAKLCLTNDPENSLSTKIINGGGQNPVFDDTLQFDVKNLDCSLKCEIFMMSRVKNYLEDQLLGFSLVPLSEVIVRNGKLEKEFSLSSTDLYHSPAGFVELSLSYAGDSPDVMHIPAVPTADETELAPIEFDESEFLDPKIVCENNQMVSKYFSTTCSDSDDFASSETGFVEVNSILSAVVETAVDEAAPANTVSTNGISSPSTAVSSGSSRTHDVSKQSSEGNNSDSEQEAKKPTDIIKSGDLDKTDEEAVVKPVLTVHIEPEQKVVQQDIVDMYTKSLQQFTESLAKMKLPLDIDSPTQSENSSSSQQTPKSASSRVFYGSRAFF

SEQ ID NO: 24965 - protein, 278 aa, Arabidopsis thaliana
  peptide (1)..(278): Ceres Seq. ID no. 12395992
MMSRVKNYLEDQLLGFSLVPLSEVIVRNGKLEKEFSLSSTDLYHSPAGFVELSLSYAGDSPDVMHIPAVPTADETELAPIEFDESEFLDPKIVCENNQMVSKYFSTTCSDSDDFASSETGFVEVNSILSAVVETAVDEAAPANTVSTNGISSPSTAVSSGSSRTHDVSKQSSEGNNSDSEQEAKKPTDIIKSGDLDKTDEEAVVKPVLTVHIEPEQKVVQQDIVDMYTKSLQQFTESLAKMKLPLDIDSPTQSENSSSSQQTPKSASSRVFYGSRAFF

SEQ ID NO: 24966 - DNA, 774 bp, Arabidopsis thaliana
  misc_feature (1)..(774): Ceres Seq. ID no. 12384810
  misc_feature (1)..(774): Ortholog of  Ceres SEQ ID NO 12556792 as cited in SEQ ID NO 37
  misc_feature (1)..(774): Ortholog of  Ceres SEQ ID NO 13594143 as cited in SEQ ID NO 58945
  misc_feature (1)..(774): Ortholog of  Ceres SEQ ID NO 12590595 as cited in SEQ ID NO 0
  misc_feature (1)..(774): Ortholog of  Ceres SEQ ID NO 15179171 as cited in SEQ ID NO 0
acacaatcattcgttctctctctcaaagtctcaatccatctccagaggtagtgtgtttttagtggaggaagaatcagattcaaaagccaaaatcaaagcttggtgatgggatctggagctggcaatttcctcaaggttcttctcaggaacttcgatgttcttgctgggcctgtggttagtctcgtttatcctctatatgcttcagttcaagcgattgaaactcaatctcatgctgatgacaaacaatggctaacttattgggtcctttattcattacttacactcatcgagctcacattcgccaaactcatcgaatggttaccgatatggtcatacatgaagctgatcttgacttgctggcttgttattccctactttagtggcgctgcttatgtctatgaacattttgtgagaccggtgtttgttaaccctcggagcattaacatttggtatgtgccaaagaagatggatatcttcagaaaaccagacgatgtgttaacagctgctgagaagtacattgcagagaatggacctgatgcttttgagaagatcttaagccgggctgataaatcaaaaagatataataagcatgaatatgaaagctatgaaacgatgtatggtgagggttatcagtactaagagaaatttgaaaaagcttttaattttagaatgtgtgaagcaacttcatgtctttgttgtttgtttatgcttcctttttgtggatctctctcgtgtaaaaaagttgctaattaaaataaagatgctttctgctcc

SEQ ID NO: 24967 - protein, 177 aa, Arabidopsis thaliana
  peptide (1)..(177): Ceres Seq. ID no. 12384811
MGSGAGNFLKVLLRNFDVLAGPVVSLVYPLYASVQAIETQSHADDKQWLTYWVLYSLLTLIELTFAKLIEWLPIWSYMKLILTCWLVIPYFSGAAYVYEHFVRPVFVNPRSINIWYVPKKMDIFRKPDDVLTAAEKYIAENGPDAFEKILSRADKSKRYNKHEYESYETMYGEGYQY

SEQ ID NO: 24968 - protein, 100 aa, Arabidopsis thaliana
  peptide (1)..(100): Ceres Seq. ID no. 12384812
MKLILTCWLVIPYFSGAAYVYEHFVRPVFVNPRSINIWYVPKKMDIFRKPDDVLTAAEKYIAENGPDAFEKILSRADKSKRYNKHEYESYETMYGEGYQY

SEQ ID NO: 24969 - DNA, 1174 bp, Arabidopsis thaliana
  misc_feature (1)..(1174): Ceres Seq. ID no. 13490958
  misc_feature (1)..(1174): Ortholog of  Ceres SEQ ID NO 13591198 as cited in SEQ ID NO 67723
gaatagaaatccaaatcgtgggcaaagaaagaaacacaaaacaaaatcgtcgatggctgttacaaaaaggcttttgtgagtgtcccaattccattcacaaagttttagtgtttaataatatctgacactctctttctttgaccgtcgccgccgcaatgaccgtcggagttttagctttgcaaggttctttcaatgagcacatcgcggctctgcggcggctcggtgtccaaggcgtcgagattaggaaggctgaccagcttctcaccgtttcttctcttatcattcctggcggcgagagcaccaccatggccaaactcgccgagtatcataacttgtttccggctctacgtgagtttgttaagatggggaaacctgtttgggggacatgcgcaggtcttatattcttggcagacagagcagttggtcagaaagagggaggtcaggaattagttggtggccttgattgcaccgtacataggaacttcttcggtagccagattcaaagttttgaagctgatatcttagtacctcaactaacatctcaagaaggtgggccagagacatacaggggagtgttcatacgtgctccagctgttcttgatgtaggtcctgatgtcgaagtcctggcggattatcccgtcccatcaaacaaggtcttgtattcaagctccaccgtacaaattcaagaggaagatgctcttcctgaaacaaaagtcattgttgctgtgaagcaaggaaacttgttagcaactgcttttcatcccgagcttactgcagacactcgatggcacagttatttcataaagatgacgaaagagattgagcaaggagcttcttcaagcagtagtaagactattgtatctgttggagaaacaagtgctggtcccgagccagctaagcctgatcttcctatatttcaataactgaacagagagaagatacacacttcttaaaataaaaaccagagaaagtgtcagattctttatctttctaaagatgttttggaaaaattgcaagctagtttgcaatttgcactcaagaaagtttcacaagactctttaatggattcatgtacttgtttcttgatacaactttatatatacagttgaatctcaaacttttttgctgattcaatttggtctatgtcttgtgaaatgtgaaaggtcgtttggcc

SEQ ID NO: 24970 - protein, 255 aa, Arabidopsis thaliana
  peptide (1)..(255): Ceres Seq. ID no. 13490959
MTVGVLALQGSFNEHIAALRRLGVQGVEIRKADQLLTVSSLIIPGGESTTMAKLAEYHNLFPALREFVKMGKPVWGTCAGLIFLADRAVGQKEGGQELVGGLDCTVHRNFFGSQIQSFEADILVPQLTSQEGGPETYRGVFIRAPAVLDVGPDVEVLADYPVPSNKVLYSSSTVQIQEEDALPETKVIVAVKQGNLLATAFHPELTADTRWHSYFIKMTKEIEQGASSSSSKTIVSVGETSAGPEPAKPDLPIFQ

SEQ ID NO: 24971 - protein, 205 aa, Arabidopsis thaliana
  peptide (1)..(205): Ceres Seq. ID no. 13490960
MAKLAEYHNLFPALREFVKMGKPVWGTCAGLIFLADRAVGQKEGGQELVGGLDCTVHRNFFGSQIQSFEADILVPQLTSQEGGPETYRGVFIRAPAVLDVGPDVEVLADYPVPSNKVLYSSSTVQIQEEDALPETKVIVAVKQGNLLATAFHPELTADTRWHSYFIKMTKEIEQGASSSSSKTIVSVGETSAGPEPAKPDLPIFQ

SEQ ID NO: 24972 - protein, 186 aa, Arabidopsis thaliana
  peptide (1)..(186): Ceres Seq. ID no. 13490961
MGKPVWGTCAGLIFLADRAVGQKEGGQELVGGLDCTVHRNFFGSQIQSFEADILVPQLTSQEGGPETYRGVFIRAPAVLDVGPDVEVLADYPVPSNKVLYSSSTVQIQEEDALPETKVIVAVKQGNLLATAFHPELTADTRWHSYFIKMTKEIEQGASSSSSKTIVSVGETSAGPEPAKPDLPIFQ

SEQ ID NO: 24973 - DNA, 1379 bp, Arabidopsis thaliana
  misc_feature (1)..(1379): Ceres Seq. ID no. 13622108
  misc_feature (1)..(1379): Ortholog of  Ceres SEQ ID NO 12784228 as cited in SEQ ID NO 66111
acttatcctgatcactagtgatcagtgataatctattaatcatctaggtggcagaagcagcatcgttgagaacgaagaagcttgaaaaagttgcgagctcagagaatctggaagtagcaaaatttggcggctttaactcagcaatttgttctgtacatggtattttgagaagagagcattcagctcacagttacgctctgcctatccagcttctaaatctactcactttggtcgagtcatggcttcttctggatctgaggcaaaagctaattacgcacccatatctaccaatgaacctgttgtgtctgttgattggctccactctaatcttggagatgctgatataaaggttttggatgcctcatggtacatggcacatgagcaaagaaatccaatccaagagtatcaagttgctcatattccaggtgctctcttctttgatttgaatggaatagcagatcgaaaaacaaatttacgacacatgctaccatctgaggaagcttttgctgctggttgttctgctcttggaatcgagaacaacgatggagtggttgtgtatgatggaatggggctctttagtgcagctcgtgtatggtggatgtttagagtctttggacatgacaaagtatgggtacttgatggaggcttgccgaaatggcgtgcttcaggctatgacgttgaatccagtgtttcaaatgatgccattttgaaagccagtgcagcaactgaggctatagagaagatctatcaaggacaaacaattagcccaataacttttcagacgaagttccggccacatcttgtattggcacttgatcaggtgaaggaaaacatcgaggataagacttatcagcacatcgatgcgcgttcaaaggctagatttgacggtattgctccagaaccttggaagggtttaccgagtggtcatatacccggtagcaagtgtgtcccttttcccctaatgtttgattcctctcaaacactgttaccagcagaggagctgaagaagcagtttgaacaggaagacatatctctggacagtccgattgcggcctcatgtggaaccggtgtaacagcttgtattttggcattgggactttatcgtctgggaaaaactaatgtggcaatctatgatgggtcttggactgaatgggcaactgcaccaaacttgcccatagtgggttcttcttcataagaaagtccaagaaaaagctacaagatcacaagccagtggatatatatttataagcttagcttggttcaatccatttctgtgttaaactttaacaaattgctgggagggttgtattagtattatacatcagtattcaggattcttgagtttggtctcatctttgtggagattgattaaaagtctt

SEQ ID NO: 24974 - protein, 318 aa, Arabidopsis thaliana
  peptide (1)..(318): Ceres Seq. ID no. 13622109
MASSGSEAKANYAPISTNEPVVSVDWLHSNLGDADIKVLDASWYMAHEQRNPIQEYQVAHIPGALFFDLNGIADRKTNLRHMLPSEEAFAAGCSALGIENNDGVVVYDGMGLFSAARVWWMFRVFGHDKVWVLDGGLPKWRASGYDVESSVSNDAILKASAATEAIEKIYQGQTISPITFQTKFRPHLVLALDQVKENIEDKTYQHIDARSKARFDGIAPEPWKGLPSGHIPGSKCVPFPLMFDSSQTLLPAEELKKQFEQEDISLDSPIAASCGTGVTACILALGLYRLGKTNVAIYDGSWTEWATAPNLPIVGSSS

SEQ ID NO: 24975 - protein, 274 aa, Arabidopsis thaliana
  peptide (1)..(274): Ceres Seq. ID no. 13622110
MAHEQRNPIQEYQVAHIPGALFFDLNGIADRKTNLRHMLPSEEAFAAGCSALGIENNDGVVVYDGMGLFSAARVWWMFRVFGHDKVWVLDGGLPKWRASGYDVESSVSNDAILKASAATEAIEKIYQGQTISPITFQTKFRPHLVLALDQVKENIEDKTYQHIDARSKARFDGIAPEPWKGLPSGHIPGSKCVPFPLMFDSSQTLLPAEELKKQFEQEDISLDSPIAASCGTGVTACILALGLYRLGKTNVAIYDGSWTEWATAPNLPIVGSSS

SEQ ID NO: 24976 - protein, 237 aa, Arabidopsis thaliana
  peptide (1)..(237): Ceres Seq. ID no. 13622111
MLPSEEAFAAGCSALGIENNDGVVVYDGMGLFSAARVWWMFRVFGHDKVWVLDGGLPKWRASGYDVESSVSNDAILKASAATEAIEKIYQGQTISPITFQTKFRPHLVLALDQVKENIEDKTYQHIDARSKARFDGIAPEPWKGLPSGHIPGSKCVPFPLMFDSSQTLLPAEELKKQFEQEDISLDSPIAASCGTGVTACILALGLYRLGKTNVAIYDGSWTEWATAPNLPIVGSSS

SEQ ID NO: 24977 - DNA, 1081 bp, Arabidopsis thaliana
  misc_feature (1)..(1081): Ceres Seq. ID no. 12321161
  misc_feature (1)..(1081): Ortholog of  Ceres SEQ ID NO 12608945 as cited in SEQ ID NO 51209
  misc_feature (1)..(1081): Ortholog of  Ceres SEQ ID NO 14316444 as cited in SEQ ID NO 59233
  misc_feature (1)..(1081): Ortholog of  Ceres SEQ ID NO 13656436 as cited in SEQ ID NO 69154
ataaatgacccaattgggtcactcgaggaataaactgcaatttacgaataacaaactctcactaatacagtatttgcaattccagagcgacgggatctctctccggtaaatatcggaaacttttattctcagcaaagcgagatctcgacgtttctcagatccgtccggcgagttagatccttgagaaatcatggctccggtctcggcactcgctaagtataagctggtgtttctgggagatcaatccgtcggcaaaaccagtatcattactcgattcatgtacgacaaattcgacaacacttaccaggccacaattggtattgattttctatcaaagacaatgtaccttgaagatcgaacggtcagacttcagttgtgggatacagctgggcaagagcgattcaggagtctaattccgagctatatcagggattcctccgttgctgttattgtgtatgatgttgcaagcaggcagtccttcctaaacactactaagtggatcgatgaggttaggacagaacgtggtagtgatgtcatagtcgtgcttgtgggaaacaaaactgatctagtggacaaaaggcaagtgtcaatagaggaagcagaagctaaggcacgcgaacttaatgtaatgttcatcgaaaccagtgccaaagcgggcttcaacattaaggcgctcttccgcaagatagcagcagctttgccgggaatggagacattgtcttcaacaaagcaagaggatatggttgatgtcaatctcaagtcttccaatgcaaatgcatctctcgctcagcagcaatcaggaggatgctcttgttagatttggcaacaacaacacaacaacaaatcgatagagaacaacaaaacacactactaaaaaatgtcctcaagcccctttgcatgattcgatcagttatcgtcttccatctgtaaaatttttgcctgtttttcaactttttttcttcatcggattgtttttaaagaagactctgttttagctatggtttgtccctaactgtgatcttttgtggtctttggagtttcaaatgctcgctgcttcagtacttttgtttacttatttctc

SEQ ID NO: 24978 - protein, 208 aa, Arabidopsis thaliana
  peptide (1)..(208): Ceres Seq. ID no. 12321162
MAPVSALAKYKLVFLGDQSVGKTSIITRFMYDKFDNTYQATIGIDFLSKTMYLEDRTVRLQLWDTAGQERFRSLIPSYIRDSSVAVIVYDVASRQSFLNTTKWIDEVRTERGSDVIVVLVGNKTDLVDKRQVSIEEAEAKARELNVMFIETSAKAGFNIKALFRKIAAALPGMETLSSTKQEDMVDVNLKSSNANASLAQQQSGGCSC

SEQ ID NO: 24979 - protein, 179 aa, Arabidopsis thaliana
  peptide (1)..(179): Ceres Seq. ID no. 12321163
MYDKFDNTYQATIGIDFLSKTMYLEDRTVRLQLWDTAGQERFRSLIPSYIRDSSVAVIVYDVASRQSFLNTTKWIDEVRTERGSDVIVVLVGNKTDLVDKRQVSIEEAEAKARELNVMFIETSAKAGFNIKALFRKIAAALPGMETLSSTKQEDMVDVNLKSSNANASLAQQQSGGCSC

SEQ ID NO: 24980 - protein, 158 aa, Arabidopsis thaliana
  peptide (1)..(158): Ceres Seq. ID no. 12321164
MYLEDRTVRLQLWDTAGQERFRSLIPSYIRDSSVAVIVYDVASRQSFLNTTKWIDEVRTERGSDVIVVLVGNKTDLVDKRQVSIEEAEAKARELNVMFIETSAKAGFNIKALFRKIAAALPGMETLSSTKQEDMVDVNLKSSNANASLAQQQSGGCSC

SEQ ID NO: 24981 - DNA, 1749 bp, Arabidopsis thaliana
  misc_feature (1)..(1749): Ceres Seq. ID no. 12326633
  misc_feature (1)..(1749): Ortholog of  Ceres SEQ ID NO 15178246 as cited in SEQ ID NO 52038
aaacactcctttatagcttttctccgcctcaactttttgcttcttctctctcgatttgctctcacggaagattcttcagaatatctgatccgatatcagaagccccaagttcgcttgaattccgtctgagcaatggctttggtcttgcacacgtacaagggaaacaaaagtgctgagaaggcactcattgcagcagagtacgttgtgtgcagatcgatgtgccctctgactttcagatgggtgtcactaacaaaacccctgcgttcctcaagatgaaccctattggaaaggttcctgtacttgagactcccgagggttcagtatttgaaagcaacgcaattgcccgttatgtaagccgattgaatggtgacaactctttgaacggatcctccctgatcgaatatgcacaaattgagcaatggattgatttctcttcattggagatctatgcaagtatcttgaggtggttcggcccaagaatgggctttatgccatacagtgctccggctgaagaaggtgcgatctctacgttgaagagagcacttgatgctctgaacacacatctcacgtctaacacttaccttgtcggacactctattacccttgctgatatcatcactgtctgcaacttgaacttgggatttgctactgtcatgaccaagaaatttacctctgaatttcctcatgttgagaggtacttctggactgtggttaaccaaccaaacttcactaaagtgttgggtgatgtcaaacagactgaagctgtccctcctattgcttccaagaaagctgcccagcctgcaaagcccaaagaagagcctaagaaaaaggaagccccagtagcagaggcacctaagcttgctgaagaggaagaggcaccaaagcccaaagccaagaaccctcttgacttgctaccaccaagccctatggttctagatgattggaagaggctttactcaaacaccaaatctaacttccgcgaggttgctattaaaggattctgggacatgtatgacccagagggatactcactatggttctgtgactacaagtacaacgatgagaacatggtgtcatttgtcacgctcaacaaggttggtgggttccttcagcgtatggacttggcacgtaaatactcctttggaaagatgctgatttgtgggtcagagggtccgttcaaggtgaagggtttatggctgttccgtggaccagagatcccaaagttcataatggacgaggtgtacgacatggagctgtatgagtggactaaggttgatatctcagatgaagcccagaaggagcgtgttagccagatgattgaagacgcagagccatttgaaggtgaggctctcttggacgccaagtgcttcaagtgagaagagagaatggtttggtacttccatttacaggttttgcagctggggctttacatatctttctatctgtctgtctcacataggggttttgctctgtgacgtgtcgcatagactgttttttttcttttctaatcgagtgtcaaggacaagtctttttagttctttgttaatgtttcgcctccgtccagaattgtttactataccagttttcgaaatcctgaccggccagtctaccctggcaataggcaatacatggtctggtttatttgttttacggtaattttgccttgattgattttctttgacgcgtttcggtcaacttatatacattggtctttgagttgaacatttagtggtaaagtctttttggcac

SEQ ID NO: 24982 - protein, 379 aa, Arabidopsis thaliana
  peptide (1)..(379): Ceres Seq. ID no. 12326634
MGVTNKTPAFLKMNPIGKVPVLETPEGSVFESNAIARYVSRLNGDNSLNGSSLIEYAQIEQWIDFSSLEIYASILRWFGPRMGFMPYSAPAEEGAISTLKRALDALNTHLTSNTYLVGHSITLADIITVCNLNLGFATVMTKKFTSEFPHVERYFWTVVNQPNFTKVLGDVKQTEAVPPIASKKAAQPAKPKEEPKKKEAPVAEAPKLAEEEEAPKPKAKNPLDLLPPSPMVLDDWKRLYSNTKSNFREVAIKGFWDMYDPEGYSLWFCDYKYNDENMVSFVTLNKVGGFLQRMDLARKYSFGKMLICGSEGPFKVKGLWLFRGPEIPKFIMDEVYDMELYEWTKVDISDEAQKERVSQMIEDAEPFEGEALLDAKCFK

SEQ ID NO: 24983 - protein, 367 aa, Arabidopsis thaliana
  peptide (1)..(367): Ceres Seq. ID no. 12326635
MNPIGKVPVLETPEGSVFESNAIARYVSRLNGDNSLNGSSLIEYAQIEQWIDFSSLEIYASILRWFGPRMGFMPYSAPAEEGAISTLKRALDALNTHLTSNTYLVGHSITLADIITVCNLNLGFATVMTKKFTSEFPHVERYFWTVVNQPNFTKVLGDVKQTEAVPPIASKKAAQPAKPKEEPKKKEAPVAEAPKLAEEEEAPKPKAKNPLDLLPPSPMVLDDWKRLYSNTKSNFREVAIKGFWDMYDPEGYSLWFCDYKYNDENMVSFVTLNKVGGFLQRMDLARKYSFGKMLICGSEGPFKVKGLWLFRGPEIPKFIMDEVYDMELYEWTKVDISDEAQKERVSQMIEDAEPFEGEALLDAKCFK

SEQ ID NO: 24984 - protein, 298 aa, Arabidopsis thaliana
  peptide (1)..(298): Ceres Seq. ID no. 12326636
MGFMPYSAPAEEGAISTLKRALDALNTHLTSNTYLVGHSITLADIITVCNLNLGFATVMTKKFTSEFPHVERYFWTVVNQPNFTKVLGDVKQTEAVPPIASKKAAQPAKPKEEPKKKEAPVAEAPKLAEEEEAPKPKAKNPLDLLPPSPMVLDDWKRLYSNTKSNFREVAIKGFWDMYDPEGYSLWFCDYKYNDENMVSFVTLNKVGGFLQRMDLARKYSFGKMLICGSEGPFKVKGLWLFRGPEIPKFIMDEVYDMELYEWTKVDISDEAQKERVSQMIEDAEPFEGEALLDAKCFK

SEQ ID NO: 24985 - DNA, 1907 bp, Arabidopsis thaliana
  misc_feature (1)..(1907): Ceres Seq. ID no. 13491988
  misc_feature (1)..(1907): Ortholog of  Ceres SEQ ID NO 15177258 as cited in SEQ ID NO 51386
gtctcctcttcggataatcctatccttctcttcctataaatacctctccactcttcctcttcctccaccactacaaccaccgcaacaaccaccaaaaaccctctcaaagaaatttcttttttttcttactttcttggtttgtcaaatatggtcagccatccaatggagaaagctgcaaatggtgcgtctgcgttggaaacgcagacgggtgagttagatcagccggaacggcttcgtaagatcatatcggtgtcttccattgccgccggtgtacagttcggttgggctttacagttatctctgttgactccttacgtgcagctactcggaatcccacataaatgggcttctctgatttggctctgtggtccaatctccggtatgcttgttcagcctatcgtcggttaccacagtgaccgttgcacctcaagattcggccgtcgtcgtcccttcatcgtcgctggagctggtttagtcaccgttgctgttttccttatcggttacgctgccgatataggtcacagcatgggcgatcagcttgacaaaccgccgaaaacgcgagccatagcgatattcgctctcgggttttggattcttgacgtggctaacaacaccttacaaggaccctgcagagctttcttggctgatttatcagcagggaacgctaagaaaacgcgaaccgcaaacgcgtttttctcgtttttcatggcggttggaaacgttttgggttacgctgcgggatcttacagaaatctctacaaagttgtgcctttcacgatgactgagtcatgcgatctctactgcgcaaacctcaaaacgtgttttttcctatccataacgcttctcctcatagtcactttcgtatctctctgttacgtgaaggagaagccatggacgccagagccaacagccgatggaaaagcctccaacgttccgtttttcggagaaatcttcggagctttcaaggaactaaaaagacccatgtggatgcttcttatagtcactgcactaaactggatcgcttggttccctttccttctcttcgacactgattggatgggccgtgaggtgtacggaggaaactcagacgcaaccgcaaccgcagcctctaagaagctttacaacgacggagtcagagctggtgctttggggcttatgcttaacgctattgttcttggtttcatgtctcttggtgttgaatggattggtcggaaattgggaggagctaaaaggctttggggtattgttaacttcatcctcgccatttgcttggccatgacggttgtggttacgaaacaagctgagaatcaccgacgagatcacggcggcgctaaaacaggtccacctggtaacgtcacagctggtgctttaactctcttcgccatcctcggtatcccccaagccattacgtttagcattccttttgcactagcttccatattttcaaccaattccggtgccggccaaggactttccctaggtgttctgaatctagccattgtcgtccctcagatggtaatatctgtgggaggtggaccattcgacgaactattcggtggtggaaacattccagcatttgtgttaggagcgattgcggcagcggtaagtggtgtattggcgttgacggtgttgccttcaccgcctccggatgctcctgccttcaaagctactatgggatttcattgaattttagcagtggttgtttggctctctttctctcataaaacagtagtgttgtgcaaatcctacataaagaaaaaagaaaaggaaattaaactcattgggttggtttgtattttacctaaacccacgaagttcctttttctttttgtaactcaatttaaatttggagtatattttactttttgttaccttcaaggcttcaatattacgacttcattgttcgg

SEQ ID NO: 24986 - protein, 512 aa, Arabidopsis thaliana
  peptide (1)..(512): Ceres Seq. ID no. 13491989
MVSHPMEKAANGASALETQTGELDQPERLRKIISVSSIAAGVQFGWALQLSLLTPYVQLLGIPHKWASLIWLCGPISGMLVQPIVGYHSDRCTSRFGRRRPFIVAGAGLVTVAVFLIGYAADIGHSMGDQLDKPPKTRAIAIFALGFWILDVANNTLQGPCRAFLADLSAGNAKKTRTANAFFSFFMAVGNVLGYAAGSYRNLYKVVPFTMTESCDLYCANLKTCFFLSITLLLIVTFVSLCYVKEKPWTPEPTADGKASNVPFFGEIFGAFKELKRPMWMLLIVTALNWIAWFPFLLFDTDWMGREVYGGNSDATATAASKKLYNDGVRAGALGLMLNAIVLGFMSLGVEWIGRKLGGAKRLWGIVNFILAICLAMTVVVTKQAENHRRDHGGAKTGPPGNVTAGALTLFAILGIPQAITFSIPFALASIFSTNSGAGQGLSLGVLNLAIVVPQMVISVGGGPFDELFGGGNIPAFVLGAIAAAVSGVLALTVLPSPPPDAPAFKATMGFH

SEQ ID NO: 24987 - protein, 507 aa, Arabidopsis thaliana
  peptide (1)..(507): Ceres Seq. ID no. 13491990
MEKAANGASALETQTGELDQPERLRKIISVSSIAAGVQFGWALQLSLLTPYVQLLGIPHKWASLIWLCGPISGMLVQPIVGYHSDRCTSRFGRRRPFIVAGAGLVTVAVFLIGYAADIGHSMGDQLDKPPKTRAIAIFALGFWILDVANNTLQGPCRAFLADLSAGNAKKTRTANAFFSFFMAVGNVLGYAAGSYRNLYKVVPFTMTESCDLYCANLKTCFFLSITLLLIVTFVSLCYVKEKPWTPEPTADGKASNVPFFGEIFGAFKELKRPMWMLLIVTALNWIAWFPFLLFDTDWMGREVYGGNSDATATAASKKLYNDGVRAGALGLMLNAIVLGFMSLGVEWIGRKLGGAKRLWGIVNFILAICLAMTVVVTKQAENHRRDHGGAKTGPPGNVTAGALTLFAILGIPQAITFSIPFALASIFSTNSGAGQGLSLGVLNLAIVVPQMVISVGGGPFDELFGGGNIPAFVLGAIAAAVSGVLALTVLPSPPPDAPAFKATMGFH

SEQ ID NO: 24988 - protein, 434 aa, Arabidopsis thaliana
  peptide (1)..(434): Ceres Seq. ID no. 13491991
MLVQPIVGYHSDRCTSRFGRRRPFIVAGAGLVTVAVFLIGYAADIGHSMGDQLDKPPKTRAIAIFALGFWILDVANNTLQGPCRAFLADLSAGNAKKTRTANAFFSFFMAVGNVLGYAAGSYRNLYKVVPFTMTESCDLYCANLKTCFFLSITLLLIVTFVSLCYVKEKPWTPEPTADGKASNVPFFGEIFGAFKELKRPMWMLLIVTALNWIAWFPFLLFDTDWMGREVYGGNSDATATAASKKLYNDGVRAGALGLMLNAIVLGFMSLGVEWIGRKLGGAKRLWGIVNFILAICLAMTVVVTKQAENHRRDHGGAKTGPPGNVTAGALTLFAILGIPQAITFSIPFALASIFSTNSGAGQGLSLGVLNLAIVVPQMVISVGGGPFDELFGGGNIPAFVLGAIAAAVSGVLALTVLPSPPPDAPAFKATMGFH

SEQ ID NO: 24989 - DNA, 1305 bp, Arabidopsis thaliana
  misc_feature (1)..(1305): Ceres Seq. ID no. 12394693
  misc_feature (1)..(1305): Ortholog of  Ceres SEQ ID NO 15173907 as cited in SEQ ID NO 62356
  misc_feature (1)..(1305): Ortholog of  Ceres SEQ ID NO 13596519 as cited in SEQ ID NO 62572
  misc_feature (1)..(1305): Ortholog of  Ceres SEQ ID NO 12625108 as cited in SEQ ID NO 68102
aattctaaaccaaacaacagattctcataatcatctcttcttttttcctctttacgaaaagaagaaagatcaaaccttccaagtttacacaaaaagaaaaaagaacgatggctcttgtcaccttcttgtttattgctacccttggagcaatgacgtcacatgtcaatggttacgccggaggaggttgggtcaacgcacacgccacattctacggtggtggtgatgcttccggcacaatgggaggtgcttgtggatacggaaacctatatagccaaggctatggaaccaacacggcggcgctaagcacggctctattcaataatggtctaagttgtggtgcttgcttcgagataagatgtcaaaacgatggaaaatggtgtcttcctggctcaattgtcgtcacagccacaaacttttgccctcctaacaacgccttaccgaacaacgcaggaggttggtgtaaccctcctcagcagcattttgatctctctcagcccgtatttcaacgcatcgctcaatacagagccggcattgtccccgtcgcttaccgaagagtgccgtgcgtgagaagaggaggaataaggtttacgataaacggacactcttacttcaacctagttctgatcactaacgtcggaggagccggagatgttcactcagcgatggttaaaggttcaagaactggatggcaagcgatgtcaagaaactggggacagaactggcagagtaactcttaccttaacggacaatctctctcattcaaagttacaacaagcgatggccaaaccattgtctctaacaacgttgctaacgcaggctggtctttcggccagaccttcacaggtgcgcagctacgttaggaagagtgattcggtgaaaattcatctcattgatcgtgtggtattgacgtgttgtagtagaagcagttagagagaggggcatgatagtaatttggtcctttctttcaattgaggttaacctaaaaagaagtggtgcttcgagtgcttgattttgcacgaggccttgatgatgtcatcttttgggaaccttttcttatctttcttcatttttattggtaaggttttatgttatactgatgcagaggtggtattgagttgaagtaccacccgctagtagtagtagtagtctctcgtgtcatttgtatcccttctcgaagcgagagggagagttttagattttattaatctcgttaaagtcatttgtatgttgtaaatttttcaatttctacaagtaagaaatattggagatttgtttgttatatactttgtgtaataaattatattc

SEQ ID NO: 24990 - protein, 250 aa, Arabidopsis thaliana
  peptide (1)..(250): Ceres Seq. ID no. 12394694
MALVTFLFIATLGAMTSHVNGYAGGGWVNAHATFYGGGDASGTMGGACGYGNLYSQGYGTNTAALSTALFNNGLSCGACFEIRCQNDGKWCLPGSIVVTATNFCPPNNALPNNAGGWCNPPQQHFDLSQPVFQRIAQYRAGIVPVAYRRVPCVRRGGIRFTINGHSYFNLVLITNVGGAGDVHSAMVKGSRTGWQAMSRNWGQNWQSNSYLNGQSLSFKVTTSDGQTIVSNNVANAGWSFGQTFTGAQLR

SEQ ID NO: 24991 - protein, 236 aa, Arabidopsis thaliana
  peptide (1)..(236): Ceres Seq. ID no. 12394695
MTSHVNGYAGGGWVNAHATFYGGGDASGTMGGACGYGNLYSQGYGTNTAALSTALFNNGLSCGACFEIRCQNDGKWCLPGSIVVTATNFCPPNNALPNNAGGWCNPPQQHFDLSQPVFQRIAQYRAGIVPVAYRRVPCVRRGGIRFTINGHSYFNLVLITNVGGAGDVHSAMVKGSRTGWQAMSRNWGQNWQSNSYLNGQSLSFKVTTSDGQTIVSNNVANAGWSFGQTFTGAQLR

SEQ ID NO: 24992 - protein, 207 aa, Arabidopsis thaliana
  peptide (1)..(207): Ceres Seq. ID no. 12394696
MGGACGYGNLYSQGYGTNTAALSTALFNNGLSCGACFEIRCQNDGKWCLPGSIVVTATNFCPPNNALPNNAGGWCNPPQQHFDLSQPVFQRIAQYRAGIVPVAYRRVPCVRRGGIRFTINGHSYFNLVLITNVGGAGDVHSAMVKGSRTGWQAMSRNWGQNWQSNSYLNGQSLSFKVTTSDGQTIVSNNVANAGWSFGQTFTGAQLR

SEQ ID NO: 24993 - DNA, 1209 bp, Arabidopsis thaliana
  misc_feature (1)..(1209): Ceres Seq. ID no. 12370368
  misc_feature (1)..(1209): Ortholog of  Ceres SEQ ID NO 14311229 as cited in SEQ ID NO 53262
atcatcgacaaaacataaatactaatggagcaccaccaccagcatcaccgtcaccaccaacgcgacgacggagaagacgatcgtcaatcctttggagtaccaccgccacacgtcgatgctccgccacaacctcatggtctttaccagtcacagcctcattttgatccttacgcgcctactcctcaagctccggcgccttaccgatcagaaactcaattcgaaccccacgcgcctccgccttaccgatcagagccttactttgaaactccggcaccaccgccttcatttggtcatgtgagtcatgttggtcaccaatcacccaacgaatcttacccaccggaacaccaccgttacggaggttatcaacagccgtctaattccttactggaaagtcatggagatcacagtggagtcacgcacgtggctcaccatagctcaaatcagccccaatcgtcttctggtgtctaccacaagcctgatgagaatcgtctacctgataatcttgctggactcgccggaagagcaacggtgaaggtgtattccaaggcggagcctaactataatttgacgatcagagatggtaaggttattctcgccccagcggatccatctgatgaagcacagcattggtacaaagacgagaagtatagtactaaagtgaaggacgcagacggtcatccttgttttgctcttgtaaacaaagctactggtgaagcaatgaagcattctgtgggagctactcatcccgtgcatctgattcgatatgtgcctgataagcttgacgagtcagtactatggacagagagcaaggattttggcgatggatatcgcacaataagaatggtaaacaatacgaggctaaacgtggatgcatatcatggtgacagcaaatctggtggtgtacgtgatggcacgactatcgtcctctgggactggaacaaaggcgacaaccagctctggaagatctttcctttctgaaaattggcgtctggagtggtaaaaagttcctttgtgtgtgctgtatgaataagaaagaaacaaaactcagatttattcattgtttgtgtcttgtaaagacttgagtttgtgctgttggcatctgtaatctatcttacttgtattccaagtatgtttttacagatacattacatacactgtctatatgtgtatacttttttcctaatctattttgagatctttctttttccc

SEQ ID NO: 24994 - protein, 317 aa, Arabidopsis thaliana
  peptide (1)..(317): Ceres Seq. ID no. 12370369
MEHHHQHHRHHQRDDGEDDRQSFGVPPPHVDAPPQPHGLYQSQPHFDPYAPTPQAPAPYRSETQFEPHAPPPYRSEPYFETPAPPPSFGHVSHVGHQSPNESYPPEHHRYGGYQQPSNSLLESHGDHSGVTHVAHHSSNQPQSSSGVYHKPDENRLPDNLAGLAGRATVKVYSKAEPNYNLTIRDGKVILAPADPSDEAQHWYKDEKYSTKVKDADGHPCFALVNKATGEAMKHSVGATHPVHLIRYVPDKLDESVLWTESKDFGDGYRTIRMVNNTRLNVDAYHGDSKSGGVRDGTTIVLWDWNKGDNQLWKIFPF

SEQ ID NO: 24995 - DNA, 850 bp, Arabidopsis thaliana
  misc_feature (1)..(850): Ceres Seq. ID no. 12335821
  misc_feature (1)..(850): Ortholog of  Ceres SEQ ID NO 12627109 as cited in SEQ ID NO 66391
accgattcattagaaatccatccctctcactgtcaaaacccgagaagcagaaaaaagcaaaaaacagatttcgaagtttcgacgcctctctattcttcgatctctttcatatttgaatcgttcaccttcttgccgatcttcggagtatattacaaggttcttaacggatctctaaatcttctgatttaagaagatgcttcctctatcgctgtttaaaactgctcaagggcatcctatgctcgtggagcttaagaatggagagacatacaatgggcatttggtgaattgtgatacttggatgaacatccatctgcgtgaagtcatatgtacatcaaaggacggagatagattttggaggatgccggaatgttatatccgtggtaacacaatcaagtaccttcgagttccggatgaggtgattgataaagtacaggaggagaagacacgcacagatagaaaaccaccaggtgttggacgtggaagaggacgtggtgtggatgatggaggagccagaggcagaggcagaggaacttcaatggggaagatgggtggcaacagaggagcaggtcgcggccgtggttgatgcaacaagttttaaagactcgctgccaaatctgctaacttcccattgtggagaaaaccaaaagttacataagaagttggtctgttgttggttttctattaagtatgtaagggatagggagtgtgttttcgattctccttgtgatcttttcgaaaaatgaaatttgtcttttgcctttttgtggtatatgtgaaattccaattgttttcatttgcgcttaaaaatgaatctttcaggtcttgaatttatataattgttagagaattt

SEQ ID NO: 24996 - protein, 129 aa, Arabidopsis thaliana
  peptide (1)..(129): Ceres Seq. ID no. 12335822
MLPLSLFKTAQGHPMLVELKNGETYNGHLVNCDTWMNIHLREVICTSKDGDRFWRMPECYIRGNTIKYLRVPDEVIDKVQEEKTRTDRKPPGVGRGRGRGVDDGGARGRGRGTSMGKMGGNRGAGRGRG

SEQ ID NO: 24997 - protein, 115 aa, Arabidopsis thaliana
  peptide (1)..(115): Ceres Seq. ID no. 12335823
MLVELKNGETYNGHLVNCDTWMNIHLREVICTSKDGDRFWRMPECYIRGNTIKYLRVPDEVIDKVQEEKTRTDRKPPGVGRGRGRGVDDGGARGRGRGTSMGKMGGNRGAGRGRG

SEQ ID NO: 24998 - protein, 94 aa, Arabidopsis thaliana
  peptide (1)..(94): Ceres Seq. ID no. 12335824
MNIHLREVICTSKDGDRFWRMPECYIRGNTIKYLRVPDEVIDKVQEEKTRTDRKPPGVGRGRGRGVDDGGARGRGRGTSMGKMGGNRGAGRGRG

SEQ ID NO: 24999 - DNA, 1750 bp, Arabidopsis thaliana
  misc_feature (1)..(1750): Ceres Seq. ID no. 12348561
  misc_feature (1)..(1750): Ortholog of  Ceres SEQ ID NO 14308625 as cited in SEQ ID NO 55009
attcagcttgctcgcaacgaaacatattttttggaaaaaaaaaacaaaggaaatcgccatggaagacgttaaccagttgttcgatgctgctttcgagttcgcacactatcccggcgctcaaaacgaaacttccgttaaggaattcctcgatcgcttccctcttcctgttatcttcaatgctttgcaaaccgatccggatataccaggatttgaaaacacgttggtgacttgcttggagaggttgtttaagactaagtatggcgcttcacttattcctcagtatatgcctgttctgcaagttggtctcaaggcagattctgcagttgtgaaatctctggcttgcaaaactgttctgtgtctcttggaggattgcgatacaaacgacgtttcttctgttcagctagttgttaacaatggcatataccctcttctacttgactatatcattaacagcgatgatgaagttgcaaatgctgcaagtgagacaattaagagcctagctcgctttccagatgcaatgtccgtaattttcccttctgaaaccaacgatcctacacatcttcgtaaccttgctgcaaggtgttcatcactggcacgagtccgggttttgtcgttgatagtgaagcttttttcgatttctcgacttgtagcttcagaagttaagaaatcggggattcttgatttactggaggcagaaatgaagggtacaaaagacactcttgtgatcttaaatgttctggaactctactatgagttaatggaagtggagcacagttcagagttcgtgccacaaacatcacttattcagctgttgtgttctatcatcagtggtacatcgacgggaccctatgaaaagttaagagcaatgatgataagtggcagactactctcaaaggaaaatatctacaaagtcgtggaagaagctagtgtgaaggcgttaatttcagctattgatgggagtctggagtcagttgagatgaatgatactgatgcacaggaagctgccattgatgcacttggtcagatgggatcaacaacgaagggagcggatcttgtcctttcaacttcacctccagctgcaagacatgttgtagcttctgcctttgatcgtaatgcacatggaaaacagttggctgcactgcatgcactggcaaacatcgcaggtgaaacacgacctaagagcaacagaatagttgatggaaaagctgaagaaagccttagatgtttgatatacgacgctgcagcacagagcacaaaactaaccccatccggtttattcctctcagttcttcaacaaagctcagagattcgtcttgcgggttatcgaacgttaacagcattagtggctcggccatggtgcctggtggaaatcttggccaaagaagagataataaacatagttacggatgcaaccactgaaactgcaaaaatagcaatggaagcaaggtataactgctgcaaagcaattcacgaagcgttcttgtgtggtaactttgttgatgaccctcgtcgtctaaaaaccggtgacaagttgcaagaagctgttcgaagtggaccatatatgtcgaagaagcacagaggcgcacgaccagaagtaatgacaggcgaaggattttaaagacaactaaagaaaaaaagttaaaacttctttgttaaccaaagttttttatatcttctctggctgttcgataagtaaactttagttctttctataaacaacgaaggctaggagtaaacgttttggcggttg

SEQ ID NO: 25000 - protein, 538 aa, Arabidopsis thaliana
  peptide (1)..(538): Ceres Seq. ID no. 12348562
FSLLATKHIFWKKKTKEIAMEDVNQLFDAAFEFAHYPGAQNETSVKEFLDRFPLPVIFNALQTDPDIPGFENTLVTCLERLFKTKYGASLIPQYMPVLQVGLKADSAVVKSLACKTVLCLLEDCDTNDVSSVQLVVNNGIYPLLLDYIINSDDEVANAASETIKSLARFPDAMSVIFPSETNDPTHLRNLAARCSSLARVRVLSLIVKLFSISRLVASEVKKSGILDLLEAEMKGTKDTLVILNVLELYYELMEVEHSSEFVPQTSLIQLLCSIISGTSTGPYEKLRAMMISGRLLSKENIYKVVEEASVKALISAIDGSLESVEMNDTDAQEAAIDALGQMGSTTKGADLVLSTSPPAARHVVASAFDRNAHGKQLAALHALANIAGETRPKSNRIVDGKAEESLRCLIYDAAAQSTKLTPSGLFLSVLQQSSEIRLAGYRTLTALVARPWCLVEILAKEEIINIVTDATTETAKIAMEARYNCCKAIHEAFLCGNFVDDPRRLKTGDKLQEAVRSGPYMSKKHRGARPEVMTGEGF

SEQ ID NO: 25001 - protein, 519 aa, Arabidopsis thaliana
  peptide (1)..(519): Ceres Seq. ID no. 12348563
MEDVNQLFDAAFEFAHYPGAQNETSVKEFLDRFPLPVIFNALQTDPDIPGFENTLVTCLERLFKTKYGASLIPQYMPVLQVGLKADSAVVKSLACKTVLCLLEDCDTNDVSSVQLVVNNGIYPLLLDYIINSDDEVANAASETIKSLARFPDAMSVIFPSETNDPTHLRNLAARCSSLARVRVLSLIVKLFSISRLVASEVKKSGILDLLEAEMKGTKDTLVILNVLELYYELMEVEHSSEFVPQTSLIQLLCSIISGTSTGPYEKLRAMMISGRLLSKENIYKVVEEASVKALISAIDGSLESVEMNDTDAQEAAIDALGQMGSTTKGADLVLSTSPPAARHVVASAFDRNAHGKQLAALHALANIAGETRPKSNRIVDGKAEESLRCLIYDAAAQSTKLTPSGLFLSVLQQSSEIRLAGYRTLTALVARPWCLVEILAKEEIINIVTDATTETAKIAMEARYNCCKAIHEAFLCGNFVDDPRRLKTGDKLQEAVRSGPYMSKKHRGARPEVMTGEGF

SEQ ID NO: 25002 - protein, 444 aa, Arabidopsis thaliana
  peptide (1)..(444): Ceres Seq. ID no. 12348564
MPVLQVGLKADSAVVKSLACKTVLCLLEDCDTNDVSSVQLVVNNGIYPLLLDYIINSDDEVANAASETIKSLARFPDAMSVIFPSETNDPTHLRNLAARCSSLARVRVLSLIVKLFSISRLVASEVKKSGILDLLEAEMKGTKDTLVILNVLELYYELMEVEHSSEFVPQTSLIQLLCSIISGTSTGPYEKLRAMMISGRLLSKENIYKVVEEASVKALISAIDGSLESVEMNDTDAQEAAIDALGQMGSTTKGADLVLSTSPPAARHVVASAFDRNAHGKQLAALHALANIAGETRPKSNRIVDGKAEESLRCLIYDAAAQSTKLTPSGLFLSVLQQSSEIRLAGYRTLTALVARPWCLVEILAKEEIINIVTDATTETAKIAMEARYNCCKAIHEAFLCGNFVDDPRRLKTGDKLQEAVRSGPYMSKKHRGARPEVMTGEGF

SEQ ID NO: 25003 - DNA, 1625 bp, Arabidopsis thaliana
  misc_feature (1)..(1625): Ceres Seq. ID no. 12673062
  misc_feature (1)..(1625): Ortholog of  Ceres SEQ ID NO 13663419 as cited in SEQ ID NO 66561
aatctttagaaactaagagagaatggaattaacactaaaattgctggttctgcttctgtttatcttaaatcatcatgttggttctggctctatcgtcaagtttcttcccggttttgaaggccctcttcctttcgaacttgaaaccgggtacattggtattggtgaggaagaggaagtgcaattgttctattatttcatcaaatctgagagaaatccaaaagaagaccctcttcttctctggttaagtggaggacctggatgttcttctatcactggccttcttttccagaatggacctttggctttgaagtccgaggtttacaatggaagtgttccttctttggtctctactacatattcgtggactaagacggcgaacataatattcttggatcaacctgttggagctggcttctcctactcaagagctccacttattgatacacctactgacacaggagaagttaagaggattcatgagtttctccaaaagtggctaagcaagcatccacagttttcttccaaccatttttatgctggcggagattcttattccggtatgattgttccggccctcgttcaagaaatctcgaaaggaaattatatatgttgcaaccctcctataaatctaaagggttatgtactcgggaacccgataacgcacgaagacgacccaaactatcgcattccattttctcatggaatggcactaatttcagatgaactatacgagtcaattagggaagcctgcaaaggaaattatttcaatgtggatccacgaaacacaaaatgtttgaaacttgtcgaggaatttcataagtgtaccgacaaactaaatgaattccatatactatcaccagattgcgacacggcatctcctgattgctatttatatccattttatctcattagcttttgggccaatgacgagagcgtccgcgatgctcttcatgttaataagaggagtattggaaaatgggagcgatgtaactatctgagtaaaccatacaacaaagacatcaagagcagcgtaccataccatatgaataacagtgttagtggctaccgatctctcatctacagtggtgatcatgatttggtggttcctttccttgcaacacaagcctggataaaatctctaaattactctatcattgatgaatggagaccttggatgattagagatcaaatcactggatacacgagaacttattccaataagatgacatttgctactgtcaaaggaagtgggcacacagcggagaataaaccacaagagagttttatcatgtttcgaaggtggattaatggccaacctttgtaaaaattacaattatgaattatctactatgtgagctatttgttcctgaggaggtttagaactctaccactagttcgacatgctatagttaccaataaatgaggtcttatttgggtctagggagactacaggccaaagacttggaacttcttggtttattgttatatgttgttaggtaacatttttgtgttattcatagattttaccttttggtacttttatcttctcacagattatattgttctgtgttgtgctgttattttttacaattaaacttagatttttaataaattcttttttgtct

SEQ ID NO: 25004 - protein, 433 aa, Arabidopsis thaliana
  peptide (1)..(433): Ceres Seq. ID no. 12673063
MELTLKLLVLLLFILNHHVGSGSIVKFLPGFEGPLPFELETGYIGIGEEEEVQLFYYFIKSERNPKEDPLLLWLSGGPGCSSITGLLFQNGPLALKSEVYNGSVPSLVSTTYSWTKTANIIFLDQPVGAGFSYSRAPLIDTPTDTGEVKRIHEFLQKWLSKHPQFSSNHFYAGGDSYSGMIVPALVQEISKGNYICCNPPINLKGYVLGNPITHEDDPNYRIPFSHGMALISDELYESIREACKGNYFNVDPRNTKCLKLVEEFHKCTDKLNEFHILSPDCDTASPDCYLYPFYLISFWANDESVRDALHVNKRSIGKWERCNYLSKPYNKDIKSSVPYHMNNSVSGYRSLIYSGDHDLVVPFLATQAWIKSLNYSIIDEWRPWMIRDQITGYTRTYSNKMTFATVKGSGHTAENKPQESFIMFRRWINGQPL

SEQ ID NO: 25005 - protein, 254 aa, Arabidopsis thaliana
  peptide (1)..(254): Ceres Seq. ID no. 12673064
MIVPALVQEISKGNYICCNPPINLKGYVLGNPITHEDDPNYRIPFSHGMALISDELYESIREACKGNYFNVDPRNTKCLKLVEEFHKCTDKLNEFHILSPDCDTASPDCYLYPFYLISFWANDESVRDALHVNKRSIGKWERCNYLSKPYNKDIKSSVPYHMNNSVSGYRSLIYSGDHDLVVPFLATQAWIKSLNYSIIDEWRPWMIRDQITGYTRTYSNKMTFATVKGSGHTAENKPQESFIMFRRWINGQPL

SEQ ID NO: 25006 - DNA, 1267 bp, Arabidopsis thaliana
  misc_feature (1)..(1267): Ceres Seq. ID no. 4936105
  misc_feature (1)..(1267): Ortholog of  Ceres SEQ ID NO 12611971 as cited in SEQ ID NO 53205
  misc_feature (1)..(1267): Ortholog of  Ceres SEQ ID NO 12615976 as cited in SEQ ID NO 62440
attccaaaagttttttctgttgtgtgtaaaaagcccggatttagagagagatttagttttttttttttttccggcacttgggtccttcaaagtctccgccttctgccgtgttgaagttcgatggcgataggagaccgcaagaagattatcatcgatactgatcctggaatcgatgatgcaatggcgatattcgtagctttaaattcacctgaagttgatgtcattggcctcactactatctttggaaacgtgtataccactctcgccactcgaaacgccttgcatttgttggaggttgcgggtaggaccgatattccggtggctgaaggaacacataaaaccttcttgaacgatacgaagcttcgaatagctgactttgttcatggaaaagatgggcttggcaaccaaaacttccctccacctaaaggaaaaccaattgaaaagtctggacctgagtttttagttgaacaagcaaagctttgccctggtgaaatcacggttgttgctttgggaccactaacaaatctcgcgttggctgttcagcttgatccagagttttcgaaaaatgtcggacaaattgttcttcttggtggagcatttgcagtaaacggaaatgtaaatccagcttcggaagctaatatttttggcgatcccgaagctgcagatattgtgttcacatgtggggccgatataattgctgtgggaatcaatgtgacccatcaagttattatgacagctgatgacaaggacaaactagcatcatcgaaggggaaattagctcaatatctctgtaaaatccttgatgtgtactatgattatcatctcacggcttacgaaatcaaaggtgtgtaccttcatgatcctgcgacgatccttgcggctttccttccttctctattcacttatacagaaggagttgctagagtgcagacaagtggtatcactaggggactcactttactgtacaacaatcttaagaggtttgaggaagcgaacgagtggtcagacaaaccaacggtaaaagtggcagtgacggttgatgctcctgcagtcgtgaagctcataatggataggcttatggagtcttaaaccatcttgggtcgttaattagttatctctttctctttgatgtttcactattgcgagccatttctcttgttaaaaataaggctcctcttgctgcattatttatttattgtttaatctttattaaaacgaatattattatgttaccaattaccaataataaagttaagatttttcctcc

SEQ ID NO: 25007 - protein, 322 aa, Arabidopsis thaliana
  peptide (1)..(322): Ceres Seq. ID no. 4936106
MAIGDRKKIIIDTDPGIDDAMAIFVALNSPEVDVIGLTTIFGNVYTTLATRNALHLLEVAGRTDIPVAEGTHKTFLNDTKLRIADFVHGKDGLGNQNFPPPKGKPIEKSGPEFLVEQAKLCPGEITVVALGPLTNLALAVQLDPEFSKNVGQIVLLGGAFAVNGNVNPASEANIFGDPEAADIVFTCGADIIAVGINVTHQVIMTADDKDKLASSKGKLAQYLCKILDVYYDYHLTAYEIKGVYLHDPATILAAFLPSLFTYTEGVARVQTSGITRGLTLLYNNLKRFEEANEWSDKPTVKVAVTVDAPAVVKLIMDRLMES

SEQ ID NO: 25008 - protein, 302 aa, Arabidopsis thaliana
  peptide (1)..(302): Ceres Seq. ID no. 4936107
MAIFVALNSPEVDVIGLTTIFGNVYTTLATRNALHLLEVAGRTDIPVAEGTHKTFLNDTKLRIADFVHGKDGLGNQNFPPPKGKPIEKSGPEFLVEQAKLCPGEITVVALGPLTNLALAVQLDPEFSKNVGQIVLLGGAFAVNGNVNPASEANIFGDPEAADIVFTCGADIIAVGINVTHQVIMTADDKDKLASSKGKLAQYLCKILDVYYDYHLTAYEIKGVYLHDPATILAAFLPSLFTYTEGVARVQTSGITRGLTLLYNNLKRFEEANEWSDKPTVKVAVTVDAPAVVKLIMDRLMES

SEQ ID NO: 25009 - DNA, 1565 bp, Arabidopsis thaliana
  misc_feature (1)..(1565): Ceres Seq. ID no. 13487823
  misc_feature (1)..(1565): Ortholog of  Ceres SEQ ID NO 15170461 as cited in SEQ ID NO 52853
  misc_feature (1)..(1565): Ortholog of  Ceres SEQ ID NO 13595351 as cited in SEQ ID NO 55934
  misc_feature (1)..(1565): Ortholog of  Ceres SEQ ID NO 13595513 as cited in SEQ ID NO 56663
  misc_feature (1)..(1565): Ortholog of  Ceres SEQ ID NO 13639645 as cited in SEQ ID NO 57488
ataaatgggtgtatatatacatctttggctataaatataaggtcgaaccaaaataaaatatagatttggggaaactaataaatgatatagagaatccacctctctcccttatttttttttcttggtttcttgacctattattattgattagtaatagtgagagaggcatattttggagatacacataaacacataaattggaagaataaaataaaagagagtgagagatggctaaatcagatatgttgccgttcttggcgatggtgttggtgcaaatcggctacgcaggcatgaacattacgtcgaagatggctatggaggccggtatgaagccactcatcctggtcgcttatcgtcagatatttgccactatcgccacttttccggtcgcattttttctcgaacggaagacaagaccgaagatcacacttaggattcttgtccaagtcttcttctgctccattactggtgcgactggaaaccaagtgctatatttcgtaggacttcagaattcatctccgaccattgcttgtgccttaactaatctcttaccagcggtcactttcctcctcgccgcaatattcagacaagaaaccgtggggatcaagaaggcatcaggacaagccaaagtgatagggacgctagtatgtgtgatcggagccatggttctctccttctaccatggtcacaccatcggcattggagaatccaagatccattgggcctacgctgaaaacatcacgaaacatggttccagttctggccattctaatttcttcttgggaccttttcttattatggctgctgccgtttcttgggccgcttggttcattatccagacgaagatgagtgaaacatttgcagcaccgtacacgagcacactactaatgtgtttgatgggaagtatccaatgtggagccattgctttgatctccgatcatacaatctctgattggtctctcagctctcctctccgcttcatatccgccctttatgccggagtggtggcgtctgcgttagctttctgcctaatgtcatgggctatgcagaggaaaggtcctctgtacgtctctgttttcagccctttacttctcgtagttgtcgccattttcagctgggctcttcttgaagagaaactctacaccggcacgtttatgggatcagcacttgtggttattggtctctatggcgtattgtgggggaaagacagagaggtgagtgagaaggaagaagaaagggagaaggtgaaacaacaaaaccataaagtcaagagtgaaagtaatgaagatattgaatcgagattaccggtagcaagtagtggaaatggttccacaaggtctacatcgccttaaaatggtgattgcttcttcatcatatataagtatgagctatggaagaacctttttgggatttcttgttatctaagttactgcaactaaattggattttcggagtgtttaattttgtatcccattttgaggctaatgatggagtgttgatttgtgtgttcatcctatggacaacaaatatcacctgtttgatctctatatatattcagtattctt

SEQ ID NO: 25010 - protein, 374 aa, Arabidopsis thaliana
  peptide (1)..(374): Ceres Seq. ID no. 13487824
MAKSDMLPFLAMVLVQIGYAGMNITSKMAMEAGMKPLILVAYRQIFATIATFPVAFFLERKTRPKITLRILVQVFFCSITGATGNQVLYFVGLQNSSPTIACALTNLLPAVTFLLAAIFRQETVGIKKASGQAKVIGTLVCVIGAMVLSFYHGHTIGIGESKIHWAYAENITKHGSSSGHSNFFLGPFLIMAAAVSWAAWFIIQTKMSETFAAPYTSTLLMCLMGSIQCGAIALISDHTISDWSLSSPLRFISALYAGVVASALAFCLMSWAMQRKGPLYVSVFSPLLLVVVAIFSWALLEEKLYTGTFMGSALVVIGLYGVLWGKDREVSEKEEEREKVKQQNHKVKSESNEDIESRLPVASSGNGSTRSTSP

SEQ ID NO: 25011 - protein, 369 aa, Arabidopsis thaliana
  peptide (1)..(369): Ceres Seq. ID no. 13487825
MLPFLAMVLVQIGYAGMNITSKMAMEAGMKPLILVAYRQIFATIATFPVAFFLERKTRPKITLRILVQVFFCSITGATGNQVLYFVGLQNSSPTIACALTNLLPAVTFLLAAIFRQETVGIKKASGQAKVIGTLVCVIGAMVLSFYHGHTIGIGESKIHWAYAENITKHGSSSGHSNFFLGPFLIMAAAVSWAAWFIIQTKMSETFAAPYTSTLLMCLMGSIQCGAIALISDHTISDWSLSSPLRFISALYAGVVASALAFCLMSWAMQRKGPLYVSVFSPLLLVVVAIFSWALLEEKLYTGTFMGSALVVIGLYGVLWGKDREVSEKEEEREKVKQQNHKVKSESNEDIESRLPVASSGNGSTRSTSP

SEQ ID NO: 25012 - protein, 363 aa, Arabidopsis thaliana
  peptide (1)..(363): Ceres Seq. ID no. 13487826
MVLVQIGYAGMNITSKMAMEAGMKPLILVAYRQIFATIATFPVAFFLERKTRPKITLRILVQVFFCSITGATGNQVLYFVGLQNSSPTIACALTNLLPAVTFLLAAIFRQETVGIKKASGQAKVIGTLVCVIGAMVLSFYHGHTIGIGESKIHWAYAENITKHGSSSGHSNFFLGPFLIMAAAVSWAAWFIIQTKMSETFAAPYTSTLLMCLMGSIQCGAIALISDHTISDWSLSSPLRFISALYAGVVASALAFCLMSWAMQRKGPLYVSVFSPLLLVVVAIFSWALLEEKLYTGTFMGSALVVIGLYGVLWGKDREVSEKEEEREKVKQQNHKVKSESNEDIESRLPVASSGNGSTRSTSP

SEQ ID NO: 25013 - DNA, 1491 bp, Arabidopsis thaliana
  misc_feature (1)..(1491): Ceres Seq. ID no. 12395997
  misc_feature (1)..(1491): Ortholog of  Ceres SEQ ID NO 14315993 as cited in SEQ ID NO 57788
atgaatgatcgatgtgatctccaagtccaacgtctcctttctatttaccgtgttccttcctttgaagtcattcttcaattcatcgctccattgttcttcagatttcaattttgctgggaaattttagagtaggcgactcctttgatcgccttatttcatttcgaaagttgagattttggatacgaccctcttgatctgacaccggaatgttggttagttaaatggagagaaaaagaacaaaggacagtgaaccaggaccagtccctctgcttgtaccggttgatagatttgggtttctgaaacaggaacatggcagttctcctcaacgtttcaccaagactaaatcatctattaattatgagaaggaggagaagagagtgacaaaatggaggaagatgattggaactgggggtagtgattggaagcattacgttaggagaaaacctcatgttgtcaagaggcggattcgaaaagggatccctgattgcttaaggggtctcgtttggcaattgatctctggaagtcgagaccttttgcttatgaatcccggtgtttatgtgcaactggtgatttatgagacgtcggcatcagaactcgatatcattcgggatatatctcgtactttcccgtcacatgttttcttccagaagagacatggaccaggccaaagatcattatacaatgttctaaaagcatactctgtctatgacagagatgtcggatatgttcagggaatgggtttcatagccggtttgttgcttctttatatgagcgaagaagatgcattctggttattagttgcattactcaaaggagctgtccactccccaatagaaggattgtatcaggcagggcttcctcttgtacagcaatatctgttacagtttgatcagttggtaagagagctaatgcccaaactaggagaacatttcactcaagaaatgatcaatccgagtatgtatgcaagtcaatggttcataaccgtcttttcgtattcacttcctttccattcagcgctacgaatttgggatgtgtttctagctgagggtgttaaaatcgtgttcaaagtcggtttagcattattgaagcattgccatgatgatttgttgaaattgccatttgaggaactcatgcatgctctgaggaatttccctgaagatgccatggatcctgatactttgcttccattggcttattccattaaggtatcaaagcgtttggaagaaatgaaacaggattgtgacaaggccgttgctaaaccgactcaaacggccaaatcggttcgacaatagagtttgatattcttgaaccgaatcaaaccggaaagtggattctcgaagattcttctcattatttgtgcaaattttatctttctctctttttttacaactcgtgtgaaaacaatagaagaattacttttgtaaaaatatatttcgactcaacaactttagattcttctttctttttggtaatgaaaagtcaaatttgagc

SEQ ID NO: 25014 - protein, 356 aa, Arabidopsis thaliana
  peptide (1)..(356): Ceres Seq. ID no. 12395998
MERKRTKDSEPGPVPLLVPVDRFGFLKQEHGSSPQRFTKTKSSINYEKEEKRVTKWRKMIGTGGSDWKHYVRRKPHVVKRRIRKGIPDCLRGLVWQLISGSRDLLLMNPGVYVQLVIYETSASELDIIRDISRTFPSHVFFQKRHGPGQRSLYNVLKAYSVYDRDVGYVQGMGFIAGLLLLYMSEEDAFWLLVALLKGAVHSPIEGLYQAGLPLVQQYLLQFDQLVRELMPKLGEHFTQEMINPSMYASQWFITVFSYSLPFHSALRIWDVFLAEGVKIVFKVGLALLKHCHDDLLKLPFEELMHALRNFPEDAMDPDTLLPLAYSIKVSKRLEEMKQDCDKAVAKPTQTAKSVRQ

SEQ ID NO: 25015 - protein, 298 aa, Arabidopsis thaliana
  peptide (1)..(298): Ceres Seq. ID no. 12395999
MIGTGGSDWKHYVRRKPHVVKRRIRKGIPDCLRGLVWQLISGSRDLLLMNPGVYVQLVIYETSASELDIIRDISRTFPSHVFFQKRHGPGQRSLYNVLKAYSVYDRDVGYVQGMGFIAGLLLLYMSEEDAFWLLVALLKGAVHSPIEGLYQAGLPLVQQYLLQFDQLVRELMPKLGEHFTQEMINPSMYASQWFITVFSYSLPFHSALRIWDVFLAEGVKIVFKVGLALLKHCHDDLLKLPFEELMHALRNFPEDAMDPDTLLPLAYSIKVSKRLEEMKQDCDKAVAKPTQTAKSVRQ

SEQ ID NO: 25016 - protein, 250 aa, Arabidopsis thaliana
  peptide (1)..(250): Ceres Seq. ID no. 12396000
MNPGVYVQLVIYETSASELDIIRDISRTFPSHVFFQKRHGPGQRSLYNVLKAYSVYDRDVGYVQGMGFIAGLLLLYMSEEDAFWLLVALLKGAVHSPIEGLYQAGLPLVQQYLLQFDQLVRELMPKLGEHFTQEMINPSMYASQWFITVFSYSLPFHSALRIWDVFLAEGVKIVFKVGLALLKHCHDDLLKLPFEELMHALRNFPEDAMDPDTLLPLAYSIKVSKRLEEMKQDCDKAVAKPTQTAKSVRQ

SEQ ID NO: 25017 - DNA, 875 bp, Arabidopsis thaliana
  misc_feature (1)..(875): Ceres Seq. ID no. 13575759
  misc_feature (1)..(875): Ortholog of  Ceres SEQ ID NO 15174145 as cited in SEQ ID NO 0
aaaataccaagcaaccaatttcttgcaattttcctctcctcccaaccaaaacacaagagccaagaacaaagaaaccatggatcatgatcacatgcatggaatgcctcgaccatcatcatcatcatcatcatcaccatcatccatgatgaacaatggatccatgaacgaaggaggaggacatcaccacatgaagatgatgatgcacatgaccttcttttggggcaagaacacggaggttctcttctccggttggcccggaacaagctccggcatgtatgctctttgtcttatctttgtcttctttctcgccgtcctcaccgaatggcttgctcattcctctctcctccgtggctccaccggagattcggctaatcgtgccgccgggttaatccaaaccgccgtgtataccctccgtatcggcctcgcctatctagtcatgctcgccgtcatgtcgtttaacgccggtgtgtttctcgtcgctctggccggtcatgccgttggtttcatgttgttcggaagccaaactttccggaatacctccgatgaccggaaaactaactatgttcctccctcaggttgtgcttgttgatgataatatcaatgctttatatatatgtatggattgatccatgcttgtgattcaaattaaagatctagggtttgtagttttcttggttattttatggattgttcttgaggttcatgtgtgtgtgaatgtgaggaggaggaatatttgatattttctatcgtttgcttaattttttttgcttttgttttattctgctggctaatggtgaaagctgagtatacaatttactacttttgggctccaatttgtttttttttttctctcagaatttcatatataatttctt

SEQ ID NO: 25018 - protein, 195 aa, Arabidopsis thaliana
  peptide (1)..(195): Ceres Seq. ID no. 13575760
KYQATNFLQFSSPPNQNTRAKNKETMDHDHMHGMPRPSSSSSSSPSSMMNNGSMNEGGGHHHMKMMMHMTFFWGKNTEVLFSGWPGTSSGMYALCLIFVFFLAVLTEWLAHSSLLRGSTGDSANRAAGLIQTAVYTLRIGLAYLVMLAVMSFNAGVFLVALAGHAVGFMLFGSQTFRNTSDDRKTNYVPPSGCAC

SEQ ID NO: 25019 - protein, 170 aa, Arabidopsis thaliana
  peptide (1)..(170): Ceres Seq. ID no. 13575761
MDHDHMHGMPRPSSSSSSSPSSMMNNGSMNEGGGHHHMKMMMHMTFFWGKNTEVLFSGWPGTSSGMYALCLIFVFFLAVLTEWLAHSSLLRGSTGDSANRAAGLIQTAVYTLRIGLAYLVMLAVMSFNAGVFLVALAGHAVGFMLFGSQTFRNTSDDRKTNYVPPSGCAC

SEQ ID NO: 25020 - protein, 165 aa, Arabidopsis thaliana
  peptide (1)..(165): Ceres Seq. ID no. 13575762
MHGMPRPSSSSSSSPSSMMNNGSMNEGGGHHHMKMMMHMTFFWGKNTEVLFSGWPGTSSGMYALCLIFVFFLAVLTEWLAHSSLLRGSTGDSANRAAGLIQTAVYTLRIGLAYLVMLAVMSFNAGVFLVALAGHAVGFMLFGSQTFRNTSDDRKTNYVPPSGCAC

SEQ ID NO: 25021 - DNA, 1226 bp, Arabidopsis thaliana
  misc_feature (1)..(1226): Ceres Seq. ID no. 13499986
  misc_feature (1)..(1226): Ortholog of  Ceres SEQ ID NO 13502952 as cited in SEQ ID NO 62271
  misc_feature (1)..(1226): Ortholog of  Ceres SEQ ID NO 13502973 as cited in SEQ ID NO 68052
  misc_feature (1)..(1226): Ortholog of  Ceres SEQ ID NO 13596000 as cited in SEQ ID NO 68188
atcaagttaaaaaaaaaacagaaggagaaatggcaataagttttagaactctagctcttttgaccctctcggtgttactaatttccatatctctcggcgtcgtcacagcaacagagtcgcagaggaatgaaggggaggtgcttacaatgtacgagcaatggcttgtagagaatgggaagaactataacggtcttggagagaaggagagacggttcaagatcttcaaagacaacttgaagcgcatcgaagaacacaattcagatccaaaccggagttatgaacgcgggttgaacaagttttcggatctaacggctgatgagtttcaagctagttacttaggtgggaagatggaaaagaaaagcctatcagatgtagcggagaggtatcagtacaaagaaggagatgttttacctgatgaagttgattggagggagagaggagcagttgttccaagagtcaaaagacaaggagagtgtggaagttgttgggcgtttgccgcgactggagcggtggaaggtataaaccagatcacaaccggagaattagtatctttatcggaacaagaactcattgactgcgatagagggaacgacaactttggatgtgctggtggtggagcagtatgggcctttgagttcattaaggagaacggtggtattgtatccgatgaagtttatggttataccggtgaagatactgccgcatgcaaggccattgagatgaaaaccactcgggttgttaccattaatggtcatgaggttgttcctgtaaacgatgagatgtctttgaagaaagctgttgcttatcaacctattagtgttatgatatcagctgcaaacatgagcgactacaaatctggtgtgtataaaggagcatgtagtaatttgtggggagatcacaatgtgctaattgtggggtatggaacatcatcagatgaaggagactactggcttattcgtaattcttggggaccagagtggggagaaggcgggtaccttaggcttcaacgtaacttccatgaaccaaccgggaaatgtgcagtcgctgtagctcctgtatacccaatcaagtcgaactcttcatctcatttgttgtctccaagtgtgtttaaattggttgttttatttgtttttcagttgattagtttggccttgctttgaaatatacttttatcggtgttcaagttcgttggtttttggtttaataaaggaaacaagattcgtcac

SEQ ID NO: 25022 - protein, 385 aa, Arabidopsis thaliana
  peptide (1)..(385): Ceres Seq. ID no. 13499987
QVKKKTEGEMAISFRTLALLTLSVLLISISLGVVTATESQRNEGEVLTMYEQWLVENGKNYNGLGEKERRFKIFKDNLKRIEEHNSDPNRSYERGLNKFSDLTADEFQASYLGGKMEKKSLSDVAERYQYKEGDVLPDEVDWRERGAVVPRVKRQGECGSCWAFAATGAVEGINQITTGELVSLSEQELIDCDRGNDNFGCAGGGAVWAFEFIKENGGIVSDEVYGYTGEDTAACKAIEMKTTRVVTINGHEVVPVNDEMSLKKAVAYQPISVMISAANMSDYKSGVYKGACSNLWGDHNVLIVGYGTSSDEGDYWLIRNSWGPEWGEGGYLRLQRNFHEPTGKCAVAVAPVYPIKSNSSSHLLSPSVFKLVVLFVFQLISLALL

SEQ ID NO: 25023 - protein, 376 aa, Arabidopsis thaliana
  peptide (1)..(376): Ceres Seq. ID no. 13499988
MAISFRTLALLTLSVLLISISLGVVTATESQRNEGEVLTMYEQWLVENGKNYNGLGEKERRFKIFKDNLKRIEEHNSDPNRSYERGLNKFSDLTADEFQASYLGGKMEKKSLSDVAERYQYKEGDVLPDEVDWRERGAVVPRVKRQGECGSCWAFAATGAVEGINQITTGELVSLSEQELIDCDRGNDNFGCAGGGAVWAFEFIKENGGIVSDEVYGYTGEDTAACKAIEMKTTRVVTINGHEVVPVNDEMSLKKAVAYQPISVMISAANMSDYKSGVYKGACSNLWGDHNVLIVGYGTSSDEGDYWLIRNSWGPEWGEGGYLRLQRNFHEPTGKCAVAVAPVYPIKSNSSSHLLSPSVFKLVVLFVFQLISLALL

SEQ ID NO: 25024 - protein, 337 aa, Arabidopsis thaliana
  peptide (1)..(337): Ceres Seq. ID no. 13499989
MYEQWLVENGKNYNGLGEKERRFKIFKDNLKRIEEHNSDPNRSYERGLNKFSDLTADEFQASYLGGKMEKKSLSDVAERYQYKEGDVLPDEVDWRERGAVVPRVKRQGECGSCWAFAATGAVEGINQITTGELVSLSEQELIDCDRGNDNFGCAGGGAVWAFEFIKENGGIVSDEVYGYTGEDTAACKAIEMKTTRVVTINGHEVVPVNDEMSLKKAVAYQPISVMISAANMSDYKSGVYKGACSNLWGDHNVLIVGYGTSSDEGDYWLIRNSWGPEWGEGGYLRLQRNFHEPTGKCAVAVAPVYPIKSNSSSHLLSPSVFKLVVLFVFQLISLALL

SEQ ID NO: 25025 - DNA, 725 bp, Arabidopsis thaliana
  misc_feature (1)..(725): Ceres Seq. ID no. 12581408
  misc_feature (1)..(725): Ortholog of  Ceres SEQ ID NO 12608953 as cited in SEQ ID NO 51227
acccactcatcttctcaattcccagatcatctacaatagtcatttctcttcgatttcttcaaactctcatcaaatcgtttatctgttctaaatttcgaagaagacgatgagtacaggcgcaggaagcggaacaaccaaaggtggcagaggaaagccaaaggccaccaaatccgtctctcgatcatctaaagccggtcttcaattccccgtcggaagaatcgctagattcctcaaatccggtaaatacgccgagcgtgtcggtgccggagctccggtctatctctccgctgttctcgagtacctcgccgccgaggtgttggagctggcgggaaacgcagcaagggataacaagaagacacgtatagtaccaagacacattcagcttgcagtgaggaacgatgaagagttaagcaaacttctgggaagtgtgacgattgcgaatggaggagttttgccaaatattcatcagactcttttgccatccaaggttggcaagaacaaaggagatattggatctgcttctcaggagttctgaggttcttagacttcttagttcagttctcttgtttggattcggaacttgtaaaatagaccctgatggtgttttttggggatcaaattaggttttaaagctaagtatatttggcttttgcctaagtatgtttaattagtgaatgatatgatatttcggaacgaatcatgtatcaatggaactgaattaatcc

SEQ ID NO: 25026 - protein, 142 aa, Arabidopsis thaliana
  peptide (1)..(142): Ceres Seq. ID no. 12581409
MSTGAGSGTTKGGRGKPKATKSVSRSSKAGLQFPVGRIARFLKSGKYAERVGAGAPVYLSAVLEYLAAEVLELAGNAARDNKKTRIVPRHIQLAVRNDEELSKLLGSVTIANGGVLPNIHQTLLPSKVGKNKGDIGSASQEF

SEQ ID NO: 25027 - DNA, 1317 bp, Arabidopsis thaliana
  misc_feature (1)..(1317): Ceres Seq. ID no. 12348654
  misc_feature (1)..(1317): Ortholog of  Ceres SEQ ID NO 14309755 as cited in SEQ ID NO 20741
  misc_feature (1)..(1317): Ortholog of  Ceres SEQ ID NO 13638746 as cited in SEQ ID NO 59296
  misc_feature (1)..(1317): Ortholog of  Ceres SEQ ID NO 13596474 as cited in SEQ ID NO 62169
  misc_feature (1)..(1317): Ortholog of  Ceres SEQ ID NO 13598714 as cited in SEQ ID NO 62656
  misc_feature (1)..(1317): Ortholog of  Ceres SEQ ID NO 13596969 as cited in SEQ ID NO 63375
  misc_feature (1)..(1317): Ortholog of  Ceres SEQ ID NO 13597519 as cited in SEQ ID NO 64759
  misc_feature (1)..(1317): Ortholog of  Ceres SEQ ID NO 13587054 as cited in SEQ ID NO 0
aaaaggaaactattcgtttgctgttctagataaaagccttcaattgagaaaaagaaaatgcctccagctttgacccgttttgcctataaaaggattctctaagatatggactttcctcatcttctcgggtaaacagaatcaactagttttgtttttcctctttcaaaaatgcatttctcttcgtcttcaacatcgtccacttggacaatcttaatcacattgggatgtcttatgcttcatgcatctttgtccgctgctcaactcacccctaccttctacgataggtcatgtcctaatgtcactaacatcgtacgagaaaccattgtaaatgagttaaggtcggaccctcgtatcgctgcgagcatccttcgtcttcacttccacgactgctttgttaatggttgtgacgcatccatcttgttagacaacacgacatcatttcgaacagagaaagatgcgtttggaaacgcaaattcggctcggggatttccagtgattgatagaatgaaagctgcggtggagagggcatgcccaagaaccgtttcatgcgcagatatgctcaccattgcagctcaacaatctgtcactttggcaggaggtccttcttggagggttcctttgggaaggagagacagtttacaagcattcctggaactcgctaatgcaaatcttccagctccattctttacacttccacaacttaaagccagcttcagaaatgttggtctcgatcgtccttctgatctcgttgctctctccggtggtcacacatttggtaaaaatcaatgtcagtttattcttgacagattatacaatttcagcaacacaggtttacccgaccctacactcaacactacttacctccaaactcttcgtggactatgcccccttaatggcaatcgaagtgccttggtagattttgatctacgtacgcctacggttttcgacaacaaatactacgtgaatctcaaagagcgaaaaggtcttatccagagcgaccaagagttgttctctagccccaatgccactgacacaatccccttggtgagagcatatgctgatggcacacaaacattcttcaatgcatttgtggaggcaatgaataggatgggaaacattacaccaactacaggaactcaaggacaaatcagattgaactgtagagttgtgaactccaactctctgctccatgatgtggtggatatcgttgactttgttagctctatgtgagaattgtttacccaatatgtggctacaagaatacatatatattaatgaataaaactctcaagacgtttacttgagaacatttatttt

SEQ ID NO: 25028 - protein, 353 aa, Arabidopsis thaliana
  peptide (1)..(353): Ceres Seq. ID no. 12348655
MHFSSSSTSSTWTILITLGCLMLHASLSAAQLTPTFYDRSCPNVTNIVRETIVNELRSDPRIAASILRLHFHDCFVNGCDASILLDNTTSFRTEKDAFGNANSARGFPVIDRMKAAVERACPRTVSCADMLTIAAQQSVTLAGGPSWRVPLGRRDSLQAFLELANANLPAPFFTLPQLKASFRNVGLDRPSDLVALSGGHTFGKNQCQFILDRLYNFSNTGLPDPTLNTTYLQTLRGLCPLNGNRSALVDFDLRTPTVFDNKYYVNLKERKGLIQSDQELFSSPNATDTIPLVRAYADGTQTFFNAFVEAMNRMGNITPTTGTQGQIRLNCRVVNSNSLLHDVVDIVDFVSSM

SEQ ID NO: 25029 - protein, 332 aa, Arabidopsis thaliana
  peptide (1)..(332): Ceres Seq. ID no. 12348656
MLHASLSAAQLTPTFYDRSCPNVTNIVRETIVNELRSDPRIAASILRLHFHDCFVNGCDASILLDNTTSFRTEKDAFGNANSARGFPVIDRMKAAVERACPRTVSCADMLTIAAQQSVTLAGGPSWRVPLGRRDSLQAFLELANANLPAPFFTLPQLKASFRNVGLDRPSDLVALSGGHTFGKNQCQFILDRLYNFSNTGLPDPTLNTTYLQTLRGLCPLNGNRSALVDFDLRTPTVFDNKYYVNLKERKGLIQSDQELFSSPNATDTIPLVRAYADGTQTFFNAFVEAMNRMGNITPTTGTQGQIRLNCRVVNSNSLLHDVVDIVDFVSSM

SEQ ID NO: 25030 - protein, 241 aa, Arabidopsis thaliana
  peptide (1)..(241): Ceres Seq. ID no. 12348657
MKAAVERACPRTVSCADMLTIAAQQSVTLAGGPSWRVPLGRRDSLQAFLELANANLPAPFFTLPQLKASFRNVGLDRPSDLVALSGGHTFGKNQCQFILDRLYNFSNTGLPDPTLNTTYLQTLRGLCPLNGNRSALVDFDLRTPTVFDNKYYVNLKERKGLIQSDQELFSSPNATDTIPLVRAYADGTQTFFNAFVEAMNRMGNITPTTGTQGQIRLNCRVVNSNSLLHDVVDIVDFVSSM

SEQ ID NO: 25031 - DNA, 1216 bp, Arabidopsis thaliana
  misc_feature (1)..(1216): Ceres Seq. ID no. 12337414
  misc_feature (1)..(1216): Ortholog of  Ceres SEQ ID NO 15176423 as cited in SEQ ID NO 53228
agacaagtttgttctggataaaaagacaattcatttctattttaattgtctgcaaaattctcacgggccatcggagagaggagacagaggtggtgctgcacaagaatccttcctcctatatcctacaagactttggaatgggaagagaagttgttgaggtgcttatggaccgaaacgccgacgtttcaagcgctagagttcatgttgctcctaagatagctgcagaggagactgatgaggaatttgaagtcaaagaatgcacagaggagaagtctctttctgagaatgcaccaaatgttggatctgctgagagagttggagctcagaaatcacctaaaacccgtaatggaaatgctaaagtttcaaagcagcaggatgctcctcttctcgcggtgaggaagccattgcaacccgagaacaagaagcatattgatgacgaagataattgctccattgcttcttccgttgcaacttccatgaggatgggtaagtctggattgacttatggaagtgctccaacgtttaggagtgctcaacgtgctgagaaacgcaaggagtattaccaaaagctcgaggagaaaaaccaagcgcttgaagctgagaggaacgagcttgaacagaggcaaaaggatgaacaagaagcagccttgaagcaacttagaaagaatctcaagttcaaggctaaacccgtccccaacttctactacgaggcacctcctgcgaaacctgagctcaagaagcttcctttgacacgtcccaagtcgccaaaactgatcctttctcggagaaaaagcttcagcgacgcagtcagctcgtcttcccgtgaagagattctgaagacagtctctaaccgtaaccgacacagcactggaacagttcagaacaaagacgatgatcacaagaacaagaacaccaatgctgcgcacgacagccctcgtgtcagatcaggcaaaggtaaatccggattgaaaccagtgaacgagtcctcagaagaagcttgaaatttcaaaagatgatgctttgttggtctaacttgatcttgccggagaaaatgtaaaatcaaagactctttgtttttcggttatttccggtatacgtttggttcactatgtaactgtctttttcgattttaagttttaacatgaaaaactttatgttgattgttgaacaactcctcctaatgttgaaatttgtaaatctgaatgttgttggattt

SEQ ID NO: 25032 - protein, 332 aa, Arabidopsis thaliana
  peptide (1)..(332): Ceres Seq. ID no. 12337415
TSLFWIKRQFISILIVCKILTGHRREETEVVLHKNPSSYILQDFGMGREVVEVLMDRNADVSSARVHVAPKIAAEETDEEFEVKECTEEKSLSENAPNVGSAERVGAQKSPKTRNGNAKVSKQQDAPLLAVRKPLQPENKKHIDDEDNCSIASSVATSMRMGKSGLTYGSAPTFRSAQRAEKRKEYYQKLEEKNQALEAERNELEQRQKDEQEAALKQLRKNLKFKAKPVPNFYYEAPPAKPELKKLPLTRPKSPKLILSRRKSFSDAVSSSSREEILKTVSNRNRHSTGTVQNKDDDHKNKNTNAAHDSPRVRSGKGKSGLKPVNESSEEA

SEQ ID NO: 25033 - protein, 287 aa, Arabidopsis thaliana
  peptide (1)..(287): Ceres Seq. ID no. 12337416
MGREVVEVLMDRNADVSSARVHVAPKIAAEETDEEFEVKECTEEKSLSENAPNVGSAERVGAQKSPKTRNGNAKVSKQQDAPLLAVRKPLQPENKKHIDDEDNCSIASSVATSMRMGKSGLTYGSAPTFRSAQRAEKRKEYYQKLEEKNQALEAERNELEQRQKDEQEAALKQLRKNLKFKAKPVPNFYYEAPPAKPELKKLPLTRPKSPKLILSRRKSFSDAVSSSSREEILKTVSNRNRHSTGTVQNKDDDHKNKNTNAAHDSPRVRSGKGKSGLKPVNESSEEA

SEQ ID NO: 25034 - protein, 278 aa, Arabidopsis thaliana
  peptide (1)..(278): Ceres Seq. ID no. 12337417
MDRNADVSSARVHVAPKIAAEETDEEFEVKECTEEKSLSENAPNVGSAERVGAQKSPKTRNGNAKVSKQQDAPLLAVRKPLQPENKKHIDDEDNCSIASSVATSMRMGKSGLTYGSAPTFRSAQRAEKRKEYYQKLEEKNQALEAERNELEQRQKDEQEAALKQLRKNLKFKAKPVPNFYYEAPPAKPELKKLPLTRPKSPKLILSRRKSFSDAVSSSSREEILKTVSNRNRHSTGTVQNKDDDHKNKNTNAAHDSPRVRSGKGKSGLKPVNESSEEA

SEQ ID NO: 25035 - DNA, 1325 bp, Arabidopsis thaliana
  misc_feature (1)..(1325): Ceres Seq. ID no. 13490846
  misc_feature (1)..(1325): Ortholog of  Ceres SEQ ID NO 15171501 as cited in SEQ ID NO 58322
actccgaccgtttcctttctcacaagccaatggcgcaacttactaattccctcaattatctcttttctgtttctctcttattatttgtatcgttccactgcttatgttttcgtttttcgttggttgcagcttgttcaaactccactgacgatcaacagattcaacaccatcaccaccggaaatgggttggtccctcaggccacaaagtcatcaccgtctcacttaacggccacgctcagtttcgctccgtccaagacgctgtggattccataccaaagaacaataacaagagcatcacaatcaagattgctcccggattttacagagagaaagtggtggttccagctacaaaaccgtacataacgttcaaaggagctggtagggatgtgaccgctatagagtggcacgaccgtgcgtccgaccttggcgctaacggtcaacagttacgtacctatcaaaccgcttccgtcaccgtctacgctaattatttcaccgctagaaacattagcttcacgaatactgcgccggctccattgccggggatgcaagggtggcaagcggtggcgtttaggatctccggcgacaaagctttcttttccggctgcgggttttacggtgcacaagacactttatgcgacgatgctggccgtcattacttcaaggagtgttacattgaaggctctatcgactttatctttggtaatggccgctccatgtataaagattgtgagttgcattcgatagcgtcaagattcgggtcgatagcggcgcatggtaggacatgcccggaagagaaaacgggtttcgcgttcgtgggttgtcgggtaacaggtacgggtccattgtatgtgggccgggccatgggacaatactcacgtatcgtttacgcctacacttactttgatgctctcgtcgctcacggtggttgggacgattgggaccacaaatccaacaaaagcaagacggcatttttcggagtgtacaattgctatgggccaggagcagcagcgacgagaggcgtgtcttgggctagagctttggactatgaatcggcccatccatttatcgctaagagcttcgttaatgggagacattggatcgctcctcgagatgcttaaccaacttcaaaccttggcggggtttcttttcctaattcctcggttcctcccagtcccaagtcctaaaagcttactatatttttatcattcgtttatttcttttattgtttattttttccaatttatttatacattgtgtgatcgtacaacaaagtattgcttcttcttcatctgtatccatttcagttaaatgttttgagcttacac

SEQ ID NO: 25036 - protein, 371 aa, Arabidopsis thaliana
  peptide (1)..(371): Ceres Seq. ID no. 13490847
SDRFLSHKPMAQLTNSLNYLFSVSLLLFVSFHCLCFRFSLVAACSNSTDDQQIQHHHHRKWVGPSGHKVITVSLNGHAQFRSVQDAVDSIPKNNNKSITIKIAPGFYREKVVVPATKPYITFKGAGRDVTAIEWHDRASDLGANGQQLRTYQTASVTVYANYFTARNISFTNTAPAPLPGMQGWQAVAFRISGDKAFFSGCGFYGAQDTLCDDAGRHYFKECYIEGSIDFIFGNGRSMYKDCELHSIASRFGSIAAHGRTCPEEKTGFAFVGCRVTGTGPLYVGRAMGQYSRIVYAYTYFDALVAHGGWDDWDHKSNKSKTAFFGVYNCYGPGAAATRGVSWARALDYESAHPFIAKSFVNGRHWIAPRDA

SEQ ID NO: 25037 - protein, 362 aa, Arabidopsis thaliana
  peptide (1)..(362): Ceres Seq. ID no. 13490848
MAQLTNSLNYLFSVSLLLFVSFHCLCFRFSLVAACSNSTDDQQIQHHHHRKWVGPSGHKVITVSLNGHAQFRSVQDAVDSIPKNNNKSITIKIAPGFYREKVVVPATKPYITFKGAGRDVTAIEWHDRASDLGANGQQLRTYQTASVTVYANYFTARNISFTNTAPAPLPGMQGWQAVAFRISGDKAFFSGCGFYGAQDTLCDDAGRHYFKECYIEGSIDFIFGNGRSMYKDCELHSIASRFGSIAAHGRTCPEEKTGFAFVGCRVTGTGPLYVGRAMGQYSRIVYAYTYFDALVAHGGWDDWDHKSNKSKTAFFGVYNCYGPGAAATRGVSWARALDYESAHPFIAKSFVNGRHWIAPRDA

SEQ ID NO: 25038 - protein, 191 aa, Arabidopsis thaliana
  peptide (1)..(191): Ceres Seq. ID no. 13490849
MQGWQAVAFRISGDKAFFSGCGFYGAQDTLCDDAGRHYFKECYIEGSIDFIFGNGRSMYKDCELHSIASRFGSIAAHGRTCPEEKTGFAFVGCRVTGTGPLYVGRAMGQYSRIVYAYTYFDALVAHGGWDDWDHKSNKSKTAFFGVYNCYGPGAAATRGVSWARALDYESAHPFIAKSFVNGRHWIAPRDA

SEQ ID NO: 25039 - DNA, 1697 bp, Arabidopsis thaliana
  misc_feature (1)..(1697): Ceres Seq. ID no. 13488308
  misc_feature (1)..(1697): Ortholog of  Ceres SEQ ID NO 14302216 as cited in SEQ ID NO 66456
aaaaagacagagagacgagagacgagagctcgtcgaaccagatctctttctctttcttctctctaattttgatttttttgaattttcttctgcaaagcaaaatcgcagaagtcgtcgtgtgtccgcgttgcatcgaaccacttgttcgattctctttcgtcatcctctcttatatcatcagcaacaacaacccttgtttcaaatttcttcattttcgccggatttataatcgcagattgattctgatcgatagagatagggttattcaaggagagacctcgattgacttcaattgtcttcctgattcgatagataagatttagggttagcttgacgttgacgttgatataggggaatggagacggacaatgggaaggggttgatactagctgtagcgtcaagtgttttcattggttccagcttcattcttaagaagaaaggtcttaagcgagctggtgctattggcacccgagcaggatatggaggctatacttatttattagagccgctttggtgggcagggatggttactatgattgttggagaagctgcaaactttgtggcttacatttatgcaccagctgtactcgttactcctctcggtgcattaagtataatcatcagtgctgttttggcacatttcttattgaaggaaaaacttaagaaaatgggggttctcggatgtgtgtcttgcattgttgggtctgttgttattgttatacacgcacctaaggaacagactcctaattccgttgaggaaatatggaatctggctactcagccagcttttctaatctacgtagccataaccatgtcgattgtccttgctttaattctgcattttgaacccctgtgcggccaaacaaacattctggtttatattggaatctgttcgttaatgggtgctctcactgttatgagcataaaagctattggaattgcgataaaattaacaatggagggagtaagccagatcgggtatccacagacatggctttttgtcatggttgcagtaacttgtgtcgttacacaattgatttacctaaataaggctttggacacattcaacgcagccattgtttctccagtatactatgtaatgttcacaaccctcacaattgttgctagtgcaataatgttcaaggactggtctgggcaagacgcagccagcgtagcctctgagttatgtggattcatcactgtgctcacagggacaatgatactccatggcacaagagaagaggaacaacaacaagcttcttcagaacatgtaagatggtacgactcgagaaagagcatgaacgaagaacatttggtaagcctgtacagtcctgaatactaggaagaagaagatgcaatatctctaggctctcaatagattgagtgaaatttgccaaaaacaagcctcatgagtcttaaaactggatcaatcaacaaatctgcggtcgggttcatttttgtattgttttatggtcactgtacagacaaaaaagtttgtctagttaaaaaaacttcacattctttagttttgatctttgtgtctctcttcttagtacagtacaggtcttcttcttatctggactcttttgtccaaatttacactgttatatatttatatatgtatctacatttttctaggatgaaatattccttcattgtatctcacttgaatgaaataataaggtaaaagtttgatc

SEQ ID NO: 25040 - protein, 328 aa, Arabidopsis thaliana
  peptide (1)..(328): Ceres Seq. ID no. 13488309
METDNGKGLILAVASSVFIGSSFILKKKGLKRAGAIGTRAGYGGYTYLLEPLWWAGMVTMIVGEAANFVAYIYAPAVLVTPLGALSIIISAVLAHFLLKEKLKKMGVLGCVSCIVGSVVIVIHAPKEQTPNSVEEIWNLATQPAFLIYVAITMSIVLALILHFEPLCGQTNILVYIGICSLMGALTVMSIKAIGIAIKLTMEGVSQIGYPQTWLFVMVAVTCVVTQLIYLNKALDTFNAAIVSPVYYVMFTTLTIVASAIMFKDWSGQDAASVASELCGFITVLTGTMILHGTREEEQQQASSEHVRWYDSRKSMNEEHLVSLYSPEY

SEQ ID NO: 25041 - protein, 272 aa, Arabidopsis thaliana
  peptide (1)..(272): Ceres Seq. ID no. 13488310
MVTMIVGEAANFVAYIYAPAVLVTPLGALSIIISAVLAHFLLKEKLKKMGVLGCVSCIVGSVVIVIHAPKEQTPNSVEEIWNLATQPAFLIYVAITMSIVLALILHFEPLCGQTNILVYIGICSLMGALTVMSIKAIGIAIKLTMEGVSQIGYPQTWLFVMVAVTCVVTQLIYLNKALDTFNAAIVSPVYYVMFTTLTIVASAIMFKDWSGQDAASVASELCGFITVLTGTMILHGTREEEQQQASSEHVRWYDSRKSMNEEHLVSLYSPEY

SEQ ID NO: 25042 - protein, 269 aa, Arabidopsis thaliana
  peptide (1)..(269): Ceres Seq. ID no. 13488311
MIVGEAANFVAYIYAPAVLVTPLGALSIIISAVLAHFLLKEKLKKMGVLGCVSCIVGSVVIVIHAPKEQTPNSVEEIWNLATQPAFLIYVAITMSIVLALILHFEPLCGQTNILVYIGICSLMGALTVMSIKAIGIAIKLTMEGVSQIGYPQTWLFVMVAVTCVVTQLIYLNKALDTFNAAIVSPVYYVMFTTLTIVASAIMFKDWSGQDAASVASELCGFITVLTGTMILHGTREEEQQQASSEHVRWYDSRKSMNEEHLVSLYSPEY

SEQ ID NO: 25043 - DNA, 1635 bp, Arabidopsis thaliana
  misc_feature (1)..(1635): Ceres Seq. ID no. 12371330
  misc_feature (1)..(1635): Ortholog of  Ceres SEQ ID NO 13582281 as cited in SEQ ID NO 51014
  misc_feature (1)..(1635): Ortholog of  Ceres SEQ ID NO 15176795 as cited in SEQ ID NO 54453
  misc_feature (1)..(1635): Ortholog of  Ceres SEQ ID NO 14310508 as cited in SEQ ID NO 58965
  misc_feature (1)..(1635): Ortholog of  Ceres SEQ ID NO 12617417 as cited in SEQ ID NO 65089
ataatagagatacaaagaaacaagaaaacgaaaggaaaaaatacagaaatgggtggtttgaagtttcatgtacttatgtatccatggttcgcaacaggccatatgaccccgttcctttttcttgccaacaaattggctgagaaaggtcatacggtcacttttttgattcccaagaaagctctgaaacagttggaaaatctcaatctgtttccacacaacattgtctttcgctctgtcaccgtccctcatgtggatggtctccccgttggcacagagacagtctctgagatccccgtgacatcagctgatctcttgatgtctgctatggatctcacacgtgatcaagttgaaggtgtggtccgagccgtggaaccggacctgatcttctttgacttcgctcattggattccagaggtagctagagactttggccttaagactgtaaagtacgtcgtggtatctgcatcgactatagctagtatgcttgttccaggtggtgagttaggtgttcctccgccgggatatccttcatcgaaggtgctgcttcgtaaacaagatgcttacaccatgaagaatctggagtctacaaatacaatcaatgtcggaccaaacttattggaaagagtcactacaagtcttatgaactctgatgtcattgcgataaggacagccagagaaatcgaaggaaacttttgcgactatatcgaaaaacattgcaggaaaaaggttctcttgacaggtccggtgttccctgagccagacaagactagagagctagaggaacgatgggttaagtggctaagtgggtatgaaccagactcagtggtgttttgtgcgttgggctcacaagtcattttagagaaagatcaattccaagaactctgcttaggaatggagctaacaggttcaccgtttcttgtagcggttaagccacctagaggctcatcaacgattcaagaagcacttcctgaaggattcgaggagagggttaaaggaagaggagttgtttggggagaatgggttcaacaaccattgctattgtctcatccatcagtcgggtgctttgtgagccattgtgggtttggatcaatgtgggagtctttgctgagtgattgtcagatagtcttggtaccacagttgggtgatcaggtcctcaacacaagattgctgagtgacgaactcaaggtttcggttgaagtggcaagagaggaaacaggatggttctcgaaagagagcttgttcgatgctatcaatagtgtgatgaaaagggacagtgagatcgggaatctggtgaagaagaatcacaccaagtggagggagacactaactagtcctggacttgtgaccggttatgtcgataatttcatagagtcattgcaggatcttgtctctgggaccaaccatgtttcgaagtagaagggagtgatcaataaggttggtacaaaccaaactatatatcttgaagtgcttctgtttccaagtgtgtttttgtttgtttgtatcatgtttctaagtagcagtaggggatttataaggttttataaaccaaaccttacttgaagtacctctgttttccctagttggctttataataatgtgtttcgtagttgtaagggcaagacaataaaatctctt

SEQ ID NO: 25044 - protein, 471 aa, Arabidopsis thaliana
  peptide (1)..(471): Ceres Seq. ID no. 12371331
IIEIQRNKKTKGKNTEMGGLKFHVLMYPWFATGHMTPFLFLANKLAEKGHTVTFLIPKKALKQLENLNLFPHNIVFRSVTVPHVDGLPVGTETVSEIPVTSADLLMSAMDLTRDQVEGVVRAVEPDLIFFDFAHWIPEVARDFGLKTVKYVVVSASTIASMLVPGGELGVPPPGYPSSKVLLRKQDAYTMKNLESTNTINVGPNLLERVTTSLMNSDVIAIRTAREIEGNFCDYIEKHCRKKVLLTGPVFPEPDKTRELEERWVKWLSGYEPDSVVFCALGSQVILEKDQFQELCLGMELTGSPFLVAVKPPRGSSTIQEALPEGFEERVKGRGVVWGEWVQQPLLLSHPSVGCFVSHCGFGSMWESLLSDCQIVLVPQLGDQVLNTRLLSDELKVSVEVAREETGWFSKESLFDAINSVMKRDSEIGNLVKKNHTKWRETLTSPGLVTGYVDNFIESLQDLVSGTNHVSK

SEQ ID NO: 25045 - protein, 455 aa, Arabidopsis thaliana
  peptide (1)..(455): Ceres Seq. ID no. 12371332
MGGLKFHVLMYPWFATGHMTPFLFLANKLAEKGHTVTFLIPKKALKQLENLNLFPHNIVFRSVTVPHVDGLPVGTETVSEIPVTSADLLMSAMDLTRDQVEGVVRAVEPDLIFFDFAHWIPEVARDFGLKTVKYVVVSASTIASMLVPGGELGVPPPGYPSSKVLLRKQDAYTMKNLESTNTINVGPNLLERVTTSLMNSDVIAIRTAREIEGNFCDYIEKHCRKKVLLTGPVFPEPDKTRELEERWVKWLSGYEPDSVVFCALGSQVILEKDQFQELCLGMELTGSPFLVAVKPPRGSSTIQEALPEGFEERVKGRGVVWGEWVQQPLLLSHPSVGCFVSHCGFGSMWESLLSDCQIVLVPQLGDQVLNTRLLSDELKVSVEVAREETGWFSKESLFDAINSVMKRDSEIGNLVKKNHTKWRETLTSPGLVTGYVDNFIESLQDLVSGTNHVSK

SEQ ID NO: 25046 - protein, 446 aa, Arabidopsis thaliana
  peptide (1)..(446): Ceres Seq. ID no. 12371333
MYPWFATGHMTPFLFLANKLAEKGHTVTFLIPKKALKQLENLNLFPHNIVFRSVTVPHVDGLPVGTETVSEIPVTSADLLMSAMDLTRDQVEGVVRAVEPDLIFFDFAHWIPEVARDFGLKTVKYVVVSASTIASMLVPGGELGVPPPGYPSSKVLLRKQDAYTMKNLESTNTINVGPNLLERVTTSLMNSDVIAIRTAREIEGNFCDYIEKHCRKKVLLTGPVFPEPDKTRELEERWVKWLSGYEPDSVVFCALGSQVILEKDQFQELCLGMELTGSPFLVAVKPPRGSSTIQEALPEGFEERVKGRGVVWGEWVQQPLLLSHPSVGCFVSHCGFGSMWESLLSDCQIVLVPQLGDQVLNTRLLSDELKVSVEVAREETGWFSKESLFDAINSVMKRDSEIGNLVKKNHTKWRETLTSPGLVTGYVDNFIESLQDLVSGTNHVSK

SEQ ID NO: 25047 - DNA, 2279 bp, Arabidopsis thaliana
  misc_feature (1)..(2279): Ceres Seq. ID no. 13492441
  misc_feature (1)..(2279): Ortholog of  Ceres SEQ ID NO 15170666 as cited in SEQ ID NO 63386
atggaaaacatcaaaaaccctaaaaacgcagatgattgttccgatagcatatcaaaaaacagtcatcaaggcgttgatgattccctgaaccagtcaagatcttacgtatgcagtttctgcataaggggcttctcgaatgctcaagcactaggagggcatatgaacatccacagaagagacagggctaaactcagacaaaagcttatggaagataataaggatgatgtcgtcgccgagagtgatgcatccgaagttgtgtctctagaccttaatgaacaacaacaacaacaaggagaagctttgacatgtgatgatcacgatcaatatgttgataacgatataagtcctaaacagaaattagagttttgggttcaagaaagcaagcttgatactaatgatcatggaaaggtcacggaggctagcatagatggttcgagttcgagtcatcatcgtgatattgaagtattggatctcgagcttcgtgacaacgaagaccagcaggtccagcacacgatcctaaatcctgtgagcatcgtctccatcgctggtcttccattattgacgaatctctttgcctttttttcttccttcttaaacaaacccaattcgatttcaacgaacgcctcttctctctcactctctttcgatttgttctttgccggagctcgtagtgtaagcgtgatccgcggcggagagatggctcctaatgatcctaaaaaagccgttggtggcggcggaagtggtttcttcgcctctcttgcttcgtcgatctccaatttgggatctgctatgaccaaatcagttaatggtttggttccctatgagggacttgaagttatcaatcctgaaggaagtacagatgatgctgaggaggaagcaagcagaggaagatggaagcaagaggatcgagatggctattggaagatgatgcagaagtacataggatctgatgttacatcaatggtgacccttcctgtgattatttttgaaccaatgacaatgcttcagaaaatggcggagttgatggaatactcgcatctgctagacatggcagacaaaaccgaggacccttatttgcgcatggtgtatgcatcatcgtgggctatatccgtgtattatgctttccaacgtacctggaaaccattcaatccaatccttggtgagacttatgagatggctaattacaatggtgttaacttcatatctgaacaggtcagccatcacccaccaatgagtgctggtcatgctgaaaatgagcattttacgtatgattgtacttcaaaactgaaaacaaaatttttgggcaattccattgacgtttacccagtaggaaggacacgggtgacacttaaaagagatggagttgttcttgacttggtacctcctctgaccaaagttcacaacctaatctttggacgaacttgggtcgattcgcctggggaaatgatcatgacaaatcagaccaccggtgacaaagtcgtgctttactttcaaccatgtggctggttcggatctggtcgatatgaagtggatggatatgtctataacgcctctgaggagcctaagatactcatgactggcaaatggaacgagtccatgagttatcagccgtgtgatggtgaaggtgaacctctcccaggcaccgaactgaaagaggtatggaaactcgctgatgtgccaaaggatgacaaatatcaatacactcactttgctcacaagattaatagcttcgacactgccccgaaaaagctgttgccctctgattcacggttacgacctgatagatacgcacttgagatgggcgacatgtccaaatcaggctatgagaagagcagcatggaagagagacagagagctgaaaagagaacccgcgaagagaaaggccaagcctttactccaaaatggttcgatgtaacggaagaagtcactgctacaccatggggtgatctggaagtttaccaattcaatggaaagtactcggaacatcgtgcagctgcggataactctgaagataacaccgaccctaagtcgatccaattcaacccatggcaattccaagatctgtctacttaaatgtatcgctccaaaagacagaaaagatcaaatctttttggaaacaaatgtattcttattctctcgtagttacaaaaaactttgttctacatctgctagctttcccattgctttctctagtattagtgtacaacttctactgttttgtcttaaattcattcaaatctttctttgatcttcgtcgtcatagttatcttcttcttctt

SEQ ID NO: 25048 - protein, 690 aa, Arabidopsis thaliana
  peptide (1)..(690): Ceres Seq. ID no. 13492442
MENIKNPKNADDCSDSISKNSHQGVDDSLNQSRSYVCSFCIRGFSNAQALGGHMNIHRRDRAKLRQKLMEDNKDDVVAESDASEVVSLDLNEQQQQQGEALTCDDHDQYVDNDISPKQKLEFWVQESKLDTNDHGKVTEASIDGSSSSHHRDIEVLDLELRDNEDQQVQHTILNPVSIVSIAGLPLLTNLFAFFSSFLNKPNSISTNASSLSLSFDLFFAGARSVSVIRGGEMAPNDPKKAVGGGGSGFFASLASSISNLGSAMTKSVNGLVPYEGLEVINPEGSTDDAEEEASRGRWKQEDRDGYWKMMQKYIGSDVTSMVTLPVIIFEPMTMLQKMAELMEYSHLLDMADKTEDPYLRMVYASSWAISVYYAFQRTWKPFNPILGETYEMANYNGVNFISEQVSHHPPMSAGHAENEHFTYDCTSKLKTKFLGNSIDVYPVGRTRVTLKRDGVVLDLVPPLTKVHNLIFGRTWVDSPGEMIMTNQTTGDKVVLYFQPCGWFGSGRYEVDGYVYNASEEPKILMTGKWNESMSYQPCDGEGEPLPGTELKEVWKLADVPKDDKYQYTHFAHKINSFDTAPKKLLPSDSRLRPDRYALEMGDMSKSGYEKSSMEERQRAEKRTREEKGQAFTPKWFDVTEEVTATPWGDLEVYQFNGKYSEHRAAADNSEDNTDPKSIQFNPWQFQDLST

SEQ ID NO: 25049 - protein, 637 aa, Arabidopsis thaliana
  peptide (1)..(637): Ceres Seq. ID no. 13492443
MNIHRRDRAKLRQKLMEDNKDDVVAESDASEVVSLDLNEQQQQQGEALTCDDHDQYVDNDISPKQKLEFWVQESKLDTNDHGKVTEASIDGSSSSHHRDIEVLDLELRDNEDQQVQHTILNPVSIVSIAGLPLLTNLFAFFSSFLNKPNSISTNASSLSLSFDLFFAGARSVSVIRGGEMAPNDPKKAVGGGGSGFFASLASSISNLGSAMTKSVNGLVPYEGLEVINPEGSTDDAEEEASRGRWKQEDRDGYWKMMQKYIGSDVTSMVTLPVIIFEPMTMLQKMAELMEYSHLLDMADKTEDPYLRMVYASSWAISVYYAFQRTWKPFNPILGETYEMANYNGVNFISEQVSHHPPMSAGHAENEHFTYDCTSKLKTKFLGNSIDVYPVGRTRVTLKRDGVVLDLVPPLTKVHNLIFGRTWVDSPGEMIMTNQTTGDKVVLYFQPCGWFGSGRYEVDGYVYNASEEPKILMTGKWNESMSYQPCDGEGEPLPGTELKEVWKLADVPKDDKYQYTHFAHKINSFDTAPKKLLPSDSRLRPDRYALEMGDMSKSGYEKSSMEERQRAEKRTREEKGQAFTPKWFDVTEEVTATPWGDLEVYQFNGKYSEHRAAADNSEDNTDPKSIQFNPWQFQDLST

SEQ ID NO: 25050 - protein, 622 aa, Arabidopsis thaliana
  peptide (1)..(622): Ceres Seq. ID no. 13492444
MEDNKDDVVAESDASEVVSLDLNEQQQQQGEALTCDDHDQYVDNDISPKQKLEFWVQESKLDTNDHGKVTEASIDGSSSSHHRDIEVLDLELRDNEDQQVQHTILNPVSIVSIAGLPLLTNLFAFFSSFLNKPNSISTNASSLSLSFDLFFAGARSVSVIRGGEMAPNDPKKAVGGGGSGFFASLASSISNLGSAMTKSVNGLVPYEGLEVINPEGSTDDAEEEASRGRWKQEDRDGYWKMMQKYIGSDVTSMVTLPVIIFEPMTMLQKMAELMEYSHLLDMADKTEDPYLRMVYASSWAISVYYAFQRTWKPFNPILGETYEMANYNGVNFISEQVSHHPPMSAGHAENEHFTYDCTSKLKTKFLGNSIDVYPVGRTRVTLKRDGVVLDLVPPLTKVHNLIFGRTWVDSPGEMIMTNQTTGDKVVLYFQPCGWFGSGRYEVDGYVYNASEEPKILMTGKWNESMSYQPCDGEGEPLPGTELKEVWKLADVPKDDKYQYTHFAHKINSFDTAPKKLLPSDSRLRPDRYALEMGDMSKSGYEKSSMEERQRAEKRTREEKGQAFTPKWFDVTEEVTATPWGDLEVYQFNGKYSEHRAAADNSEDNTDPKSIQFNPWQFQDLST

SEQ ID NO: 25051 - DNA, 1140 bp, Arabidopsis thaliana
  misc_feature (1)..(1140): Ceres Seq. ID no. 12335389
  misc_feature (1)..(1140): Ortholog of  Ceres SEQ ID NO 14308225 as cited in SEQ ID NO 59062
  misc_feature (1)..(1140): Ortholog of  Ceres SEQ ID NO 15176615 as cited in SEQ ID NO 0
ctcattaagatacatctcgagaagcagagcagagagaaagagattccgagagagagagagaaggagggagagaaggagcttagtggtctcattaccattaccagctccatacgaaccgaaacgacgccgttcgctcaacccttttctctgcaatctctcttcctcccacgagtttctcagcttttctcggatcatctaattaagagaggagatcttgtctcacggtgggattgatttttctcttcacgaagatcgtgttccaggcaattaactgcagaaaatggtgatgtgggtctttggctatggctctcttgtgtggaacccaggatttcactacgatgagaaagtgttaggtttcatcaagggatataaacgtgtctttgatcttgcttgcattgatcatagaggtacaccagaacaccctgcaagaacttgcaccctcgagaaagctgaagaagccatatgctggggtactgcattctgtgtccgtggaggaccagaaaaagaacgtctggctatggagtacttggaacgtagagagtgtgaatatgatctcaagacaagtgtagacttttacaaggaagattatcctctaaagccagctgtaactggagtgatagtattcacttctactcctgacaaggtctccaacaagtattatctcggacctgcgccattagaagacatggcaagacaaatcgcgacagccaatggaccatgtggtaacaacagagattatctcttcctgctcgagaaggcaatgcacgacattgggcatgaggaggactatgttatagagctggcaaacgaggtgaggaaggttctggccgagtcctcgacgaagaaggtgacaccggtgaaggaatcaagagcaagccgtgtagctaacaagtcgaagaacaatgtccccacggctcatcagatactacctcatcatccagaagctgttgccactacaatataactcttgtagttttcttcttaattggctttagagatgagtgaaatcaggtctttttttttataataataacaaagtaagtttgttttctgagtagagaagtgtaatctttgtgtgtttcgaactttgttgtcttgtgtgttgtcctaacgagtgcctagttgtgcaccttttgaagc

SEQ ID NO: 25052 - protein, 227 aa, Arabidopsis thaliana
  peptide (1)..(227): Ceres Seq. ID no. 12335390
MVMWVFGYGSLVWNPGFHYDEKVLGFIKGYKRVFDLACIDHRGTPEHPARTCTLEKAEEAICWGTAFCVRGGPEKERLAMEYLERRECEYDLKTSVDFYKEDYPLKPAVTGVIVFTSTPDKVSNKYYLGPAPLEDMARQIATANGPCGNNRDYLFLLEKAMHDIGHEEDYVIELANEVRKVLAESSTKKVTPVKESRASRVANKSKNNVPTAHQILPHHPEAVATTI

SEQ ID NO: 25053 - protein, 225 aa, Arabidopsis thaliana
  peptide (1)..(225): Ceres Seq. ID no. 12335391
MWVFGYGSLVWNPGFHYDEKVLGFIKGYKRVFDLACIDHRGTPEHPARTCTLEKAEEAICWGTAFCVRGGPEKERLAMEYLERRECEYDLKTSVDFYKEDYPLKPAVTGVIVFTSTPDKVSNKYYLGPAPLEDMARQIATANGPCGNNRDYLFLLEKAMHDIGHEEDYVIELANEVRKVLAESSTKKVTPVKESRASRVANKSKNNVPTAHQILPHHPEAVATTI

SEQ ID NO: 25054 - protein, 148 aa, Arabidopsis thaliana
  peptide (1)..(148): Ceres Seq. ID no. 12335392
MEYLERRECEYDLKTSVDFYKEDYPLKPAVTGVIVFTSTPDKVSNKYYLGPAPLEDMARQIATANGPCGNNRDYLFLLEKAMHDIGHEEDYVIELANEVRKVLAESSTKKVTPVKESRASRVANKSKNNVPTAHQILPHHPEAVATTI

SEQ ID NO: 25055 - DNA, 1203 bp, Arabidopsis thaliana
  misc_feature (1)..(1203): Ceres Seq. ID no. 5002163
  misc_feature (1)..(1203): Ortholog of  Ceres SEQ ID NO 13505109 as cited in SEQ ID NO 58983
  misc_feature (1)..(1203): Ortholog of  Ceres SEQ ID NO 14302303 as cited in SEQ ID NO 62365
  misc_feature (1)..(1203): Ortholog of  Ceres SEQ ID NO 13599066 as cited in SEQ ID NO 0
agaaaggcaaatttctcaaaggaagcgaagccctagcgtcctctctctgtcttctcgtttctgcgccgattcgtagtctgttgtgcgcttgcctctcctcttttggattagcatacctctcactcgcatcagattttcagttgctttttctatccaaatggactgcaagaagttcatccagatggtcgaggagaagaaacgaagagttcttgagaagcaagaagctcctttgaaatgggagcagaagctagaggcggctgcgaatgccaaagcagacacagaaactaaagtgaagagatcaaagggccctaagagaaaacaaagggctgcgtctgaatctagctcagaaagtgatagtagctctgaggtgagaagaaagtctagaagatctcacaataagcaccgaagacatgcacactctgattcagatgacagtgataggaggaaagagaagaaatccaggaggcagaaaagaaggtccttgagtccaagcgatgatagcactggtgattatgaaagtgggtcagaggatgagctgaggatgaagataaagcaccatcggaggcacaagtggcatagctcaagaaagacttgcgatgatgacagtaccgaagatgtgagaagaaaacatttaaagcatcacaggcgcagtgaggtggtcacttcaagtgatagtgaggaagagagtggaagaagaaggcgaggcaaatatcacaggcacaacagaggttcagcctcctcgagtggctcggaagaagatagtgggaaaagtatgaagagaaggcaacataaaaggcatcgtttggctgagtcttcaagtgaggaagatggggcaatgagaaggactaggcatcataaacatggcagagattcagcatctgagtctgatggaagaaggtaatcagatgagaaaagagagcactacttcgacaaatgaaaatggaaaatgtctttgtttaattcacatcataagaactgaatcttgtggtaaaccatcagcacatgattactacccagatgttgggacccaaatacgatgaatattgtgttgaattactatggtggcactctgttcttagattttcatttttacatttgtagcaagaatggtacacaaccaattgaactctgaaatgcatgtgcagatgatggtttttattttgattatacctcgtagttaagaggagtgtgttacaaaataag

SEQ ID NO: 25056 - protein, 247 aa, Arabidopsis thaliana
  peptide (1)..(247): Ceres Seq. ID no. 5002164
MDCKKFIQMVEEKKRRVLEKQEAPLKWEQKLEAAANAKADTETKVKRSKGPKRKQRAASESSSESDSSSEVRRKSRRSHNKHRRHAHSDSDDSDRRKEKKSRRQKRRSLSPSDDSTGDYESGSEDELRMKIKHHRRHKWHSSRKTCDDDSTEDVRRKHLKHHRRSEVVTSSDSEEESGRRRRGKYHRHNRGSASSSGSEEDSGKSMKRRQHKRHRLAESSSEEDGAMRRTRHHKHGRDSASESDGRR

SEQ ID NO: 25057 - protein, 239 aa, Arabidopsis thaliana
  peptide (1)..(239): Ceres Seq. ID no. 5002165
MVEEKKRRVLEKQEAPLKWEQKLEAAANAKADTETKVKRSKGPKRKQRAASESSSESDSSSEVRRKSRRSHNKHRRHAHSDSDDSDRRKEKKSRRQKRRSLSPSDDSTGDYESGSEDELRMKIKHHRRHKWHSSRKTCDDDSTEDVRRKHLKHHRRSEVVTSSDSEEESGRRRRGKYHRHNRGSASSSGSEEDSGKSMKRRQHKRHRLAESSSEEDGAMRRTRHHKHGRDSASESDGRR

SEQ ID NO: 25058 - DNA, 1156 bp, Arabidopsis thaliana; identical to SEQ ID NO: 24607
  misc_feature (1)..(1156): Ceres Seq. ID no. 12337904
  misc_feature (1)..(1156): Ortholog of  Ceres SEQ ID NO 13586635 as cited in SEQ ID NO 14217
  misc_feature (1)..(1156): Ortholog of  Ceres SEQ ID NO 12616285 as cited in SEQ ID NO 63483

SEQ ID NO: 25059 - protein, 91 aa, Arabidopsis thaliana; identical to SEQ ID NO: 24608
  peptide (1)..(91): Ceres Seq. ID no. 12337905

SEQ ID NO: 25060 - protein, 69 aa, Arabidopsis thaliana; identical to SEQ ID NO: 24609
  peptide (1)..(69): Ceres Seq. ID no. 12337906

SEQ ID NO: 25061 - protein, 63 aa, Arabidopsis thaliana; identical to SEQ ID NO: 24610
  peptide (1)..(63): Ceres Seq. ID no. 12337907

SEQ ID NO: 25062 - DNA, 1624 bp, Arabidopsis thaliana
  misc_feature (1)..(1624): Ceres Seq. ID no. 13487679
  misc_feature (1)..(1624): Ortholog of  Ceres SEQ ID NO 15176862 as cited in SEQ ID NO 67415
attcgtgtcggaactttagatccgatatttatagaaagcaaccaaactccggctccggttactcgggagttcaagttttggattttgatgggtcatgctcgaactcgtaccggtatcatctccgtcgcttttaaattcttcaggtctctgttccctcgccatcaccgtactaacagcatgaagataaaaacaggaacgtttttgggggtttcgatatcattgattcttataaacttagctgcgatcatggaacgtgcagacgagaatctattgccttcggtttataaagaagtgagtgaagcatttaacgcaggaccatcagatttaggctacttaacattcgttagaaactttgttcaaggacttgcatcaccattagcaggagttcttgtcattacctatgatcgtcccattgttcttgcaataggtactttctgttgggctttatcaactgctgcagttggagccagcagctacttcattcaggttgctttatggagagcagtgaatggttttggattggcaattgttatacccgcgcttcaatcgtttattgcagatagttataaggatggtgcgagaggagctggtttcggaatgttgaacctcattggtacaatcggtggtataggaggaggtgttgtagcaactgttatggctggttcagagttttggggcataccgggatggcgttgtgcttttataatgatggcagcgctcagcgcagtgatcggattacttgtctttctcttcgttgttgacccgagaaagaacattgaacgagaggaactaatggctcataagatgaattcgaactcggtttggaatgattcattagcagctgcaaaatctgtcgtcaaagtaagtacctttcagataatcgtcgcgcaaggaatcattggttcgtttccgtggaccgcgatggttttctttacaatgtggtttgagcttattggcttcgatcataaccagactgcagctttgcttggggtatttgctacaggaggagcgataggaacattaatgggagggataatagcggataaaatgtcgcggatatatccgaattcgggtagagtgatgtgtgcgcagttcagtgcattcatgggaatcccattctctattattcttctgaaagtaatcccacaaagcacaagcagctactcaatcttctcgataactctcttcctgatgggtcttaccataacttggtgcggatcagcggtcaatgcaccaatgtttgcagaagtcgttcctccaaggcaccgtacaatgatctacgcgtttgaccgtgctttcgaagggtcattctcatcttttgctgcgcctttggttggaattttgtcagagaaactgtttgggtatgactcaagaggtattgatcctttgaaaggttcctctgttcgtgaggctgatgccctttcaaaggggcttctgtcaatgatggctgttccgtttgggctctgttgtctctgttacactccgttgcattttgttttccagaaagatcgagaaaacgcgaaaatcgcgagctctaaagaaactgaaatgatctgagagacttgctcatgtagtcatgttgtgattctttttataccacaaacgattttaaaaccactatgtg

SEQ ID NO: 25063 - protein, 518 aa, Arabidopsis thaliana
  peptide (1)..(518): Ceres Seq. ID no. 13487680
IRVGTLDPIFIESNQTPAPVTREFKFWILMGHARTRTGIISVAFKFFRSLFPRHHRTNSMKIKTGTFLGVSISLILINLAAIMERADENLLPSVYKEVSEAFNAGPSDLGYLTFVRNFVQGLASPLAGVLVITYDRPIVLAIGTFCWALSTAAVGASSYFIQVALWRAVNGFGLAIVIPALQSFIADSYKDGARGAGFGMLNLIGTIGGIGGGVVATVMAGSEFWGIPGWRCAFIMMAALSAVIGLLVFLFVVDPRKNIEREELMAHKMNSNSVWNDSLAAAKSVVKVSTFQIIVAQGIIGSFPWTAMVFFTMWFELIGFDHNQTAALLGVFATGGAIGTLMGGIIADKMSRIYPNSGRVMCAQFSAFMGIPFSIILLKVIPQSTSSYSIFSITLFLMGLTITWCGSAVNAPMFAEVVPPRHRTMIYAFDRAFEGSFSSFAAPLVGILSEKLFGYDSRGIDPLKGSSVREADALSKGLLSMMAVPFGLCCLCYTPLHFVFQKDRENAKIASSKETEMI

SEQ ID NO: 25064 - protein, 489 aa, Arabidopsis thaliana
  peptide (1)..(489): Ceres Seq. ID no. 13487681
MGHARTRTGIISVAFKFFRSLFPRHHRTNSMKIKTGTFLGVSISLILINLAAIMERADENLLPSVYKEVSEAFNAGPSDLGYLTFVRNFVQGLASPLAGVLVITYDRPIVLAIGTFCWALSTAAVGASSYFIQVALWRAVNGFGLAIVIPALQSFIADSYKDGARGAGFGMLNLIGTIGGIGGGVVATVMAGSEFWGIPGWRCAFIMMAALSAVIGLLVFLFVVDPRKNIEREELMAHKMNSNSVWNDSLAAAKSVVKVSTFQIIVAQGIIGSFPWTAMVFFTMWFELIGFDHNQTAALLGVFATGGAIGTLMGGIIADKMSRIYPNSGRVMCAQFSAFMGIPFSIILLKVIPQSTSSYSIFSITLFLMGLTITWCGSAVNAPMFAEVVPPRHRTMIYAFDRAFEGSFSSFAAPLVGILSEKLFGYDSRGIDPLKGSSVREADALSKGLLSMMAVPFGLCCLCYTPLHFVFQKDRENAKIASSKETEMI

SEQ ID NO: 25065 - protein, 459 aa, Arabidopsis thaliana
  peptide (1)..(459): Ceres Seq. ID no. 13487682
MKIKTGTFLGVSISLILINLAAIMERADENLLPSVYKEVSEAFNAGPSDLGYLTFVRNFVQGLASPLAGVLVITYDRPIVLAIGTFCWALSTAAVGASSYFIQVALWRAVNGFGLAIVIPALQSFIADSYKDGARGAGFGMLNLIGTIGGIGGGVVATVMAGSEFWGIPGWRCAFIMMAALSAVIGLLVFLFVVDPRKNIEREELMAHKMNSNSVWNDSLAAAKSVVKVSTFQIIVAQGIIGSFPWTAMVFFTMWFELIGFDHNQTAALLGVFATGGAIGTLMGGIIADKMSRIYPNSGRVMCAQFSAFMGIPFSIILLKVIPQSTSSYSIFSITLFLMGLTITWCGSAVNAPMFAEVVPPRHRTMIYAFDRAFEGSFSSFAAPLVGILSEKLFGYDSRGIDPLKGSSVREADALSKGLLSMMAVPFGLCCLCYTPLHFVFQKDRENAKIASSKETEMI

SEQ ID NO: 25066 - DNA, 1521 bp, Arabidopsis thaliana
  misc_feature (1)..(1521): Ceres Seq. ID no. 12738283
  misc_feature (1)..(1521): Ortholog of  Ceres SEQ ID NO 13662745 as cited in SEQ ID NO 66320
  misc_feature (1)..(1521): Ortholog of  Ceres SEQ ID NO 13660029 as cited in SEQ ID NO 67353
tcgaatcttcttcttcttatttcttctataccgtcgtcgaaaagctttaccaaaatctcacgcccccgacgattcatcgggatttgagtttgcactaaacccacaatggtttcctatcgtgctaccacagagacgatttccctggctttagaagccaacagctcggaggctattacgatactgtaccaggttttggaagacccttcttcatctcctgaggctatacggatcaaggagcaagcgattacaaacctttgtgatcgattgactgaagagaagagaggtgaggatctccggaaactgttgaccaatttgaggcctttcttttccttaatccccaaggcgaaaactgcgaaaatcgtcagaggaatcattgatgctgtggcaaagattcctggaacaactgatctccagatcactctctgcaaagagatggtcgaatggacccgcgctgagaagcgtactttcctcaggcagcgagtagaggctaggcttgcagctcttttgatggagaacaaggagtatgttgaagctttggcgctgttgagtactttggtaaaagaggtagggagattagatgataagctccttctggtcgacatagacttgctggagagcaaacttcacttctcattgagaaacttacccaaggcaaaagctgcactcactgcagctaggacagctgctaacgctatatatgtcccaccagctcaacaaggcacgatagatctgcagagtgggattcttcatgctgaagagaaagactacaaaaccggatacagttacttctttgaagcctttgagtccttcaacgctctcggagatccgagagcggtttcagtttgaagtacatgttactgtgcaagatcatggttagccaagctgatgatgttgcaggaataatctcctcaaaggctggactacagtacgttggccctgacctggatgccatgaaagcagtcgctgatgctcactcgaagaggtccttgaagttgtttgagaacgctctcctcactacaaagcacagcttgaagatgacccaattgtccacaggcatctctcttctctctatgacacgcttctggagcaaaatctgtgtcgtttgatcgagcccttctcaagagttgagatagctcacattgctgagctcattggattgccgctcgaccatgtggaaaagaagctatctcagatgatactcgacaagaaatttgcaggtaccttggatcaaggagctggatgcctcatcatcttcgaagacccaaaggcagatgctatctactcggctaccctcgaaaccattgcaaacatggggaaggtcgtcgacagcctttatgtccggtctgccaaaatcatgtcctgagagagtgagtgagttggtcgtatgaatctcattctatcgttctttctttctggttttagatatcgtttggactcaaagaaactgatgtttctcaatggagaaagtaaacttgtctgaattgttcacattactcgttttgcttatgatcttattatgcc

SEQ ID NO: 25067 - protein, 246 aa, Arabidopsis thaliana
  peptide (1)..(246): Ceres Seq. ID no. 12738284
MVSYRATTETISLALEANSSEAITILYQVLEDPSSSPEAIRIKEQAITNLCDRLTEEKRGEDLRKLLTNLRPFFSLIPKAKTAKIVRGIIDAVAKIPGTTDLQITLCKEMVEWTRAEKRTFLRQRVEARLAALLMENKEYVEALALLSTLVKEVGRLDDKLLLVDIDLLESKLHFSLRNLPKAKAALTAARTAANAIYVPPAQQGTIDLQSGILHAEEKDYKTGYSYFFEAFESFNALGDPRAVSV

SEQ ID NO: 25068 - protein, 137 aa, Arabidopsis thaliana
  peptide (1)..(137): Ceres Seq. ID no. 12738285
MVEWTRAEKRTFLRQRVEARLAALLMENKEYVEALALLSTLVKEVGRLDDKLLLVDIDLLESKLHFSLRNLPKAKAALTAARTAANAIYVPPAQQGTIDLQSGILHAEEKDYKTGYSYFFEAFESFNALGDPRAVSV

SEQ ID NO: 25069 - DNA, 1119 bp, Arabidopsis thaliana
  misc_feature (1)..(1119): Ceres Seq. ID no. 12335788
  misc_feature (1)..(1119): Ortholog of  Ceres SEQ ID NO 15177022 as cited in SEQ ID NO 57405
  misc_feature (1)..(1119): Ortholog of  Ceres SEQ ID NO 13597427 as cited in SEQ ID NO 64038
attattcccctaacgaatttcaaatcaaaatctctctctttctcttatctctaatggcgttgaggaacattgaaaacgctcttccgatctcacaggaacgacctaagaagctggccaaactctcaaagcaaccggagattggtctaaatgacgaaaacaaccctgtcgctgtggctgaatcgaccgtcgaatacgttgcttctgagaatctcaaaccattttcagatcctgaatcttctgtccagagattacttgaagaattagcatcaaaggattggattaaagtatgtgaatcattgaacaacacaaggagatttgcaattcatcactcttctctgttgctaccaattctagaaaagcttatagttgtgatggtgaaggcgatgaagaatcctagaagtgcattgtgcaagacttcgattatgacttgttctgatatcttcactgcttatggagaaaagttgctggaaggacctcatttgaaatctatggacgatctgctgttgcagttgctgatgaaagcttcacaagacaagaagtttgtgtgtgaagaagcagagaaagcgctgaacacgatggttaactcggtggctcgcttgccgcttctgcgtaagcttcagagttatgtccgtcacagtaaccctcgtgtcagggccaaagctgctgtgtctacttccaactgcgtttctaaaatggaggtaaatgaaatggaagaatttgggatggttctgctcgcacaaatggctgcggatcagttgagtgacaagttgccagaggcaagggaagctgcaaggagtatggtgaactcgcttttcgagaaatttacatggaatgaagaagaagacgaagaaggaagcaagcaagaagcttggaagaagttttgtgagaagaatgtaacagggctcaatgcacaagccatgatcaagattgttgcatctcaataaatttctgaagatgaaatgttgttctctctgattcatgtaaaatacgtttttacatgataaaaacaatcttttttttatttctactggatctgtcctctcaattccaatgttactaccataatacgccagaggctcagtggttctttaagcttcatgaaaaattgttgttgtggct

SEQ ID NO: 25070 - protein, 313 aa, Arabidopsis thaliana
  peptide (1)..(313): Ceres Seq. ID no. 12335789
YSPNEFQIKISLFLLSLMALRNIENALPISQERPKKLAKLSKQPEIGLNDENNPVAVAESTVEYVASENLKPFSDPESSVQRLLEELASKDWIKVCESLNNTRRFAIHHSSLLLPILEKLIVVMVKAMKNPRSALCKTSIMTCSDIFTAYGEKLLEGPHLKSMDDLLLQLLMKASQDKKFVCEEAEKALNTMVNSVARLPLLRKLQSYVRHSNPRVRAKAAVSTSNCVSKMEVNEMEEFGMVLLAQMAADQLSDKLPEAREAARSMVNSLFEKFTWNEEEDEEGSKQEAWKKFCEKNVTGLNAQAMIKIVASQ

SEQ ID NO: 25071 - protein, 296 aa, Arabidopsis thaliana
  peptide (1)..(296): Ceres Seq. ID no. 12335790
MALRNIENALPISQERPKKLAKLSKQPEIGLNDENNPVAVAESTVEYVASENLKPFSDPESSVQRLLEELASKDWIKVCESLNNTRRFAIHHSSLLLPILEKLIVVMVKAMKNPRSALCKTSIMTCSDIFTAYGEKLLEGPHLKSMDDLLLQLLMKASQDKKFVCEEAEKALNTMVNSVARLPLLRKLQSYVRHSNPRVRAKAAVSTSNCVSKMEVNEMEEFGMVLLAQMAADQLSDKLPEAREAARSMVNSLFEKFTWNEEEDEEGSKQEAWKKFCEKNVTGLNAQAMIKIVASQ

SEQ ID NO: 25072 - protein, 190 aa, Arabidopsis thaliana
  peptide (1)..(190): Ceres Seq. ID no. 12335791
MVKAMKNPRSALCKTSIMTCSDIFTAYGEKLLEGPHLKSMDDLLLQLLMKASQDKKFVCEEAEKALNTMVNSVARLPLLRKLQSYVRHSNPRVRAKAAVSTSNCVSKMEVNEMEEFGMVLLAQMAADQLSDKLPEAREAARSMVNSLFEKFTWNEEEDEEGSKQEAWKKFCEKNVTGLNAQAMIKIVASQ

SEQ ID NO: 25073 - DNA, 1305 bp, Arabidopsis thaliana
  misc_feature (1)..(1305): Ceres Seq. ID no. 12357654
  misc_feature (1)..(1305): Ortholog of  Ceres SEQ ID NO 13655302 as cited in SEQ ID NO 63307
  misc_feature (1)..(1305): Ortholog of  Ceres SEQ ID NO 13597380 as cited in SEQ ID NO 64054
  misc_feature (1)..(1305): Ortholog of  Ceres SEQ ID NO 12625474 as cited in SEQ ID NO 64169
  misc_feature (1)..(1305): Ortholog of  Ceres SEQ ID NO 13597502 as cited in SEQ ID NO 64681
  misc_feature (1)..(1305): Ortholog of  Ceres SEQ ID NO 13600397 as cited in SEQ ID NO 0
aatggaatcacactatcacaatcataaccacaaaaacaaacactatgggacacctcaaaagtctcttcactattcttttcctaatagctatgtcgtcaaccgtaacatttgccggtaaaatacccgcgatcatcgtgtttggcgactcttccgttgatgccgggaacaacaactatatcccaactgttgctagaagcaactttgagccatatggacgggactttgttggtggaaagccgaccggacggttttgtaacggaaagattgcgacggattttatgtccgaagccttagggcttaaaccaatcattccggcatacttggatccttcttataacatttcagactttgcaacaggtgttacctttgcttctgctgccactggctatgacaacgccacttctgatgttctgtcggtactacctctatggaaacaacttgaatactacaaagaataccaaacaaaacttaaagcataccaaggaaaagacagagccacagagactatagaaagctctctctacctcataagcatagggaccaacgatttcctcgagaattactttgtctttccgggccgttcttcgcaatattccgtcagtctttaccaagattttctagccggaatcgcgaaagaatttgtgaagaagttgcatggacttggtgctagaaagatctcactaggtgggttacctccaatgggatgcatgcctttagagagagccaccaacattggcactggaggtgagtgcgtaggacggtacaacgacatagccgtccagttcaacagcaagcttgataagatggttgagaagctgaacaaagagcttcctggttccaacctcgttttctcaaatccatatgagccatttatgcggatcatcaagaacccttcctcctttgggttcgaggtggtgggagcggcatgctgcgcgacagggatgttcgagatgggatatggttgtcaaaggaataacccatttacatgtacaaacgcagacaagtatgtgttttgggactcatttcacccaacacagaagactaatcacatcatggccaatgctctcatgaacagcacattccctcacttcctctaaatgatttttatgtttgtgtgtggaaactaaatagatataagagtaatattattattagggattgcttttgatatgcactctgtatgtatttatatttaagtagattttgctcttgtgttagttagcgaaacctacgtttcttttctagattatggtgtgcctatttatgtagcttattttatcctctttagttattctcaatatatcc

SEQ ID NO: 25074 - protein, 364 aa, Arabidopsis thaliana
  peptide (1)..(364): Ceres Seq. ID no. 12357655
WNHTITIITTKTNTMGHLKSLFTILFLIAMSSTVTFAGKIPAIIVFGDSSVDAGNNNYIPTVARSNFEPYGRDFVGGKPTGRFCNGKIATDFMSEALGLKPIIPAYLDPSYNISDFATGVTFASAATGYDNATSDVLSVLPLWKQLEYYKEYQTKLKAYQGKDRATETIESSLYLISIGTNDFLENYFVFPGRSSQYSVSLYQDFLAGIAKEFVKKLHGLGARKISLGGLPPMGCMPLERATNIGTGGECVGRYNDIAVQFNSKLDKMVEKLNKELPGSNLVFSNPYEPFMRIIKNPSSFGFEVVGAACCATGMFEMGYGCQRNNPFTCTNADKYVFWDSFHPTQKTNHIMANALMNSTFPHFL

SEQ ID NO: 25075 - protein, 350 aa, Arabidopsis thaliana
  peptide (1)..(350): Ceres Seq. ID no. 12357656
MGHLKSLFTILFLIAMSSTVTFAGKIPAIIVFGDSSVDAGNNNYIPTVARSNFEPYGRDFVGGKPTGRFCNGKIATDFMSEALGLKPIIPAYLDPSYNISDFATGVTFASAATGYDNATSDVLSVLPLWKQLEYYKEYQTKLKAYQGKDRATETIESSLYLISIGTNDFLENYFVFPGRSSQYSVSLYQDFLAGIAKEFVKKLHGLGARKISLGGLPPMGCMPLERATNIGTGGECVGRYNDIAVQFNSKLDKMVEKLNKELPGSNLVFSNPYEPFMRIIKNPSSFGFEVVGAACCATGMFEMGYGCQRNNPFTCTNADKYVFWDSFHPTQKTNHIMANALMNSTFPHFL

SEQ ID NO: 25076 - protein, 335 aa, Arabidopsis thaliana
  peptide (1)..(335): Ceres Seq. ID no. 12357657
MSSTVTFAGKIPAIIVFGDSSVDAGNNNYIPTVARSNFEPYGRDFVGGKPTGRFCNGKIATDFMSEALGLKPIIPAYLDPSYNISDFATGVTFASAATGYDNATSDVLSVLPLWKQLEYYKEYQTKLKAYQGKDRATETIESSLYLISIGTNDFLENYFVFPGRSSQYSVSLYQDFLAGIAKEFVKKLHGLGARKISLGGLPPMGCMPLERATNIGTGGECVGRYNDIAVQFNSKLDKMVEKLNKELPGSNLVFSNPYEPFMRIIKNPSSFGFEVVGAACCATGMFEMGYGCQRNNPFTCTNADKYVFWDSFHPTQKTNHIMANALMNSTFPHFL

SEQ ID NO: 25077 - DNA, 1041 bp, Arabidopsis thaliana
  misc_feature (1)..(1041): Ceres Seq. ID no. 13500158
  misc_feature (1)..(1041): Ortholog of  Ceres SEQ ID NO 15173410 as cited in SEQ ID NO 61812
gatatatctctagtctagacattatttgtctacaaacgttttgtattgacttggccatctcattccaacaagatacaactcatcactccaaacattcaacttccatataaaccattcccttccgatctcactttccaaatcactcttcacactttaactaagcaaaccaataatggctaccactcgtctaactctagctcctctcctcctcatcgcagccgtactactcgcaaccaaggcaacggctcagccggcagcccccactccagagcctgctggtcccatcaacctcactgcgatcctcgaaaaaggtggtcaattcactactttcatccatcttctaaacatcactcaagtcggtagtcaagtgaacattcaagtcaatagttcatccgaaggtatgacggtgttcgcaccaacagacaatgcttttcaaaaccttaaacccggaaccctaaaccagttaagccctgacgatcaagttaaactcattctctaccacgttagccccaaatattacagtatggatgatctcctctccgtgagtaacccggttaggactcaagcttctggccgagacaacggtgtttacgggcttaacttcaccggccaaacaaaccaaatcaatgtctctactggttatgtggagacacgtattagcaattcgttgaggcaacaacgtcctctcgcagtttatgttgtcgacatggttttgttgcccggtgagatgttcggagagcacaagctttcgccgattgctcctgcccctaaatctaaatccggtggggttaccgatgactccggctccactaagaaggcagcgtcaccgtcggataagtcaggctccggtgagaagaaagtcggactagggtttggtcttggacttattgtcttatgtttgaaatttctcttttgaaaatttaatagcaaagatttgttttgctttctattgattttatcctgcgatgtgaggtataaatatgaaatttgttgattaagttccgtgaaataaaatgtgagatttttaataaaaaaaaaaaa

SEQ ID NO: 25078 - protein, 247 aa, Arabidopsis thaliana
  peptide (1)..(247): Ceres Seq. ID no. 13500159
MATTRLTLAPLLLIAAVLLATKATAQPAAPTPEPAGPINLTAILEKGGQFTTFIHLLNITQVGSQVNIQVNSSSEGMTVFAPTDNAFQNLKPGTLNQLSPDDQVKLILYHVSPKYYSMDDLLSVSNPVRTQASGRDNGVYGLNFTGQTNQINVSTGYVETRISNSLRQQRPLAVYVVDMVLLPGEMFGEHKLSPIAPAPKSKSGGVTDDSGSTKKAASPSDKSGSGEKKVGLGFGLGLIVLCLKFLF

SEQ ID NO: 25079 - protein, 171 aa, Arabidopsis thaliana
  peptide (1)..(171): Ceres Seq. ID no. 13500160
MTVFAPTDNAFQNLKPGTLNQLSPDDQVKLILYHVSPKYYSMDDLLSVSNPVRTQASGRDNGVYGLNFTGQTNQINVSTGYVETRISNSLRQQRPLAVYVVDMVLLPGEMFGEHKLSPIAPAPKSKSGGVTDDSGSTKKAASPSDKSGSGEKKVGLGFGLGLIVLCLKFLF

SEQ ID NO: 25080 - protein, 130 aa, Arabidopsis thaliana
  peptide (1)..(130): Ceres Seq. ID no. 13500161
MDDLLSVSNPVRTQASGRDNGVYGLNFTGQTNQINVSTGYVETRISNSLRQQRPLAVYVVDMVLLPGEMFGEHKLSPIAPAPKSKSGGVTDDSGSTKKAASPSDKSGSGEKKVGLGFGLGLIVLCLKFLF

SEQ ID NO: 25081 - DNA, 1571 bp, Arabidopsis thaliana
  misc_feature (1)..(1571): Ceres Seq. ID no. 13622128
  misc_feature (1)..(1571): Ortholog of  Ceres SEQ ID NO 14302287 as cited in SEQ ID NO 68134
  misc_feature (1)..(1571): Ortholog of  Ceres SEQ ID NO 14309328 as cited in SEQ ID NO 0
attttctgtcattttgatcagatccaagaaaccaaaagagtaaaacaaacacagagaagcttcttcttaaacgatgccgtactataccagagatgacaacgacgtcgacgatttcgatgagtttgatccaacgccgtacagtggtggttacgacatcacggtgatctacggccgtccgattccaccttccgatgagacttgttatcctctctcatctggtgtcgatgatgatttcgaatacgagagacctgaatttactcagatccatgagccttctgcttacggtgatgaagctcttaacacagagtacagtagctattctcgacccaagccacgacccgcatttcgacccgattcaggtggtggtggtcatgttcaaggtgaaagaccaaatcctggttatggatctgaatccggttatgggaggaaaccggaatctgagtacggatctggctatggtggacaaacggaggtggagtatggtcggagacctgagcagagttatggatctggttatggtggaaggacggagactgaatcggagtatggatctggtggtggtggaagaactgaggttgagtatggtaggagacctgaatcagggcttggatctggttatggtgggagatcggagtctgagtatgagcgtaagcctagctatggaaggtctgaggaacaagaagaaggttataggaagcctagctatggaagatctgaagaacaagaggaaggttacaggaagccaagttatggaagatctgaggagcaggaagaaggatatagaaagcctagctatggaagatctgaggaggaacaagaggaaggttataggaagcctagctatggaagatctgaggaacaagaggaaggaagttacaggaaacctagttatgggaggtctgatgatcaggtggagagttacattaagcctagctatggaagatctgaggaacaggaggagggaagttacaggaagcctagttatgggaggtctgaggaacaggaagaggggagttacaggaagcagcctagctatggccgtggcaatgacgatgatgatgatgagcagcgtaggaaccgttctggttctggtgatgatgaggaagggagctatggccgcaagaaatatggtggcaatgactctgatgaggatgaggagaagaagaagcaccgtcacaagcatcaccaccagaagcgtcgtgacgaagacgatgagtaaactaaaccctctctgtgctagagagtgtaatgagaatgtgtgtttgcttagcctcaaaaatctactaaataaagagctaagtcacatacctttctacataatatcttccgacgttggtgttgtgtttgtttgaatctctgtattattactacagagtcttcgtactggttcataataagacctttaagtggtattgggtcaccatgtaactgttgctactctgtttcgttttctatctatcgttttgtgttatgatttacttttctatccttatataattatgatgatcatttcgtgtaatatcagaatgttttttgcatgaattggaattagatggaaactttgtttaagg

SEQ ID NO: 25082 - protein, 386 aa, Arabidopsis thaliana
  peptide (1)..(386): Ceres Seq. ID no. 13622129
MRLVILSHLVSMMISNTRDLNLLRSMSLLLTVMKLLTQSTVAILDPSHDPHFDPIQVVVVMFKVKDQILVMDLNPVMGGNRNLSTDLAMVDKRRWSMVGDLSRVMDLVMVEGRRLNRSMDLVVVEELRLSMVGDLNQGLDLVMVGDRSLSMSVSLAMEGLRNKKKVIGSLAMEDLKNKRKVTGSQVMEDLRSRKKDIESLAMEDLRRNKRKVIGSLAMEDLRNKRKEVTGNLVMGGLMIRWRVTLSLAMEDLRNRRREVTGSLVMGGLRNRKRGVTGSSLAMAVAMTMMMMSSVGTVLVLVMMRKGAMAARNMVAMTLMRMRRRRSTVTSITTRSVVTKTMSKLNPLCARECNENVCLLSLKNLLNKELSHIPFYIISSDVGVVFV

SEQ ID NO: 25083 - protein, 381 aa, Arabidopsis thaliana
  peptide (1)..(381): Ceres Seq. ID no. 13622130
MPYYTRDDNDVDDFDEFDPTPYSGGYDITVIYGRPIPPSDETCYPLSSGVDDDFEYERPEFTQIHEPSAYGDEALNTEYSSYSRPKPRPAFRPDSGGGGHVQGERPNPGYGSESGYGRKPESEYGSGYGGQTEVEYGRRPEQSYGSGYGGRTETESEYGSGGGGRTEVEYGRRPESGLGSGYGGRSESEYERKPSYGRSEEQEEGYRKPSYGRSEEQEEGYRKPSYGRSEEQEEGYRKPSYGRSEEEQEEGYRKPSYGRSEEQEEGSYRKPSYGRSDDQVESYIKPSYGRSEEQEEGSYRKPSYGRSEEQEEGSYRKQPSYGRGNDDDDDEQRRNRSGSGDDEEGSYGRKKYGGNDSDEDEEKKKHRHKHHHQKRRDEDDE

SEQ ID NO: 25084 - protein, 375 aa, Arabidopsis thaliana
  peptide (1)..(375): Ceres Seq. ID no. 13622131
MMISNTRDLNLLRSMSLLLTVMKLLTQSTVAILDPSHDPHFDPIQVVVVMFKVKDQILVMDLNPVMGGNRNLSTDLAMVDKRRWSMVGDLSRVMDLVMVEGRRLNRSMDLVVVEELRLSMVGDLNQGLDLVMVGDRSLSMSVSLAMEGLRNKKKVIGSLAMEDLKNKRKVTGSQVMEDLRSRKKDIESLAMEDLRRNKRKVIGSLAMEDLRNKRKEVTGNLVMGGLMIRWRVTLSLAMEDLRNRRREVTGSLVMGGLRNRKRGVTGSSLAMAVAMTMMMMSSVGTVLVLVMMRKGAMAARNMVAMTLMRMRRRRSTVTSITTRSVVTKTMSKLNPLCARECNENVCLLSLKNLLNKELSHIPFYIISSDVGVVFV

SEQ ID NO: 25085 - DNA, 1071 bp, Arabidopsis thaliana
  misc_feature (1)..(1071): Ceres Seq. ID no. 12385269
  misc_feature (1)..(1071): Ortholog of  Ceres SEQ ID NO 12557497 as cited in SEQ ID NO 43
  misc_feature (1)..(1071): Ortholog of  Ceres SEQ ID NO 12635723 as cited in SEQ ID NO 0
accttataggagcagtttcgtctcttcctcgttctttcacttagctcttcctagtgttaaaccagagtaaagcttgaaactttggactaaaagaatggcgtctttgggtgtgtcggaaatgcttggtactccccttaacttcagggcagtttcaagatcgtctgctccgttggcatcaagcccatccacgttcaagactgttgctctcttctctaagaaaaagccagctcctgctaagtccaaggctgtctctgagactagcgatgagctcgccaagtggtatggtcctgacaggagaattttcttgcctgatggtcttttggatagatcagagatcccagagtacttaaacggtgaagttgctggagattatggttatgacccatttggtcttggaaagaagcctgagaactttgctaaataccaagcttttgaattgatccatgcgagatgggctatgttaggagcagctggtttcatcattcctgaagctttaaacaaatatggcgctaactgtggccctgaagctgtctggtttaagactggtgctttgcttcttgatggaaacacattgaactactttggcaagaacatccctatcaaccttgttctcgccgtagttgctgaggttgttctcctcggtggagccgagtactacagaatcaccaacggattggatttcgaggacaagctacacccaggaggtccatttgatcctctaggccttgctaaggaccctgagcaaggagctcttctcaaagtcaaagagatcaagaacgggagattagccatgtttgcgatgctcggtttctttatccaagcgtatgttaccggagaaggtcctgttgagaaccttgcaaagcatctcagtgatccttttggaaacaacttgcttaccgtcatcgctggaactgccgagagagctcccactctctaagccatttctactttttttaagagcttccaaaatgtacactttgttcgattggaactccttttgacaatgttaaaaaaacttccatctgaattttccttgatatatttcaatggtgctttatcatgcttctaagc

SEQ ID NO: 25086 - protein, 280 aa, Arabidopsis thaliana
  peptide (1)..(280): Ceres Seq. ID no. 12385270
MASLGVSEMLGTPLNFRAVSRSSAPLASSPSTFKTVALFSKKKPAPAKSKAVSETSDELAKWYGPDRRIFLPDGLLDRSEIPEYLNGEVAGDYGYDPFGLGKKPENFAKYQAFELIHARWAMLGAAGFIIPEALNKYGANCGPEAVWFKTGALLLDGNTLNYFGKNIPINLVLAVVAEVVLLGGAEYYRITNGLDFEDKLHPGGPFDPLGLAKDPEQGALLKVKEIKNGRLAMFAMLGFFIQAYVTGEGPVENLAKHLSDPFGNNLLTVIAGTAERAPTL

SEQ ID NO: 25087 - protein, 272 aa, Arabidopsis thaliana
  peptide (1)..(272): Ceres Seq. ID no. 12385271
MLGTPLNFRAVSRSSAPLASSPSTFKTVALFSKKKPAPAKSKAVSETSDELAKWYGPDRRIFLPDGLLDRSEIPEYLNGEVAGDYGYDPFGLGKKPENFAKYQAFELIHARWAMLGAAGFIIPEALNKYGANCGPEAVWFKTGALLLDGNTLNYFGKNIPINLVLAVVAEVVLLGGAEYYRITNGLDFEDKLHPGGPFDPLGLAKDPEQGALLKVKEIKNGRLAMFAMLGFFIQAYVTGEGPVENLAKHLSDPFGNNLLTVIAGTAERAPTL

SEQ ID NO: 25088 - protein, 159 aa, Arabidopsis thaliana
  peptide (1)..(159): Ceres Seq. ID no. 12385272
MLGAAGFIIPEALNKYGANCGPEAVWFKTGALLLDGNTLNYFGKNIPINLVLAVVAEVVLLGGAEYYRITNGLDFEDKLHPGGPFDPLGLAKDPEQGALLKVKEIKNGRLAMFAMLGFFIQAYVTGEGPVENLAKHLSDPFGNNLLTVIAGTAERAPTL

SEQ ID NO: 25089 - DNA, 939 bp, Arabidopsis thaliana
  misc_feature (1)..(939): Ceres Seq. ID no. 12322431
  misc_feature (1)..(939): Ortholog of  Ceres SEQ ID NO 15175519 as cited in SEQ ID NO 1110
  misc_feature (1)..(939): Ortholog of  Ceres SEQ ID NO 13637980 as cited in SEQ ID NO 58973
  misc_feature (1)..(939): Ortholog of  Ceres SEQ ID NO 12624081 as cited in SEQ ID NO 61729
  misc_feature (1)..(939): Ortholog of  Ceres SEQ ID NO 13599435 as cited in SEQ ID NO 0
atttttgtgcctactcatttcctccaaacgtcaaacatagcagcagccatggctgccaccaacacaatcctcgcattctcatctccttctcgtcttctcattcctccttcctccaatccttcaactctccgttcctctttccgcggcgtctctctcaacaacaacaatctccaccgtctccaatctgtttccttcgccgttaaagctccgtcgaaagcgttgacagttgtttccgcggcgaagaaggctgttgcagtgcttaaaggtacttctgatgtcgaaggagttgttactttgacccaagatgactcaggtcctacaactgtgaatgttcgtatcactggtctcactccagggcctcatggatttcatctccatgagtttggtgatacaactaatggatgtatctcaacaggaccacatttcaaccctaacaacatgacacacggagctccagaagatgagtgccgtcatgcgggtgacctgggaaacataaatgccaatgccgatggcgtggcagaaacaacaatagtggacaatcagattcctctgactggtcctaattctgttgttggaagagcctttgtggttcacgagcttaaggatgacctcggaaagggtggccatgagcttagtctgaccactggaaacgcaggcgggagattggcatgtggtgtgattggcttgacgccgctctaagtcagaggctaagcaagtactcttatgtctactgtgttgatcttgtctgtttgaacagatgtaagaatcttagcaaataatgtttggcttaataaactttgatgtttatgttcattgcatcaatttttctctttttgaatttgtgacagtgatgtgtttacttttgatacaactttgtgtttgatcgtttaagtacattttggtttatttagcatcctttttattcagttcaagattgtg

SEQ ID NO: 25090 - protein, 232 aa, Arabidopsis thaliana
  peptide (1)..(232): Ceres Seq. ID no. 12322432
IFVPTHFLQTSNIAAAMAATNTILAFSSPSRLLIPPSSNPSTLRSSFRGVSLNNNNLHRLQSVSFAVKAPSKALTVVSAAKKAVAVLKGTSDVEGVVTLTQDDSGPTTVNVRITGLTPGPHGFHLHEFGDTTNGCISTGPHFNPNNMTHGAPEDECRHAGDLGNINANADGVAETTIVDNQIPLTGPNSVVGRAFVVHELKDDLGKGGHELSLTTGNAGGRLACGVIGLTPL

SEQ ID NO: 25091 - protein, 216 aa, Arabidopsis thaliana
  peptide (1)..(216): Ceres Seq. ID no. 12322433
MAATNTILAFSSPSRLLIPPSSNPSTLRSSFRGVSLNNNNLHRLQSVSFAVKAPSKALTVVSAAKKAVAVLKGTSDVEGVVTLTQDDSGPTTVNVRITGLTPGPHGFHLHEFGDTTNGCISTGPHFNPNNMTHGAPEDECRHAGDLGNINANADGVAETTIVDNQIPLTGPNSVVGRAFVVHELKDDLGKGGHELSLTTGNAGGRLACGVIGLTPL

SEQ ID NO: 25092 - DNA, 1210 bp, Arabidopsis thaliana
  misc_feature (1)..(1210): Ceres Seq. ID no. 12370351
  misc_feature (1)..(1210): Ortholog of  Ceres SEQ ID NO 15177991 as cited in SEQ ID NO 53915
  misc_feature (1)..(1210): Ortholog of  Ceres SEQ ID NO 15174347 as cited in SEQ ID NO 58577
  misc_feature (1)..(1210): Ortholog of  Ceres SEQ ID NO 13596609 as cited in SEQ ID NO 63070
  misc_feature (1)..(1210): Ortholog of  Ceres SEQ ID NO 12616895 as cited in SEQ ID NO 63909
  misc_feature (1)..(1210): Ortholog of  Ceres SEQ ID NO 13598574 as cited in SEQ ID NO 69083
aacagatttcgtaacggacaaagttcccaattctttttttttgcataataagatctgaaatcggagatagaaaaaaaaatcacatttttatttccgccggaacaaaaagcgatggttcagtgtagcaacaatctcctcggaatcctcaatttcttcacattcctcctctcaatcccaattctctccgccgggatctggctcggcaaaaatgcagcaaccgaatgcgaacgtttcctcgacaaaccaatggtcgtactcggaatcttcctcatgttcgtctcaatcgccggactcgtcggtgcttgttgccgtgtctcttgcctcctctggctttacctcttcgctatgttcctcctcattctcctcggcttctgtttcacaatcttcgctttcgcagtcacaaaccgcggcgccggtgaggttatatcggatcgagggtataaagagtatcatgtcgccgattactctaattggttgcagaaacgtgtcaacaatgctaagaattgggaacggatcaggagttgtttgatgtactctgacgtttgctccacttatcgtactcgttatgccagcattaacgttgaagatttctacaaatctaatcttaatgctcttcagtctggttgttgtaagccgtccaatgactgtaacttcacctatgtgaacccgactacttggacaaagactcctggtccatacaaaaacgaggactgtaatgtgtgggacaacaaaccaggaactctctgctacgactgtgaagcctgcaaggctggtctgcttgacaacatcaagaactcatggaaaaaggtggctaaggtcaacattgtcttcctcatattcctcattatcgtctactctgttggttgttgtgcgttcaggaacaacaggaaacgcagttggtaatagattctaatgcgttgaaaccaagactaaggccagagaagatatctgaagtgtcatcatcttactgtcaagtaagttaaagcagcatttaagacaactcgttgatcgcttgtcttgtgtgtgggggattgcaatttcaatgtattttctctcttaaatttgcaacataatgagttacaaaagcacttgcttgtgcttctatttcgactcttttgtgtgttgagtagcttatacatctgttgagacgagtgagatttgtaaaagaagttccatttcactttgcgttattatcattttcatattcttc

SEQ ID NO: 25093 - protein, 263 aa, Arabidopsis thaliana
  peptide (1)..(263): Ceres Seq. ID no. 12370352
MVQCSNNLLGILNFFTFLLSIPILSAGIWLGKNAATECERFLDKPMVVLGIFLMFVSIAGLVGACCRVSCLLWLYLFAMFLLILLGFCFTIFAFAVTNRGAGEVISDRGYKEYHVADYSNWLQKRVNNAKNWERIRSCLMYSDVCSTYRTRYASINVEDFYKSNLNALQSGCCKPSNDCNFTYVNPTTWTKTPGPYKNEDCNVWDNKPGTLCYDCEACKAGLLDNIKNSWKKVAKVNIVFLIFLIIVYSVGCCAFRNNRKRSW

SEQ ID NO: 25094 - protein, 218 aa, Arabidopsis thaliana
  peptide (1)..(218): Ceres Seq. ID no. 12370353
MVVLGIFLMFVSIAGLVGACCRVSCLLWLYLFAMFLLILLGFCFTIFAFAVTNRGAGEVISDRGYKEYHVADYSNWLQKRVNNAKNWERIRSCLMYSDVCSTYRTRYASINVEDFYKSNLNALQSGCCKPSNDCNFTYVNPTTWTKTPGPYKNEDCNVWDNKPGTLCYDCEACKAGLLDNIKNSWKKVAKVNIVFLIFLIIVYSVGCCAFRNNRKRSW

SEQ ID NO: 25095 - protein, 210 aa, Arabidopsis thaliana
  peptide (1)..(210): Ceres Seq. ID no. 12370354
MFVSIAGLVGACCRVSCLLWLYLFAMFLLILLGFCFTIFAFAVTNRGAGEVISDRGYKEYHVADYSNWLQKRVNNAKNWERIRSCLMYSDVCSTYRTRYASINVEDFYKSNLNALQSGCCKPSNDCNFTYVNPTTWTKTPGPYKNEDCNVWDNKPGTLCYDCEACKAGLLDNIKNSWKKVAKVNIVFLIFLIIVYSVGCCAFRNNRKRSW

SEQ ID NO: 25096 - DNA, 675 bp, Arabidopsis thaliana
  misc_feature (1)..(675): Ceres Seq. ID no. 12580226
  misc_feature (1)..(675): Ortholog of  Ceres SEQ ID NO 13595158 as cited in SEQ ID NO 51008
  misc_feature (1)..(675): Ortholog of  Ceres SEQ ID NO 13581682 as cited in SEQ ID NO 57913
  misc_feature (1)..(675): Ortholog of  Ceres SEQ ID NO 14304144 as cited in SEQ ID NO 59152
  misc_feature (1)..(675): Ortholog of  Ceres SEQ ID NO 13662050 as cited in SEQ ID NO 61580
  misc_feature (1)..(675): Ortholog of  Ceres SEQ ID NO 14309388 as cited in SEQ ID NO 0
aatcacaatccaaaactctctctctctctctctgtctcttgtcttattatttatctctctaacggcgaggcaatgggttttccggtgggatattctgagctacttctcccaaaaatctttttctacttgttatctttcttaggtttgatacgtaaactcatctccacaatgttcaagatcattggtctaccagatttcttagaacctgaaccggtttcaacctcatggcccgacccaccacccacgttgaccaaacctgactcagcagcaatactagccggagagatgttaccggttgttcgattctcggatataaaccgaccggaatccgagtgttgcgcagtgtgtctctacgatttcgagaacgacgacgagatccgacggctgacgaattgtcgacatatatttcatcggggatgtttggaccgttggatgatgggttataatcagatgacgtgtccactttgtcgtacacagtttatacctgatcatcttcaactggagtttaatcaaaggctctggtctcaatcttctgctgtttcttctcaacttcttgatgaatcatcatcttaggacgtattaaatctttgtccaaacaaaaaaagaaagacatattaaatccttttttttggtactttcattgggaattgggtttggtgtgagatcgatgtaaat

SEQ ID NO: 25097 - protein, 190 aa, Arabidopsis thaliana
  peptide (1)..(190): Ceres Seq. ID no. 12580227
NHNPKLSLSLSVSCLIIYLSNGEAMGFPVGYSELLLPKIFFYLLSFLGLIRKLISTMFKIIGLPDFLEPEPVSTSWPDPPPTLTKPDSAAILAGEMLPVVRFSDINRPESECCAVCLYDFENDDEIRRLTNCRHIFHRGCLDRWMMGYNQMTCPLCRTQFIPDHLQLEFNQRLWSQSSAVSSQLLDESSS

SEQ ID NO: 25098 - protein, 166 aa, Arabidopsis thaliana
  peptide (1)..(166): Ceres Seq. ID no. 12580228
MGFPVGYSELLLPKIFFYLLSFLGLIRKLISTMFKIIGLPDFLEPEPVSTSWPDPPPTLTKPDSAAILAGEMLPVVRFSDINRPESECCAVCLYDFENDDEIRRLTNCRHIFHRGCLDRWMMGYNQMTCPLCRTQFIPDHLQLEFNQRLWSQSSAVSSQLLDESSS

SEQ ID NO: 25099 - protein, 134 aa, Arabidopsis thaliana
  peptide (1)..(134): Ceres Seq. ID no. 12580229
MFKIIGLPDFLEPEPVSTSWPDPPPTLTKPDSAAILAGEMLPVVRFSDINRPESECCAVCLYDFENDDEIRRLTNCRHIFHRGCLDRWMMGYNQMTCPLCRTQFIPDHLQLEFNQRLWSQSSAVSSQLLDESSS

SEQ ID NO: 25100 - DNA, 1332 bp, Arabidopsis thaliana
  misc_feature (1)..(1332): Ceres Seq. ID no. 12488506
  misc_feature (1)..(1332): Ortholog of  Ceres SEQ ID NO 15177676 as cited in SEQ ID NO 52631
  misc_feature (1)..(1332): Ortholog of  Ceres SEQ ID NO 14314212 as cited in SEQ ID NO 57401
attcacaataaaccagcgtcggcccaccgcatcccaaaccataacgcttaatccttaaaaaccgtccagatccatttccttcctctacaactcatcacacacacttctaatggcttcttcttcttgtttgaatctcttcttcttctcttttctctccgctctaatcatttctaaatctcagatctctgattccgttaacggggtcgttttccctgttgttaaagaccttccaaccggtcaatacctcgcacagattcgactcggtgactcaccggatccagtcaagctcgtagtcgatctggccggctcaattctctggtttgattgttcctcaagacatgtttcctcgtcaaggaacctaatatccggtagctctagcggctgcttaaaggcaaaagttggaaatgaacgagtatcatcatcatcatcatcgcgtaaagaccaaaacgccgattgcgaattacttgttaaaaacgacgcctttgggattacggcgagaggagagcttttcagtgacgtcatgtcggttggctctgttacttctccgggaaccgttgatctacttttcgcttgtactccaccgtggctgttacgtgggctcgctagtggagcccaaggagtaatgggcttaggaagggcccaaatctcactcccttcacaactcgccgcggaaactaacgaacgtcgtcggttaactgtttacctgtcgccgttgaacggtgtcgtatcaacgagttcggtggaggaggtttttggagtggctgcgtctagatcgctggtttacacgcctttgttaaccggttcgagtggcaactacgtaattaacgtgaaatcgattagagtcaacggggaaaagctctccgtggaaggtccgttggcggtggagctgagcacggtggttccttacacgattttagagagctcgatctacaaggtgttcgcggaagcttacgccaaagctgcgggtgaagctacatcggtgcctcctgtcgcaccgtttgggctctgcttcactagtgacgtagattttccggcggtagatctagcgttgcagagtgagatggtgcggtggaggattcatgggaagaatctgatggtggatgttggtggtggagtccgatgctcggggattgttgacggcgggtcaagtcgagtcaacccgattgtaatgggtgggctacaattagaaggctttatattggactttgatttgggtaactcaatgatgggctttggacaaagaacacgctctgattcaacttcgttgtaatacagaaacctttgtaattgtaaccttctaattatctggtagatatcctcaattttgatccc

SEQ ID NO: 25101 - protein, 386 aa, Arabidopsis thaliana
  peptide (1)..(386): Ceres Seq. ID no. 12488507
MASSSCLNLFFFSFLSALIISKSQISDSVNGVVFPVVKDLPTGQYLAQIRLGDSPDPVKLVVDLAGSILWFDCSSRHVSSSRNLISGSSSGCLKAKVGNERVSSSSSSRKDQNADCELLVKNDAFGITARGELFSDVMSVGSVTSPGTVDLLFACTPPWLLRGLASGAQGVMGLGRAQISLPSQLAAETNERRRLTVYLSPLNGVVSTSSVEEVFGVAASRSLVYTPLLTGSSGNYVINVKSIRVNGEKLSVEGPLAVELSTVVPYTILESSIYKVFAEAYAKAAGEATSVPPVAPFGLCFTSDVDFPAVDLALQSEMVRWRIHGKNLMVDVGGGVRCSGIVDGGSSRVNPIVMGGLQLEGFILDFDLGNSMMGFGQRTRSDSTSL

SEQ ID NO: 25102 - protein, 249 aa, Arabidopsis thaliana
  peptide (1)..(249): Ceres Seq. ID no. 12488508
MSVGSVTSPGTVDLLFACTPPWLLRGLASGAQGVMGLGRAQISLPSQLAAETNERRRLTVYLSPLNGVVSTSSVEEVFGVAASRSLVYTPLLTGSSGNYVINVKSIRVNGEKLSVEGPLAVELSTVVPYTILESSIYKVFAEAYAKAAGEATSVPPVAPFGLCFTSDVDFPAVDLALQSEMVRWRIHGKNLMVDVGGGVRCSGIVDGGSSRVNPIVMGGLQLEGFILDFDLGNSMMGFGQRTRSDSTSL

SEQ ID NO: 25103 - protein, 215 aa, Arabidopsis thaliana
  peptide (1)..(215): Ceres Seq. ID no. 12488509
MGLGRAQISLPSQLAAETNERRRLTVYLSPLNGVVSTSSVEEVFGVAASRSLVYTPLLTGSSGNYVINVKSIRVNGEKLSVEGPLAVELSTVVPYTILESSIYKVFAEAYAKAAGEATSVPPVAPFGLCFTSDVDFPAVDLALQSEMVRWRIHGKNLMVDVGGGVRCSGIVDGGSSRVNPIVMGGLQLEGFILDFDLGNSMMGFGQRTRSDSTSL

SEQ ID NO: 25104 - DNA, 1254 bp, Arabidopsis thaliana
  misc_feature (1)..(1254): Ceres Seq. ID no. 12335354
  misc_feature (1)..(1254): Ortholog of  Ceres SEQ ID NO 13590776 as cited in SEQ ID NO 64877
  misc_feature (1)..(1254): Ortholog of  Ceres SEQ ID NO 12780534 as cited in SEQ ID NO 65670
  misc_feature (1)..(1254): Ortholog of  Ceres SEQ ID NO 13598301 as cited in SEQ ID NO 68281
ataattggtctctcgcggtggcttggcgacacggaacagagaattaatcgagaatctttttcagcttgtaaccggaattcatggcgatgcaagccggtgttcagacctctaaggtccttatcctactcggcgcaggtgtatctggttcgatcgtattgagacatgggaggttgtctgacctaatagcccaacttcaagacttactcaatggtgctcaaggagttgaaagcactccttttaagtatgacggtgcactccttgctgctcagattcgacagcttgcaaacgagatcaaagaactaactatgaccaatccagttaccatctttaatggagattcaaactccagtggctatgcatcttacctggttccagcggctgccgttggagctatggggtactgctacatgtggtggaagggctggtcgttttcagatgcaatgtttgtgacaaagaaaaatatggctgatgcggttgcctctgtttcgaaacaactagacgatttgtcagacacattagcgtcaacaaggaaacatctttctcagaagctagcgaccttggattggaaggtggaagagcagaatgagacatctaaaatgatcttaagtgatgttactgagatgagatcaagcatttcgcaaattgggtttgattttaagcaacttaatgaaatgatttctggaatagaagggaagattgaaagtcttgaaagcaaacaagatgtgaccctctctggactatggcatctatgtcaagttgcaggcgttaaagacagcacaagtactaaagtatttcaggatgttggtgagagattacctattgatggaaaaccatccactaatacttctctctctggtctgcggtttctgacggaaggcaaagaggatgcaaatgtaatacacaagccggttatggcgaaagaaattatggtgatgggggaaaaaacaaaagtcactgcagcgggaagaagcagagttcatagagcgtttccaggtggaatatcttgggtacgggatgtttcaggactatcctaatattattttggttgatatacaaagaaattgcttgtattcgtcccaaattctgatactgggactggcaattattttttcatgtaaaaagaagaaaaatctacatatgttattgcatccaccaacaatttggtttgcccctaattatatttggtcttgatgtttgtaaagaaagagtgtgattaaggctttcacgtatgttgatgtcttcattgatttggac

SEQ ID NO: 25105 - protein, 317 aa, Arabidopsis thaliana
  peptide (1)..(317): Ceres Seq. ID no. 12335355
MAMQAGVQTSKVLILLGAGVSGSIVLRHGRLSDLIAQLQDLLNGAQGVESTPFKYDGALLAAQIRQLANEIKELTMTNPVTIFNGDSNSSGYASYLVPAAAVGAMGYCYMWWKGWSFSDAMFVTKKNMADAVASVSKQLDDLSDTLASTRKHLSQKLATLDWKVEEQNETSKMILSDVTEMRSSISQIGFDFKQLNEMISGIEGKIESLESKQDVTLSGLWHLCQVAGVKDSTSTKVFQDVGERLPIDGKPSTNTSLSGLRFLTEGKEDANVIHKPVMAKEIMVMGEKTKVTAAGRSRVHRAFPGGISWVRDVSGLS

SEQ ID NO: 25106 - protein, 315 aa, Arabidopsis thaliana
  peptide (1)..(315): Ceres Seq. ID no. 12335356
MQAGVQTSKVLILLGAGVSGSIVLRHGRLSDLIAQLQDLLNGAQGVESTPFKYDGALLAAQIRQLANEIKELTMTNPVTIFNGDSNSSGYASYLVPAAAVGAMGYCYMWWKGWSFSDAMFVTKKNMADAVASVSKQLDDLSDTLASTRKHLSQKLATLDWKVEEQNETSKMILSDVTEMRSSISQIGFDFKQLNEMISGIEGKIESLESKQDVTLSGLWHLCQVAGVKDSTSTKVFQDVGERLPIDGKPSTNTSLSGLRFLTEGKEDANVIHKPVMAKEIMVMGEKTKVTAAGRSRVHRAFPGGISWVRDVSGLS

SEQ ID NO: 25107 - protein, 242 aa, Arabidopsis thaliana
  peptide (1)..(242): Ceres Seq. ID no. 12335357
MTNPVTIFNGDSNSSGYASYLVPAAAVGAMGYCYMWWKGWSFSDAMFVTKKNMADAVASVSKQLDDLSDTLASTRKHLSQKLATLDWKVEEQNETSKMILSDVTEMRSSISQIGFDFKQLNEMISGIEGKIESLESKQDVTLSGLWHLCQVAGVKDSTSTKVFQDVGERLPIDGKPSTNTSLSGLRFLTEGKEDANVIHKPVMAKEIMVMGEKTKVTAAGRSRVHRAFPGGISWVRDVSGLS

SEQ ID NO: 25108 - DNA, 1242 bp, Arabidopsis thaliana
  misc_feature (1)..(1242): Ceres Seq. ID no. 13495848
  misc_feature (1)..(1242): Ortholog of  Ceres SEQ ID NO 13597638 as cited in SEQ ID NO 65448
acacatatacattcacattactaatctctcaagatttcacaattttcttgtgattttctctcagtttcttatttcgtttcataacatggatgccatgagtagcgtagacgagagctctacaactacagattccattccggcgagaaagtcatcgtctccggcgagtttactatatagaatgggaagcggaacaagcgtggtacttgattcagagaacggtgtcgaagtcgaagtcgaagccgaatcaagaaagcttccttcttcaagattcaaaggtgttgttcctcaaccaaatggaagatggggagctcagatttacgagaaacatcaacgcgtgtggcttggtactttcaacgaggaagacgaagcagctcgtgcttacgacgtcgcggctcaccgtttccgtggccgcgatgccgttactaatttcaaagacacgacgttcgaagaagaggttgagttcttaaacgcgcattcgaaatcagagatcgtagatatgttgagaaaacacacttacaaagaagagttagaccaaaggaaacgtaaccgtgacggtaacggaaaagagacgacggcgtttgctttggcttcgatggtggttatgacggggtttaaaacggcggagttactgtttgagaaaacggtaacgccaagtgacgtcgggaaactaaaccgtttagttataccaaaacaccaagcggagaaacattttccgttaccgttaggtaataataacgtctccgttaaaggtatgctgttgaatttcgaagacgttaacgggaaagtgtggaggttccgttactcttattggaatagtagtcaaagttatgtgttgaccaaaggttggagtagattcgttaaagagaagagactttgtgctggtgatttgatcagttttaaaagatccaacgatcaagatcaaaaattctttatcgggtggaaatcgaaatccgggttggatctagagacgggtcgggttatgagattgtttggggttgatatttctttaaacgccgtcgttgtagtgaaggaaacaacggaggtgttaatgtcgtcgttaaggtgtaagaatcaacgagttttgtaataacaatttaacaacttgggaaagaaaaaaaaagctttttgattttaatttctcttcaacgttaatcttgctgagattatttatgttgtaagttgtaacaagtggaaaaaattaattaggtgtcaaacaaatcttgtgttaatattctttgtatg

SEQ ID NO: 25109 - protein, 361 aa, Arabidopsis thaliana
  peptide (1)..(361): Ceres Seq. ID no. 13495849
HIYIHITNLSRFHNFLVIFSQFLISFHNMDAMSSVDESSTTTDSIPARKSSSPASLLYRMGSGTSVVLDSENGVEVEVEAESRKLPSSRFKGVVPQPNGRWGAQIYEKHQRVWLGTFNEEDEAARAYDVAAHRFRGRDAVTNFKDTTFEEEVEFLNAHSKSEIVDMLRKHTYKEELDQRKRNRDGNGKETTAFALASMVVMTGFKTAELLFEKTVTPSDVGKLNRLVIPKHQAEKHFPLPLGNNNVSVKGMLLNFEDVNGKVWRFRYSYWNSSQSYVLTKGWSRFVKEKRLCAGDLISFKRSNDQDQKFFIGWKSKSGLDLETGRVMRLFGVDISLNAVVVVKETTEVLMSSLRCKNQRVL

SEQ ID NO: 25110 - protein, 333 aa, Arabidopsis thaliana
  peptide (1)..(333): Ceres Seq. ID no. 13495850
MDAMSSVDESSTTTDSIPARKSSSPASLLYRMGSGTSVVLDSENGVEVEVEAESRKLPSSRFKGVVPQPNGRWGAQIYEKHQRVWLGTFNEEDEAARAYDVAAHRFRGRDAVTNFKDTTFEEEVEFLNAHSKSEIVDMLRKHTYKEELDQRKRNRDGNGKETTAFALASMVVMTGFKTAELLFEKTVTPSDVGKLNRLVIPKHQAEKHFPLPLGNNNVSVKGMLLNFEDVNGKVWRFRYSYWNSSQSYVLTKGWSRFVKEKRLCAGDLISFKRSNDQDQKFFIGWKSKSGLDLETGRVMRLFGVDISLNAVVVVKETTEVLMSSLRCKNQRVL

SEQ ID NO: 25111 - protein, 330 aa, Arabidopsis thaliana
  peptide (1)..(330): Ceres Seq. ID no. 13495851
MSSVDESSTTTDSIPARKSSSPASLLYRMGSGTSVVLDSENGVEVEVEAESRKLPSSRFKGVVPQPNGRWGAQIYEKHQRVWLGTFNEEDEAARAYDVAAHRFRGRDAVTNFKDTTFEEEVEFLNAHSKSEIVDMLRKHTYKEELDQRKRNRDGNGKETTAFALASMVVMTGFKTAELLFEKTVTPSDVGKLNRLVIPKHQAEKHFPLPLGNNNVSVKGMLLNFEDVNGKVWRFRYSYWNSSQSYVLTKGWSRFVKEKRLCAGDLISFKRSNDQDQKFFIGWKSKSGLDLETGRVMRLFGVDISLNAVVVVKETTEVLMSSLRCKNQRVL

SEQ ID NO: 25112 - DNA, 1415 bp, Arabidopsis thaliana
  misc_feature (1)..(1415): Ceres Seq. ID no. 12335742
  misc_feature (1)..(1415): Ortholog of  Ceres SEQ ID NO 14314300 as cited in SEQ ID NO 57386
  misc_feature (1)..(1415): Ortholog of  Ceres SEQ ID NO 14311993 as cited in SEQ ID NO 60371
  misc_feature (1)..(1415): Ortholog of  Ceres SEQ ID NO 13596509 as cited in SEQ ID NO 62004
  misc_feature (1)..(1415): Ortholog of  Ceres SEQ ID NO 13659971 as cited in SEQ ID NO 67565
  misc_feature (1)..(1415): Ortholog of  Ceres SEQ ID NO 13500385 as cited in SEQ ID NO 67583
atcatcgatatatacaccgatacatacaccgacacatacgcatgagtgtaagtatacgctcaagtgtgggagcaatctcagatccctccatgaaaacaacgctttataagatgactcattttctgaaacgaactcaactccaagtgtgacacattctcaacgagagatcgtgatcgtacttatatacacacacgcacacttgcaaagcttgggaggaagaagtgatggacaagtatgaggttgtgaaggatttgggagctggaaattttggtgtggctcgtcttcttagacacaaagagaccaaagagctcgttgctatgaaatacattgagagaggtcgcaagattgatgagaatgtggcaagagagattatcaatcatagatcacttaggcatcctaatatcatcagattcaaggaggtgattctgactccaactcatcttgcaattgtaatggagtatgcttctggaggagagctctttgaaagaatctgtaatgctggtagattcagtgaagctgaggctagatacttctttcagcagctgatttgtggcgtggattactgtcattcactgcaaatatgtcatagagatttgaagcttgagaatacactgcttgatggtagtccggccccgcttttgaaaatctgtgattttggttactccaagtcatctctgcttcactctagacctaaatcaactgttggtactccagcttatatcgcacctgaagttctttcccgaagagaatatgacggaaagcatgcggatgtttggtcctgtggtgtgactctttatgtgatgttagttggaggttatccgtttgaagacccggatgatccgagaaacttcaggaaaacaatccaacgtataatggctgtccagtacaagatcccggattacgttcatatatcgcaggagtgcagacaccttctctctcgcatatttgtcactaattcagctaagagaatcacacttaaagagatcaagaagcatccatggtacttaaagaacttgccaaaggagcttacagagcctgctcaagcggcgtactacaagagagaaaccccaagcttttccctccaaagcgtagaggacataatgaagatcgttggagaagccaggaatccagctccgtcttctaatgccgtcaagggctttgatgatgatgaggaagatgtggaggacgaggttgaagaagaagaagaagaagaagaggaggaagaagaggaagaggaagaagatgaatacgagaagcatgttaaagaggcccattcttgtcaagagcctcccaaagcttaagaaactctcactctgttgtgtaatattcaatctccttgtatctttacgtttatgtgaattcgaagtttcaaaactttatctacgcaattgaccaattagttatcatagcatttg

SEQ ID NO: 25113 - protein, 358 aa, Arabidopsis thaliana
  peptide (1)..(358): Ceres Seq. ID no. 12335743
MDKYEVVKDLGAGNFGVARLLRHKETKELVAMKYIERGRKIDENVAREIINHRSLRHPNIIRFKEVILTPTHLAIVMEYASGGELFERICNAGRFSEAEARYFFQQLICGVDYCHSLQICHRDLKLENTLLDGSPAPLLKICDFGYSKSSLLHSRPKSTVGTPAYIAPEVLSRREYDGKHADVWSCGVTLYVMLVGGYPFEDPDDPRNFRKTIQRIMAVQYKIPDYVHISQECRHLLSRIFVTNSAKRITLKEIKKHPWYLKNLPKELTEPAQAAYYKRETPSFSLQSVEDIMKIVGEARNPAPSSNAVKGFDDDEEDVEDEVEEEEEEEEEEEEEEEEDEYEKHVKEAHSCQEPPKA

SEQ ID NO: 25114 - protein, 327 aa, Arabidopsis thaliana
  peptide (1)..(327): Ceres Seq. ID no. 12335744
MKYIERGRKIDENVAREIINHRSLRHPNIIRFKEVILTPTHLAIVMEYASGGELFERICNAGRFSEAEARYFFQQLICGVDYCHSLQICHRDLKLENTLLDGSPAPLLKICDFGYSKSSLLHSRPKSTVGTPAYIAPEVLSRREYDGKHADVWSCGVTLYVMLVGGYPFEDPDDPRNFRKTIQRIMAVQYKIPDYVHISQECRHLLSRIFVTNSAKRITLKEIKKHPWYLKNLPKELTEPAQAAYYKRETPSFSLQSVEDIMKIVGEARNPAPSSNAVKGFDDDEEDVEDEVEEEEEEEEEEEEEEEEDEYEKHVKEAHSCQEPPKA

SEQ ID NO: 25115 - protein, 282 aa, Arabidopsis thaliana
  peptide (1)..(282): Ceres Seq. ID no. 12335745
MEYASGGELFERICNAGRFSEAEARYFFQQLICGVDYCHSLQICHRDLKLENTLLDGSPAPLLKICDFGYSKSSLLHSRPKSTVGTPAYIAPEVLSRREYDGKHADVWSCGVTLYVMLVGGYPFEDPDDPRNFRKTIQRIMAVQYKIPDYVHISQECRHLLSRIFVTNSAKRITLKEIKKHPWYLKNLPKELTEPAQAAYYKRETPSFSLQSVEDIMKIVGEARNPAPSSNAVKGFDDDEEDVEDEVEEEEEEEEEEEEEEEEDEYEKHVKEAHSCQEPPKA

SEQ ID NO: 25116 - DNA, 1165 bp, Arabidopsis thaliana
  misc_feature (1)..(1165): Ceres Seq. ID no. 13488379
  misc_feature (1)..(1165): Ortholog of  Ceres SEQ ID NO 14306627 as cited in SEQ ID NO 53023
  misc_feature (1)..(1165): Ortholog of  Ceres SEQ ID NO 14307797 as cited in SEQ ID NO 54802
  misc_feature (1)..(1165): Ortholog of  Ceres SEQ ID NO 15168374 as cited in SEQ ID NO 55652
  misc_feature (1)..(1165): Ortholog of  Ceres SEQ ID NO 13663874 as cited in SEQ ID NO 67003
  misc_feature (1)..(1165): Ortholog of  Ceres SEQ ID NO 13624654 as cited in SEQ ID NO 0
aagtctttttataaaggaaagaaagaaaaactttcctaattggttcataccaaagtctgagctcttctttatatctctcttgtagtttcttattgggggtctttgttttgtttggttcttttagagtaagaagtttcttaaaaaaggatcaaaaatgggaaggggtagggttcaattgaagaggatagagaacaagatcaatagacaagtgacattctcgaaaagaagagctggtcttttgaagaaagctcatgagatctctgttctctgtgatgctgaagttgctcttgttgtcttctcccataagggaaaactcttcgaatactccactgattcttgtatggagaagatacttgaacgctatgagaggtactcttacgccgaaagacagcttattgcacctgagtccgacgtcaatacaaactggtcgatggagtataacaggcttaaggctaagattgagcttttggagagaaaccagaggcattatcttggggaagacttgcaagcaatgagccctaaagagcttcagaatctggagcagcagcttgacactgctcttaagcacatccgcactagaaaaaaccaacttatgtacgagtccatcaatgagctccaaaaaaaggagaaggccatacaggagcaaaacagcatgctttctaaacagatcaaggagagggaaaaaattcttagggctcaacaggagcagtgggatcagcagaaccaaggccacaatatgcctccccctctgccaccgcagcagcaccaaatccagcatccttacatgctctctcatcagccatctccttttctcaacatgggtggtctgtatcaagaagatgatcctatggcaatgaggaggaatgatctcgaactgactcttgaacccgtttacaactgcaaccttggctgcttcgccgcatgaagcatttccatatatatatttgtaatcgtcaacaataaaaacagtttgccacatacatataaatagtggctaggctcttttcatccaattaatatattttggcaaatgttcgatgttcttatatcatcatatataaattagcaggctcctttcttcttttgtaatttgataagtttatttgcttcaatatggagcaaaattgtaatatatttgaaggtcagagagaatgaacgtgaactt

SEQ ID NO: 25117 - protein, 256 aa, Arabidopsis thaliana
  peptide (1)..(256): Ceres Seq. ID no. 13488380
MGRGRVQLKRIENKINRQVTFSKRRAGLLKKAHEISVLCDAEVALVVFSHKGKLFEYSTDSCMEKILERYERYSYAERQLIAPESDVNTNWSMEYNRLKAKIELLERNQRHYLGEDLQAMSPKELQNLEQQLDTALKHIRTRKNQLMYESINELQKKEKAIQEQNSMLSKQIKEREKILRAQQEQWDQQNQGHNMPPPLPPQQHQIQHPYMLSHQPSPFLNMGGLYQEDDPMAMRRNDLELTLEPVYNCNLGCFAA

SEQ ID NO: 25118 - protein, 194 aa, Arabidopsis thaliana
  peptide (1)..(194): Ceres Seq. ID no. 13488381
MEKILERYERYSYAERQLIAPESDVNTNWSMEYNRLKAKIELLERNQRHYLGEDLQAMSPKELQNLEQQLDTALKHIRTRKNQLMYESINELQKKEKAIQEQNSMLSKQIKEREKILRAQQEQWDQQNQGHNMPPPLPPQQHQIQHPYMLSHQPSPFLNMGGLYQEDDPMAMRRNDLELTLEPVYNCNLGCFAA

SEQ ID NO: 25119 - protein, 164 aa, Arabidopsis thaliana
  peptide (1)..(164): Ceres Seq. ID no. 13488382
MEYNRLKAKIELLERNQRHYLGEDLQAMSPKELQNLEQQLDTALKHIRTRKNQLMYESINELQKKEKAIQEQNSMLSKQIKEREKILRAQQEQWDQQNQGHNMPPPLPPQQHQIQHPYMLSHQPSPFLNMGGLYQEDDPMAMRRNDLELTLEPVYNCNLGCFAA

SEQ ID NO: 25120 - DNA, 1347 bp, Arabidopsis thaliana
  misc_feature (1)..(1347): Ceres Seq. ID no. 12335738
  misc_feature (1)..(1347): Ortholog of  Ceres SEQ ID NO 13582297 as cited in SEQ ID NO 56486
  misc_feature (1)..(1347): Ortholog of  Ceres SEQ ID NO 13586936 as cited in SEQ ID NO 0
agactcactaaacaaaaatgatgatcggcgaaaataaaaaccggccacatccaacgatccatatccctcaatgggatcaaatcaacgatccaacggccacaatctcttcaccattctcttccgtcaaccttaacagcgttaacgactacccacactctccgtcaccgtatctcgactccttcgcttctctcttccgttacctcccgtcaaacgagttaacaaacgattcagactcatcaagtggcgacgagtcatcaccactcaccgactcattctcctccgacgagtttcgcatctacgagttcaaaatccggcgatgcgctcgaggtcgatctcatgattggacggagtgtccgttcgcacatcccggaggaaaaagctcgacgacgtgatccgagaaagtttcattactccggcaccgcttgtcctgagtttcgtaaaggaagttgtagaagaggtgattcgtgtgagttctctcatggagttttcgagtgttggctccatccttctcgttaccgtactcagccgtgtaaagacggaactagctgccggagaagaatctgtttcttcgctcatacgacggagcagttacgtgtattaccttgttcgttagatccagatcttggattcttctcaggattagctacttctccgacttcgattcttgtttctccttcgttttcaccaccgtcggaatctccgccgctttctccgagtaccggtgaacttattgcgtcgatgaggaaaatgcaattgaacggaggtggttgttcgtggagttctccgatgagatctgcagttaggttacctttttcgtcgtctctgcgtccgattcaggcggcaacgtggccgaggataagagagtttgagatcgaagaagctccggcgatggaatttgtggaatctgggaaagagctgagagcggagatgtatgcaagactcagtagagagaactcactcggttgagtcgacttggatcgagtctttgatgacgtggcgactcgatctgattttgtgaatattttagagatttttaaggtgttgtggataaatgacgtggcgggtcgatcttagtgacggtacaatcggacgatgaagaaaaaagcgttaagagtaacaaaaaaaggaagaatttgtaaagagatgataatgagagaatttgagagctattcttctggcttttttctctgcagttttttttattgttttcgttattttcttgtttttattttggttttcggctttattttgtttgttgtttattaatgttatatcattttgtaattagttctcaaatgtatttggataacatcttagtttgagactttagaaaagaacatttcattt

SEQ ID NO: 25121 - protein, 209 aa, Arabidopsis thaliana
  peptide (1)..(209): Ceres Seq. ID no. 12335739
MIGRSVRSHIPEEKARRRDPRKFHYSGTACPEFRKGSCRRGDSCEFSHGVFECWLHPSRYRTQPCKDGTSCRRRICFFAHTTEQLRVLPCSLDPDLGFFSGLATSPTSILVSPSFSPPSESPPLSPSTGELIASMRKMQLNGGGCSWSSPMRSAVRLPFSSSLRPIQAATWPRIREFEIEEAPAMEFVESGKELRAEMYARLSRENSLG

SEQ ID NO: 25122 - protein, 124 aa, Arabidopsis thaliana
  peptide (1)..(124): Ceres Seq. ID no. 12335740
MMIGENKNRPHPTIHIPQWDQINDPTATISSPFSSVNLNSVNDYPHSPSPYLDSFASLFRYLPSNELTNDSDSSSGDESSPLTDSFSSDEFRIYEFKIRRCARGRSHDWTECPFAHPGGKSSTT

SEQ ID NO: 25123 - protein, 123 aa, Arabidopsis thaliana
  peptide (1)..(123): Ceres Seq. ID no. 12335741
MIGENKNRPHPTIHIPQWDQINDPTATISSPFSSVNLNSVNDYPHSPSPYLDSFASLFRYLPSNELTNDSDSSSGDESSPLTDSFSSDEFRIYEFKIRRCARGRSHDWTECPFAHPGGKSSTT

SEQ ID NO: 25124 - DNA, 1189 bp, Arabidopsis thaliana
  misc_feature (1)..(1189): Ceres Seq. ID no. 12329063
  misc_feature (1)..(1189): Ortholog of  Ceres SEQ ID NO 14306675 as cited in SEQ ID NO 52939
  misc_feature (1)..(1189): Ortholog of  Ceres SEQ ID NO 12608114 as cited in SEQ ID NO 57218
aaatccttatcttctctctttcactcacaaccaattgctcatcccacctacttgttccccacaaaacactctctccctctttgttctttcatcttctctaagctctttctctgaacctacgcttctgctaagctattctaagagaagccagactagcaataaacccttcattttaagcattctgtttccttcttgagaaacctagatattttggtttcttgtatccggtgatgaagatacagtgtgatgtgtgtgagaaagctccggcgacggtgatttgttgcgccgacgaagctgctctctgtcctcaatgcgacatcgagattcacgccgctaacaaactcgctagcaagcaccaacgtcttcatcttaattccctctccaccaaattccctcgttgcgatatctgccaagagaaggcagctttcattttctgtgtagaggatagagctctgctttgcagggactgcgatgaatccatccacgtggctaattctcgatctgctaatcaccagaggttcttagccactgggatcaaagtagctctgacctcaactatatgtagtaaagaaattgagaagaatcaacctgagccttccaacaaccaacagaaggctaatcagattcctgctaaatccacaagccagcagcaacaacaaccttcttctgctactccacttccctgggctgttgacgatttctttcacttctctgatattgaatccaccgacaagaaaggacagcttgatcttggggcaggggagttggattggttttcagacatgggattcttcggtgatcagattaatgacaaggctcttcctgcagctgaagttcctgagctttctgtttcgcatttaggtcatgttcattcatacaaacctatgaagtcaaatgtttcacacaagaagccgaggtttgagaccagatatgatgatgatgatgaggaacacttcattgtccctgatcttggctaaaaagctatatgtaatctatgtgtagacattcttcaatgtaaaagaacaaacaagaaacctatctgcatgtgtggagttaatgtcatatacattttagttttgtcttaagttgtgtaagatatgttgagagcttataacaaatgtctgtgtttgagttttgttcatacctcttgaacatggtctatgcttaatgctttgatgctacaaacttg

SEQ ID NO: 25125 - protein, 248 aa, Arabidopsis thaliana
  peptide (1)..(248): Ceres Seq. ID no. 12329064
MKIQCDVCEKAPATVICCADEAALCPQCDIEIHAANKLASKHQRLHLNSLSTKFPRCDICQEKAAFIFCVEDRALLCRDCDESIHVANSRSANHQRFLATGIKVALTSTICSKEIEKNQPEPSNNQQKANQIPAKSTSQQQQQPSSATPLPWAVDDFFHFSDIESTDKKGQLDLGAGELDWFSDMGFFGDQINDKALPAAEVPELSVSHLGHVHSYKPMKSNVSHKKPRFETRYDDDDEEHFIVPDLG

SEQ ID NO: 25126 - DNA, 1254 bp, Arabidopsis thaliana
  misc_feature (1)..(1254): Ceres Seq. ID no. 12384844
  misc_feature (1)..(1254): Ortholog of  Ceres SEQ ID NO 14313074 as cited in SEQ ID NO 59199
  misc_feature (1)..(1254): Ortholog of  Ceres SEQ ID NO 13655506 as cited in SEQ ID NO 64493
atttggttttgttgccccaaaatatcccaagaaaagatcaacttcttcttcttaccaaaactgtcggcgtcgtctcctctaagctcctcccattgaagcagaagaaggtcatcagcgtgaccgcctctgcgactattgcgactcctccgtggctcttgtctactgcaaagctgactccgccaagctctgcctcgcctgcgacaagcaagtccacgtcgccaaccaactcttcgccaaacacttcaggtcacttctctgcgactcctgcaacgaatctccctcttcccttttctgcgagactgaaaggtctgttctttgccagaactgcgactggcaacaccacactgcctcttcctcccttcatagccgcagaccctttgaaggatttaccggctgtccctccgtgcctgagttgctggccatcgttggcctcgatgacctcactctcgattccggattgctttgggagtcacctgagatcgttagcctcaacgaccttattgtttcgggcgggtccggtactcataacttccgggccacggatgttcctcctctgcctaagaatcgtcacgccacctgcgggaaatacaaagatgagatgatccgacagctccgtggactatccagatctgagcctggttgtctgaaatttgaaaccccagatgctgagatcgatgccgggttccaattcctagcgccggatttgttttctacatgcgagctggagagtggactgaaatggttctatcagcaagatcatgaggactttccatattgctctctgctaaagaacttgtcggagtcagatgagaaacctgagaatgtagaccgagagtcatcggtgatggttcccgtttccggctgcttaaaccgatgtgaggaagagactgtgatggttccggttatcactagtacaaggtcgatgacacatgagatcaacagtcttgagaggaactctgctctctctcgctacaaagaaaagaagaagtctcgaaggtacgagaaacacatcaggtatgaatcacgcaaggttcgtgcagaaagcaggacaagaatcaggggacgtttcgccaaggcagcagatccatgaatgatgatgaggttactttgataatcaaaaatcttttgtattaatcgaatcatatagtgtgtatgatcagataagtttttgtattctaagcttaggagttatcactgtatatcgaccacactctcaaaattgtcacttaagaatagttttttttttgttttgcc

SEQ ID NO: 25127 - protein, 199 aa, Arabidopsis thaliana
  peptide (1)..(199): Ceres Seq. ID no. 12384845
LVLLPQNIPRKDQLLLLTKTVGVVSSKLLPLKQKKVISVTASATIATPPWLLSTAKLTPPSSASPATSKSTSPTNSSPNTSGHFSATPATNLPLPFSARLKGLFFARTATGNTTLPLPPFIAADPLKDLPAVPPCLSCWPSLASMTSLSIPDCFGSHLRSLASTTLLFRAGPVLITSGPRMFLLCLRIVTPPAGNTKMR

SEQ ID NO: 25128 - protein, 163 aa, Arabidopsis thaliana
  peptide (1)..(163): Ceres Seq. ID no. 12384846
MIRQLRGLSRSEPGCLKFETPDAEIDAGFQFLAPDLFSTCELESGLKWFYQQDHEDFPYCSLLKNLSESDEKPENVDRESSVMVPVSGCLNRCEEETVMVPVITSTRSMTHEINSLERNSALSRYKEKKKSRRYEKHIRYESRKVRAESRTRIRGRFAKAADP

SEQ ID NO: 25129 - DNA, 1009 bp, Arabidopsis thaliana
  misc_feature (1)..(1009): Ceres Seq. ID no. 13488493
  misc_feature (1)..(1009): Ortholog of  Ceres SEQ ID NO 13591776 as cited in SEQ ID NO 20695
aataactcacactctctcttatctcctttcctttcattgtagttaacgaaaagattacgataatgggaacatcagctatccagcaatcctccttcgccggccaaacggctctcaagccctccaacgaactcctccgcaaggttggtgtctccggtggtggccgtgtgaccatgcgtcgtaccgtcaagtctactcctcaaagcatttggtacggaccagaccgtcccaagtacttgggaccattctcggagaacacaccgtcctacctaaccggagaataccccggagactacggctgggacaccgctggactctcggctgacccggagacattcgctaagaaccgtgagcttgaagtaatccacaacagatgggctatgttgggtgctctcggatgcacattccctgagattctctccaagaacggtgttaaattcggagaagccgtgtggttcaaggcaggctctcagattttctcagaaggaggtcttgattacctcggaaaccctaacttgatccacgcgcaaagcatcttagccatctgggctgttcaagttgtgctcatggggttcattgaaggctacagaatcggaggtggaccactcggagaaggacttgacccgctttatcccggaggtgcgttcgacccattgaacttggctgaggatccagaggctttctctgagctgaaggtgaaggagctcaagaacggtcgtcttgccatgttctctatgtttggattctttgtccaagccattgttactggtaaaggtcccattgagaacttatttgatcatttggctgatcctgtggctaacaacgcctggtcttacgctactaactttgtccccggaaagtaattatctwagattgtatttgcttccataatctctctgctttgtaaastcgtgaatgtacttattggtgttttatgatgartttggyacttaatgmbwwttattttgtgggkdcttttttttgaatcgtgatgaaagattttgtttcacag

SEQ ID NO: 25130 - protein, 265 aa, Arabidopsis thaliana
  peptide (1)..(265): Ceres Seq. ID no. 15218578
MGTSAIQQSSFAGQTALKPSNELLRKVGVSGGGRVTMRRTVKSTPQSIWYGPDRPKYLGPFSENTPSYLTGEYPGDYGWDTAGLSADPETFAKNRELEVIHNRWAMLGALGCTFPEILSKNGVKFGEAVWFKAGSQIFSEGGLDYLGNPNLIHAQSILAIWAVQVVLMGFIEGYRIGGGPLGEGLDPLYPGGAFDPLNLAEDPEAFSELKVKELKNGRLAMFSMFGFFVQAIVTGKGPIENLFDHLADPVANNAWSYATNFVPGK

SEQ ID NO: 25131 - protein, 229 aa, Arabidopsis thaliana
  peptide (1)..(229): Ceres Seq. ID no. 15218579
MRRTVKSTPQSIWYGPDRPKYLGPFSENTPSYLTGEYPGDYGWDTAGLSADPETFAKNRELEVIHNRWAMLGALGCTFPEILSKNGVKFGEAVWFKAGSQIFSEGGLDYLGNPNLIHAQSILAIWAVQVVLMGFIEGYRIGGGPLGEGLDPLYPGGAFDPLNLAEDPEAFSELKVKELKNGRLAMFSMFGFFVQAIVTGKGPIENLFDHLADPVANNAWSYATNFVPGK

SEQ ID NO: 25132 - protein, 160 aa, Arabidopsis thaliana
  peptide (1)..(160): Ceres Seq. ID no. 15218580
MLGALGCTFPEILSKNGVKFGEAVWFKAGSQIFSEGGLDYLGNPNLIHAQSILAIWAVQVVLMGFIEGYRIGGGPLGEGLDPLYPGGAFDPLNLAEDPEAFSELKVKELKNGRLAMFSMFGFFVQAIVTGKGPIENLFDHLADPVANNAWSYATNFVPGK

SEQ ID NO: 25133 - DNA, 1321 bp, Arabidopsis thaliana
  misc_feature (1)..(1321): Ceres Seq. ID no. 13490759
  misc_feature (1)..(1321): Ortholog of  Ceres SEQ ID NO 15171228 as cited in SEQ ID NO 56948
  misc_feature (1)..(1321): Ortholog of  Ceres SEQ ID NO 13654728 as cited in SEQ ID NO 62302
  misc_feature (1)..(1321): Ortholog of  Ceres SEQ ID NO 13597134 as cited in SEQ ID NO 64501
  misc_feature (1)..(1321): Ortholog of  Ceres SEQ ID NO 15174333 as cited in SEQ ID NO 0
  misc_feature (1)..(1321): Ortholog of  Ceres SEQ ID NO 15179047 as cited in SEQ ID NO 0
aggtcccacttttttcttttatttttcactcttcttcacatcaaatccgcgaccagagatttttctttcctttgatttttcgtttcgtttcgtttcaaatattgttcctcctgtgtgaaggaaaaacaatcttccatttcaatccgcgtcaacgcgattttcttcatgacgatgacaacagttaaagtgagcaatgtttctctaggagcaaccgatagagatctcaaggagttcttttccttttctggcgatattctgtaccttgagacgcagagcgagactgagcggactaaactggcatatgtcacttttaaggatctacaaggagctgaaactgcggttcttctctcgggagcaacgattgttgattcttcagtcattgtctctatggctcctgattaccaactgtcccctgaggctttagcttccttggaacccaaggacagcaataaatctcccaaggcaggtgactccgtgttgagaaaagccgaagatgttgtgagcagcatgcttgcaaagggctttatcctgggaaaagatgccatagctaaagccaaaagtgttgacgagaagcaccagctaacatctacagcatcagccaaagtcgcatcttttgacaagaaaattggtttcactgataagatcaacacaggcacggtggtagtgggagaaaaggtcagggaagttgatcagaagtaccaagtctcagagaaaaccaaatcagcaatcgctgcagcggagcagacagtgagcaatgcaggttcagctataatgaagaaccggtatgttctcacaggtgccacgtgggttactggagcattcaacaaagttgctaaagctgcagaagaagttggacaaaaggctaaagagaaagttggtatggctgaggaagaggataagaggaaagtggttgatgagtttgctagagttcacttgtctgaatcaccaaaggcagcttcatcaacgcaagaagccgaacgtgaatcaaaactctctgaatctcctgaagcaaagaaagattctgaacatcttgagccacaatcgaaaccattgcagcaacaatctcctccacctatggcttcagctcctgctccggctcaaccttgagatatgcaatcaaagacctttctgattcttgttgtaaacggtaaaacttggaactaatctctctcagattgttgaagatgaagattgaacttgttatttaggacgaagacttgtgttcttgtaacattggattcatggtcgatttggtaattagaccttaaaaagaaaacaattttgttcttttcgtttttcttaaacttatttaaaccgggct

SEQ ID NO: 25134 - protein, 313 aa, Arabidopsis thaliana
  peptide (1)..(313): Ceres Seq. ID no. 13490760
MTMTTVKVSNVSLGATDRDLKEFFSFSGDILYLETQSETERTKLAYVTFKDLQGAETAVLLSGATIVDSSVIVSMAPDYQLSPEALASLEPKDSNKSPKAGDSVLRKAEDVVSSMLAKGFILGKDAIAKAKSVDEKHQLTSTASAKVASFDKKIGFTDKINTGTVVVGEKVREVDQKYQVSEKTKSAIAAAEQTVSNAGSAIMKNRYVLTGATWVTGAFNKVAKAAEEVGQKAKEKVGMAEEEDKRKVVDEFARVHLSESPKAASSTQEAERESKLSESPEAKKDSEHLEPQSKPLQQQSPPPMASAPAPAQP

SEQ ID NO: 25135 - protein, 311 aa, Arabidopsis thaliana
  peptide (1)..(311): Ceres Seq. ID no. 13490761
MTTVKVSNVSLGATDRDLKEFFSFSGDILYLETQSETERTKLAYVTFKDLQGAETAVLLSGATIVDSSVIVSMAPDYQLSPEALASLEPKDSNKSPKAGDSVLRKAEDVVSSMLAKGFILGKDAIAKAKSVDEKHQLTSTASAKVASFDKKIGFTDKINTGTVVVGEKVREVDQKYQVSEKTKSAIAAAEQTVSNAGSAIMKNRYVLTGATWVTGAFNKVAKAAEEVGQKAKEKVGMAEEEDKRKVVDEFARVHLSESPKAASSTQEAERESKLSESPEAKKDSEHLEPQSKPLQQQSPPPMASAPAPAQP

SEQ ID NO: 25136 - protein, 239 aa, Arabidopsis thaliana
  peptide (1)..(239): Ceres Seq. ID no. 13490762
MAPDYQLSPEALASLEPKDSNKSPKAGDSVLRKAEDVVSSMLAKGFILGKDAIAKAKSVDEKHQLTSTASAKVASFDKKIGFTDKINTGTVVVGEKVREVDQKYQVSEKTKSAIAAAEQTVSNAGSAIMKNRYVLTGATWVTGAFNKVAKAAEEVGQKAKEKVGMAEEEDKRKVVDEFARVHLSESPKAASSTQEAERESKLSESPEAKKDSEHLEPQSKPLQQQSPPPMASAPAPAQP

SEQ ID NO: 25137 - DNA, 1058 bp, Arabidopsis thaliana
  misc_feature (1)..(1058): Ceres Seq. ID no. 12561501
  misc_feature (1)..(1058): Ortholog of  Ceres SEQ ID NO 14308727 as cited in SEQ ID NO 58726
  misc_feature (1)..(1058): Ortholog of  Ceres SEQ ID NO 13663517 as cited in SEQ ID NO 66850
actggtatgtctgtgtttcttcttccattttctgtttctattggaaacttctctctccaatttcgttttcttcacttctttgatcctttagctttgacaaaaccgtagtaaaggatcaaaagttatcatctttggtccatgttgtgaatcgtgctctgcttgggtcgtgactcccaaatccggatttgaaaccagcatatctgagcttaattcgagcatgcatgcgcttctttttttctgattttttttagactttggttctaaatcccttaactttggattaactgtcaatctacaattttatattaacagagatagcttagcaatggagcagtcagaagagggtcaacagcaacagcaacagggagtgatggattatgtacctcctcatgcttatcagagtgggccagtaaatgcagcttcccatatggcattccaacaagctcaccacttccaccaccaccatcagcagcaacaacagcagcagcttcagatgttctgggctaaccaaatgcaagagatcgagcataccactgatttcaagaaccacacccttcccctagcccgcatcaagaagatcatgaaagctgatgaagatgtgaggatgatctctgcggaggctcctgtgatttttgccaaggcctgtgagatgttcattttggagctcactctacgtgcttggatccacaccgaggagaacaagaggaggaccttgcagaagaacgacatcgccgctgccatttccaggaccgacgtgtttgatttccttgtggacataatcccgagggacgagctgaaagaagaaggtttaggcgtgaccaaagggaccataccatcggtggtgggttccccgccatactattacttgcaacaacaggggatgatgcaacactggccccaggagcaacaccctgatgagtcttaaaacttttcccctttcgtttgtttggttgtatcgtagtaaggtagctctgctctgctgggaaccatttctattgtgttctgtaatgacatgttagtatatccccagtctatatctatggcaatgcagtttctgt

SEQ ID NO: 25138 - protein, 199 aa, Arabidopsis thaliana
  peptide (1)..(199): Ceres Seq. ID no. 12561502
MEQSEEGQQQQQQGVMDYVPPHAYQSGPVNAASHMAFQQAHHFHHHHQQQQQQQLQMFWANQMQEIEHTTDFKNHTLPLARIKKIMKADEDVRMISAEAPVIFAKACEMFILELTLRAWIHTEENKRRTLQKNDIAAAISRTDVFDFLVDIIPRDELKEEGLGVTKGTIPSVVGSPPYYYLQQQGMMQHWPQEQHPDES

SEQ ID NO: 25139 - protein, 184 aa, Arabidopsis thaliana
  peptide (1)..(184): Ceres Seq. ID no. 12561503
MDYVPPHAYQSGPVNAASHMAFQQAHHFHHHHQQQQQQQLQMFWANQMQEIEHTTDFKNHTLPLARIKKIMKADEDVRMISAEAPVIFAKACEMFILELTLRAWIHTEENKRRTLQKNDIAAAISRTDVFDFLVDIIPRDELKEEGLGVTKGTIPSVVGSPPYYYLQQQGMMQHWPQEQHPDES

SEQ ID NO: 25140 - protein, 165 aa, Arabidopsis thaliana
  peptide (1)..(165): Ceres Seq. ID no. 12561504
MAFQQAHHFHHHHQQQQQQQLQMFWANQMQEIEHTTDFKNHTLPLARIKKIMKADEDVRMISAEAPVIFAKACEMFILELTLRAWIHTEENKRRTLQKNDIAAAISRTDVFDFLVDIIPRDELKEEGLGVTKGTIPSVVGSPPYYYLQQQGMMQHWPQEQHPDES

SEQ ID NO: 25141 - DNA, 1406 bp, Arabidopsis thaliana
  misc_feature (1)..(1406): Ceres Seq. ID no. 12338475
  misc_feature (1)..(1406): Ortholog of  Ceres SEQ ID NO 13654557 as cited in SEQ ID NO 68444
aaaaaaccctaatttctcaaagagtctaaagagacggagagtgagagaagagagaaacatttcgagacaaatggccgccgccgctgctcgtcctctcgtcaccatccaaaccttggatggtgacatttccaccgatcaatcctccaccgtcgtacttcccgacgtcatgacggcgccagttcgaccagacatcgttaacttcgttcacgcccaaatctccaacaacagccgtcagccatacgccgtatcgaagaaggccggtcaccagacctccgccgagtcctgcggaaccggacgtgccgtgtctcgtatccctcgtgttcccggtggtggtactcaccgtgctggtcaagctgcgttcggtaacatgtgtcgtggtggtcgtatgttcgctccaaccaagatctggcgccgctggcaccgtcgtgtcaatgtcaacatgaagcgtcacgcaatcgtctcagctatcgctgcaactgctgttcctgcgcttgtgatggctcgtggtcacaagatcgagaatgttcctgagatgcctcttgttgtgagtgactccgccgaagctgtggagaagacctcagctgcgatcaaggttttgaaacagatcggtgcttatgatgatgctgagaaggcaaagaacagcattggaatccgtcctggtaaaggtaaaatgaggaaccgtcgttacatttctaggaaaggtcctctggtggtttatggaactgaaggatctaagatagttaaggcgtttagaaaccttcctggtgttgagctttgtcatgtggagaggcttaatttgttgaagcttgctcctggtggtcaccttggtcggtttgtgatctggaccaagtctgcctttgagaagcttgagtctatctatggttcgtttgagaagccatcagagaagaagaaggggtatgtgcttcctcgtgcaaagatggtgaatgctgatcttgccaggattatcaattcagatgagattcagagtgttgtgaatccgatcaagaaggatgcgaagagggctgttcttaagaagaatccattgaagaatctcaatgtgatgttgaagttgaatccttatgctaagaccgcgaagaggatgtcactattagctgaagcacagagagttaaggctaagaaggagaagctcgccaagaagaggaaaaccgttaccaaggaggaggcgttggcaatcaaagcagcaggcaagtcgtggtacaagactatgatctccgacagtgattacaccgagtttgataacttcaccaaatggctcggtgctagccagtaataatctcgtctgctttggaacactttccatattttagtcaaaagattttggtttttttaatctgttttgtctttgggtgtctggatatcaagttgaattatgaacaagtttcacc

SEQ ID NO: 25142 - protein, 429 aa, Arabidopsis thaliana
  peptide (1)..(429): Ceres Seq. ID no. 12338476
KNPNFSKSLKRRRVREERNISRQMAAAAARPLVTIQTLDGDISTDQSSTVVLPDVMTAPVRPDIVNFVHAQISNNSRQPYAVSKKAGHQTSAESCGTGRAVSRIPRVPGGGTHRAGQAAFGNMCRGGRMFAPTKIWRRWHRRVNVNMKRHAIVSAIAATAVPALVMARGHKIENVPEMPLVVSDSAEAVEKTSAAIKVLKQIGAYDDAEKAKNSIGIRPGKGKMRNRRYISRKGPLVVYGTEGSKIVKAFRNLPGVELCHVERLNLLKLAPGGHLGRFVIWTKSAFEKLESIYGSFEKPSEKKKGYVLPRAKMVNADLARIINSDEIQSVVNPIKKDAKRAVLKKNPLKNLNVMLKLNPYAKTAKRMSLLAEAQRVKAKKEKLAKKRKTVTKEEALAIKAAGKSWYKTMISDSDYTEFDNFTKWLGASQ

SEQ ID NO: 25143 - protein, 406 aa, Arabidopsis thaliana
  peptide (1)..(406): Ceres Seq. ID no. 12338478
MAAAAARPLVTIQTLDGDISTDQSSTVVLPDVMTAPVRPDIVNFVHAQISNNSRQPYAVSKKAGHQTSAESCGTGRAVSRIPRVPGGGTHRAGQAAFGNMCRGGRMFAPTKIWRRWHRRVNVNMKRHAIVSAIAATAVPALVMARGHKIENVPEMPLVVSDSAEAVEKTSAAIKVLKQIGAYDDAEKAKNSIGIRPGKGKMRNRRYISRKGPLVVYGTEGSKIVKAFRNLPGVELCHVERLNLLKLAPGGHLGRFVIWTKSAFEKLESIYGSFEKPSEKKKGYVLPRAKMVNADLARIINSDEIQSVVNPIKKDAKRAVLKKNPLKNLNVMLKLNPYAKTAKRMSLLAEAQRVKAKKEKLAKKRKTVTKEEALAIKAAGKSWYKTMISDSDYTEFDNFTKWLGASQ

SEQ ID NO: 25144 - protein, 374 aa, Arabidopsis thaliana
  peptide (1)..(374): Ceres Seq. ID no. 12338479
MTAPVRPDIVNFVHAQISNNSRQPYAVSKKAGHQTSAESCGTGRAVSRIPRVPGGGTHRAGQAAFGNMCRGGRMFAPTKIWRRWHRRVNVNMKRHAIVSAIAATAVPALVMARGHKIENVPEMPLVVSDSAEAVEKTSAAIKVLKQIGAYDDAEKAKNSIGIRPGKGKMRNRRYISRKGPLVVYGTEGSKIVKAFRNLPGVELCHVERLNLLKLAPGGHLGRFVIWTKSAFEKLESIYGSFEKPSEKKKGYVLPRAKMVNADLARIINSDEIQSVVNPIKKDAKRAVLKKNPLKNLNVMLKLNPYAKTAKRMSLLAEAQRVKAKKEKLAKKRKTVTKEEALAIKAAGKSWYKTMISDSDYTEFDNFTKWLGASQ

SEQ ID NO: 25145 - DNA, 1183 bp, Arabidopsis thaliana
  misc_feature (1)..(1183): Ceres Seq. ID no. 13490825
  misc_feature (1)..(1183): Ortholog of  Ceres SEQ ID NO 14301430 as cited in SEQ ID NO 56553
  misc_feature (1)..(1183): Ortholog of  Ceres SEQ ID NO 15175700 as cited in SEQ ID NO 58584
  misc_feature (1)..(1183): Ortholog of  Ceres SEQ ID NO 13596474 as cited in SEQ ID NO 62169
  misc_feature (1)..(1183): Ortholog of  Ceres SEQ ID NO 13598714 as cited in SEQ ID NO 62656
  misc_feature (1)..(1183): Ortholog of  Ceres SEQ ID NO 13596969 as cited in SEQ ID NO 63375
  misc_feature (1)..(1183): Ortholog of  Ceres SEQ ID NO 13597519 as cited in SEQ ID NO 64759
  misc_feature (1)..(1183): Ortholog of  Ceres SEQ ID NO 13597870 as cited in SEQ ID NO 64982
  misc_feature (1)..(1183): Ortholog of  Ceres SEQ ID NO 13656123 as cited in SEQ ID NO 65212
  misc_feature (1)..(1183): Ortholog of  Ceres SEQ ID NO 13662323 as cited in SEQ ID NO 68305
agtatcatcgatcatctgtcaaaaagaggagctaataataatatggctgctttgaagatgactatctcttgtttcttgtttcttcaagtaatatattgcttgctctcttcatttgctccaacaaatgtgcaaggattgaaagttggattctacgacaaggcatgccccaaagccgagcttattgtcaaaaagtctgtcttcgaggctgtgaagaatgatcggacaattgcagctcctttgctcaggatgttcttccacgattgcttcgttaggggatgcgaagggtcggtattgctagagctaaagaacaaaaaagatgagaaaaactcaattcctaacctcacccttcgaggatttgagatcatagacaatgtcaaggcagctctagaaaaggagtgtccgggcattgtttcttgctctgatgtattggctcttgtcgctagagacgcaatggttgcgctcaatggaccgtcgtgggaggttgaaacgggacgaagagacggtctggttacaaacatcactgaggccttattaaacttaccatcaccatttaataatatcagtagccttatcactcaattccagtccaaaggcctcgacaagaaagacctcgttgtgctttcaggtgggcacacaattgggaatggacattgtccacagatcacaaaccgtctctacaacttcaccggaaaaggagatagtgacccgaacttagacacggaatacgcagtcaaactcagaggaaaatgcaagccaactgataccacaacggctctagaaatggatccaggaagctttaaaacgttcgatgaaagttacttcaagcttgtgtctcaaagaagaggattgtttcaatctgatgcagctcttttagacaatcaagaaactaagtcttatgttctcaagagtttgaatagtgatgggtctactttctttaaagactttggtgtctccatggtaaaaatgggtcggattggagttttaacgggtcaggttggggaagttcgcaagaagtgcagaatggttaattaagtatattttatatagatatgtctgtgagattgttttatgattatgtatgtgtttttccctaagaatattgtgtggagttatatgtattgtacaatggaatgttaaattgtaaaatatgtcatgttttatttatcacaaaagaaaaaattcg

SEQ ID NO: 25146 - protein, 343 aa, Arabidopsis thaliana
  peptide (1)..(343): Ceres Seq. ID no. 13490826
SIIDHLSKRGANNNMAALKMTISCFLFLQVIYCLLSSFAPTNVQGLKVGFYDKACPKAELIVKKSVFEAVKNDRTIAAPLLRMFFHDCFVRGCEGSVLLELKNKKDEKNSIPNLTLRGFEIIDNVKAALEKECPGIVSCSDVLALVARDAMVALNGPSWEVETGRRDGLVTNITEALLNLPSPFNNISSLITQFQSKGLDKKDLVVLSGGHTIGNGHCPQITNRLYNFTGKGDSDPNLDTEYAVKLRGKCKPTDTTTALEMDPGSFKTFDESYFKLVSQRRGLFQSDAALLDNQETKSYVLKSLNSDGSTFFKDFGVSMVKMGRIGVLTGQVGEVRKKCRMVN

SEQ ID NO: 25147 - protein, 329 aa, Arabidopsis thaliana
  peptide (1)..(329): Ceres Seq. ID no. 13490827
MAALKMTISCFLFLQVIYCLLSSFAPTNVQGLKVGFYDKACPKAELIVKKSVFEAVKNDRTIAAPLLRMFFHDCFVRGCEGSVLLELKNKKDEKNSIPNLTLRGFEIIDNVKAALEKECPGIVSCSDVLALVARDAMVALNGPSWEVETGRRDGLVTNITEALLNLPSPFNNISSLITQFQSKGLDKKDLVVLSGGHTIGNGHCPQITNRLYNFTGKGDSDPNLDTEYAVKLRGKCKPTDTTTALEMDPGSFKTFDESYFKLVSQRRGLFQSDAALLDNQETKSYVLKSLNSDGSTFFKDFGVSMVKMGRIGVLTGQVGEVRKKCRMVN

SEQ ID NO: 25148 - protein, 324 aa, Arabidopsis thaliana
  peptide (1)..(324): Ceres Seq. ID no. 13490828
MTISCFLFLQVIYCLLSSFAPTNVQGLKVGFYDKACPKAELIVKKSVFEAVKNDRTIAAPLLRMFFHDCFVRGCEGSVLLELKNKKDEKNSIPNLTLRGFEIIDNVKAALEKECPGIVSCSDVLALVARDAMVALNGPSWEVETGRRDGLVTNITEALLNLPSPFNNISSLITQFQSKGLDKKDLVVLSGGHTIGNGHCPQITNRLYNFTGKGDSDPNLDTEYAVKLRGKCKPTDTTTALEMDPGSFKTFDESYFKLVSQRRGLFQSDAALLDNQETKSYVLKSLNSDGSTFFKDFGVSMVKMGRIGVLTGQVGEVRKKCRMVN

SEQ ID NO: 25149 - DNA, 1483 bp, Arabidopsis thaliana
  misc_feature (1)..(1483): Ceres Seq. ID no. 12329362
  misc_feature (1)..(1483): Ortholog of  Ceres SEQ ID NO 13639243 as cited in SEQ ID NO 56820
  misc_feature (1)..(1483): Ortholog of  Ceres SEQ ID NO 13496409 as cited in SEQ ID NO 65697
caggaagggtttatagattaggtttttaagtcgcacctctctctctcactgccgcatcttttcttagggttcttgtttcgctatctcttaaacacaaacagctctgtccgaataatctctcttcaagtacctcttttttctgattctgtatatcgccatgaattactgatttccctctctataaacccatcaaagtaaaccaatttctcctgtgacttgtacctaactcgatcttaccagactggtgatggcgtctttgaaccctttcgatcttctaggagatgatgctgaggatccaagccagctcgctgtggctttgtctcagaaagtcgagaaagctgctgctgctgttcagcctcctaaggccgctaagttcccaaccaagccggctcctccttctcaagcagtgagggagtcgaggaatgctcctcaaggaggtcgtggtgggactggtggacgtggtggattttcccgtggcaggggtaatggtggatacaaccgggacaacaggaacaatgatgctcctggaaatgagaatggattttctggaggatacaggagaccttctgaagatgctgatggagcaagccgtggtgggtctgttggtggataccgtgttggcggtggtcgtgaaggacctcgccgtggtggagttgccaacggggaatctggtgatgttgaacgcccaccgaggaattatgaccgccatagcaggacaggtcatggtactggcatgaaacgtaatggtggaggtcgtggaaactggggcactactgaagatgatatccctccaacgtctgaggaacctaccacagaggttgagaagagccctgttgctgagaagcaaggaggtgaggatgaaacccctgaagcaaagaaagaactcactgcggaagagaaagcacagaaagaagctgaagaagctgaagccagggagatgactctagaagagtatgagaaaattctggaggagaagaagaaggctctgcaagccacaaaggttgaggaaaggaaagttgacaccaaagtgtttgagtccatgcaacagctctctaacaagaagaacaccgatgaagaaatcttcatcaagctgggatctgacaaggaaaaacgcaaagatgctactgagaaggccaaaaagtcgttgagcattaatgagttcttgaagccggctgatggaaagaggtacaacgggagaggtggaggctcccgcggaagaggaggtcgcggtggtcgtggtgaaggaggaaaccaaaggtatgcaaaagaagctgcagctccggcgattggagacacagctcagttcccttcgttgggctagtaaagacccctggtccttcagcctcgctatctctgtctttcgtttctctttggttgaattttgttagttttataattttttgttacactttctgaaggtcttttctgcgaaactattacgttttttaagttatgaaaaaaattattaagatatttttctctc

SEQ ID NO: 25150 - protein, 357 aa, Arabidopsis thaliana
  peptide (1)..(357): Ceres Seq. ID no. 12329363
MASLNPFDLLGDDAEDPSQLAVALSQKVEKAAAAVQPPKAAKFPTKPAPPSQAVRESRNAPQGGRGGTGGRGGFSRGRGNGGYNRDNRNNDAPGNENGFSGGYRRPSEDADGASRGGSVGGYRVGGGREGPRRGGVANGESGDVERPPRNYDRHSRTGHGTGMKRNGGGRGNWGTTEDDIPPTSEEPTTEVEKSPVAEKQGGEDETPEAKKELTAEEKAQKEAEEAEAREMTLEEYEKILEEKKKALQATKVEERKVDTKVFESMQQLSNKKNTDEEIFIKLGSDKEKRKDATEKAKKSLSINEFLKPADGKRYNGRGGGSRGRGGRGGRGEGGNQRYAKEAAAPAIGDTAQFPSLG

SEQ ID NO: 25151 - protein, 195 aa, Arabidopsis thaliana; identical to SEQ ID NO: 24160
  peptide (1)..(195): Ceres Seq. ID no. 12329364

SEQ ID NO: 25152 - DNA, 1398 bp, Arabidopsis thaliana
  misc_feature (1)..(1398): Ceres Seq. ID no. 12324536
  misc_feature (1)..(1398): Ortholog of  Ceres SEQ ID NO 13596216 as cited in SEQ ID NO 68515
atagatacgcattggttttttcttttttgaagattctcgcttcttactacatgtgtatcaatcgatctctacccagattctccggaggagctttgagtcttgtcgtatagatgcagtgaaggtcctttgttagatgggaaaacttgttcttgagttgtcaaaagagaatcagttggagactaccgattgtggagtcagtgatcacggttctccacctatcaagaatgaagaacatgaggcaccacgttacagttcagacaaagacacgggtttaccaacttgccgtgtatgccagtgtgcagaatctgatagaagaggagatgctgctttagggtttttgggaattactcctccggtttcagaacctcgtagaagcaatgcgggtgaagaaaccgttgatcagagaagctcggttgtcaaatctagcggattcatcgaactgataagtcctgatggagaagtttttgtttgtgcaaacgacgatatagaaatgggagcgtggcagcatcgagataagttgctagaacttggatgttcttgcaagaatgatctcgctttggtacactatgcttgtgcattgaaatggtttgtcaaccacggatcaactgtttgtgagatatgcggaaaaaccacggagaatataagaacagttgatttcaacaaagtggttatcgccttaaaagattacgcagcgctaagagaaagaacagcggatggagatccaaatcctgtagtggttaacaacaacaccagttcgtcagggattgatcctgatgcagttgcagccattcgaaggcaacgacttagtgagatatcgttatggtttggtcctcattgttcaaccaacaacaacaatagtagtaattccgctgctgcagggacggcttcttctcaggttacatctgaacaacctgtgggtatagtaaactttgatatcttgcctatggaaagccgtgcgactaaatgggcggtggaaggtaccggaatactacttgcaaccggattactcacagttactttggcttggctcattgctcctcgtgtcggaaagagaactgcaaagagtggtctacacatacttctaggtggtctctgtgctttaacagtagtcatcttcttcagattcgttgtgctgacaagaatcaggtacggaccagcacgttactgggcaatattgttcgccttctggtttcttgtgtttggcatttgggcttcacgttcacacgcttctcactcctccacatgataaattctccatcatccttcaagacacaaaatgtactctttttggtctctgtcaatatcatgtacgttattctctttcaagacacaaaatgtacaattaattactcttatcaaaaagaaaaaaaggggtgaaactgaatgttatcatctcac

SEQ ID NO: 25153 - protein, 370 aa, Arabidopsis thaliana
  peptide (1)..(370): Ceres Seq. ID no. 12324537
MGKLVLELSKENQLETTDCGVSDHGSPPIKNEEHEAPRYSSDKDTGLPTCRVCQCAESDRRGDAALGFLGITPPVSEPRRSNAGEETVDQRSSVVKSSGFIELISPDGEVFVCANDDIEMGAWQHRDKLLELGCSCKNDLALVHYACALKWFVNHGSTVCEICGKTTENIRTVDFNKVVIALKDYAALRERTADGDPNPVVVNNNTSSSGIDPDAVAAIRRQRLSEISLWFGPHCSTNNNNSSNSAAAGTASSQVTSEQPVGIVNFDILPMESRATKWAVEGTGILLATGLLTVTLAWLIAPRVGKRTAKSGLHILLGGLCALTVVIFFRFVVLTRIRYGPARYWAILFAFWFLVFGIWASRSHASHSST

SEQ ID NO: 25154 - protein, 251 aa, Arabidopsis thaliana
  peptide (1)..(251): Ceres Seq. ID no. 12324538
MGAWQHRDKLLELGCSCKNDLALVHYACALKWFVNHGSTVCEICGKTTENIRTVDFNKVVIALKDYAALRERTADGDPNPVVVNNNTSSSGIDPDAVAAIRRQRLSEISLWFGPHCSTNNNNSSNSAAAGTASSQVTSEQPVGIVNFDILPMESRATKWAVEGTGILLATGLLTVTLAWLIAPRVGKRTAKSGLHILLGGLCALTVVIFFRFVVLTRIRYGPARYWAILFAFWFLVFGIWASRSHASHSST

SEQ ID NO: 25155 - DNA, 1253 bp, Arabidopsis thaliana
  misc_feature (1)..(1253): Ceres Seq. ID no. 12483453
  misc_feature (1)..(1253): Ortholog of  Ceres SEQ ID NO 13495070 as cited in SEQ ID NO 53216
  misc_feature (1)..(1253): Ortholog of  Ceres SEQ ID NO 13661333 as cited in SEQ ID NO 61620
  misc_feature (1)..(1253): Ortholog of  Ceres SEQ ID NO 13596812 as cited in SEQ ID NO 62283
  misc_feature (1)..(1253): Ortholog of  Ceres SEQ ID NO 13623021 as cited in SEQ ID NO 0
gatttagccatggtgagctcaattttctcttgtttctgttttaagtttttcgattttgaagctttcttctcgaaaatttcgattgcctgctagtcgatttcgagttcaaatccgtttgcttctcttttggataacgattctcgctcgtttagatagatctggagatgatttcagatactcgatctttggtagttgtagtgtgtgatcggattagagatccgattaaagaactcgtaactttgttgttctgcttcttcgctagtttatctgaaatcaggaagaatctgctgtttttcacttcaagttcaaatcaagtgttaaattctacgaatttttgactttttcatcagtgtttgtcaattgttcgatctatgttgtgcttcttgcctcttgatgtgtcaaaattgaagtcaaaatcgttctacaaagttgtgaggagctacttagcttctcttccttgtgatgttaacaatgttagagatgatgataatattatccaatttctgtgttaagttgtgatctttgttttagaaaatgtgtttttgaagagatgtgcatcttctcagtgttttgttatgtgtattgatatgataacaggcaaacgcggcatcgggaatggctgtgcatgatgattgcaagctgaaatttatggaactgaaggcgaaaagaacattccgtaccatagtctacaagattgaggataagcaagtgattgtagagaaactcggtgaacctgaacaatcatatgatgactttgcagctagtcttccagctgatgattgccgatattgcatttacgatttcgactttgtcactgcggagaactgccagaagagcaagatcttcttcattgcatggtctccggacactgccaaagtgagagacaagatgatttacgcgagctctaaagataggttcaagagagaactagatggaattcaagtggaacttcaagctactgatccaacagaaatgggtcttgatgttttcaaaagccgcaccaactaagtaaaacaaaaccctgtaagggcatttgaataagtttggtttctggagtgaatatgtttcctctgactgttatgaaaactttttaacaccttcaacttcattctacttggtattattttatgtctttgatgtgttatgtgtgccttgtgatggttttcaattagttttacatgtacaatacttgaaatcagattgttgctaggcttcaagccttgtctcagttatctatctgataatttattcgc

SEQ ID NO: 25156 - protein, 130 aa, Arabidopsis thaliana
  peptide (1)..(130): Ceres Seq. ID no. 12483454
MAVHDDCKLKFMELKAKRTFRTIVYKIEDKQVIVEKLGEPEQSYDDFAASLPADDCRYCIYDFDFVTAENCQKSKIFFIAWSPDTAKVRDKMIYASSKDRFKRELDGIQVELQATDPTEMGLDVFKSRTN

SEQ ID NO: 25157 - protein, 119 aa, Arabidopsis thaliana
  peptide (1)..(119): Ceres Seq. ID no. 12483455
MELKAKRTFRTIVYKIEDKQVIVEKLGEPEQSYDDFAASLPADDCRYCIYDFDFVTAENCQKSKIFFIAWSPDTAKVRDKMIYASSKDRFKRELDGIQVELQATDPTEMGLDVFKSRTN

SEQ ID NO: 25158 - DNA, 1245 bp, Arabidopsis thaliana
  misc_feature (1)..(1245): Ceres Seq. ID no. 13490807
  misc_feature (1)..(1245): Ortholog of  Ceres SEQ ID NO 13594727 as cited in SEQ ID NO 52169
  misc_feature (1)..(1245): Ortholog of  Ceres SEQ ID NO 14301430 as cited in SEQ ID NO 56553
  misc_feature (1)..(1245): Ortholog of  Ceres SEQ ID NO 13596474 as cited in SEQ ID NO 62169
  misc_feature (1)..(1245): Ortholog of  Ceres SEQ ID NO 13596969 as cited in SEQ ID NO 63375
  misc_feature (1)..(1245): Ortholog of  Ceres SEQ ID NO 14302240 as cited in SEQ ID NO 64162
  misc_feature (1)..(1245): Ortholog of  Ceres SEQ ID NO 13584480 as cited in SEQ ID NO 64751
  misc_feature (1)..(1245): Ortholog of  Ceres SEQ ID NO 13597519 as cited in SEQ ID NO 64759
  misc_feature (1)..(1245): Ortholog of  Ceres SEQ ID NO 15170183 as cited in SEQ ID NO 65667
  misc_feature (1)..(1245): Ortholog of  Ceres SEQ ID NO 13595926 as cited in SEQ ID NO 67778
  misc_feature (1)..(1245): Ortholog of  Ceres SEQ ID NO 13596362 as cited in SEQ ID NO 67877
aagaaaaggcagagaagagagaggctctgataaaaaaaaaaacaaaaaaaaatgacaaaggcttattcaacacgtgtcctcacgtttctgatattgatctcgctaatggcggtgacactgaacctttttcccacggtagaggcaaagaagcggagtagagatgctcctatagtgaaaggtctctcatggaacttttaccagaaagcatgtccgaaagtcgaaaacatcatcagaaaagagctcaagaaagtcttcaagagagatattggtttagccgcagccatccttcgtatacatttccatgattgctttgttcagggatgtgaagcatcagtgctgctagctggatcagccagtggaccaggagaacaatcatcaatcccaaatctgacactacgtcaacaagcctttgtcgtcattaataaccttcgtgccctcgtccaaaagaagtgcggtcaagtcgtctcttgctcagatatcctcgctctcgccgctcgcgattccgtcgtcctatcaggagggccagactatgctgtcccacttggccgacgtgactctctagcgttcgcgagccaggaaacgacgttaaataacttaccaccaccgttcttcaacgcgagccagctcatcgccgacttcgccaacagaaacctcaacatcaccgacttagtagcactttccggtggtcacaccatcggaatcgcgcattgtccgtctttcacagaccgactctacccgaaccaagacccaaccatgaaccagttcttcgccaacagcctcaaacgcacttgtcccaccgcaaactcgagcaacacgcaagtgaatgacataaggagtcctgacgtgttcgacaacaagtactacgttgatctcatgaaccgacaagggctattcacttctgaccaggatctcttcgtggataagaggacacgtggcattgtggaaagctttgcgatcgaccagcagctgttttttgattattttactgtggcgatgatcaagatgggtcagatgagtgtcttaactggaacacaaggagagattcgttccaattgttcagccagaaacacccaaagtttcatgtccgttttggaagaaggcatagaggaagctatttccatgatctaaataaccataaatctcgacctttcctttgtcaactctgtttttatttagttcatgcacttgtggttgggttgtcgaatgcgtaaaactatctgataaataagaacgtcgcttcatctt

SEQ ID NO: 25159 - protein, 358 aa, Arabidopsis thaliana
  peptide (1)..(358): Ceres Seq. ID no. 13490808
MTKAYSTRVLTFLILISLMAVTLNLFPTVEAKKRSRDAPIVKGLSWNFYQKACPKVENIIRKELKKVFKRDIGLAAAILRIHFHDCFVQGCEASVLLAGSASGPGEQSSIPNLTLRQQAFVVINNLRALVQKKCGQVVSCSDILALAARDSVVLSGGPDYAVPLGRRDSLAFASQETTLNNLPPPFFNASQLIADFANRNLNITDLVALSGGHTIGIAHCPSFTDRLYPNQDPTMNQFFANSLKRTCPTANSSNTQVNDIRSPDVFDNKYYVDLMNRQGLFTSDQDLFVDKRTRGIVESFAIDQQLFFDYFTVAMIKMGQMSVLTGTQGEIRSNCSARNTQSFMSVLEEGIEEAISMI

SEQ ID NO: 25160 - protein, 340 aa, Arabidopsis thaliana
  peptide (1)..(340): Ceres Seq. ID no. 13490809
MAVTLNLFPTVEAKKRSRDAPIVKGLSWNFYQKACPKVENIIRKELKKVFKRDIGLAAAILRIHFHDCFVQGCEASVLLAGSASGPGEQSSIPNLTLRQQAFVVINNLRALVQKKCGQVVSCSDILALAARDSVVLSGGPDYAVPLGRRDSLAFASQETTLNNLPPPFFNASQLIADFANRNLNITDLVALSGGHTIGIAHCPSFTDRLYPNQDPTMNQFFANSLKRTCPTANSSNTQVNDIRSPDVFDNKYYVDLMNRQGLFTSDQDLFVDKRTRGIVESFAIDQQLFFDYFTVAMIKMGQMSVLTGTQGEIRSNCSARNTQSFMSVLEEGIEEAISMI

SEQ ID NO: 25161 - DNA, 1716 bp, Arabidopsis thaliana
  misc_feature (1)..(1716): Ceres Seq. ID no. 12337410
  misc_feature (1)..(1716): Ortholog of  Ceres SEQ ID NO 14311535 as cited in SEQ ID NO 51559
  misc_feature (1)..(1716): Ortholog of  Ceres SEQ ID NO 15176200 as cited in SEQ ID NO 55188
accatatacacaattcagtatttgacttcacagagatagagagagagatggcgacggaaacggaagttgtggctccggtaagcaacggcggaggcaaaggatgttgcaagtacggtggtcctggttacgcgacgcctctcgccgctatgtctggtccatcagagaaacttatctacgtcaccgccgtctacaccggaactggaatagataaaccggactatttggcgacggtggatgtagatccaagctcgccttcgtattcaagtgttattcatagattaccaatgccttttgttggtgatgagcttcatcattctggttggaactcttgtagttcttgccatggtgatgcttctgttgatagacgttatctcgtgttaccgtctcttatatctggtcgcatttatgcgattgatactaaggaaaacccgagggctccgtctttgtataagtatgttgatcctaaagagattgctgataagactggattggcgtttcctcacacggctcattgcctcgccacgggcgagatcttggtgtcctgtcttggagatgaagaggggaatgctaaggggaatgggtttcttcttcttgattctgattttaacatcaagaataggtgggagaaaccaggacatagtcctttgtatgggtatgatttttggtaccaacctcggcacaagaccatgatcagtacatcttggggagcacctaaagccttttcgaaaggtttcaatcttcagcatgttgctgatggcttgtatggaagtcatctacatgtttatagttggccaggaggtgaaatgaaacaattaattgaccttggaccgactggtctcttacctttggagattagattcttgcatgatccgtctaaagatacagggtttgttgggagtgccttgtcaagtaatatgataagatttttcaagaacagtgatgaaacatggagccatgaggtggttatatcagttaaacctctgaaagtagaaaactggatacttccagaaatgccggggcttatcaccgacttcttgatctccctcgatgaccgattcatttactttgtgaactggctccatggagacattcgtcagtacaacatagaggaccctaaaacccctgtcttaacaggacaaatttgggttggaggattactacaaaagggcagtcctgttaaggcggttggagaagacggcaacactttccaattcgaggttcctcagatcaaggggaactctctacgaggtggacctcaaatgattcagctgagcctcgatgggaaaagattgtatgcaacaaactcgctgtttagcgcatgggatcgtcagttttatcctgaaatcatggagaaaggctcacacataattcagattgatgttgatacagaaaaaggtggtctcaccataaaccctgatttctttgtggactttggtgatgaaccagacggtccttcactagcccacgagatgagatatccaggtggagactgcacttccgatatctggatttgaatttggctttgtttagtgtgtgttttgtgttaagtttaaattgagttttattatttgttgtgtgtttagtagagttgaataaaaagggagtaagatgacccagacaattaacacttgtttgtacattttgactcctatgtgtcttatgtaataaaactttctacaattccacttaacacttggtttttctcttttgttttcc

SEQ ID NO: 25162 - protein, 503 aa, Arabidopsis thaliana
  peptide (1)..(503): Ceres Seq. ID no. 12337411
HIHNSVFDFTEIEREMATETEVVAPVSNGGGKGCCKYGGPGYATPLAAMSGPSEKLIYVTAVYTGTGIDKPDYLATVDVDPSSPSYSSVIHRLPMPFVGDELHHSGWNSCSSCHGDASVDRRYLVLPSLISGRIYAIDTKENPRAPSLYKYVDPKEIADKTGLAFPHTAHCLATGEILVSCLGDEEGNAKGNGFLLLDSDFNIKNRWEKPGHSPLYGYDFWYQPRHKTMISTSWGAPKAFSKGFNLQHVADGLYGSHLHVYSWPGGEMKQLIDLGPTGLLPLEIRFLHDPSKDTGFVGSALSSNMIRFFKNSDETWSHEVVISVKPLKVENWILPEMPGLITDFLISLDDRFIYFVNWLHGDIRQYNIEDPKTPVLTGQIWVGGLLQKGSPVKAVGEDGNTFQFEVPQIKGNSLRGGPQMIQLSLDGKRLYATNSLFSAWDRQFYPEIMEKGSHIIQIDVDTEKGGLTINPDFFVDFGDEPDGPSLAHEMRYPGGDCTSDIWI

SEQ ID NO: 25163 - protein, 488 aa, Arabidopsis thaliana
  peptide (1)..(488): Ceres Seq. ID no. 12337412
MATETEVVAPVSNGGGKGCCKYGGPGYATPLAAMSGPSEKLIYVTAVYTGTGIDKPDYLATVDVDPSSPSYSSVIHRLPMPFVGDELHHSGWNSCSSCHGDASVDRRYLVLPSLISGRIYAIDTKENPRAPSLYKYVDPKEIADKTGLAFPHTAHCLATGEILVSCLGDEEGNAKGNGFLLLDSDFNIKNRWEKPGHSPLYGYDFWYQPRHKTMISTSWGAPKAFSKGFNLQHVADGLYGSHLHVYSWPGGEMKQLIDLGPTGLLPLEIRFLHDPSKDTGFVGSALSSNMIRFFKNSDETWSHEVVISVKPLKVENWILPEMPGLITDFLISLDDRFIYFVNWLHGDIRQYNIEDPKTPVLTGQIWVGGLLQKGSPVKAVGEDGNTFQFEVPQIKGNSLRGGPQMIQLSLDGKRLYATNSLFSAWDRQFYPEIMEKGSHIIQIDVDTEKGGLTINPDFFVDFGDEPDGPSLAHEMRYPGGDCTSDIWI

SEQ ID NO: 25164 - protein, 455 aa, Arabidopsis thaliana
  peptide (1)..(455): Ceres Seq. ID no. 12337413
MSGPSEKLIYVTAVYTGTGIDKPDYLATVDVDPSSPSYSSVIHRLPMPFVGDELHHSGWNSCSSCHGDASVDRRYLVLPSLISGRIYAIDTKENPRAPSLYKYVDPKEIADKTGLAFPHTAHCLATGEILVSCLGDEEGNAKGNGFLLLDSDFNIKNRWEKPGHSPLYGYDFWYQPRHKTMISTSWGAPKAFSKGFNLQHVADGLYGSHLHVYSWPGGEMKQLIDLGPTGLLPLEIRFLHDPSKDTGFVGSALSSNMIRFFKNSDETWSHEVVISVKPLKVENWILPEMPGLITDFLISLDDRFIYFVNWLHGDIRQYNIEDPKTPVLTGQIWVGGLLQKGSPVKAVGEDGNTFQFEVPQIKGNSLRGGPQMIQLSLDGKRLYATNSLFSAWDRQFYPEIMEKGSHIIQIDVDTEKGGLTINPDFFVDFGDEPDGPSLAHEMRYPGGDCTSDIWI

SEQ ID NO: 25165 - DNA, 636 bp, Arabidopsis thaliana; identical to SEQ ID NO: 22820
  misc_feature (1)..(636): Ceres Seq. ID no. 12562389
  misc_feature (1)..(636): Ortholog of  Ceres SEQ ID NO 12556889 as cited in SEQ ID NO 125
  misc_feature (1)..(636): Ortholog of  Ceres SEQ ID NO 15172982 as cited in SEQ ID NO 51725
  misc_feature (1)..(636): Ortholog of  Ceres SEQ ID NO 13598188 as cited in SEQ ID NO 61498

SEQ ID NO: 25166 - protein, 140 aa, Arabidopsis thaliana; identical to SEQ ID NO: 22821
  peptide (1)..(140): Ceres Seq. ID no. 12562390

SEQ ID NO: 25167 - DNA, 991 bp, Arabidopsis thaliana
  misc_feature (1)..(991): Ceres Seq. ID no. 13491383
  misc_feature (1)..(991): Ortholog of  Ceres SEQ ID NO 14314442 as cited in SEQ ID NO 52358
  misc_feature (1)..(991): Ortholog of  Ceres SEQ ID NO 12610442 as cited in SEQ ID NO 56281
  misc_feature (1)..(991): Ortholog of  Ceres SEQ ID NO 12610713 as cited in SEQ ID NO 56591
  misc_feature (1)..(991): Ortholog of  Ceres SEQ ID NO 12587345 as cited in SEQ ID NO 62844
  misc_feature (1)..(991): Ortholog of  Ceres SEQ ID NO 13597357 as cited in SEQ ID NO 68961
  misc_feature (1)..(991): Ortholog of  Ceres SEQ ID NO 13587656 as cited in SEQ ID NO 0
  misc_feature (1)..(991): Ortholog of  Ceres SEQ ID NO 14309353 as cited in SEQ ID NO 0
  misc_feature (1)..(991): Ortholog of  Ceres SEQ ID NO 15177686 as cited in SEQ ID NO 0
catttactttaccattttgatctgttgctctgtttcactgtgcgtgatcgggaagaagaagaaaatgttggcgattttcgacaagaacgtggcgaaaacacccgaggctcttcagggtcaagagggtggatcggtttgtgctcttaaagataggttcttgccgaaccatttctcctctgtttatcctggtgctgtcaccatcaatctcggatcttctggtttcattgcttgctctctcgagaaacagaaccctcttcttcccagattgtttgctgtggtggatgatatgttctgcatattccaaggacatatagagaacgttccaattcttaagcaacaatatggactaaccaaaacagctacagaggttaccattgtgattgaagcctacagaactctaagagatcgtggtccgtattcagctgaacaagttgttagagattttcaaggcaaattcgggtttatgctctatgactgctccacacaaaatgtcttccttgccggggatgtagatgggagtgttcctctctactggggaaccgatgctgaaggacatcttgttgtttctgatgatgttgagactgtcaagaagggttgtggtaaatcctttgcgccattccctaaaggatgtttctttacctcatctggaggtttgaggagctatgagcatccatcaaatgagttaaagccggtaccaagggtagacagttcgggtgaggtttgcggtgtaacgtttaaagtggattctgaggccaagaaagaagcgatgcctagggttgggagtgttcagaattggtctaaacaaatctgaactagctgaaaaaggcttgttttattttttacttgttggactcctgtggctgtgttccacagatttactcttttcctgatattctcactgtagccattctaaggactaatggtgctcttattgctattgtacctgtacttggtaacaaggaagctaagaataaaatattttataaacgtc

SEQ ID NO: 25168 - protein, 269 aa, Arabidopsis thaliana
  peptide (1)..(269): Ceres Seq. ID no. 13491384
IYFTILICCSVSLCVIGKKKKMLAIFDKNVAKTPEALQGQEGGSVCALKDRFLPNHFSSVYPGAVTINLGSSGFIACSLEKQNPLLPRLFAVVDDMFCIFQGHIENVPILKQQYGLTKTATEVTIVIEAYRTLRDRGPYSAEQVVRDFQGKFGFMLYDCSTQNVFLAGDVDGSVPLYWGTDAEGHLVVSDDVETVKKGCGKSFAPFPKGCFFTSSGGLRSYEHPSNELKPVPRVDSSGEVCGVTFKVDSEAKKEAMPRVGSVQNWSKQI

SEQ ID NO: 25169 - protein, 248 aa, Arabidopsis thaliana
  peptide (1)..(248): Ceres Seq. ID no. 13491385
MLAIFDKNVAKTPEALQGQEGGSVCALKDRFLPNHFSSVYPGAVTINLGSSGFIACSLEKQNPLLPRLFAVVDDMFCIFQGHIENVPILKQQYGLTKTATEVTIVIEAYRTLRDRGPYSAEQVVRDFQGKFGFMLYDCSTQNVFLAGDVDGSVPLYWGTDAEGHLVVSDDVETVKKGCGKSFAPFPKGCFFTSSGGLRSYEHPSNELKPVPRVDSSGEVCGVTFKVDSEAKKEAMPRVGSVQNWSKQI

SEQ ID NO: 25170 - protein, 174 aa, Arabidopsis thaliana
  peptide (1)..(174): Ceres Seq. ID no. 13491386
MFCIFQGHIENVPILKQQYGLTKTATEVTIVIEAYRTLRDRGPYSAEQVVRDFQGKFGFMLYDCSTQNVFLAGDVDGSVPLYWGTDAEGHLVVSDDVETVKKGCGKSFAPFPKGCFFTSSGGLRSYEHPSNELKPVPRVDSSGEVCGVTFKVDSEAKKEAMPRVGSVQNWSKQI

SEQ ID NO: 25171 - DNA, 1177 bp, Arabidopsis thaliana
  misc_feature (1)..(1177): Ceres Seq. ID no. 12322062
  misc_feature (1)..(1177): Ortholog of  Ceres SEQ ID NO 13582388 as cited in SEQ ID NO 56812
  misc_feature (1)..(1177): Ortholog of  Ceres SEQ ID NO 14305353 as cited in SEQ ID NO 57710
aattttaataatcttgaatttagagaaaaagggtaaagcttgtcatcaacttattcgacagtttatataaaaaccgagtcatctttcatcggaagtacttccctccggcccattttctgacgccggcgatactctctttcacctctttctttctttcttctctgtcttttttgctttgtttctctccagtgaggaaaatggcggagtcattacgattctccgactgaaaaaagaagttaaaacctttgaaagaagaggaagaatttgaaagaaaggaaaatgctttgccggaaaaactcaagcttggtggacagaggaaatgttccggtttatctgaatgtctacgatcttactcccattaatggctatgcttactggcttggtcttggcgtttaccattctggtgttgaagttcatggtatagagtatgcttatggagctcatgaatatccaagcactgggatattcgaaggggagccgaagcaatgtgaaggctttacgtttaggaaatcgattttgattggtaaaacggatcttggtcctttggaagtcagagctactatggagcaacttgctgacaactacaaaggaagttcttacaatcttatcaccaagaactgcaaccatttctgcgatgaaacttgtattaagttaactgggaatccaattcctagttgggttaaccgccttgcccgaatcggcttcatgtgcaactgtgtgcttcctgcgactataaacgcgaccaggtttggaaacaacagagtcaatcaagacaaatcatgtgaagcagaaaatgagaagaagaaactgacgagtgtatcgagcagagagaggtctaccattgctactccttcgtcgtcttcttcgtctccttcagttcaagttcgcggtcgaagcaggaaaaggcgtcctcgtgctctgcaaccttcatcgccattgactctcggatcttcctccgtttgactataagtaaaatgaaatttggctttgtttggtaaatccatttttgatctctcaactagagagaccactctgtatttcttctattaattgcgagtgtgctctgtaatcttgttaatatgcaaacctttttcttttcttttttttgtaatcttatttgcattttcgtttcagattttggactttatttttacagtcagatatcaaattctcggtc

SEQ ID NO: 25172 - protein, 227 aa, Arabidopsis thaliana
  peptide (1)..(227): Ceres Seq. ID no. 12322063
MLCRKNSSLVDRGNVPVYLNVYDLTPINGYAYWLGLGVYHSGVEVHGIEYAYGAHEYPSTGIFEGEPKQCEGFTFRKSILIGKTDLGPLEVRATMEQLADNYKGSSYNLITKNCNHFCDETCIKLTGNPIPSWVNRLARIGFMCNCVLPATINATRFGNNRVNQDKSCEAENEKKKLTSVSSRERSTIATPSSSSSSPSVQVRGRSRKRRPRALQPSSPLTLGSSSV

SEQ ID NO: 25173 - protein, 133 aa, Arabidopsis thaliana
  peptide (1)..(133): Ceres Seq. ID no. 12322064
MEQLADNYKGSSYNLITKNCNHFCDETCIKLTGNPIPSWVNRLARIGFMCNCVLPATINATRFGNNRVNQDKSCEAENEKKKLTSVSSRERSTIATPSSSSSSPSVQVRGRSRKRRPRALQPSSPLTLGSSSV

SEQ ID NO: 25174 - DNA, 1062 bp, Arabidopsis thaliana
  misc_feature (1)..(1062): Ceres Seq. ID no. 12422467
  misc_feature (1)..(1062): Ortholog of  Ceres SEQ ID NO 13638532 as cited in SEQ ID NO 51186
  misc_feature (1)..(1062): Ortholog of  Ceres SEQ ID NO 14306733 as cited in SEQ ID NO 53866
  misc_feature (1)..(1062): Ortholog of  Ceres SEQ ID NO 13596350 as cited in SEQ ID NO 68204
agaagtttgggattttattcgttattagtgtggtaagaaagaaaaccctaaaccaccggaaatcgatttgtttggaagatggatatcgagcagaagcaagccgagatcattgatcagctcgtgaagcgagcttctacttgcaaatccgaggctctgggcccgctcatcatcgaagccacatcgcatccttctctcttcgccttctccgagattttggctctacccaatgttgcccagcttgaaggaaccacagattctgtgtacctggatctactacgcttgtttgcccatggcacctggggagactacaaatgcaatgccacccgtcttccgcacttgtcccctgaccaaattcttaagcttaagcagctcactgtcctcacccttgctgagtctaacaaggtattgccctatgatacactaatggtcgagttagatgtttccaatgttcgcgaactcgaggactttcttatcaatgaatgcatgtatgcgggtatagttaggggaaaactggatcagttaaaaagatgttttgaggttccgtttgcagctggtagggatctaaggccaggtcaactagggaatatgttacacacattgtccaactggttgaacacgtcagagaatctgctcatttcaattcaagacaagatcaaatgggcggacaatatgagtgagatggacaaaaaacatcgtaaggaagcagaagaaggggtggaagaagtgaagaagtctctgtccatgaagggggatgttgacatcagagggaataaggagatgtttggggaaccaagtggagtgatggactacgaagaagatgggatccgaccaaagaggaggaggcatcctgtaacaaggtagaggagcaagagagagcaaatggtcagtgcggattgacattccatttaccgagagtagattatgattatttggttgcggattttcaacttgtataagatcctctgttctctctcacaataaccccttgttatgtttgatttccctcattagcaaatttggtgtctctctgcccattaaaagaaaaatggctttgaatttagt

SEQ ID NO: 25175 - protein, 260 aa, Arabidopsis thaliana
  peptide (1)..(260): Ceres Seq. ID no. 12422468
MDIEQKQAEIIDQLVKRASTCKSEALGPLIIEATSHPSLFAFSEILALPNVAQLEGTTDSVYLDLLRLFAHGTWGDYKCNATRLPHLSPDQILKLKQLTVLTLAESNKVLPYDTLMVELDVSNVRELEDFLINECMYAGIVRGKLDQLKRCFEVPFAAGRDLRPGQLGNMLHTLSNWLNTSENLLISIQDKIKWADNMSEMDKKHRKEAEEGVEEVKKSLSMKGDVDIRGNKEMFGEPSGVMDYEEDGIRPKRRRHPVTR

SEQ ID NO: 25176 - protein, 145 aa, Arabidopsis thaliana
  peptide (1)..(145): Ceres Seq. ID no. 12422469
MVELDVSNVRELEDFLINECMYAGIVRGKLDQLKRCFEVPFAAGRDLRPGQLGNMLHTLSNWLNTSENLLISIQDKIKWADNMSEMDKKHRKEAEEGVEEVKKSLSMKGDVDIRGNKEMFGEPSGVMDYEEDGIRPKRRRHPVTR

SEQ ID NO: 25177 - DNA, 2006 bp, Arabidopsis thaliana
  misc_feature (1)..(2006): Ceres Seq. ID no. 12371524
  misc_feature (1)..(2006): Ortholog of  Ceres SEQ ID NO 13594037 as cited in SEQ ID NO 55666
  misc_feature (1)..(2006): Ortholog of  Ceres SEQ ID NO 13657707 as cited in SEQ ID NO 66407
actggcctaagtcattcaacaatttggctttaatctaataaagcctctccctctccgattaaccttaataaatccggagggatcggagagaaaaaagaaccaaaaaaaaaaaaaaacagaaaaaaaaaaatgattggaaaagttgtggtctcggtggcctccatcctcttaatagtcggagttgccataggagtcgttgccttcataaacaaaaatggcgatgctaatctgtctccccaaatgaaagcggttcaaggaatttgccagtcgacatccgacaaagcctcatgtgtcaaaactctcgagccggtcaagagcgaggacccaaacaagctgatcaaggctttcatgctcgctacaaaagacgaattaaccaaatcgtctaacttcacgggtcaaaccgaagtaaacatgggctcgagcatctcgccaaacaacaaagccgttcttgattactgcaagagagttttcatgtacgctcttgaggatctcgctaccattattgaagaaatgggtgaagatcttagccagatcgggagcaaaatcgaccagctcaaacaatggttaatcggtgtttacaattaccaaactgattgtcttgacgatatcgaagaagatgatttaagaaaggcgattggtgagggcattgcaaactccaagattctcactaccaacgctattgacatcttccacactgtcgttagcgccatggccaagattaacaacaaggttgacgacttgaagaacatgacaggcggaatccccactcccggagcccctcctgttgttgatgaatctcccgtggccgacccagatggtcctgctcgtcgtcttcttgaagacattgacgagaccggaatcccaacatgggtttcaggtgctgacaggaagctcatggctaaggctggacgtggccgtagaggcggccgcggaggcggtgctagggtcagaacgaactttgtggtggctaaggatggaagcggacagtttaagacggttcaacaagccgttgatgcttgtcctgagaataaccgaggccgatgcatcatctacatcaaggccggtctctacagagagcaagtaatcatccctaagaagaagaacaacatcttcatgtttggagatggtgcaagaaagaccgtcatttcttacaacagaagtgttgctctcagccgtggaaccaccacatccctcagtgccacagttcaggttgaatcggaaggattcatggcgaaatggatgggattcaagaacaccgccggtccaatgggacaccaagccgcggctatccgagtgaacggagaccgtgccgtgatcttcaactgcagattcgacggttatcaagacacattgtacgttaacaacggtcgtcagttctacagaaactgtgtggtctcgggaacagtagacttcatcttcggcaaatccgcaaccgtgatccaaaacacactaattgttgtccgtaaaggaagcaagggacaatacaacacggtcacagccgatggaaacgaattgggcttagggatgaaaattggtatcgtcctccaaaactgccgcatcgtgcccgacaggaaactaacgccagagagacttacggtggcgacatacttgggaaggccgtggaagaaattctcgaccaccgtgataatgagcaccgagatgggagatttgattagaccagaagggtggaagatttgggatggggaaagtttccacaagtcatgtaggtacgttgagtacaacaaccgtggaccaggagcattcgctaacagaagagttaactgggctaaggttgccaggtctgcagctgaggtcaatggcttcacagctgctaactggttaggtcctattaactggattcaagaagccaatgttcctgtcacaattggattataatttataaagcgtatatgaaaattattttagtttttaagtatatgaaaattggtgtatgaaattggtttatgaaaactttttaagaaagtctataatgtttttcctctgtc

SEQ ID NO: 25178 - protein, 588 aa, Arabidopsis thaliana
  peptide (1)..(588): Ceres Seq. ID no. 12371525
MIGKVVVSVASILLIVGVAIGVVAFINKNGDANLSPQMKAVQGICQSTSDKASCVKTLEPVKSEDPNKLIKAFMLATKDELTKSSNFTGQTEVNMGSSISPNNKAVLDYCKRVFMYALEDLATIIEEMGEDLSQIGSKIDQLKQWLIGVYNYQTDCLDDIEEDDLRKAIGEGIANSKILTTNAIDIFHTVVSAMAKINNKVDDLKNMTGGIPTPGAPPVVDESPVADPDGPARRLLEDIDETGIPTWVSGADRKLMAKAGRGRRGGRGGGARVRTNFVVAKDGSGQFKTVQQAVDACPENNRGRCIIYIKAGLYREQVIIPKKKNNIFMFGDGARKTVISYNRSVALSRGTTTSLSATVQVESEGFMAKWMGFKNTAGPMGHQAAAIRVNGDRAVIFNCRFDGYQDTLYVNNGRQFYRNCVVSGTVDFIFGKSATVIQNTLIVVRKGSKGQYNTVTADGNELGLGMKIGIVLQNCRIVPDRKLTPERLTVATYLGRPWKKFSTTVIMSTEMGDLIRPEGWKIWDGESFHKSCRYVEYNNRGPGAFANRRVNWAKVARSAAEVNGFTAANWLGPINWIQEANVPVTIGL

SEQ ID NO: 25179 - protein, 551 aa, Arabidopsis thaliana
  peptide (1)..(551): Ceres Seq. ID no. 12371526
MKAVQGICQSTSDKASCVKTLEPVKSEDPNKLIKAFMLATKDELTKSSNFTGQTEVNMGSSISPNNKAVLDYCKRVFMYALEDLATIIEEMGEDLSQIGSKIDQLKQWLIGVYNYQTDCLDDIEEDDLRKAIGEGIANSKILTTNAIDIFHTVVSAMAKINNKVDDLKNMTGGIPTPGAPPVVDESPVADPDGPARRLLEDIDETGIPTWVSGADRKLMAKAGRGRRGGRGGGARVRTNFVVAKDGSGQFKTVQQAVDACPENNRGRCIIYIKAGLYREQVIIPKKKNNIFMFGDGARKTVISYNRSVALSRGTTTSLSATVQVESEGFMAKWMGFKNTAGPMGHQAAAIRVNGDRAVIFNCRFDGYQDTLYVNNGRQFYRNCVVSGTVDFIFGKSATVIQNTLIVVRKGSKGQYNTVTADGNELGLGMKIGIVLQNCRIVPDRKLTPERLTVATYLGRPWKKFSTTVIMSTEMGDLIRPEGWKIWDGESFHKSCRYVEYNNRGPGAFANRRVNWAKVARSAAEVNGFTAANWLGPINWIQEANVPVTIGL

SEQ ID NO: 25180 - protein, 515 aa, Arabidopsis thaliana
  peptide (1)..(515): Ceres Seq. ID no. 12371527
MLATKDELTKSSNFTGQTEVNMGSSISPNNKAVLDYCKRVFMYALEDLATIIEEMGEDLSQIGSKIDQLKQWLIGVYNYQTDCLDDIEEDDLRKAIGEGIANSKILTTNAIDIFHTVVSAMAKINNKVDDLKNMTGGIPTPGAPPVVDESPVADPDGPARRLLEDIDETGIPTWVSGADRKLMAKAGRGRRGGRGGGARVRTNFVVAKDGSGQFKTVQQAVDACPENNRGRCIIYIKAGLYREQVIIPKKKNNIFMFGDGARKTVISYNRSVALSRGTTTSLSATVQVESEGFMAKWMGFKNTAGPMGHQAAAIRVNGDRAVIFNCRFDGYQDTLYVNNGRQFYRNCVVSGTVDFIFGKSATVIQNTLIVVRKGSKGQYNTVTADGNELGLGMKIGIVLQNCRIVPDRKLTPERLTVATYLGRPWKKFSTTVIMSTEMGDLIRPEGWKIWDGESFHKSCRYVEYNNRGPGAFANRRVNWAKVARSAAEVNGFTAANWLGPINWIQEANVPVTIGL

SEQ ID NO: 25181 - DNA, 887 bp, Arabidopsis thaliana
  misc_feature (1)..(887): Ceres Seq. ID no. 12396998
  misc_feature (1)..(887): Ortholog of  Ceres SEQ ID NO 15173795 as cited in SEQ ID NO 61763
gtcattttgagacgagagaaagagaaggtaatcggccacgatgacgatggcgacgcctttcagtggggctgcgaactctattgtggcggcgaggaccgttctgataacgggagtgagcaaaggtctgggaagagccctagctctcgagctggccaagaggggtcacactgtgataggatgcgctcgtagtcaagagaagctcaccgctcttcaatcggagctttcctcttcgaccaatcatctcctcctcaccgctgatgtgaaatcaaacagcagtgtcgaagaaatggcacacacaattgtggagaagaagggtgtcccagatatcatagttaacaatgctggtaccatcaataagaacagcaagatttgggaagtctctgctgaagattttgacaatgtcatggatacaaacgttaaaggagttgcaaatgtgctgcgccattttatccctttgatgctcccacgcaagcaaggaattattgtaaatatgtcttctggatggggaagatctggtgctgccctggttgcaccttactgtgcatcaaaatgggcgattgagggtttaagccgagcagtggcaaaggaagtagttgaaggaatggcagtagttgcattaaatccaggcgtgatcaacacagaattactcacttcctgcttcgggaactcagcttccttgtatcaagctcctgatgcttgggctgtgaaggctgcgacgatgattctgaatcttacagcgggtgacaatggcggatctctcacagtctaacaactaataaagctactcatttattttcaattagagtgttatggataaggttagaaataacaaacgtaaaaccaaatgaaacagactacaaatgattagaaaatgggccattagtttc

SEQ ID NO: 25182 - protein, 242 aa, Arabidopsis thaliana
  peptide (1)..(242): Ceres Seq. ID no. 12396999
MTMATPFSGAANSIVAARTVLITGVSKGLGRALALELAKRGHTVIGCARSQEKLTALQSELSSSTNHLLLTADVKSNSSVEEMAHTIVEKKGVPDIIVNNAGTINKNSKIWEVSAEDFDNVMDTNVKGVANVLRHFIPLMLPRKQGIIVNMSSGWGRSGAALVAPYCASKWAIEGLSRAVAKEVVEGMAVVALNPGVINTELLTSCFGNSASLYQAPDAWAVKAATMILNLTAGDNGGSLTV

SEQ ID NO: 25183 - protein, 240 aa, Arabidopsis thaliana
  peptide (1)..(240): Ceres Seq. ID no. 12397000
MATPFSGAANSIVAARTVLITGVSKGLGRALALELAKRGHTVIGCARSQEKLTALQSELSSSTNHLLLTADVKSNSSVEEMAHTIVEKKGVPDIIVNNAGTINKNSKIWEVSAEDFDNVMDTNVKGVANVLRHFIPLMLPRKQGIIVNMSSGWGRSGAALVAPYCASKWAIEGLSRAVAKEVVEGMAVVALNPGVINTELLTSCFGNSASLYQAPDAWAVKAATMILNLTAGDNGGSLTV

SEQ ID NO: 25184 - protein, 160 aa, Arabidopsis thaliana
  peptide (1)..(160): Ceres Seq. ID no. 12397001
MAHTIVEKKGVPDIIVNNAGTINKNSKIWEVSAEDFDNVMDTNVKGVANVLRHFIPLMLPRKQGIIVNMSSGWGRSGAALVAPYCASKWAIEGLSRAVAKEVVEGMAVVALNPGVINTELLTSCFGNSASLYQAPDAWAVKAATMILNLTAGDNGGSLTV

SEQ ID NO: 25185 - DNA, 1120 bp, Arabidopsis thaliana
  misc_feature (1)..(1120): Ceres Seq. ID no. 12423003
  misc_feature (1)..(1120): Ortholog of  Ceres SEQ ID NO 12620986 as cited in SEQ ID NO 66720
gtagggttcctcaaaatcatttcaataattcaatttcagatgtatggtgatgcttctttgattacaaatcggcgttgaacaattctccgattttacactctaatcgaatcactttggggtgttttgttaatcgctgttctcaagatctgagatttacagggagaagtgagctggaacaaggtgccggagtagatggcgatcatatttgcgttggtggctcgtggaacggtggtgttatcggagtttagcgctacttcgactaacgctagctcaatctcgaagcagattttggagaagttgcctggaaacgatagcgatagccatatgtcttactctcaggatcgctacatcttccatgtgaaacgaacagatggtcttaccgttctctgtatggccgacgaaaccgccggaaggaatattccgtttgcgtttttggatgatattcatcagaggtttgtgaaaacatatggccgagctattcattcagctcaagcttattccatgaatgatgaattttcaagagttctgagtcaacagatggagttttattccaatgatcctaatgcagacaggatgagcagaatcaaaggtgaaatgagtcaggttcgaaatgtgatgattgagaatattgataaagttttggatagaggggagcgtttggagttgctagttgataaaaccgaaaatatgcaaggcaacacttttcgtttcagaaagcaagctcgtcgttacagaaccattatgtggtggagaaatgtcaagcttacaattgctctgatacttgtactagctttggttgtgtacatcgcgatggcctttgtttgccatgggccaagtcttccttcttgtttcaagtaagaagacattctcttatcttcttcacctttcccttcttgggaattatcagactctgcttcgattttggaatgtgagattatatgcgtttgtctaaaatgtgtgtttatgtgatctttcaatttcagcttctgcttattgctttgaattacagagtcgattatttatttgtaagtgtgatatttcactgttaatgatcatcccctgtctgtttgcaatttatgctgcggcgttaaaagttgtattaaatgatgacgtttttagc

SEQ ID NO: 25186 - protein, 221 aa, Arabidopsis thaliana
  peptide (1)..(221): Ceres Seq. ID no. 12423004
MAIIFALVARGTVVLSEFSATSTNASSISKQILEKLPGNDSDSHMSYSQDRYIFHVKRTDGLTVLCMADETAGRNIPFAFLDDIHQRFVKTYGRAIHSAQAYSMNDEFSRVLSQQMEFYSNDPNADRMSRIKGEMSQVRNVMIENIDKVLDRGERLELLVDKTENMQGNTFRFRKQARRYRTIMWWRNVKLTIALILVLALVVYIAMAFVCHGPSLPSCFK

SEQ ID NO: 25187 - protein, 177 aa, Arabidopsis thaliana
  peptide (1)..(177): Ceres Seq. ID no. 12423005
MSYSQDRYIFHVKRTDGLTVLCMADETAGRNIPFAFLDDIHQRFVKTYGRAIHSAQAYSMNDEFSRVLSQQMEFYSNDPNADRMSRIKGEMSQVRNVMIENIDKVLDRGERLELLVDKTENMQGNTFRFRKQARRYRTIMWWRNVKLTIALILVLALVVYIAMAFVCHGPSLPSCFK

SEQ ID NO: 25188 - protein, 155 aa, Arabidopsis thaliana
  peptide (1)..(155): Ceres Seq. ID no. 12423006
MADETAGRNIPFAFLDDIHQRFVKTYGRAIHSAQAYSMNDEFSRVLSQQMEFYSNDPNADRMSRIKGEMSQVRNVMIENIDKVLDRGERLELLVDKTENMQGNTFRFRKQARRYRTIMWWRNVKLTIALILVLALVVYIAMAFVCHGPSLPSCFK

SEQ ID NO: 25189 - DNA, 1302 bp, Arabidopsis thaliana
  misc_feature (1)..(1302): Ceres Seq. ID no. 12357714
  misc_feature (1)..(1302): Ortholog of  Ceres SEQ ID NO 13661767 as cited in SEQ ID NO 61423
atatatcgcgtggatttgaagacgaagaggaatcataaaaagcctaacgaagaagacgaagaagaagaggaacaaacaaccatgggtgaagtggttaaggtaatcgtaaatctcttgcttctgattctgatttcgtgaaagctcatcggaaaatttcttgtttcagctatgaaaacatgaatcgccgccgattgttaattaagtggtcttcaatcactgatcactattccaattttgatttttgttttattttaatcatcaaatttgatgttttctagtttcacttgttgtgtatgaaattcaggctttgtcttggaggttgcaatcgaaaatttcactaattgctgaacgttttttgtttctctttcaagcttagcatcataaatttatgttttcttgttgtgtttgtgtatgtgtgtttttgcttaggatggaagagaagaagtgatccaggcatggtatatggatgatagcgaagaggatcagagacttcctcaccacaaggatcctaaggagtttctatctttggacaaacttgcaggtctctttgtgtgtttcaattagtgttcttctctctgtttctctatttttttcagatgtaatgtttgtgtgcagagctgggagtacttagctggagacttgatgctgataactatgaaaccgatgaggatttgaaaaagatccgcgaatctcgtggttactcttacatggacttttgtgaggtatgcccggaaaagcttccaaactatgaagtgaaagtgaagagctttttcgaagaacatttgcacactgatgaagagatccgttactgcgttgcaggaagcggttactttgatgtgagggatcgcaatgaagcttggattagagtatgggtaaagaagggaggtatgatagtcttacctgctggaatatatcatcgcttcaccgtagactcagacaactatatcaaggcaatgcggcttttcgtgggtgaaccggtctggacaccatacaatcgcccacacgaccacctccctgcaaggaaagagtacatcgataatttcgtgaaggtgaatgaaggtggtgtcatagacgcgtcagcctagaggattctcagtcttatgcatcagatttctataaactaagcatacaataaagagagctttctgtctcatgttggatattatgtcatctacagatccacttgtgaagaaactttgattcgtgtggctttggcattatggttgtgttgtaactgtatttatagtttatactccagaaatcaaactgtgttacattatcaatctctccaaagttttcctc

SEQ ID NO: 25190 - protein, 125 aa, Arabidopsis thaliana
  peptide (1)..(125): Ceres Seq. ID no. 12357715
MDFCEVCPEKLPNYEVKVKSFFEEHLHTDEEIRYCVAGSGYFDVRDRNEAWIRVWVKKGGMIVLPAGIYHRFTVDSDNYIKAMRLFVGEPVWTPYNRPHDHLPARKEYIDNFVKVNEGGVIDASA

SEQ ID NO: 25191 - protein, 65 aa, Arabidopsis thaliana
  peptide (1)..(65): Ceres Seq. ID no. 12357716
MIVLPAGIYHRFTVDSDNYIKAMRLFVGEPVWTPYNRPHDHLPARKEYIDNFVKVNEGGVIDASA

SEQ ID NO: 25192 - DNA, 1669 bp, Arabidopsis thaliana
  misc_feature (1)..(1669): Ceres Seq. ID no. 12578090
  misc_feature (1)..(1669): Ortholog of  Ceres SEQ ID NO 14307863 as cited in SEQ ID NO 20504
agaaatagaaaaatcagatctagattcagtttttttcatcaaaaaagagcgtcttcataaacgcccttcgtcttcttccctggaaatctagtttctttcttccacgaaaatgagagagtgcatttcgatccacattggtcaggctggtatccaggtcggaaatgcttgctgggagctgtactgtcttgaacatggcattcagcctgatggccagatgccgagtgacaagactgttggtggaggtgacgatgctttcaacaccttcttcagtgaaaccggtgcaggtaagcacgtcccacgtgctgtctttgttgatcttgagccaactgtgatcgacgaggtcaggactggtacttaccgtcagcttttccaccctgaacaactcatcagcggtaaagaagatgcagctaacaatttcgcccgtggtcattacaccattgggaaagagattgttgacctgtgcttagaccgtatcagaaagcttgctgataactgtactggtctccaaggattcctcgtcttcaacgctgttggtggagggactggatctggtcttggatctctcctccttgagagactttctgttgactacgggaaaaagtccaagttgggtttcacagtttacccatctccacaggtctctacctccgttgttgagccttacaacagtgtcctctccactcactctctcttggaacacactgatgtctccatcctcctcgacaatgaagctatctatgacatctgcagacgctccctaagcattgagagaccaacctacaccaacctcaaccgcctcgtctctcaggttatttcttccttgactgcttctctgaggtttgatggtgccttaaatgttgatgtcactgagttccaaaccaacttggtcccatacccaagaatccacttcatgctttcctcctatgccccagtcatctccgcagagaaagccttccatgagcaactctcagttgctgagatcacaaacagtgcttttgagccagcttccatgatggctaagtgtgacccacgtcacggaaagtacatggcttgctgtttgatgtaccgtggtgatgttgtccccaaggatgtaaacgcagctgttggcaccatcaagaccaagcgcactattcagtttgttgactggtgtcctactggattcaagtgtggtatcaactaccagccaccaacagttgttccaggaggtgatcttgctaaagtccagagagctgtttgcatgatctcaaactcgaccagtgttgctgaggtgttctcccgtattgatcacaagtttgatcttatgtacgccaaacgtgctttcgttcactggtatgtgggtgagggtatggaagaaggagaattctcagaggcacgtgaggatcttgcagcattggagaaggattatgaagaggtcggtgctgaaggtggtgacgatgaagatgatgaaggagaggaatactaagaagaatgtttctaaaaactttggatttgtgtgggtttctctataatctcgtcttgtgagaatgggctcaaaactcttgggagtctttaatcgtgtgtgttttaaaacctacttctctatcttttcgtagccatgttatctctctattatctatttcctttgtgtgttaaatcgtttctgcctttctggtaatatcttatcactact

SEQ ID NO: 25193 - protein, 450 aa, Arabidopsis thaliana; identical to SEQ ID NO: 24489
  peptide (1)..(450): Ceres Seq. ID no. 12578091

SEQ ID NO: 25194 - protein, 415 aa, Arabidopsis thaliana; identical to SEQ ID NO: 24490
  peptide (1)..(415): Ceres Seq. ID no. 12578092

SEQ ID NO: 25195 - DNA, 1664 bp, Arabidopsis thaliana
  misc_feature (1)..(1664): Ceres Seq. ID no. 12357598
  misc_feature (1)..(1664): Ortholog of  Ceres SEQ ID NO 13581273 as cited in SEQ ID NO 54551
  misc_feature (1)..(1664): Ortholog of  Ceres SEQ ID NO 13594209 as cited in SEQ ID NO 59089
  misc_feature (1)..(1664): Ortholog of  Ceres SEQ ID NO 13502874 as cited in SEQ ID NO 66298
  misc_feature (1)..(1664): Ortholog of  Ceres SEQ ID NO 12614124 as cited in SEQ ID NO 68392
atcacaaccaaattccttagagaaaaaggaagagaaaggtcaaagatgttttactatgtgattgtccttcctttagctctctttctcttggctaacaaattattcttcacctccaaaacgaagcgtttcaacctccctccctctccaccttactctctcccaatcctcggccaccacaacctcctcaaaccgccggtccaccgtctcttccaccgcctctccaaaacacacggcccaatcttctccctccaatttggctcccgccgtgccgtcgtaatctcctcctcctcactcgcaacacaatgcttcacaggccaaaacgacattattctctcaaaccggccttgtttcctaaccgctaaatacgtcgcttacaactacacaaccgtaggaaccgcgccttatggcgaccactggcgtaacctccgccgcatttgctccctggaaatcctctcctcgaaccgtctcacaaacttcctccacatccgtaaagacgaaatccaccgcatgctcacgagactctcacgcgacgtcaagaaagagatcgagctcgagccgctcttgtccgatctaacgttcaacaacatagtaagaatggttacagggaagagatactacggcgacgaagtccataacgaagaagaggcaaatgttttcaagaaactcgtcgccgatatcaacgactgtagcggcgcgagacatcccggagattacttgcccttcatgaagatgttcggagggagctttgagaagaaagtgaaagctcttgcggaagccatggatgagatcttgcagcgtttgcttgaagaatgcaggagagataaagatggtaacactatggttaatcatttgctctctctgcaacaaaatgaaccagagtattacactgacgtcactatcaaaggcctaatgctgggcatgatgatcgccggaacagacacttccgctgtgacgctggagtgggcgatgtcgagcttgctaaatcatcccgaggctttggaaaaagcaaaactagagattgacgagaaaatcggacaagaacgtttgatcgatgaaccagacatcgcaaacttgccttaccttcaaaacatagtgtcggaaacattccgattatatccagcggcaccgcttctagtaccaagatcaccaacagaggatattaaagtcggaggatacgatgtgccacgtggcacaatggtgatggttaatgcgtgggctatacacagagatccagagctctggaacgaaccggagaagtttaaaccagagaggtttaatggcggagaaggtggaggaagaggagaagacgttcataagctgatgccgtttgggaatggacggagatcgtgtcccggcgccggactagggcagaagatcgtgacattagcgttaggttcgttgatccaatgctttgactggcaaaaagtcaacggcgaagcaatcgatatgacggagactccggggatggcaatgcgtaagaaaatacctctatctgctttgtgtcaatctcggcccattatgagtaagcttcaggcccatttaaaaggttagatgtttctttttctttttctttttagttatctgttttctatgcgttgagatgtgagattttgctgcgtttgtgtaacgaaggatatttgtgtaatgcgaacaaatgaaattcc

SEQ ID NO: 25196 - protein, 516 aa, Arabidopsis thaliana
  peptide (1)..(516): Ceres Seq. ID no. 12357599
ITTKFLREKGRERSKMFYYVIVLPLALFLLANKLFFTSKTKRFNLPPSPPYSLPILGHHNLLKPPVHRLFHRLSKTHGPIFSLQFGSRRAVVISSSSLATQCFTGQNDIILSNRPCFLTAKYVAYNYTTVGTAPYGDHWRNLRRICSLEILSSNRLTNFLHIRKDEIHRMLTRLSRDVKKEIELEPLLSDLTFNNIVRMVTGKRYYGDEVHNEEEANVFKKLVADINDCSGARHPGDYLPFMKMFGGSFEKKVKALAEAMDEILQRLLEECRRDKDGNTMVNHLLSLQQNEPEYYTDVTIKGLMLGMMIAGTDTSAVTLEWAMSSLLNHPEALEKAKLEIDEKIGQERLIDEPDIANLPYLQNIVSETFRLYPAAPLLVPRSPTEDIKVGGYDVPRGTMVMVNAWAIHRDPELWNEPEKFKPERFNGGEGGGRGEDVHKLMPFGNGRRSCPGAGLGQKIVTLALGSLIQCFDWQKVNGEAIDMTETPGMAMRKKIPLSALCQSRPIMSKLQAHLKG

SEQ ID NO: 25197 - protein, 501 aa, Arabidopsis thaliana
  peptide (1)..(501): Ceres Seq. ID no. 12357600
MFYYVIVLPLALFLLANKLFFTSKTKRFNLPPSPPYSLPILGHHNLLKPPVHRLFHRLSKTHGPIFSLQFGSRRAVVISSSSLATQCFTGQNDIILSNRPCFLTAKYVAYNYTTVGTAPYGDHWRNLRRICSLEILSSNRLTNFLHIRKDEIHRMLTRLSRDVKKEIELEPLLSDLTFNNIVRMVTGKRYYGDEVHNEEEANVFKKLVADINDCSGARHPGDYLPFMKMFGGSFEKKVKALAEAMDEILQRLLEECRRDKDGNTMVNHLLSLQQNEPEYYTDVTIKGLMLGMMIAGTDTSAVTLEWAMSSLLNHPEALEKAKLEIDEKIGQERLIDEPDIANLPYLQNIVSETFRLYPAAPLLVPRSPTEDIKVGGYDVPRGTMVMVNAWAIHRDPELWNEPEKFKPERFNGGEGGGRGEDVHKLMPFGNGRRSCPGAGLGQKIVTLALGSLIQCFDWQKVNGEAIDMTETPGMAMRKKIPLSALCQSRPIMSKLQAHLKG

SEQ ID NO: 25198 - protein, 347 aa, Arabidopsis thaliana
  peptide (1)..(347): Ceres Seq. ID no. 12357601
MLTRLSRDVKKEIELEPLLSDLTFNNIVRMVTGKRYYGDEVHNEEEANVFKKLVADINDCSGARHPGDYLPFMKMFGGSFEKKVKALAEAMDEILQRLLEECRRDKDGNTMVNHLLSLQQNEPEYYTDVTIKGLMLGMMIAGTDTSAVTLEWAMSSLLNHPEALEKAKLEIDEKIGQERLIDEPDIANLPYLQNIVSETFRLYPAAPLLVPRSPTEDIKVGGYDVPRGTMVMVNAWAIHRDPELWNEPEKFKPERFNGGEGGGRGEDVHKLMPFGNGRRSCPGAGLGQKIVTLALGSLIQCFDWQKVNGEAIDMTETPGMAMRKKIPLSALCQSRPIMSKLQAHLKG

SEQ ID NO: 25199 - DNA, 1184 bp, Arabidopsis thaliana
  misc_feature (1)..(1184): Ceres Seq. ID no. 12324958
  misc_feature (1)..(1184): Ortholog of  Ceres SEQ ID NO 12609869 as cited in SEQ ID NO 52065
  misc_feature (1)..(1184): Ortholog of  Ceres SEQ ID NO 14301506 as cited in SEQ ID NO 61159
  misc_feature (1)..(1184): Ortholog of  Ceres SEQ ID NO 13597124 as cited in SEQ ID NO 64173
  misc_feature (1)..(1184): Ortholog of  Ceres SEQ ID NO 12780602 as cited in SEQ ID NO 65695
aatattcggaaataaaatcaaattagggttttcctcagtctctctctcttatagacgccaaccacgttttccagctcttgttctttcgattctcagagaagacttttcagaacatcctccaactttctcagataagcaacaatggtgaaaggtcccggtctctacaccgaaatcggcaaaaaggccagagatcttctgtacaaagaccacaacagtgaccagaaattcagtatcaccactttctctcctgccggtgttgccatcacctcaaccggaactaagaaaggtgacttattgttgggagatgtcgcttttcagtcgaggcgaaagaacattactactgatttgaaagtttgcactgattctacttttctgatcaccgctaccgttgatgaggctgcacccggactgaggtcaatcttcagcttcaaggttcctgaccaaaattctggcaaggttgagctgcaatacttgcatgagtacgccggtatcagcacaagcatgggattgactcagaacccaactgtcaacttctctggtgtgattggctccaatgtcttggctgttggtactgatgtttcatttgacaccaagtctggaaatttcaccaagatcaatgctggtttaagcttcaccaaggaggacttaattgcctcccttactgtgaacgacaagggcgatctattgaatgcatcttactatcacattgtgaacccgctgttcaacactgcggttggagccgaagtgagccacaagttatctagcaaggacagcaccataactgttggaacacagcactcgcttgaccccttgacctctgtgaaggctcgtgtcaatagtgcgggtattgcaagtgctctcattcaacacgagtggaaacccaagtcattcttcacaatctctggagaagtcgacacaaagtcaattgacaagagtgctaaagttggattggctctcgcactcaagccttgaaactgagatggaagaagaagttgcaatagtttttttaaactagtttctttctacgtactctgttttttctctgcttggttcatggtttgagtgggcaactactgatctttcccattttcctgccggatttgtagaagaataaaaaggttgaaaatgatcatcttgagatggtgatgaaactcttaagatcctcctcttctgcttctcttttt

SEQ ID NO: 25200 - protein, 276 aa, Arabidopsis thaliana
  peptide (1)..(276): Ceres Seq. ID no. 12324959
MVKGPGLYTEIGKKARDLLYKDHNSDQKFSITTFSPAGVAITSTGTKKGDLLLGDVAFQSRRKNITTDLKVCTDSTFLITATVDEAAPGLRSIFSFKVPDQNSGKVELQYLHEYAGISTSMGLTQNPTVNFSGVIGSNVLAVGTDVSFDTKSGNFTKINAGLSFTKEDLIASLTVNDKGDLLNASYYHIVNPLFNTAVGAEVSHKLSSKDSTITVGTQHSLDPLTSVKARVNSAGIASALIQHEWKPKSFFTISGEVDTKSIDKSAKVGLALALKP

SEQ ID NO: 25201 - protein, 156 aa, Arabidopsis thaliana
  peptide (1)..(156): Ceres Seq. ID no. 12324960
MGLTQNPTVNFSGVIGSNVLAVGTDVSFDTKSGNFTKINAGLSFTKEDLIASLTVNDKGDLLNASYYHIVNPLFNTAVGAEVSHKLSSKDSTITVGTQHSLDPLTSVKARVNSAGIASALIQHEWKPKSFFTISGEVDTKSIDKSAKVGLALALKP

SEQ ID NO: 25202 - DNA, 1701 bp, Arabidopsis thaliana
  misc_feature (1)..(1701): Ceres Seq. ID no. 12422376
  misc_feature (1)..(1701): Ortholog of  Ceres SEQ ID NO 14301765 as cited in SEQ ID NO 61955
  misc_feature (1)..(1701): Ortholog of  Ceres SEQ ID NO 12618205 as cited in SEQ ID NO 65153
aattcgcgtcgtttttgagtaaaaaaatggcgcaacaatcgttgatctacagtttcgtcgctcgtggtaccgttatcctcgttgagttcacagatttcaaaggcaatttcacatcaatcgctgctcagtgccttcagaagcttccttcttctaacaacaagtttacctacaactgcgatggtcacacgttcaattacctcgtcgaaaatggattcagtgagtcaaaatattgctcgatctgtaagcgtagcttgtttgtgttttgatttatccattgtttgaattagattttttgcctaattgagaaatatgaatcgagttcttatgtttggtatagtttccagtaataattatgtattggcgttgataattaattgatgttagatctatggtaatcagtgatatgtttggtggatctatcaatgaatatttgcaatttttgttctggatctattgattctttgcttatttgcgtgtagctttcgatatcatgaagtttttggcattagtgtattgtgttctttatgtaactctgttttactaaacctaattgggttttgggtgatgttgatggcggatatggtctctttatgatagtgttaactttcttatcagcgatatattgatgaatctattgctttatctcttaatatagagtttaaaatggaccggttttgttttcgtttgtgcagcctattgtgttgttgcagttgattctgctgggaggcagattcctatggctttcttggaacgagttaaggaggatttcaacaagagatatggtggtggaaaggctgcaactgctcaagcaaacagcttgaatatagaatttgggtcgaaactgaaagagcatatgcagtattgcatggatcatcctgatgagattagcaagcttgctaaggttaaagctcaagtgtctgaagttaaaggtgttatgatggaaaacattgagaaggtttgattctgacccttttttctttttatcgatatagttttatgttgtaaaccttttcgaacagagttcagcttgtatgactttagtaccaggatcttatgattcgtaaagcattaactgtagagcggaatgttttattctcggttgtgaagacatattctgttgttaactcgtttatgcattcgtttgcaggttcttgaccgtggtgagaagattgagcttttggttgacaaaacagaaaaccttcgctcacaggtttgttttctaaatggttcaaagtcaatagacccacacagagacatgcaagagtttgcagctttctcttactgattgttgtttctttggtttctaactttaaatttgaactcgactttatcacaggcgcaagattttagaacacaaggaactcaaatgagaagaaagatgtggtttcagaacatgaagataaagctcattgtccttgcaattatcattgccttgattctcatcatcatcctctcaatttgtgggggattcaactgcggtaaataagtctggaacatttcttcccggcgttatcgactgcgctctgtgcttcccaagatctctgagaatatcttcattcagttcgttgtgctacctttttttttgtttttgtttttgtgatttctatattctcatactatatgtttcttcttagattgtacttcttgaaatttgttttgtataggctatatatattatacatatatgtatgcatgttcggc

SEQ ID NO: 25203 - protein, 87 aa, Arabidopsis thaliana
  peptide (1)..(87): Ceres Seq. ID no. 12422377
FASFLSKKMAQQSLIYSFVARGTVILVEFTDFKGNFTSIAAQCLQKLPSSNNKFTYNCDGHTFNYLVENGFSESKYCSICKRSLFVF

SEQ ID NO: 25204 - protein, 79 aa, Arabidopsis thaliana
  peptide (1)..(79): Ceres Seq. ID no. 12422378
MAQQSLIYSFVARGTVILVEFTDFKGNFTSIAAQCLQKLPSSNNKFTYNCDGHTFNYLVENGFSESKYCSICKRSLFVF

SEQ ID NO: 25205 - protein, 74 aa, Arabidopsis thaliana
  peptide (1)..(74): Ceres Seq. ID no. 12422379
MAFLERVKEDFNKRYGGGKAATAQANSLNIEFGSKLKEHMQYCMDHPDEISKLAKVKAQVSEVKGVMMENIEKV

SEQ ID NO: 25206 - DNA, 1258 bp, Arabidopsis thaliana
  misc_feature (1)..(1258): Ceres Seq. ID no. 12335762
  misc_feature (1)..(1258): Ortholog of  Ceres SEQ ID NO 14307839 as cited in SEQ ID NO 54379
  misc_feature (1)..(1258): Ortholog of  Ceres SEQ ID NO 13596109 as cited in SEQ ID NO 68619
gatttttacaaaacaaagatggaagagcaagtcagaagtcaaaatagctcgaagatgtaagtgacggcgcctgaatactcttggctggtagatttcacctacctcatttttttcatatatctcaaacgtggaatcgctgttactcagtttttatatataaaaataaacactctctcttcttcaaccaaactcatttccaaaatcccacaagcttttcaaatggcgattgctttcaaatccggcgtcttcttcctccaatccccaaaatctcaaattggattccgccattcttctcctcctgattcatcgctttctttcaagagattcactcccatggcttctctctccacctcttctcctactctcggtctcgctgatactttcacacagctcaaaaaacaaggcaaagtagcattcataccatatatcacagctggtgatccggatctctctactactgctgaagcattgaaagttcttgatgcttgtggttctgacataatcgaattgggtgttccttactctgaccctttagctgatggacctgttattcaggctgcggcaacaaggtcgttggagaggggaacaaacctcgatagcatccttgagatgttggataaggttgttccacaaatatcttgtccgatttcgttgttcacgtattacaacccgattcttaaacgtgggttggggaagttcatgtccagcatcagagctgttggtgtacagggacttgtggttcccgatgttcctcttgaggaaactgagatgctgagaaaagaagccctcaacaacgacattgagctggtcctactcactacaccaaccacaccaacagagcgaatgaagcgaattgttgatgcgtcagaaggatttatttaccttgtgagctcaattggagtgactggtgcacgatcatctgtaagcggaaaggttcagtcgctcttgaaggatatcaaagaggcgacagacaagccggtggcagtcggttttggaatatcaaagccggagcatgtgaaacagatagctggatggggagctgatggagtgatcgtaggcagtgcaatggtaaagctattgggtgatgcaaagtcgccaactgaaggacttaaggagcttgagaaactaaccaagtctcttaaatctgctcttctttgaaacacaaacatttgcagacaacatctttagattgtgtttttgattattatcggtgtgtgacaatgatgtctcaatcttttgatacatttcaagtatgatt

SEQ ID NO: 25207 - protein, 312 aa, Arabidopsis thaliana
  peptide (1)..(312): Ceres Seq. ID no. 12335763
MAIAFKSGVFFLQSPKSQIGFRHSSPPDSSLSFKRFTPMASLSTSSPTLGLADTFTQLKKQGKVAFIPYITAGDPDLSTTAEALKVLDACGSDIIELGVPYSDPLADGPVIQAAATRSLERGTNLDSILEMLDKVVPQISCPISLFTYYNPILKRGLGKFMSSIRAVGVQGLVVPDVPLEETEMLRKEALNNDIELVLLTTPTTPTERMKRIVDASEGFIYLVSSIGVTGARSSVSGKVQSLLKDIKEATDKPVAVGFGISKPEHVKQIAGWGADGVIVGSAMVKLLGDAKSPTEGLKELEKLTKSLKSALL

SEQ ID NO: 25208 - protein, 274 aa, Arabidopsis thaliana
  peptide (1)..(274): Ceres Seq. ID no. 12335764
MASLSTSSPTLGLADTFTQLKKQGKVAFIPYITAGDPDLSTTAEALKVLDACGSDIIELGVPYSDPLADGPVIQAAATRSLERGTNLDSILEMLDKVVPQISCPISLFTYYNPILKRGLGKFMSSIRAVGVQGLVVPDVPLEETEMLRKEALNNDIELVLLTTPTTPTERMKRIVDASEGFIYLVSSIGVTGARSSVSGKVQSLLKDIKEATDKPVAVGFGISKPEHVKQIAGWGADGVIVGSAMVKLLGDAKSPTEGLKELEKLTKSLKSALL

SEQ ID NO: 25209 - protein, 182 aa, Arabidopsis thaliana
  peptide (1)..(182): Ceres Seq. ID no. 12335765
MLDKVVPQISCPISLFTYYNPILKRGLGKFMSSIRAVGVQGLVVPDVPLEETEMLRKEALNNDIELVLLTTPTTPTERMKRIVDASEGFIYLVSSIGVTGARSSVSGKVQSLLKDIKEATDKPVAVGFGISKPEHVKQIAGWGADGVIVGSAMVKLLGDAKSPTEGLKELEKLTKSLKSALL

SEQ ID NO: 25210 - DNA, 1391 bp, Arabidopsis thaliana; identical to SEQ ID NO: 21324
  misc_feature (1)..(1391): Ceres Seq. ID no. 13488285
  misc_feature (1)..(1391): Ortholog of  Ceres SEQ ID NO 13495628 as cited in SEQ ID NO 60727

SEQ ID NO: 25211 - protein, 381 aa, Arabidopsis thaliana; identical to SEQ ID NO: 21325
  peptide (1)..(381): Ceres Seq. ID no. 13488286

SEQ ID NO: 25212 - protein, 372 aa, Arabidopsis thaliana; identical to SEQ ID NO: 21326
  peptide (1)..(372): Ceres Seq. ID no. 13488287

SEQ ID NO: 25213 - protein, 275 aa, Arabidopsis thaliana; identical to SEQ ID NO: 21327
  peptide (1)..(275): Ceres Seq. ID no. 13488288

SEQ ID NO: 25214 - DNA, 1201 bp, Arabidopsis thaliana
  misc_feature (1)..(1201): Ceres Seq. ID no. 13492933
  misc_feature (1)..(1201): Ortholog of  Ceres SEQ ID NO 14308278 as cited in SEQ ID NO 55403
  misc_feature (1)..(1201): Ortholog of  Ceres SEQ ID NO 12618176 as cited in SEQ ID NO 64489
  misc_feature (1)..(1201): Ortholog of  Ceres SEQ ID NO 15179231 as cited in SEQ ID NO 0
accaatcaccactcacatgttatcaataattgcttataagaatttgtattcccactctaatcatcaactctattgattccacgcgatgacgacgttttcaacgagctttcttttccttttgttggttttctgcttgatcggttcactagctgccgatgatctccaacataaatccggtcgggacgtctgctccggtggttctgatcttagaacccccgatattcgtcttaaccggccgacagactctgtcgtcggaaactgcccgacggaggcgagtcctttagttatggctgacgacgagaagtacggtaacaaaatggttatcagtctcactcctcgcctttatgactatgtcctcaacaacgttcgtgagcatgagattttgaagcaacttcgagaagaaactgccattagtcaaattcaggtgtcacctgatcaagcgcaattgcttgcaatgcttgtagagattcttggagctaaacgatgtattgaagttggagtttacacgggatattcatcactggctgtggcgttggttctaccagaatcagggcgtcttgttgcctgtgataaagatgctaacgctcttgaagttgctaagaggtactacgagcttgccggagtgtctcacaaggtcactgtgaaacatggtcttgcagcagaatctttgatgtctatgattcagaacggtgaagagtccagctatgattttgcatttcttgatgctgataaggcgatgtatcaggagtacttcgaatcgctacttcgactcgtcagggttggtggagtcattgtgattgataatgttctttggcatggatgggttgcggattctacggtgaatgatgagaggaccatcagcctaagaaatttcaacaaaaaattaatggatgatcaacgtgtaagcattagtatggtatcaatcggcgatggtatgaccatatgccgcaagaggtaatcatccgtaaaaaccactcagctcgcagtgaacctgtttcaagatagaagaagtctttaaacataaaaggattgatgaagccaagatatccagtctcacaaacactaaagactcatcaacttttcccttttcagtcaaaaataagttgaataattgataaaccaatgtgtgggcctattgggctttgatatgtactgtttctatgtccgtttgaggccttttataaaatcgtcttacgaccct

SEQ ID NO: 25215 - protein, 290 aa, Arabidopsis thaliana
  peptide (1)..(290): Ceres Seq. ID no. 13492934
MTTFSTSFLFLLLVFCLIGSLAADDLQHKSGRDVCSGGSDLRTPDIRLNRPTDSVVGNCPTEASPLVMADDEKYGNKMVISLTPRLYDYVLNNVREHEILKQLREETAISQIQVSPDQAQLLAMLVEILGAKRCIEVGVYTGYSSLAVALVLPESGRLVACDKDANALEVAKRYYELAGVSHKVTVKHGLAAESLMSMIQNGEESSYDFAFLDADKAMYQEYFESLLRLVRVGGVIVIDNVLWHGWVADSTVNDERTISLRNFNKKLMDDQRVSISMVSIGDGMTICRKR

SEQ ID NO: 25216 - protein, 223 aa, Arabidopsis thaliana
  peptide (1)..(223): Ceres Seq. ID no. 13492935
MADDEKYGNKMVISLTPRLYDYVLNNVREHEILKQLREETAISQIQVSPDQAQLLAMLVEILGAKRCIEVGVYTGYSSLAVALVLPESGRLVACDKDANALEVAKRYYELAGVSHKVTVKHGLAAESLMSMIQNGEESSYDFAFLDADKAMYQEYFESLLRLVRVGGVIVIDNVLWHGWVADSTVNDERTISLRNFNKKLMDDQRVSISMVSIGDGMTICRKR

SEQ ID NO: 25217 - protein, 213 aa, Arabidopsis thaliana
  peptide (1)..(213): Ceres Seq. ID no. 13492936
MVISLTPRLYDYVLNNVREHEILKQLREETAISQIQVSPDQAQLLAMLVEILGAKRCIEVGVYTGYSSLAVALVLPESGRLVACDKDANALEVAKRYYELAGVSHKVTVKHGLAAESLMSMIQNGEESSYDFAFLDADKAMYQEYFESLLRLVRVGGVIVIDNVLWHGWVADSTVNDERTISLRNFNKKLMDDQRVSISMVSIGDGMTICRKR

SEQ ID NO: 25218 - DNA, 1463 bp, Arabidopsis thaliana
  misc_feature (1)..(1463): Ceres Seq. ID no. 13487792
  misc_feature (1)..(1463): Ortholog of  Ceres SEQ ID NO 13664220 as cited in SEQ ID NO 61151
  misc_feature (1)..(1463): Ortholog of  Ceres SEQ ID NO 13597477 as cited in SEQ ID NO 65160
atattatttgcactctttcaagttcacaaggtgaatctgatcttactttctggtccacctctaagcacttttaaatggagaagaaaggccagcatggtacatatgaatcaatgatgactcatcatccgatcctctgtatcattgctttatctgtacttttcatagcaatcgacccctttcacatgagtccaatcgggggtcgtgagttcaaacccgtgaagcatgaggttgctccatataaggaagtcatgggaagctggcctagagacaaccttagtcgactgggtaatcatgggaaactggagttcgtggaccaagtctttggtccagagtcattagagtttgatagtttaggtcgtggtccatacacagggttggctgatggaagagtggttagatggatgggtgaagcaatcggatgggagacattttcggtggtaacatcaaaatggtcagaggaagcttgtgtgagaggtgtggattcaacaacaaacaagcaatggaagcacgagaagctgtgtgggaggcctcttggactgagatttcataaagagacaggaaatttgtatattgcagacgcttactatggtctacttgtggttggtcctgaaggagggattgctacgcctttagctactcatgtggaaggaaagcctatactctttgccaatgaccttgacatccatagaaatggctccatcttcttcactgacaccagcaaaagatatgacagagcgaatcatttctttatattactggaaggagaatcaacaggaaggcttctaagatatgacccacctaccaaaacaacacacattgtgctggagggtttggcttttcccaatggaattcaactctctaaagaccaatctttcctcctcttcaccgaaacaaccaattgcagattggtgaagtactggctggagggtccaaagatgggtgaagtcgaggtggtggcagatctcccgggattcccagacaatgtaagaataaatgaagagggtcagttttgggttgcaattgattgttgcagaacaccggcacaagaggttcttacaaacaacccttggataagaagcatctactttcggttgccaataccgatgaagctgcttgcgaaaacgatggggatgagaatgtacactgtgatatcgagattcgacgaggaaggtaaagtcctggaggtgctcgaggatagacaagggaaggtaatgaagcttgtgagtgaagtgagggaagttcaagggaagctttggattggaacagtggctcataaccacattgccactctaccttatcctttgacaatgaatcaatgaaggactttgttgtgtagttcctgaactaaatcatctctctgtaacttaattatcttcgttttgattcaagttcctttggaccggtttgtcttttgttgatattatgtgtgaccttagattcctcatgaaattctctttctttct

SEQ ID NO: 25219 - protein, 414 aa, Arabidopsis thaliana
  peptide (1)..(414): Ceres Seq. ID no. 13487793
MEKKGQHGTYESMMTHHPILCIIALSVLFIAIDPFHMSPIGGREFKPVKHEVAPYKEVMGSWPRDNLSRLGNHGKLEFVDQVFGPESLEFDSLGRGPYTGLADGRVVRWMGEAIGWETFSVVTSKWSEEACVRGVDSTTNKQWKHEKLCGRPLGLRFHKETGNLYIADAYYGLLVVGPEGGIATPLATHVEGKPILFANDLDIHRNGSIFFTDTSKRYDRANHFFILLEGESTGRLLRYDPPTKTTHIVLEGLAFPNGIQLSKDQSFLLFTETTNCRLVKYWLEGPKMGEVEVVADLPGFPDNVRINEEGQFWVAIDCCRTPAQEVLTNNPWIRSIYFRLPIPMKLLAKTMGMRMYTVISRFDEEGKVLEVLEDRQGKVMKLVSEVREVQGKLWIGTVAHNHIATLPYPLTMNQ

SEQ ID NO: 25220 - protein, 402 aa, Arabidopsis thaliana
  peptide (1)..(402): Ceres Seq. ID no. 13487794
MMTHHPILCIIALSVLFIAIDPFHMSPIGGREFKPVKHEVAPYKEVMGSWPRDNLSRLGNHGKLEFVDQVFGPESLEFDSLGRGPYTGLADGRVVRWMGEAIGWETFSVVTSKWSEEACVRGVDSTTNKQWKHEKLCGRPLGLRFHKETGNLYIADAYYGLLVVGPEGGIATPLATHVEGKPILFANDLDIHRNGSIFFTDTSKRYDRANHFFILLEGESTGRLLRYDPPTKTTHIVLEGLAFPNGIQLSKDQSFLLFTETTNCRLVKYWLEGPKMGEVEVVADLPGFPDNVRINEEGQFWVAIDCCRTPAQEVLTNNPWIRSIYFRLPIPMKLLAKTMGMRMYTVISRFDEEGKVLEVLEDRQGKVMKLVSEVREVQGKLWIGTVAHNHIATLPYPLTMNQ

SEQ ID NO: 25221 - protein, 401 aa, Arabidopsis thaliana
  peptide (1)..(401): Ceres Seq. ID no. 13487795
MTHHPILCIIALSVLFIAIDPFHMSPIGGREFKPVKHEVAPYKEVMGSWPRDNLSRLGNHGKLEFVDQVFGPESLEFDSLGRGPYTGLADGRVVRWMGEAIGWETFSVVTSKWSEEACVRGVDSTTNKQWKHEKLCGRPLGLRFHKETGNLYIADAYYGLLVVGPEGGIATPLATHVEGKPILFANDLDIHRNGSIFFTDTSKRYDRANHFFILLEGESTGRLLRYDPPTKTTHIVLEGLAFPNGIQLSKDQSFLLFTETTNCRLVKYWLEGPKMGEVEVVADLPGFPDNVRINEEGQFWVAIDCCRTPAQEVLTNNPWIRSIYFRLPIPMKLLAKTMGMRMYTVISRFDEEGKVLEVLEDRQGKVMKLVSEVREVQGKLWIGTVAHNHIATLPYPLTMNQ

SEQ ID NO: 25222 - DNA, 1610 bp, Arabidopsis thaliana
  misc_feature (1)..(1610): Ceres Seq. ID no. 13490866
  misc_feature (1)..(1610): Ortholog of  Ceres SEQ ID NO 14314480 as cited in SEQ ID NO 52362
  misc_feature (1)..(1610): Ortholog of  Ceres SEQ ID NO 13593854 as cited in SEQ ID NO 53403
  misc_feature (1)..(1610): Ortholog of  Ceres SEQ ID NO 12581680 as cited in SEQ ID NO 55019
accaccaactcaacacacacacgaatcccttaaaaccgatcagatcaaacaaaaacgaacgaatcaaaattcaataaaaaaaaacctttcgatttctctcatccaatcgaatcgaaaatcttgttatctctttctctctaactctactgcactcagaatctctctgtatagaaaaaccctaagtaggttgtgatgttgcgagctttagcacggcctctcgaacggtgtttgggaagcagagctagtggtgatggtttactctggcaatcggaattgagacctcacgctggcggtgattattcgatcgcggtggttcaagccaattccaggcttgaagatcagagtcaggttttcacatcttcttctgctacttacgtcggtgtatacgatggtcatggtggacctgaagcttctagattcgttaacagacatctctttccttatatgcacaaatttgcaagagaacatgggggattatctgtagatgttatcaaaaaggcattcaaagaaacagaagaagagttttgtggtatggttaaacgatcccttcccatgaaaccgcaaatggctactgtaggatcttgctgtcttgttggtgcaatctctaatgacacactgtatgttgctaatcttggggactcgagagccgttcttggaagcgttgtttcaggggttgatagtaataaaggtgccgtagctgaacggttatctactgatcataatgttgctgttgaagaagtgagaaaggaggttaaggcacttaaccctgatgactcacaaatcgtcttatacacacgtggagtttggcggattaaaggcattattcaggtatcgagatcaattggggatgtatacttgaaaaaaccggagtattacagggacccgattttccagcgacatggaaatcccattcctttgaggagacccgcgatgacagccgaaccctccattatagtaaggaagcttaagccacaggacttgtttctgatatttgcatcagatggtctctgggaacatcttagtgatgaaacagccgtagaaatcgtcctcaaacacccaagaactggtattgcccgaagacttgtaagagctgctctggaagaagcggcaaagaagagagaaatgagatatggagatataaagaaaatagccaaaggaattcgacgacatttccatgacgacataagcgttattgtagtttatctagatcaaaacaaaaccagttcatcgaatagtaaattggtgaagcaaggaggtatcaccgctccaccggatatctactcattacactctgatgaagcagagcaacgacggttactcaatgtgttatactgactgtttgattatggtaaaatggctgcttgggaaagatccgaatagggagaaaacttgtttacatatttgtttatttgtttttctacgaagaactggttttttttttttttcaatattggagttggatttgtatattcttttaccagcaaagaaggtcgaaaccctttagtttttgggcaaagcagttttgcttttgacacaaacaatacttttgtatgaaaatctagtgtgaaaccgttgaggacaactcttcatatatcagattgttttttttt

SEQ ID NO: 25223 - protein, 380 aa, Arabidopsis thaliana
  peptide (1)..(380): Ceres Seq. ID no. 13490867
MLRALARPLERCLGSRASGDGLLWQSELRPHAGGDYSIAVVQANSRLEDQSQVFTSSSATYVGVYDGHGGPEASRFVNRHLFPYMHKFAREHGGLSVDVIKKAFKETEEEFCGMVKRSLPMKPQMATVGSCCLVGAISNDTLYVANLGDSRAVLGSVVSGVDSNKGAVAERLSTDHNVAVEEVRKEVKALNPDDSQIVLYTRGVWRIKGIIQVSRSIGDVYLKKPEYYRDPIFQRHGNPIPLRRPAMTAEPSIIVRKLKPQDLFLIFASDGLWEHLSDETAVEIVLKHPRTGIARRLVRAALEEAAKKREMRYGDIKKIAKGIRRHFHDDISVIVVYLDQNKTSSSNSKLVKQGGITAPPDIYSLHSDEAEQRRLLNVLY

SEQ ID NO: 25224 - protein, 296 aa, Arabidopsis thaliana
  peptide (1)..(296): Ceres Seq. ID no. 13490868
MHKFAREHGGLSVDVIKKAFKETEEEFCGMVKRSLPMKPQMATVGSCCLVGAISNDTLYVANLGDSRAVLGSVVSGVDSNKGAVAERLSTDHNVAVEEVRKEVKALNPDDSQIVLYTRGVWRIKGIIQVSRSIGDVYLKKPEYYRDPIFQRHGNPIPLRRPAMTAEPSIIVRKLKPQDLFLIFASDGLWEHLSDETAVEIVLKHPRTGIARRLVRAALEEAAKKREMRYGDIKKIAKGIRRHFHDDISVIVVYLDQNKTSSSNSKLVKQGGITAPPDIYSLHSDEAEQRRLLNVLY

SEQ ID NO: 25225 - protein, 267 aa, Arabidopsis thaliana
  peptide (1)..(267): Ceres Seq. ID no. 13490869
MVKRSLPMKPQMATVGSCCLVGAISNDTLYVANLGDSRAVLGSVVSGVDSNKGAVAERLSTDHNVAVEEVRKEVKALNPDDSQIVLYTRGVWRIKGIIQVSRSIGDVYLKKPEYYRDPIFQRHGNPIPLRRPAMTAEPSIIVRKLKPQDLFLIFASDGLWEHLSDETAVEIVLKHPRTGIARRLVRAALEEAAKKREMRYGDIKKIAKGIRRHFHDDISVIVVYLDQNKTSSSNSKLVKQGGITAPPDIYSLHSDEAEQRRLLNVLY

SEQ ID NO: 25226 - DNA, 1198 bp, Arabidopsis thaliana
  misc_feature (1)..(1198): Ceres Seq. ID no. 12327305
  misc_feature (1)..(1198): Ortholog of  Ceres SEQ ID NO 12615264 as cited in SEQ ID NO 62383
acaaaaaataaaaaaacgcctacctttaacttcgaattagggtttatcaggattcagtcgcctgctcacttgaatttcttcgcaagctcaaaaagttcccaaatttttgaaggaagatggtgaggccgtatgggattaaagtgaacaagagaaaggagagagaagagaggtatgataaggaagaagatgaagtagaggagcaaccaaagtttgagcaaaaacaaaaggcaagagaaagttcgaagaaagctaaaaaagaaagcacttcaagagcagaggaagataatgacgaggaggaagtaactgaggaagcaactgcagcagcagaggatattgtgggagggatacctattgtccttaatgctcctaacaaggaaaagtctggcattgtattcgtgcttgagaaggcctctcttgaagttgccaaagttggaaagacttaccagctactgaactcggatgatcatgctaatttcttgaaaaagaataacagaaatccggctgattaccgaccagacattactcatcaggcgcttcttatgattttggatagtccggttaataaagctgggaggttgaaagctgtttatgttagaacagaaaaaggtgtcctttttgaagttaagccacatgttcgtataccaagaactttcaaacgatttgccggaatcatgttgcaactgctacaaaagctgagcattactgcagttaacagccgtgagaagcttctacggtgtgtcaagaaccctatcgaagaacatcatctaccggttaactcccacagaataggcttctcgcatagctctgagaaactcgtcaatatgcagaaacacctagctactgtatgtgatgatgatagagacacagtttttgtggtaggcgcaatggcacacgggaaaatagactgcaactatatcgatgaatttgtgtcggtttcagagtatccattgagcgcagcctactgtatctcaagaatctgcgaggcattagcaacaaattggaatattatataaaagaatgattataaggtcctttgttttcctctctactgctctaatggtaggaactactttaagctatgttgttgtgatacacattgtttatctactatcgaatttatataacttttcgtttgaaattttgactccactattttattcaaacgtaatataaagtaaaagaaagagatgttcctgtg

SEQ ID NO: 25227 - protein, 298 aa, Arabidopsis thaliana
  peptide (1)..(298): Ceres Seq. ID no. 12327306
MVRPYGIKVNKRKEREERYDKEEDEVEEQPKFEQKQKARESSKKAKKESTSRAEEDNDEEEVTEEATAAAEDIVGGIPIVLNAPNKEKSGIVFVLEKASLEVAKVGKTYQLLNSDDHANFLKKNNRNPADYRPDITHQALLMILDSPVNKAGRLKAVYVRTEKGVLFEVKPHVRIPRTFKRFAGIMLQLLQKLSITAVNSREKLLRCVKNPIEEHHLPVNSHRIGFSHSSEKLVNMQKHLATVCDDDRDTVFVVGAMAHGKIDCNYIDEFVSVSEYPLSAAYCISRICEALATNWNII

SEQ ID NO: 25228 - protein, 157 aa, Arabidopsis thaliana
  peptide (1)..(157): Ceres Seq. ID no. 12327307
MILDSPVNKAGRLKAVYVRTEKGVLFEVKPHVRIPRTFKRFAGIMLQLLQKLSITAVNSREKLLRCVKNPIEEHHLPVNSHRIGFSHSSEKLVNMQKHLATVCDDDRDTVFVVGAMAHGKIDCNYIDEFVSVSEYPLSAAYCISRICEALATNWNII

SEQ ID NO: 25229 - DNA, 1755 bp, Arabidopsis thaliana
  misc_feature (1)..(1755): Ceres Seq. ID no. 13490767
  misc_feature (1)..(1755): Ortholog of  Ceres SEQ ID NO 15168509 as cited in SEQ ID NO 57909
  misc_feature (1)..(1755): Ortholog of  Ceres SEQ ID NO 13594429 as cited in SEQ ID NO 58006
  misc_feature (1)..(1755): Ortholog of  Ceres SEQ ID NO 13661403 as cited in SEQ ID NO 61549
ctctctctctatcatcatcatcatcactttctctatctatctctcttcttaaagcggccattggtgctctccaagttccatctcaagcttttcttcttgttttgttgttctcttaattgaaaaacaagatcttgaactaaaaaatggaaactgaagacgatttgtgcaacaccaattggggaagctcttcttcgaaatcgcgagagccgggttcatcagactgtgggaattcgacattcgcaggttttacgtcccagcagaagtgggaagatgcttcaatcttggattatgagatgggtgtggagcctggattgcaagagagcattcaagcaaatgttgatttcttacaaggtgttagggctcaagcgtgggatccaaggacgatgttgagtaacctttcttttatggagcagaagattcaccagctgaggatcttgttcatcttcttgttggtcgtggtgggcagcttcaaggtcgtcaagacgagctcgcggctcagcagcagcagcttataacgacggatcttacttccattatcatacagcttatttcaactgcaggtagtcttcttccatctgttaagcataatatgtcaacagctccgggtccattcactgggcagcccggttcagccgtgttcccttatgtaagggaggctaataacgttgcttcacagagtcagaacaataacaactgtggtgctcgagagttcgatttgcctaagccggttcttgttgatgagagggaaggtcatgttgtggaggaacatgagatgaaagatgaagatgatgtggaagaaggagagaaccttcctcccggttcgtatgagatattgcagcttgagaaagaagagattctcgcaccgcatactcacttctgcacgatatgtggcaagggtttcaagagagacgcgaatttgaggatgcatatgagagggcatggagatgagtacaaaacagcagctgctctggcgaaaccgaacaaagaatccgtacccgggtctgagccgatgctgatcaagaggtactcgtgcccattccttggttgcaaacgtaacaaggagcacaaaaagttccagcctttgaaaacgattctatgcgtgaagaatcactataaacgcacccactgcgataaaagcttcacttgcagccggtgccataccaagaaattctctgtcattgcagatcttaaaacccacgagaagcactgcgggaaaaacaagtggctttgttcctgtggtacaacattttcaaggaaagacaagttgtttggtcacatagctctgttccagggacacacgcctgcaatccctcttgaagagacaaaaccatcagccagtacatctactcagagagggagctctgaaggcgggaacaacaaccaaggaatggttggcttcaatcttggttctgcatcaaatgctaaccaagaaaccacacagcctggaatgactgatgggaggatatgttttgaggagtcgttctcaccaatgaactttgatacatgtaattttggagggttccacgagtttccgcgactgatgtttgatgattcagagagttcttttcaaatgcttattgcgaatgcctgtggtttctcgcccaggaatgttggtgagtctgtttcagatactagtctctaaggcattgccatatatatgataagttatgtaagatgttctagtttttagccttttaagcagttcttttgtgtctgtaattttgttttcgccataataataatatcagaatagcg

SEQ ID NO: 25230 - protein, 350 aa, Arabidopsis thaliana
  peptide (1)..(350): Ceres Seq. ID no. 13490768
MSTAPGPFTGQPGSAVFPYVREANNVASQSQNNNNCGAREFDLPKPVLVDEREGHVVEEHEMKDEDDVEEGENLPPGSYEILQLEKEEILAPHTHFCTICGKGFKRDANLRMHMRGHGDEYKTAAALAKPNKESVPGSEPMLIKRYSCPFLGCKRNKEHKKFQPLKTILCVKNHYKRTHCDKSFTCSRCHTKKFSVIADLKTHEKHCGKNKWLCSCGTTFSRKDKLFGHIALFQGHTPAIPLEETKPSASTSTQRGSSEGGNNNQGMVGFNLGSASNANQETTQPGMTDGRICFEESFSPMNFDTCNFGGFHEFPRLMFDDSESSFQMLIANACGFSPRNVGESVSDTSL

SEQ ID NO: 25231 - protein, 289 aa, Arabidopsis thaliana
  peptide (1)..(289): Ceres Seq. ID no. 13490769
MKDEDDVEEGENLPPGSYEILQLEKEEILAPHTHFCTICGKGFKRDANLRMHMRGHGDEYKTAAALAKPNKESVPGSEPMLIKRYSCPFLGCKRNKEHKKFQPLKTILCVKNHYKRTHCDKSFTCSRCHTKKFSVIADLKTHEKHCGKNKWLCSCGTTFSRKDKLFGHIALFQGHTPAIPLEETKPSASTSTQRGSSEGGNNNQGMVGFNLGSASNANQETTQPGMTDGRICFEESFSPMNFDTCNFGGFHEFPRLMFDDSESSFQMLIANACGFSPRNVGESVSDTSL

SEQ ID NO: 25232 - protein, 239 aa, Arabidopsis thaliana
  peptide (1)..(239): Ceres Seq. ID no. 13490770
MHMRGHGDEYKTAAALAKPNKESVPGSEPMLIKRYSCPFLGCKRNKEHKKFQPLKTILCVKNHYKRTHCDKSFTCSRCHTKKFSVIADLKTHEKHCGKNKWLCSCGTTFSRKDKLFGHIALFQGHTPAIPLEETKPSASTSTQRGSSEGGNNNQGMVGFNLGSASNANQETTQPGMTDGRICFEESFSPMNFDTCNFGGFHEFPRLMFDDSESSFQMLIANACGFSPRNVGESVSDTSL

SEQ ID NO: 25233 - DNA, 1239 bp, Arabidopsis thaliana
  misc_feature (1)..(1239): Ceres Seq. ID no. 12396085
  misc_feature (1)..(1239): Ortholog of  Ceres SEQ ID NO 13590307 as cited in SEQ ID NO 67154
acgctctctcactgatcattcacaatctctctctttttttcaccggcgataattttccgatctcgattataagatggctaagaaaccagttcgtgttcttgttaccggagctgcaggacaaatcggatatgctcttgttcctatgattgcaagggggataatgcttggtgctgatcagcctgtgatcctccacatgcttgacatcccttttgcagcagaagctttgaacggtgtgaagatggaattggtcgatgctgctttccctcttctaaagggtgtggtggctacaactgatgctgttgaagcgtgtaccggtgttaatgttgctgtcatggttggtggtttcccgaggaaggaaggaatggagaggaaggatgttatgtccaagaacgtttccatttacaagtctcaagcttctgccttggagaagcatgctgcaccaaactgcaaggttctggttgttgcaaaccctgcaaacaccaatgcattgatcctgaaggaatttgcaccatcgatcccagagaagaacattacttgcttgaccaggcttgaccacaacagagcattgggacaagtgtctgagaggttaagcgtaccagtctctgatgtgaagaacgtgattatctggggaaaccactcttcaacccaatacccagatgtcaaccacgctaccgtcaagacttcttctggagagaagccagtgcgtgagctagtcaagaatgacgagtggttgaatggagagttcatctctaccgttcaacaacgtggtgctgccattatcaaggccaggaagctgtctagtgcactttctgcagctagctcagcttgtgaccatatccgtgattgggttgttggaacacccgagggcacatttgtttcaatgggagtatactcagatggatcctacaatgttccagctggacttatctactccttccccgtaacctgccgtaatggagagtggaccattgttcaaggtttaccgattgatgacgcatcgaggaagaagatggatttgacagcagaggagttgaaggaagagaaggacctcgcttactcatgcctctcttaaacccgtcttttctcagctggtttaatcagtgagagctttgtttcgaataaagaagttttgttataaaatgaacttttaataacctcatgagcttgaggtttagttttcctaatgttcccatgatgtgtcggtactgatttgctgaccatatataaacaatcattttg

SEQ ID NO: 25234 - protein, 332 aa, Arabidopsis thaliana
  peptide (1)..(332): Ceres Seq. ID no. 12396086
MAKKPVRVLVTGAAGQIGYALVPMIARGIMLGADQPVILHMLDIPFAAEALNGVKMELVDAAFPLLKGVVATTDAVEACTGVNVAVMVGGFPRKEGMERKDVMSKNVSIYKSQASALEKHAAPNCKVLVVANPANTNALILKEFAPSIPEKNITCLTRLDHNRALGQVSERLSVPVSDVKNVIIWGNHSSTQYPDVNHATVKTSSGEKPVRELVKNDEWLNGEFISTVQQRGAAIIKARKLSSALSAASSACDHIRDWVVGTPEGTFVSMGVYSDGSYNVPAGLIYSFPVTCRNGEWTIVQGLPIDDASRKKMDLTAEELKEEKDLAYSCLS

SEQ ID NO: 25235 - protein, 309 aa, Arabidopsis thaliana
  peptide (1)..(309): Ceres Seq. ID no. 12396087
MIARGIMLGADQPVILHMLDIPFAAEALNGVKMELVDAAFPLLKGVVATTDAVEACTGVNVAVMVGGFPRKEGMERKDVMSKNVSIYKSQASALEKHAAPNCKVLVVANPANTNALILKEFAPSIPEKNITCLTRLDHNRALGQVSERLSVPVSDVKNVIIWGNHSSTQYPDVNHATVKTSSGEKPVRELVKNDEWLNGEFISTVQQRGAAIIKARKLSSALSAASSACDHIRDWVVGTPEGTFVSMGVYSDGSYNVPAGLIYSFPVTCRNGEWTIVQGLPIDDASRKKMDLTAEELKEEKDLAYSCLS

SEQ ID NO: 25236 - protein, 303 aa, Arabidopsis thaliana
  peptide (1)..(303): Ceres Seq. ID no. 12396088
MLGADQPVILHMLDIPFAAEALNGVKMELVDAAFPLLKGVVATTDAVEACTGVNVAVMVGGFPRKEGMERKDVMSKNVSIYKSQASALEKHAAPNCKVLVVANPANTNALILKEFAPSIPEKNITCLTRLDHNRALGQVSERLSVPVSDVKNVIIWGNHSSTQYPDVNHATVKTSSGEKPVRELVKNDEWLNGEFISTVQQRGAAIIKARKLSSALSAASSACDHIRDWVVGTPEGTFVSMGVYSDGSYNVPAGLIYSFPVTCRNGEWTIVQGLPIDDASRKKMDLTAEELKEEKDLAYSCLS

SEQ ID NO: 25237 - DNA, 1609 bp, Arabidopsis thaliana
  misc_feature (1)..(1609): Ceres Seq. ID no. 12385308
  misc_feature (1)..(1609): Ortholog of  Ceres SEQ ID NO 12627133 as cited in SEQ ID NO 68031
tctcttttctttcactctctgttttgttctttatcgcctgagaattgatgtggatttttcatatttcagttaatcttagctaattgacttgaaattcaatgaaaagattcaatttttggtttaattaagcaagttgtgagatagatgaacgaatttgttgaccaattgcgttttacaggatacgtttgttgctctatgaagtcttatagattatctgaacttagttcttcccaagttgatagtttgaagtcacgccctcgcattgacttctcttctattttcgccactgtgaacccgattatcgatgctgttcgtagcaatggggataatgctgtcaaagaatacactgaaagatttgacaaagtccagctgaataaagttgtggaagatatgtctgagctttctgttcctgagctcgattccaatgtcaaagaagcgtttgatgttgcgtatgacaacatatatgcgtttcacttagcccaaaagtcaactgagaaaagcgttgagaatatgaaaggtgtcagatgtaaaagggtgtcaagatctattggctctgtaggtctttatgtgcctggtggaacagctgttttgccatcaacggctttgatgcttgctattcctgctcaaattgctggatgtaaaacagttgttcttgcaactccaccaagtaaggatggaagcatttgtaaggaggttctgtattgcgccaagagggctggtgtaactcacatactcaaagctggtggagcgcaggctatagctgccatggcctgggggacagattcttgtccaaaggttgagaagatttttggtcctgggaaccagtatgtcacagctgctaagatgattcttcaaaacagcgaggcaatggtctcaatcgatatgcctgctggtccttcagaagtcctagttattgctgacgaacatgctagtccagtttacattgcagcagacttactttctcaggcggagcatggtccagatagtcaagttgttcttgtagttgtgggcgatagtgtagatctcaacgccatcgaagaagaaattgccaagcagtgcaaaagccttcctagaggagagtttgcttcaaaagcactaagtcacagtttcacagtgtttgctcgagatatgattgaggcaatatctttctcaaatctatatgcacccgaacatttgatcatcaatgtcaaagacgctgagaaatgggagggactgattgagaacgcaggctcggttttcataggaccatggactccagagagtgttggggattatgcgagcgggacaaaccacgttcttccaacatatggatatgcaagaatgtacagtggcgtctctctcgactctttcctaaagttcatgactgtacaatctttgacagaggaaggtctgagaaacctcggcccttatgtagcaactatggctgaaatcgaaggtttagatgcacacaagagagccgttactctcagactcaaggatatcgaagccaaacagcttgcataatccaattgagatttatattcagacaaaagaggcgaaaattctttttgtattgtatgaacatatttggtttcctgagattggataacaataaaataagagatgttgg

SEQ ID NO: 25238 - protein, 452 aa, Arabidopsis thaliana
  peptide (1)..(452): Ceres Seq. ID no. 12385309
MNEFVDQLRFTGYVCCSMKSYRLSELSSSQVDSLKSRPRIDFSSIFATVNPIIDAVRSNGDNAVKEYTERFDKVQLNKVVEDMSELSVPELDSNVKEAFDVAYDNIYAFHLAQKSTEKSVENMKGVRCKRVSRSIGSVGLYVPGGTAVLPSTALMLAIPAQIAGCKTVVLATPPSKDGSICKEVLYCAKRAGVTHILKAGGAQAIAAMAWGTDSCPKVEKIFGPGNQYVTAAKMILQNSEAMVSIDMPAGPSEVLVIADEHASPVYIAADLLSQAEHGPDSQVVLVVVGDSVDLNAIEEEIAKQCKSLPRGEFASKALSHSFTVFARDMIEAISFSNLYAPEHLIINVKDAEKWEGLIENAGSVFIGPWTPESVGDYASGTNHVLPTYGYARMYSGVSLDSFLKFMTVQSLTEEGLRNLGPYVATMAEIEGLDAHKRAVTLRLKDIEAKQLA

SEQ ID NO: 25239 - protein, 435 aa, Arabidopsis thaliana
  peptide (1)..(435): Ceres Seq. ID no. 12385310
MKSYRLSELSSSQVDSLKSRPRIDFSSIFATVNPIIDAVRSNGDNAVKEYTERFDKVQLNKVVEDMSELSVPELDSNVKEAFDVAYDNIYAFHLAQKSTEKSVENMKGVRCKRVSRSIGSVGLYVPGGTAVLPSTALMLAIPAQIAGCKTVVLATPPSKDGSICKEVLYCAKRAGVTHILKAGGAQAIAAMAWGTDSCPKVEKIFGPGNQYVTAAKMILQNSEAMVSIDMPAGPSEVLVIADEHASPVYIAADLLSQAEHGPDSQVVLVVVGDSVDLNAIEEEIAKQCKSLPRGEFASKALSHSFTVFARDMIEAISFSNLYAPEHLIINVKDAEKWEGLIENAGSVFIGPWTPESVGDYASGTNHVLPTYGYARMYSGVSLDSFLKFMTVQSLTEEGLRNLGPYVATMAEIEGLDAHKRAVTLRLKDIEAKQLA

SEQ ID NO: 25240 - protein, 370 aa, Arabidopsis thaliana
  peptide (1)..(370): Ceres Seq. ID no. 12385311
MSELSVPELDSNVKEAFDVAYDNIYAFHLAQKSTEKSVENMKGVRCKRVSRSIGSVGLYVPGGTAVLPSTALMLAIPAQIAGCKTVVLATPPSKDGSICKEVLYCAKRAGVTHILKAGGAQAIAAMAWGTDSCPKVEKIFGPGNQYVTAAKMILQNSEAMVSIDMPAGPSEVLVIADEHASPVYIAADLLSQAEHGPDSQVVLVVVGDSVDLNAIEEEIAKQCKSLPRGEFASKALSHSFTVFARDMIEAISFSNLYAPEHLIINVKDAEKWEGLIENAGSVFIGPWTPESVGDYASGTNHVLPTYGYARMYSGVSLDSFLKFMTVQSLTEEGLRNLGPYVATMAEIEGLDAHKRAVTLRLKDIEAKQLA

SEQ ID NO: 25241 - DNA, 1493 bp, Arabidopsis thaliana
  misc_feature (1)..(1493): Ceres Seq. ID no. 13490763
  misc_feature (1)..(1493): Ortholog of  Ceres SEQ ID NO 14311136 as cited in SEQ ID NO 56694
gacccacgcgtccgtacaggcgtgctctctctcctctctccatctatctccctctcttcgccggagatcgcccttcaccaattccactatagtagcaaaaacaagtgaagcacaatggggatcatcgaaaggattaaagaaatcgaggccgagatggctcggactcagaagaataaagctacagagtatcatcttggtcagctcaaggcaaagattgcaaaactcaggacacaactgttggagcctccaaaaggtgctagtggaggcggggaaggttttgaagttaccaagtatggtcatggacgtgttgcacttataggatttcctagtgtcggaaagtccacgcttttgactatgttaactggaacacattctgaagcagcctcatatgaatttacaacacttacatgcatccctggtgtaattcactacaacgacacaaagattcagcttctcgatcttcctgggattattgaaggtgcttcggaaggaaaggggcgaggaaggcaggttattgctgttgcaaagtcttccgaccttgtattgatggttcttgatgcctcaaaaagcgaaggccacaggcaaatattgactaaggaacttgaggcagtgggcttgcgactaaacaaaactcctccgcagatatactttaaaaagaaaaagactggtggaatctctttcaacactacagcacccttgactcacattgatgagaagctctgttatcaaatcctgcatgaatacaagattcacaatgctgaggtgctatttcgtgagaatgccacagtggatgactttattgatgtcattgaaggcaaccgcaagtatattaagtgtgtttatgtctacatcaaaatagatgttgttggaattgatgatgtggatagactatcccggcagccaaattccattgttattagctgcaatcttaagcttaacttagacagactacttgctaggatgtgggacgaaatgggccttgtgagagtttactcgaagccgcaaggccagcaaccagatttcgatgagccttttgtcctctcatctgatcgaggtggctgcacagtggaagacttctgtaaccacgtccacaggactctggtgaaggatatgaagtatgcactcgtttggggcacaagcacaaggcacaatccacagaattgtggtctttctcaacatcttgaagacgaagatgttgttcagatcgtcaagaaaaaggagagagacgaaggaggaagaggccggttcaagtcacactcaaacgcccctgctagaattgcagacagagagaaaaaagctcctcttaagcaataagcttttagctgataagtcatctccatacatccatctccaccatcatagtcgtggatggtttcacctgagtaagatttactatgttgtatctgaatccgttttgttgttttctctcacaatataagttttggaacaattttacttttttgagatacaaatggaagtacgagttcctattt

SEQ ID NO: 25242 - protein, 399 aa, Arabidopsis thaliana
  peptide (1)..(399): Ceres Seq. ID no. 13490764
MGIIERIKEIEAEMARTQKNKATEYHLGQLKAKIAKLRTQLLEPPKGASGGGEGFEVTKYGHGRVALIGFPSVGKSTLLTMLTGTHSEAASYEFTTLTCIPGVIHYNDTKIQLLDLPGIIEGASEGKGRGRQVIAVAKSSDLVLMVLDASKSEGHRQILTKELEAVGLRLNKTPPQIYFKKKKTGGISFNTTAPLTHIDEKLCYQILHEYKIHNAEVLFRENATVDDFIDVIEGNRKYIKCVYVYIKIDVVGIDDVDRLSRQPNSIVISCNLKLNLDRLLARMWDEMGLVRVYSKPQGQQPDFDEPFVLSSDRGGCTVEDFCNHVHRTLVKDMKYALVWGTSTRHNPQNCGLSQHLEDEDVVQIVKKKERDEGGRGRFKSHSNAPARIADREKKAPLKQ

SEQ ID NO: 25243 - protein, 386 aa, Arabidopsis thaliana
  peptide (1)..(386): Ceres Seq. ID no. 13490765
MARTQKNKATEYHLGQLKAKIAKLRTQLLEPPKGASGGGEGFEVTKYGHGRVALIGFPSVGKSTLLTMLTGTHSEAASYEFTTLTCIPGVIHYNDTKIQLLDLPGIIEGASEGKGRGRQVIAVAKSSDLVLMVLDASKSEGHRQILTKELEAVGLRLNKTPPQIYFKKKKTGGISFNTTAPLTHIDEKLCYQILHEYKIHNAEVLFRENATVDDFIDVIEGNRKYIKCVYVYIKIDVVGIDDVDRLSRQPNSIVISCNLKLNLDRLLARMWDEMGLVRVYSKPQGQQPDFDEPFVLSSDRGGCTVEDFCNHVHRTLVKDMKYALVWGTSTRHNPQNCGLSQHLEDEDVVQIVKKKERDEGGRGRFKSHSNAPARIADREKKAPLKQ

SEQ ID NO: 25244 - protein, 319 aa, Arabidopsis thaliana
  peptide (1)..(319): Ceres Seq. ID no. 13490766
MLTGTHSEAASYEFTTLTCIPGVIHYNDTKIQLLDLPGIIEGASEGKGRGRQVIAVAKSSDLVLMVLDASKSEGHRQILTKELEAVGLRLNKTPPQIYFKKKKTGGISFNTTAPLTHIDEKLCYQILHEYKIHNAEVLFRENATVDDFIDVIEGNRKYIKCVYVYIKIDVVGIDDVDRLSRQPNSIVISCNLKLNLDRLLARMWDEMGLVRVYSKPQGQQPDFDEPFVLSSDRGGCTVEDFCNHVHRTLVKDMKYALVWGTSTRHNPQNCGLSQHLEDEDVVQIVKKKERDEGGRGRFKSHSNAPARIADREKKAPLKQ

SEQ ID NO: 25245 - DNA, 1356 bp, Arabidopsis thaliana
  misc_feature (1)..(1356): Ceres Seq. ID no. 12322340
  misc_feature (1)..(1356): Ortholog of  Ceres SEQ ID NO 13655244 as cited in SEQ ID NO 62716
aaattttcgattgattcgcttcttcaactctctctcttcttcttcttctatttgcttctgtgaaaccctagattttggtgtgaggaagaagacttcaatggcggaagaagtagcagagaacgttaacgcagtcccggtttcggaagacgagctttacggatttaaacgatcggagatgtacagtggtactctcgccggttccgttggtccgtacggtcgtcatgttttcctttgttacaagagtcatgagacttggcttcctcgtgttgaaactgaaggacttcctcagcgtttcgcgaagttgtttaaggatcgtaaagctgatttcgctgttgagacgaagcttacggtgtgtggtggtggtggtgaatctgatggagatgtgttgattttcccggagatggttagatacaaggcgattcaggacacagatgtggatgcttttgtggaagatgtgcttgtgaaaggaaaaacatggacttctgggattcaggaagagttgactggttcctttgtgtttgtgtgcgctcatggtagccgagacaagagatgtggtgtttgtggaccagttcttatggagaagttcgagcaggagataagttcacgtggactttcagacaaaatctttgttttgccgtgttctcatatcggtgggcacaagtatgctggaaatttgattgtcttcagccctgattcagctggaaatgtttctggccattggtatggctatgtgactcctgatgacgtgcctgcaatgcttgatcagcatattgcaaaaggagaaatcattcaaaacctttccagaggccagatgagactaagacccgagggtgaggaagctgagaaagaggatgagcataaaatcccaaacggaaacagtgtaatggtggaagaacgcgaacctgtggagcagaaagggttcacaggaggttgttgccaaggtgcaaacggagtttcatgttgccaagaacaagctgcagagccagtcaagaaagaaggatgcatgaagctaaactggttgaaatcgatggggaaagaagaggttctcttgggagcagcagtagtttcagctgtcgcaaccgttgccgtggcttacagcatttacagaaggtcaggttaagaacctgaaccaccctcctctttttacacttttaagaagaaactttatttttggtagccatattatagaagtaaaggaagaaaagaaaacatggagaggtaataatcttttggaactatataaccatcatttggtttcggtatgggcaatgcaggaatgggatgtaatcttgcttttgactcggtttagtttggtttatcttattatgttgtcattggaatatatcaatcttctcc

SEQ ID NO: 25246 - protein, 372 aa, Arabidopsis thaliana
  peptide (1)..(372): Ceres Seq. ID no. 12322341
NFRLIRFFNSLSSSSSICFCETLDFGVRKKTSMAEEVAENVNAVPVSEDELYGFKRSEMYSGTLAGSVGPYGRHVFLCYKSHETWLPRVETEGLPQRFAKLFKDRKADFAVETKLTVCGGGGESDGDVLIFPEMVRYKAIQDTDVDAFVEDVLVKGKTWTSGIQEELTGSFVFVCAHGSRDKRCGVCGPVLMEKFEQEISSRGLSDKIFVLPCSHIGGHKYAGNLIVFSPDSAGNVSGHWYGYVTPDDVPAMLDQHIAKGEIIQNLSRGQMRLRPEGEEAEKEDEHKIPNGNSVMVEEREPVEQKGFTGGCCQGANGVSCCQEQAAEPVKKEGCMKLNWLKSMGKEEVLLGAAVVSAVATVAVAYSIYRRSG

SEQ ID NO: 25247 - protein, 340 aa, Arabidopsis thaliana
  peptide (1)..(340): Ceres Seq. ID no. 12322342
MAEEVAENVNAVPVSEDELYGFKRSEMYSGTLAGSVGPYGRHVFLCYKSHETWLPRVETEGLPQRFAKLFKDRKADFAVETKLTVCGGGGESDGDVLIFPEMVRYKAIQDTDVDAFVEDVLVKGKTWTSGIQEELTGSFVFVCAHGSRDKRCGVCGPVLMEKFEQEISSRGLSDKIFVLPCSHIGGHKYAGNLIVFSPDSAGNVSGHWYGYVTPDDVPAMLDQHIAKGEIIQNLSRGQMRLRPEGEEAEKEDEHKIPNGNSVMVEEREPVEQKGFTGGCCQGANGVSCCQEQAAEPVKKEGCMKLNWLKSMGKEEVLLGAAVVSAVATVAVAYSIYRRSG

SEQ ID NO: 25248 - protein, 314 aa, Arabidopsis thaliana
  peptide (1)..(314): Ceres Seq. ID no. 12322343
MYSGTLAGSVGPYGRHVFLCYKSHETWLPRVETEGLPQRFAKLFKDRKADFAVETKLTVCGGGGESDGDVLIFPEMVRYKAIQDTDVDAFVEDVLVKGKTWTSGIQEELTGSFVFVCAHGSRDKRCGVCGPVLMEKFEQEISSRGLSDKIFVLPCSHIGGHKYAGNLIVFSPDSAGNVSGHWYGYVTPDDVPAMLDQHIAKGEIIQNLSRGQMRLRPEGEEAEKEDEHKIPNGNSVMVEEREPVEQKGFTGGCCQGANGVSCCQEQAAEPVKKEGCMKLNWLKSMGKEEVLLGAAVVSAVATVAVAYSIYRRSG

SEQ ID NO: 25249 - DNA, 1426 bp, Arabidopsis thaliana
  misc_feature (1)..(1426): Ceres Seq. ID no. 12330660
  misc_feature (1)..(1426): Ortholog of  Ceres SEQ ID NO 13582301 as cited in SEQ ID NO 56509
taataatattcttttaaaaaaatagaaacgttggtcacgaggcctcatcaatgcttttgataccttccttcaccgcaaattctaacgaaccaccaccgtcgaagctttctctttccgatctttcaatggcgattctcaaatctcacttcttcttactcttccctcttcttcttctccactttcacactgtctcctttgctcagacgctctttgtgttcggagatggtctttacgacgccggaaacaaacagtttctctctcagaaccgagttgacgcaagctttcctccttatggagtcactgtaggacaagccaccggacggtggtccgatggttctatcgttcctgattatcttgctaaattcatgggaattcctaaaatctctccgattctcctaaccacggcggatttttctcacggagctaatttcgccatcgccgacgctaccgttcttggctctcctccggagacgatgactttgtcacaacaagtgaagaaattctcggaaaacaagaataagtggacaaatcaaacacgttctgaagctatctacttgatctacattggttctgatgattacttgagctatgctaagagtaatccaagtccatcagatactcagaaacaagcttttgttgatcaagtcatcactaccataaaagcagaaataaaggtggtttacgggtctggcggaaggaaattcgcattccagaacttggcaccgttaggttgcttaccggccgtgaaacaagcaagcggaaatgttcaagaatgtgtgaaattgccttcggaaatggctgctttgcataacaagaaacttttgcagctcttggttgaactatcaagagaactaaatggtttccagtactcgttttacgacttctttagctcgatccaaaacagagttatcaagtctaagacttatacattcgagacaggaaacgctgcttgttgtggaactggctctatcaacgggagtaattgctcagctaaaaatgtatgcgccaagcctgaagagtatatcttctttgatggtaagcatttgacgcaagaagccaaccttcaggtcgggcatttgatgtggggagcagatccggaagtgattggaccgaacaatatcagggagcttatggtccttcctctagacattacagtcatcttagctggtatacaagaagctatggctgccatgagaccgagacagagcaacattgagagtctctatgatatcaagaagatggagtcagagatggataatcattggctttatcaagttgacaaagctatctcctttatgatataagattgtggttacagtttgatttaagcgagagagtttaagagctagtgtaacaaagaactagcaagaaaactgaaacatccatttttcttgtttagtaataaaacaatcaaccttattaagtc

SEQ ID NO: 25250 - protein, 417 aa, Arabidopsis thaliana
  peptide (1)..(417): Ceres Seq. ID no. 12330661
MLLIPSFTANSNEPPPSKLSLSDLSMAILKSHFFLLFPLLLLHFHTVSFAQTLFVFGDGLYDAGNKQFLSQNRVDASFPPYGVTVGQATGRWSDGSIVPDYLAKFMGIPKISPILLTTADFSHGANFAIADATVLGSPPETMTLSQQVKKFSENKNKWTNQTRSEAIYLIYIGSDDYLSYAKSNPSPSDTQKQAFVDQVITTIKAEIKVVYGSGGRKFAFQNLAPLGCLPAVKQASGNVQECVKLPSEMAALHNKKLLQLLVELSRELNGFQYSFYDFFSSIQNRVIKSKTYTFETGNAACCGTGSINGSNCSAKNVCAKPEEYIFFDGKHLTQEANLQVGHLMWGADPEVIGPNNIRELMVLPLDITVILAGIQEAMAAMRPRQSNIESLYDIKKMESEMDNHWLYQVDKAISFMI

SEQ ID NO: 25251 - protein, 392 aa, Arabidopsis thaliana
  peptide (1)..(392): Ceres Seq. ID no. 12330662
MAILKSHFFLLFPLLLLHFHTVSFAQTLFVFGDGLYDAGNKQFLSQNRVDASFPPYGVTVGQATGRWSDGSIVPDYLAKFMGIPKISPILLTTADFSHGANFAIADATVLGSPPETMTLSQQVKKFSENKNKWTNQTRSEAIYLIYIGSDDYLSYAKSNPSPSDTQKQAFVDQVITTIKAEIKVVYGSGGRKFAFQNLAPLGCLPAVKQASGNVQECVKLPSEMAALHNKKLLQLLVELSRELNGFQYSFYDFFSSIQNRVIKSKTYTFETGNAACCGTGSINGSNCSAKNVCAKPEEYIFFDGKHLTQEANLQVGHLMWGADPEVIGPNNIRELMVLPLDITVILAGIQEAMAAMRPRQSNIESLYDIKKMESEMDNHWLYQVDKAISFMI

SEQ ID NO: 25252 - protein, 312 aa, Arabidopsis thaliana
  peptide (1)..(312): Ceres Seq. ID no. 12330663
MGIPKISPILLTTADFSHGANFAIADATVLGSPPETMTLSQQVKKFSENKNKWTNQTRSEAIYLIYIGSDDYLSYAKSNPSPSDTQKQAFVDQVITTIKAEIKVVYGSGGRKFAFQNLAPLGCLPAVKQASGNVQECVKLPSEMAALHNKKLLQLLVELSRELNGFQYSFYDFFSSIQNRVIKSKTYTFETGNAACCGTGSINGSNCSAKNVCAKPEEYIFFDGKHLTQEANLQVGHLMWGADPEVIGPNNIRELMVLPLDITVILAGIQEAMAAMRPRQSNIESLYDIKKMESEMDNHWLYQVDKAISFMI

SEQ ID NO: 25253 - DNA, 1230 bp, Arabidopsis thaliana
  misc_feature (1)..(1230): Ceres Seq. ID no. 12335445
  misc_feature (1)..(1230): Ortholog of  Ceres SEQ ID NO 14304170 as cited in SEQ ID NO 53453
  misc_feature (1)..(1230): Ortholog of  Ceres SEQ ID NO 14315911 as cited in SEQ ID NO 56998
  misc_feature (1)..(1230): Ortholog of  Ceres SEQ ID NO 13656028 as cited in SEQ ID NO 64728
ttttggtgaatcgattgttctcctttcttcgatatcgaattagggtttctgtagaatccagtttttgataggaacaatgtcaatttcggtggttgatagcagtctctgccatccgactgcgtcgtttccgtcatccatggttcattctaatcgattctcgaagagaatatcagggaacgggaattgggttcgcgaaaggagaagactttatgtgaaatcgagtaactcagaaggtaaaaaggaggaagcagcacagaaatcgagcagtaataatacatctagcttcttgtcttttctctgtccattgcttaaagctttctctggaggtgatccttctcaacagcggaatcatgctctcgaggttgcaacttcttcattggcatctgttgcaagacttccatggggatctcgagtatcaactgggagtatagataaccaggatgtctcttctaatccgcctttgcgattgcagctttttgaatttgaggcatgtcccttttgtcggagagtgcgggaagccatgactgagctagacctttcagtagaagtttatccttgtcctaaaggatctataagacacagagaactggttagaagatctggcggaaaagagatgtttccatttctcgtcgacccgaatactgaaactttaatgtatgagagtggtgacatcgtaaagtacctatttaaacaatatggaaatggaagaggcccttccacaggacttctggaaagcaccttgttcactggatggatgccaactcttctccgagcaggtagaggcatgtcattgtgggataaggcttcaacagatctgccacctaaaatgctcgagctcttctcttacgaaaacaacccgtattcacggttggtgcgtgaagcactgtgtgagctggagcttccctatgtattacacaacattggagaagggtccacacggatgaaatcacttctaaatgcttcaggatccaataaggttccattcttggttgatccaaacaccggtgtccaattaggtgattacgagaagattctggcttacctcttcaagacatattcttcagcagcatctgcatagtccatagaacctatacatcattattcccaaggtacaagcttttgagtccacatgttttaacaatactgagaaactggttgacatggaagttacatacatggtcaaaatctgaacttttgaatatatgatgagtcggtaggtatcgcaagttg

SEQ ID NO: 25254 - protein, 333 aa, Arabidopsis thaliana
  peptide (1)..(333): Ceres Seq. ID no. 12335446
MSISVVDSSLCHPTASFPSSMVHSNRFSKRISGNGNWVRERRRLYVKSSNSEGKKEEAAQKSSSNNTSSFLSFLCPLLKAFSGGDPSQQRNHALEVATSSLASVARLPWGSRVSTGSIDNQDVSSNPPLRLQLFEFEACPFCRRVREAMTELDLSVEVYPCPKGSIRHRELVRRSGGKEMFPFLVDPNTETLMYESGDIVKYLFKQYGNGRGPSTGLLESTLFTGWMPTLLRAGRGMSLWDKASTDLPPKMLELFSYENNPYSRLVREALCELELPYVLHNIGEGSTRMKSLLNASGSNKVPFLVDPNTGVQLGDYEKILAYLFKTYSSAASA

SEQ ID NO: 25255 - protein, 313 aa, Arabidopsis thaliana
  peptide (1)..(313): Ceres Seq. ID no. 12335447
MVHSNRFSKRISGNGNWVRERRRLYVKSSNSEGKKEEAAQKSSSNNTSSFLSFLCPLLKAFSGGDPSQQRNHALEVATSSLASVARLPWGSRVSTGSIDNQDVSSNPPLRLQLFEFEACPFCRRVREAMTELDLSVEVYPCPKGSIRHRELVRRSGGKEMFPFLVDPNTETLMYESGDIVKYLFKQYGNGRGPSTGLLESTLFTGWMPTLLRAGRGMSLWDKASTDLPPKMLELFSYENNPYSRLVREALCELELPYVLHNIGEGSTRMKSLLNASGSNKVPFLVDPNTGVQLGDYEKILAYLFKTYSSAASA

SEQ ID NO: 25256 - protein, 185 aa, Arabidopsis thaliana
  peptide (1)..(185): Ceres Seq. ID no. 12335448
MTELDLSVEVYPCPKGSIRHRELVRRSGGKEMFPFLVDPNTETLMYESGDIVKYLFKQYGNGRGPSTGLLESTLFTGWMPTLLRAGRGMSLWDKASTDLPPKMLELFSYENNPYSRLVREALCELELPYVLHNIGEGSTRMKSLLNASGSNKVPFLVDPNTGVQLGDYEKILAYLFKTYSSAASA

SEQ ID NO: 25257 - DNA, 1150 bp, Arabidopsis thaliana
  misc_feature (1)..(1150): Ceres Seq. ID no. 12371236
  misc_feature (1)..(1150): Ortholog of  Ceres SEQ ID NO 14312594 as cited in SEQ ID NO 58686
ttataaagaaaaacacggatcttggaattatctttaaaatcatcttgtgaatacagcaaattgggaaatatgagaaaaggattctctcaagaagaagcttctcctcgtctagacagacttatgttcgataagataaaagaagcattaggaggaagagctcatatgttgttatcaggagcagcgcctctacctcgtcatgtagaggagttcttgagaatcattcctgcctctaatctctctcaaggttatggattgactgagagttgtgggggaagcttcacgaccttagccggagtattttctatggtggggacagtgggtgtgccaatgcccacggtggaggcaaggctagtgtccgtaccagagatgggttacgacgccttttccgctgacgtgccgagaggagagatttgtcttagaggaaattcaatgttttctggttaccataaaagacaagatctaactgatcaagtcctaatcgatggatggttccacacaggagatattggagaatggcaagaagatggatcaatgaagatcatcgataggaagaagaacatcttcaagttgtctcaaggtgaatatgttgctgttgaaaacctcgaaaacacttactcaagatgtcccctcattgctcagatatgggtctatggcaacagcttcgagtcatttttggtaggtgtggttgtacctgatagaaaagctattgaagattgggctaaactcaattaccaatctcccaatgatttcgaatctctatgtcaaaatctcaaagctcaaaaatacttcttggatgagcttaactctaccgcaaagcaatatcaacttaaaggatttgaaatgttaaaagctattcatttagaaccaaacccttttgatattgaaagagatcttattactccaactttcaagctgaaaaggccacagctcctccaacattacaagggcatagttgatcaactttattcagaagcaaagaggtccatggcatagataattagatacctatcggctattcattttctgatgctatttgggtttgtatgatagtatgttacaaaattgtgttcggatcctctcatcatgtgattcttgttacactaaatttatagtttggaaactatatatatactattaagcaacgtttact

SEQ ID NO: 25258 - protein, 307 aa, Arabidopsis thaliana
  peptide (1)..(307): Ceres Seq. ID no. 12371237
MRKGFSQEEASPRLDRLMFDKIKEALGGRAHMLLSGAAPLPRHVEEFLRIIPASNLSQGYGLTESCGGSFTTLAGVFSMVGTVGVPMPTVEARLVSVPEMGYDAFSADVPRGEICLRGNSMFSGYHKRQDLTDQVLIDGWFHTGDIGEWQEDGSMKIIDRKKNIFKLSQGEYVAVENLENTYSRCPLIAQIWVYGNSFESFLVGVVVPDRKAIEDWAKLNYQSPNDFESLCQNLKAQKYFLDELNSTAKQYQLKGFEMLKAIHLEPNPFDIERDLITPTFKLKRPQLLQHYKGIVDQLYSEAKRSMA

SEQ ID NO: 25259 - protein, 290 aa, Arabidopsis thaliana
  peptide (1)..(290): Ceres Seq. ID no. 12371238
MFDKIKEALGGRAHMLLSGAAPLPRHVEEFLRIIPASNLSQGYGLTESCGGSFTTLAGVFSMVGTVGVPMPTVEARLVSVPEMGYDAFSADVPRGEICLRGNSMFSGYHKRQDLTDQVLIDGWFHTGDIGEWQEDGSMKIIDRKKNIFKLSQGEYVAVENLENTYSRCPLIAQIWVYGNSFESFLVGVVVPDRKAIEDWAKLNYQSPNDFESLCQNLKAQKYFLDELNSTAKQYQLKGFEMLKAIHLEPNPFDIERDLITPTFKLKRPQLLQHYKGIVDQLYSEAKRSMA

SEQ ID NO: 25260 - protein, 276 aa, Arabidopsis thaliana
  peptide (1)..(276): Ceres Seq. ID no. 12371239
MLLSGAAPLPRHVEEFLRIIPASNLSQGYGLTESCGGSFTTLAGVFSMVGTVGVPMPTVEARLVSVPEMGYDAFSADVPRGEICLRGNSMFSGYHKRQDLTDQVLIDGWFHTGDIGEWQEDGSMKIIDRKKNIFKLSQGEYVAVENLENTYSRCPLIAQIWVYGNSFESFLVGVVVPDRKAIEDWAKLNYQSPNDFESLCQNLKAQKYFLDELNSTAKQYQLKGFEMLKAIHLEPNPFDIERDLITPTFKLKRPQLLQHYKGIVDQLYSEAKRSMA

SEQ ID NO: 25261 - DNA, 1297 bp, Arabidopsis thaliana
  misc_feature (1)..(1297): Ceres Seq. ID no. 12324847
  misc_feature (1)..(1297): Ortholog of  Ceres SEQ ID NO 15172948 as cited in SEQ ID NO 51777
  misc_feature (1)..(1297): Ortholog of  Ceres SEQ ID NO 12784416 as cited in SEQ ID NO 61324
atattccaaaattaaagagaatttaatttattgttttccttccagaaaaatattaatattctttctaaactaaaaaatggagtcttcaaatagcacagaagcagagacatagagcgggaacgcgtttagtcacagctttcttctcctttagcttttctctctacacttgcttctctctctctctctcctttgggttatccttcttgagatctgtgcttgcgtttcttcttcattcgacgacactttatctcgggagatttcagatttgtcgatttgttcagcaatggcgccaccgattgaggtttctaccaaaagctacgttgagaaacatgtttcacttcctactcttaatgagaggatactttcgtccatgagtcacagatcagtagctgcacacccatggcatgatctcgagataggacctgaagccccaattatcttcaattgtgtggttgagataggaaaagggagcaaggtgaaatatgaactcgacaaaactacgggtctcattaaggtcgaccgtattctttactcatctgtcgtatacccacacaactatgggttcattccgcgtaccctttgtgaggacagtgaccctattgatgttcttgtcattatgcaggaaccggtgatcccagcatgctttcttcgggccaaagctattggtctgatgccaatgattgatcagggtgagaaagacgacaagatcattgctgtctgcgctgacgatccagagtatcgccattacaacgacatcagtgagcttccgcctcatcgtatggctgagatccgccgtttctttgaagactataagaaaaacgagaacaaggaagtagccgttaacgacttccttccggcaactgcagcctacgacgcagttcagcattccatggatctctatgcagactacgtcgtggagaacctaagacgttgaatcatcacctcaagcaatggaatgaaagctcacaactgcattattcacaaatataaatatacatataaatgtcaggcttctcaaaggatatatttgttgtgtatgtcctctgatgaatccggtagatgatgccgataattctttttttttttttgtcgtatgaaaccgataatcaaagactaaaacagggattttcctcatttgtggtcatcactttttaaattttggtgtcatttctcatcttaatcaatttgtttttgagttttattcttctattagatcttttatacatcaaagaatagatgaagattccaccctaaaaccttatagtatgtcatttattcacaatatgttatacgtgtt

SEQ ID NO: 25262 - protein, 216 aa, Arabidopsis thaliana
  peptide (1)..(216): Ceres Seq. ID no. 12324848
MAPPIEVSTKSYVEKHVSLPTLNERILSSMSHRSVAAHPWHDLEIGPEAPIIFNCVVEIGKGSKVKYELDKTTGLIKVDRILYSSVVYPHNYGFIPRTLCEDSDPIDVLVIMQEPVIPACFLRAKAIGLMPMIDQGEKDDKIIAVCADDPEYRHYNDISELPPHRMAEIRRFFEDYKKNENKEVAVNDFLPATAAYDAVQHSMDLYADYVVENLRR

SEQ ID NO: 25263 - protein, 187 aa, Arabidopsis thaliana
  peptide (1)..(187): Ceres Seq. ID no. 12324849
MSHRSVAAHPWHDLEIGPEAPIIFNCVVEIGKGSKVKYELDKTTGLIKVDRILYSSVVYPHNYGFIPRTLCEDSDPIDVLVIMQEPVIPACFLRAKAIGLMPMIDQGEKDDKIIAVCADDPEYRHYNDISELPPHRMAEIRRFFEDYKKNENKEVAVNDFLPATAAYDAVQHSMDLYADYVVENLRR

SEQ ID NO: 25264 - DNA, 1155 bp, Arabidopsis thaliana
  misc_feature (1)..(1155): Ceres Seq. ID no. 12335441
  misc_feature (1)..(1155): Ortholog of  Ceres SEQ ID NO 14307202 as cited in SEQ ID NO 54330
aatttcgtaaacttctaggggagaaacaagggagatagagaagtgagagagggggaaaccctagattcgatctccattcgatttgattcgtttctcgaatcgaagcgatggttttctacttcaaggcccgtcctgatgctggcgactacaccatcttcatggggcttgataagttcgagaacgaggagctcatcaagtacggcttccctgaagatgtctggtttcacgtggataaaatgtcgtcagctcatgtttacttgaggcttcatagaggccaaagttttgatgacattagtgaaggtgtgctggaggactgtgctcagcttgtgaaagctaactccattcaaggcaacaaggtgaacaacgttgatgttgtgtacactccgtggtccaacttgaagaaaactgcctccatggatgttggtcaagttggtttccacaattcaaagatggtccggactatcagagtggagaagcgagtcaatgaaatagttaacagactgaacaaaacaaaagttgaaagaacccctgatctgagagccgagagagaagcagtgaatgccgcagaaagggcagagaggaaacaacatctgagggagaagaagaaacgtgaagagatagataggcttgagaaggagaggcaatcagagatgaggagttacaagggactaatggtaactgataaaatgacatccaacaaagacattgcttcaagcaacaaatcgcttcaagaacttgaagacgatttcatgtaaaagctctgaagaaatgagaaacaaaacaaaccaagtcggtaacattctgccagagatgatctggtaccgtccttcaaagaaggcttatgatgttctactcgccttaactatgatgttgatggttgtccggttctatgttttctttaaaaaaatcttgaatacctaaaaccctaatctggttcttggactccttggtccattgaaatgtttcaaaaggattgaatctgatctgtgggaaaaaggagagcattatattctatatataacacaggtgaaccagtgatctggtgcaattatggtttactctgcattgctgtgtaacctgaaatttgtttactaccccataaagcttcatgtgttactctgcattgggttggattttggaatcactttattcttg

SEQ ID NO: 25265 - protein, 215 aa, Arabidopsis thaliana
  peptide (1)..(215): Ceres Seq. ID no. 12335442
MVFYFKARPDAGDYTIFMGLDKFENEELIKYGFPEDVWFHVDKMSSAHVYLRLHRGQSFDDISEGVLEDCAQLVKANSIQGNKVNNVDVVYTPWSNLKKTASMDVGQVGFHNSKMVRTIRVEKRVNEIVNRLNKTKVERTPDLRAEREAVNAAERAERKQHLREKKKREEIDRLEKERQSEMRSYKGLMVTDKMTSNKDIASSNKSLQELEDDFM

SEQ ID NO: 25266 - protein, 198 aa, Arabidopsis thaliana
  peptide (1)..(198): Ceres Seq. ID no. 12335443
MGLDKFENEELIKYGFPEDVWFHVDKMSSAHVYLRLHRGQSFDDISEGVLEDCAQLVKANSIQGNKVNNVDVVYTPWSNLKKTASMDVGQVGFHNSKMVRTIRVEKRVNEIVNRLNKTKVERTPDLRAEREAVNAAERAERKQHLREKKKREEIDRLEKERQSEMRSYKGLMVTDKMTSNKDIASSNKSLQELEDDFM

SEQ ID NO: 25267 - protein, 172 aa, Arabidopsis thaliana
  peptide (1)..(172): Ceres Seq. ID no. 12335444
MSSAHVYLRLHRGQSFDDISEGVLEDCAQLVKANSIQGNKVNNVDVVYTPWSNLKKTASMDVGQVGFHNSKMVRTIRVEKRVNEIVNRLNKTKVERTPDLRAEREAVNAAERAERKQHLREKKKREEIDRLEKERQSEMRSYKGLMVTDKMTSNKDIASSNKSLQELEDDFM

SEQ ID NO: 25268 - DNA, 1497 bp, Arabidopsis thaliana
  misc_feature (1)..(1497): Ceres Seq. ID no. 12738561
  misc_feature (1)..(1497): Ortholog of  Ceres SEQ ID NO 13638160 as cited in SEQ ID NO 58847
gacggcccgacctcgattctcttccacttctttcttgttccaaaaacctaaaccctctctctctctctctctctctctctatctcttgaaaaatcaacaaaacattggaatcaatttctctatgttttgattctattttaaagatccaatattctttctccattgagattaagcttctttctcgttgtcgtctctctatagatcttggttcttagtcccttttgaataataatgatggtggagatggattacgctaagaaaatgcagaaatgtcatgaatacgttgaagcacttgaagaagaacagaagaaaatccaagtctttcaacgcgagcttcctttatgtttagagcttgtcactcaagcgatcgaagcttgtcggaaggagttatctggtacgacgacaactacatcagaacagtgttcagaacagaccacaagtgtttgtggtggtcctgtctttgaagagtttattcctatcaagaaaattagttccttgtgtgaagaagtacaagaagaagaagaagaagatggtgaacatgaatcttctccagaacttgtgaataataagaaatcagattggcttagatctgttcagctatggaatcattcaccggatctaaatccaaaagaggagcgtgtagctaagaaagcgaaagtggtggaggtgaaaccaaaaagcggtgcgtttcagccatttcaaaagcgcgttttggagactgatttgcaaccggcggtgaaagtagctagttcgatgccagcgacgacgacgagttctacgacggaaacttgtggtggtaaaagtgatttgattaaagctggagatgaggaaagacggatagagcagcagcaatcgcagtcgcatacgcatagaaaacaaaggcggtgctggtcgccggaattacaccgtcgattcctaaacgcgcttcagcagcttggaggatctcatgttgctacaccaaagcaaatcagggatcacatgaaggttgatggattaacaaacgacgaagttaaaagccatttacagaaatatagacttcacacaagaaggccagcagcaacatccgtggcggcacaaagtaccgggaatcagcaacaaccacaatttgtggtggttggaggcatatgggtaccatcgtcacaagattttccaccaccgtccgatgtagccaacaagggtggtgtatatgctccggttgcggtggcgcaatctccaaaacgttcgttggagagaagttgcaactcgccggcggcatcttcctctacaaatacaaatacttctactcctgtgtcatagtctgatagtcatactagaatcatctcctgatgttgattttagtgcaggtttgaaaatgtttatgtgaatgtaagatatattttcgtccgtttttgtttgtaaccaagaaatgttatttcctcggttggaaattttgaataaagtagacgaatgctactatgtagtatatacacgagataagtgaagactctttgtttttct

SEQ ID NO: 25269 - protein, 354 aa, Arabidopsis thaliana
  peptide (1)..(354): Ceres Seq. ID no. 12738562
MMVEMDYAKKMQKCHEYVEALEEEQKKIQVFQRELPLCLELVTQAIEACRKELSGTTTTTSEQCSEQTTSVCGGPVFEEFIPIKKISSLCEEVQEEEEEDGEHESSPELVNNKKSDWLRSVQLWNHSPDLNPKEERVAKKAKVVEVKPKSGAFQPFQKRVLETDLQPAVKVASSMPATTTSSTTETCGGKSDLIKAGDEERRIEQQQSQSHTHRKQRRCWSPELHRRFLNALQQLGGSHVATPKQIRDHMKVDGLTNDEVKSHLQKYRLHTRRPAATSVAAQSTGNQQQPQFVVVGGIWVPSSQDFPPPSDVANKGGVYAPVAVAQSPKRSLERSCNSPAASSSTNTNTSTPVS

SEQ ID NO: 25270 - protein, 353 aa, Arabidopsis thaliana
  peptide (1)..(353): Ceres Seq. ID no. 12738563
MVEMDYAKKMQKCHEYVEALEEEQKKIQVFQRELPLCLELVTQAIEACRKELSGTTTTTSEQCSEQTTSVCGGPVFEEFIPIKKISSLCEEVQEEEEEDGEHESSPELVNNKKSDWLRSVQLWNHSPDLNPKEERVAKKAKVVEVKPKSGAFQPFQKRVLETDLQPAVKVASSMPATTTSSTTETCGGKSDLIKAGDEERRIEQQQSQSHTHRKQRRCWSPELHRRFLNALQQLGGSHVATPKQIRDHMKVDGLTNDEVKSHLQKYRLHTRRPAATSVAAQSTGNQQQPQFVVVGGIWVPSSQDFPPPSDVANKGGVYAPVAVAQSPKRSLERSCNSPAASSSTNTNTSTPVS

SEQ ID NO: 25271 - protein, 350 aa, Arabidopsis thaliana
  peptide (1)..(350): Ceres Seq. ID no. 12738564
MDYAKKMQKCHEYVEALEEEQKKIQVFQRELPLCLELVTQAIEACRKELSGTTTTTSEQCSEQTTSVCGGPVFEEFIPIKKISSLCEEVQEEEEEDGEHESSPELVNNKKSDWLRSVQLWNHSPDLNPKEERVAKKAKVVEVKPKSGAFQPFQKRVLETDLQPAVKVASSMPATTTSSTTETCGGKSDLIKAGDEERRIEQQQSQSHTHRKQRRCWSPELHRRFLNALQQLGGSHVATPKQIRDHMKVDGLTNDEVKSHLQKYRLHTRRPAATSVAAQSTGNQQQPQFVVVGGIWVPSSQDFPPPSDVANKGGVYAPVAVAQSPKRSLERSCNSPAASSSTNTNTSTPVS

SEQ ID NO: 25272 - DNA, 1679 bp, Arabidopsis thaliana
  misc_feature (1)..(1679): Ceres Seq. ID no. 13575488
  misc_feature (1)..(1679): Ortholog of  Ceres SEQ ID NO 13657220 as cited in SEQ ID NO 66169
  misc_feature (1)..(1679): Ortholog of  Ceres SEQ ID NO 13663074 as cited in SEQ ID NO 69191
gcacacacacacacactctacaaatctgaaatcacaaatctcatcatctccttcctcccttgcgagatctgatcgtatcaatggagatcttctacttcgtggtgttcggtggcctggctgcgatcgtcgccggcttggagctgagcaaatcgaacaaagaccgcattaacacctcctccgccttcaactccttcaagaacaactatctcctcgtctactctctcatgatggctggggactggttgcagggtccgtatgtgtactatctctacagcacttatggctttggaaagggagagatcggtcagctctttattgctggttttggatcttccatgttgtttggcaccattgttggatctcttgccgacaaacagggtcgcaagagagcttctatcacctactgtatcacctacattctcagctgtatcaccaaacattctccccagtacaaagttttgatggtcggtcgtgttcttggtggtatcgctacttctctccttttctctgccttcgaatcctggctcgtcgctgagcacaacaagagaggcttcgagcagcagtggctttctgtcactttctccaaggctattttcctcggtaatggattagtcgccatcattgctggcctctttggcaattaccttgtcgattctctctccctcggtcctgttgctcctttcgatgctgctgcttgcttccttgctattggtatggccgttattatctcatcttggtccgaaaactatggagatccatctgaaaacaaagaccttcttacccagttcaagaacgctgcatctgccattgcttctgatgagaagatcgcattactcggtgctattcagtctctgtttgaagggtccatgtacacctttgtgtttctctggactcctgctttgagcccaaacgaagaggacattccacatggtttcatatttgcaacattcatgctggcttcgatgcttggtagctccattgcctctcgtttgttggcacattcgtctccaaaagtagagagctatatgcagatcgtatttgtgatatcttctgctgctctaatgcttcctgttgtaacaagcttcttggtggcgccctcaggtgtaaaaggtggaagcatatccttctctggatgcattcagttaatgggtttctgcacatttgaagcgtgtgtaggaatcttctggccatctataatgaagatgagatcgcaatacattccagaggaagctagaagcaccatcatgaattttttccgcatcccactcaacatctttgtctgccttgtattatacaatgttgacgcgtttccaatgaccgtgatgtttggaatgtgctctgtattcctttttgtggcctctatattgcagaggaggttgatgaatgtagccgagatccacaagtcaagatcacaagagtggtcagcagaaaaggagatgacctcagaagctgaccctctaaacccataataaccaaatcaaccatgacataagaaaaaagaagaaacgccgttccgtttctcttgatgatttttctacttgtcttaatatgttcgttggtcataaagtctttccacttgtttagttatatttggattttgtgccttcaccagatgtagcaaacacaccctaatacctctgcacgtcagcttatttgggctttggccactattcttctcg

SEQ ID NO: 25273 - protein, 462 aa, Arabidopsis thaliana
  peptide (1)..(462): Ceres Seq. ID no. 13575489
MEIFYFVVFGGLAAIVAGLELSKSNKDRINTSSAFNSFKNNYLLVYSLMMAGDWLQGPYVYYLYSTYGFGKGEIGQLFIAGFGSSMLFGTIVGSLADKQGRKRASITYCITYILSCITKHSPQYKVLMVGRVLGGIATSLLFSAFESWLVAEHNKRGFEQQWLSVTFSKAIFLGNGLVAIIAGLFGNYLVDSLSLGPVAPFDAAACFLAIGMAVIISSWSENYGDPSENKDLLTQFKNAASAIASDEKIALLGAIQSLFEGSMYTFVFLWTPALSPNEEDIPHGFIFATFMLASMLGSSIASRLLAHSSPKVESYMQIVFVISSAALMLPVVTSFLVAPSGVKGGSISFSGCIQLMGFCTFEACVGIFWPSIMKMRSQYIPEEARSTIMNFFRIPLNIFVCLVLYNVDAFPMTVMFGMCSVFLFVASILQRRLMNVAEIHKSRSQEWSAEKEMTSEADPLNP

SEQ ID NO: 25274 - protein, 414 aa, Arabidopsis thaliana
  peptide (1)..(414): Ceres Seq. ID no. 13575490
MMAGDWLQGPYVYYLYSTYGFGKGEIGQLFIAGFGSSMLFGTIVGSLADKQGRKRASITYCITYILSCITKHSPQYKVLMVGRVLGGIATSLLFSAFESWLVAEHNKRGFEQQWLSVTFSKAIFLGNGLVAIIAGLFGNYLVDSLSLGPVAPFDAAACFLAIGMAVIISSWSENYGDPSENKDLLTQFKNAASAIASDEKIALLGAIQSLFEGSMYTFVFLWTPALSPNEEDIPHGFIFATFMLASMLGSSIASRLLAHSSPKVESYMQIVFVISSAALMLPVVTSFLVAPSGVKGGSISFSGCIQLMGFCTFEACVGIFWPSIMKMRSQYIPEEARSTIMNFFRIPLNIFVCLVLYNVDAFPMTVMFGMCSVFLFVASILQRRLMNVAEIHKSRSQEWSAEKEMTSEADPLNP

SEQ ID NO: 25275 - protein, 413 aa, Arabidopsis thaliana
  peptide (1)..(413): Ceres Seq. ID no. 13575491
MAGDWLQGPYVYYLYSTYGFGKGEIGQLFIAGFGSSMLFGTIVGSLADKQGRKRASITYCITYILSCITKHSPQYKVLMVGRVLGGIATSLLFSAFESWLVAEHNKRGFEQQWLSVTFSKAIFLGNGLVAIIAGLFGNYLVDSLSLGPVAPFDAAACFLAIGMAVIISSWSENYGDPSENKDLLTQFKNAASAIASDEKIALLGAIQSLFEGSMYTFVFLWTPALSPNEEDIPHGFIFATFMLASMLGSSIASRLLAHSSPKVESYMQIVFVISSAALMLPVVTSFLVAPSGVKGGSISFSGCIQLMGFCTFEACVGIFWPSIMKMRSQYIPEEARSTIMNFFRIPLNIFVCLVLYNVDAFPMTVMFGMCSVFLFVASILQRRLMNVAEIHKSRSQEWSAEKEMTSEADPLNP

SEQ ID NO: 25276 - DNA, 1197 bp, Arabidopsis thaliana
  misc_feature (1)..(1197): Ceres Seq. ID no. 12335573
  misc_feature (1)..(1197): Ortholog of  Ceres SEQ ID NO 12466401 as cited in SEQ ID NO 20698
  misc_feature (1)..(1197): Ortholog of  Ceres SEQ ID NO 15224731 as cited in SEQ ID NO 63650
acttgttcatcttccattccaatctcaagatgcacgcgaagaccgactccgaggtgacaagcctctcagcttcatcgccgactagatctccccgtcgaccagcctacttcgtccaatctccatcacgtgactcccacgatggggagaaaacagcaacatcattccactcaacaccggtactcaccagcccgatgggatctccaccacattctcactcttcctcaagccgcttctccaagatcaacggctcaaaacgtaagggccacgctggagaaaaacagttcgctatgattgaagaagaaggtcttcttgatgatggagatagagaacaagaagctttgcctcgtcgatgttatgttttagctttcattgttggattctctctactctttgctttcttctctttgattctttatgcagctgctaaacctcagaaacctaagatctctgttaagagtataacgtttgagcaacttaaggttcaagctggacaagatgctggaggtataggaactgatatgatcactatgaacgcgacactgagaatgttgtaccgtaacactggtactttctttggtgttcatgtcacttcttctccgattgatcttagcttctcgcagatcactattggctctggctctattaagaagttttatcagtcaaggaaaagccaaagaacagtggtggtgaatgtacttggagacaagattccactctatggaagtggctcaacattagtcccaccaccacctcctgcaccaattccaaaacccaagaagaagaaaggacctatcgttatcgtcgaaccaccagcgcctcctgctccagtaccgatgaggctaaacttcaccgttagatctcgagcttacgtgttggggaagttagttcaacctaagttttacaagagaatcgtgtgcttgattaatttcgaacacaagaaactcagtaaacatattcccatcacgaataactgcactgtcacatctatttaaaagaagaaaaaatacacatgagagtgcggacggtctcgtattgggtagtgcgcctatggccctatacatgttacaaggttacaaggtattgcgtgtggcctaccccaaagcagaataatcatcatcagtgggtttcataaatttaatttacgtaattggtttgagagatttttgttaatgatacacagaaaacgagaagattcgc

SEQ ID NO: 25277 - protein, 329 aa, Arabidopsis thaliana
  peptide (1)..(329): Ceres Seq. ID no. 12335574
LFIFHSNLKMHAKTDSEVTSLSASSPTRSPRRPAYFVQSPSRDSHDGEKTATSFHSTPVLTSPMGSPPHSHSSSSRFSKINGSKRKGHAGEKQFAMIEEEGLLDDGDREQEALPRRCYVLAFIVGFSLLFAFFSLILYAAAKPQKPKISVKSITFEQLKVQAGQDAGGIGTDMITMNATLRMLYRNTGTFFGVHVTSSPIDLSFSQITIGSGSIKKFYQSRKSQRTVVVNVLGDKIPLYGSGSTLVPPPPPAPIPKPKKKKGPIVIVEPPAPPAPVPMRLNFTVRSRAYVLGKLVQPKFYKRIVCLINFEHKKLSKHIPITNNCTVTSI

SEQ ID NO: 25278 - protein, 320 aa, Arabidopsis thaliana
  peptide (1)..(320): Ceres Seq. ID no. 12335575
MHAKTDSEVTSLSASSPTRSPRRPAYFVQSPSRDSHDGEKTATSFHSTPVLTSPMGSPPHSHSSSSRFSKINGSKRKGHAGEKQFAMIEEEGLLDDGDREQEALPRRCYVLAFIVGFSLLFAFFSLILYAAAKPQKPKISVKSITFEQLKVQAGQDAGGIGTDMITMNATLRMLYRNTGTFFGVHVTSSPIDLSFSQITIGSGSIKKFYQSRKSQRTVVVNVLGDKIPLYGSGSTLVPPPPPAPIPKPKKKKGPIVIVEPPAPPAPVPMRLNFTVRSRAYVLGKLVQPKFYKRIVCLINFEHKKLSKHIPITNNCTVTSI

SEQ ID NO: 25279 - protein, 266 aa, Arabidopsis thaliana
  peptide (1)..(266): Ceres Seq. ID no. 12335576
MGSPPHSHSSSSRFSKINGSKRKGHAGEKQFAMIEEEGLLDDGDREQEALPRRCYVLAFIVGFSLLFAFFSLILYAAAKPQKPKISVKSITFEQLKVQAGQDAGGIGTDMITMNATLRMLYRNTGTFFGVHVTSSPIDLSFSQITIGSGSIKKFYQSRKSQRTVVVNVLGDKIPLYGSGSTLVPPPPPAPIPKPKKKKGPIVIVEPPAPPAPVPMRLNFTVRSRAYVLGKLVQPKFYKRIVCLINFEHKKLSKHIPITNNCTVTSI

SEQ ID NO: 25280 - DNA, 1274 bp, Arabidopsis thaliana
  misc_feature (1)..(1274): Ceres Seq. ID no. 12357658
  misc_feature (1)..(1274): Ortholog of  Ceres SEQ ID NO 12609528 as cited in SEQ ID NO 51902
  misc_feature (1)..(1274): Ortholog of  Ceres SEQ ID NO 12625248 as cited in SEQ ID NO 68797
ctcgaaatctgaatccagagattaaacaaaaattggtattgcgaatgatcgattcttcttcctctaaactctgattcctgaacggacttgctttgacacagcagaccgtaaatcgggatgggtgctcctaagcagaaatggactcaagaagaagaatcagctttaaagtctggagttataaagcatggacctggtaaatggcgcacaattctcaaagatcctgaatttagcggagtcttgtacctgcgttccaatgttgatcttaaggataaatggagaaacatgagtgtcatggcaaatggctggggatcgcgcgaaaagtctaggttagctgttaaaaggacgttctcccttcctaaacaggaagagaactcactagccctaaccaattctttgcaaagtgatgaagaaaatgtggatgccacctctggactccaagtttcttctaatcctcctccaaggagacctaatgtaaggttggatagccttataatggaagcaatagctaccctgaaagagcctggtggctgtaacaaaacaacaattggtgcctacattgaggatcaatatcatgctccaccagacttcaaacggttgttgtctaccaagctaaagtacttgacatcttgcgggaaacttgtgaaggttaaacgtaagtacagaattccaaactccacctccttgtcttcccacaggagaaaaggtctgggggtgtttggaggaaaacagaggacttcttctttgccttcacctaaaacagacatagatgaagtgaattttcagacaaggtcacagattgatacagagatagccagaatgaagagtatgaacgtacatgaggcggcagcagttgcagcacaggcagtagcagaggcagaagctgccatggcagaggctgaggaagctgcaaaggaagcggaggcagcagaagccgaagcagaagtagctcaagctttcgctgaggaagcttcaaagacattgaaaggaagaaacatctgcaaaatgatgatccgtgcctgaggtaatggaaagcgagagaagaaggagactaaatgtgaagagagagtagagagaagcctagtgtttgtgttgatcattctctttacttgggaagttgttttttagtagtaagcaatcaaatatgtttgtcagtatgtcgtcgctctgactcttttgattcctgcacaacttttgggaaaaaatgttttatttggctcttctcactctccaatatacatacaattatcgttagtaatgtgtataatttatagacc

SEQ ID NO: 25281 - protein, 300 aa, Arabidopsis thaliana
  peptide (1)..(300): Ceres Seq. ID no. 12357659
MGAPKQKWTQEEESALKSGVIKHGPGKWRTILKDPEFSGVLYLRSNVDLKDKWRNMSVMANGWGSREKSRLAVKRTFSLPKQEENSLALTNSLQSDEENVDATSGLQVSSNPPPRRPNVRLDSLIMEAIATLKEPGGCNKTTIGAYIEDQYHAPPDFKRLLSTKLKYLTSCGKLVKVKRKYRIPNSTSLSSHRRKGLGVFGGKQRTSSLPSPKTDIDEVNFQTRSQIDTEIARMKSMNVHEAAAVAAQAVAEAEAAMAEAEEAAKEAEAAEAEAEVAQAFAEEASKTLKGRNICKMMIRA

SEQ ID NO: 25282 - protein, 245 aa, Arabidopsis thaliana
  peptide (1)..(245): Ceres Seq. ID no. 12357660
MSVMANGWGSREKSRLAVKRTFSLPKQEENSLALTNSLQSDEENVDATSGLQVSSNPPPRRPNVRLDSLIMEAIATLKEPGGCNKTTIGAYIEDQYHAPPDFKRLLSTKLKYLTSCGKLVKVKRKYRIPNSTSLSSHRRKGLGVFGGKQRTSSLPSPKTDIDEVNFQTRSQIDTEIARMKSMNVHEAAAVAAQAVAEAEAAMAEAEEAAKEAEAAEAEAEVAQAFAEEASKTLKGRNICKMMIRA

SEQ ID NO: 25283 - protein, 242 aa, Arabidopsis thaliana
  peptide (1)..(242): Ceres Seq. ID no. 12357661
MANGWGSREKSRLAVKRTFSLPKQEENSLALTNSLQSDEENVDATSGLQVSSNPPPRRPNVRLDSLIMEAIATLKEPGGCNKTTIGAYIEDQYHAPPDFKRLLSTKLKYLTSCGKLVKVKRKYRIPNSTSLSSHRRKGLGVFGGKQRTSSLPSPKTDIDEVNFQTRSQIDTEIARMKSMNVHEAAAVAAQAVAEAEAAMAEAEEAAKEAEAAEAEAEVAQAFAEEASKTLKGRNICKMMIRA

SEQ ID NO: 25284 - DNA, 1306 bp, Arabidopsis thaliana
  misc_feature (1)..(1306): Ceres Seq. ID no. 12335581
  misc_feature (1)..(1306): Ortholog of  Ceres SEQ ID NO 14315440 as cited in SEQ ID NO 57161
cttctctccttctctcccttttctctctctctcgaagatatcgcctttaattccttcttcttcttctgatttcttcaaagattcatttcttagagatctcagcttctgtaagagtaggctagctaccaaaaaaaaagaaatagaaaaaaacattgatgcttaatcagcagttcttggtgtttgagacacatgtctccaataatactcagtgagatctttctctctgggtttatgttaaattccacaatcaggcgcaggacccatcttgttcaatctttctctgttgtcttcctttactggctttactatgtctcatgatctctgaacttatctccagttttatatctatacgcataattacaacaaaaccctagtttcttttcaaatttctcttcttcgtttttcgtcatctgggtcctgtcctgttctgttgtgtcttgttctgttctgtttttaattcccctaaaaacccattttaaaatattttatctctcttctcttaaaaaaaactcttccctgtttttgtttgtgtgttactaaatggaatcgtcgtcgtcgggaacaacttcgtcgacgattcaaacgtcgtcaggatcggaggagagtctcatggagcagaggaaacgtaaacggatgctctcaaaccgtgaatctgcaaggagatcaagaatgaagaaacaaaagctcctagacgatctaacggctcaggttaatcatctgaaaaaagagaacacggagatcgtgacaagtgtcagcatcacaacgcaacactacctaaccgttgaagcagagaactctgttctcagagctcagcttgatgaacttaaccacaggctccaatctctcaacgacatcatcgagttcctcgacagtagcaacaacaacaacaacaacaacatgggcatgtgttcgaaccctctggttggtttggagtgtgatgatttcttcgtgaatcagatgaacatgtcttatattatgaaccagcctctcatggcgtcttctgatgctttaatgtattaaatgtggacctaaaaaccccctcgaaatcacaaagaaatggggccgtttttatttgtccgatttagagacatgtccaaagagagagatttatatataaaaatgggtctgttgtttgatttgtttccatttcaaatttttgtttgtttgggtccgttttaggcgttaggtatctctaagcatcatcgttatgagtgtgtctgtaataaaggctctgttgccgcatgagtacaaagtgttttcttaatattgtaatatgcttattactttctttttattcttaagtact

SEQ ID NO: 25285 - protein, 159 aa, Arabidopsis thaliana
  peptide (1)..(159): Ceres Seq. ID no. 12335582
MESSSSGTTSSTIQTSSGSEESLMEQRKRKRMLSNRESARRSRMKKQKLLDDLTAQVNHLKKENTEIVTSVSITTQHYLTVEAENSVLRAQLDELNHRLQSLNDIIEFLDSSNNNNNNNMGMCSNPLVGLECDDFFVNQMNMSYIMNQPLMASSDALMY

SEQ ID NO: 25286 - protein, 136 aa, Arabidopsis thaliana
  peptide (1)..(136): Ceres Seq. ID no. 12335583
MEQRKRKRMLSNRESARRSRMKKQKLLDDLTAQVNHLKKENTEIVTSVSITTQHYLTVEAENSVLRAQLDELNHRLQSLNDIIEFLDSSNNNNNNNMGMCSNPLVGLECDDFFVNQMNMSYIMNQPLMASSDALMY

SEQ ID NO: 25287 - protein, 128 aa, Arabidopsis thaliana
  peptide (1)..(128): Ceres Seq. ID no. 12335584
MLSNRESARRSRMKKQKLLDDLTAQVNHLKKENTEIVTSVSITTQHYLTVEAENSVLRAQLDELNHRLQSLNDIIEFLDSSNNNNNNNMGMCSNPLVGLECDDFFVNQMNMSYIMNQPLMASSDALMY

SEQ ID NO: 25288 - DNA, 1292 bp, Arabidopsis thaliana
  misc_feature (1)..(1292): Ceres Seq. ID no. 13490810
  misc_feature (1)..(1292): Ortholog of  Ceres SEQ ID NO 15225973 as cited in SEQ ID NO 50947
aatttgttgtttccttaaacccttcaaagcaaaattagggtttctcttggttttcgcaaattagggattttttctctcgttctcatgaaaagatgagtttgatttccaaatccttggcaagaattgaatgttcgccatttttttatccaagagcttcagaaatcactaccggaaaacggataacctctccgcaaatccgtttatacactgcggcggccgtcggcgggaaaactggaaatggagaaaggaaacaaagagccaaagcaccggcgaaaactccggaggcagtgacacctgtgaaaccgctggagattgcgtcagtcacggcgacgacggagaatgaattgcctcggcctaatgagatagcttacgagagtgaagcagcgaattgggttaatctgattggatttgttgatcaaccagttcaattcgaagcttcttctgatggcaaattctgggctggtactgttatttcccagaggtctgcttcagattcctctggtttctggattccgataatatttgaaggcgatttagctaaaaccgcagctcgatatgtaagcaaagacgatcaaattcatgtgtctgggaagctgtttatagattctcctcctccaaatatgacttatgcacaagccaatgttcaggtattggtccagaatcttaactttatacagcctatgtccccgtctccgtcgccatttatggttatgtcatcatctgaaaaggaagaaagtggtatcaagaagcagcctgctagagctaagcaggatatagtcattgatgaagcttcagattcttggaatcacctcattgaaaatcctaaagaatggtgggatcaccgggaaaataaagtcaatggattggtaaaacctaggcatcctgatttcaaaagcaaggacagtagtttttcgctgtggctcaataaggctcctaattgggttttgccaaaactcgaaggactcgagttcgatgttctagtccctaaagccagagttgtaaaacaacttaaaggagaagaatcatggaaggacttggttcagaacccagataaatggtgggacaatagaatcgacaagagaaatgcaaaagcccctgatttcaagcacaaggagacaggtgaagcactgtggctaaacgagtctcctacttgggtattaccgaaactgccaccagtcaagaagaaacaagaaagtattgtcttttagctttagaaacattatctccatgtaaagagctccaagtgtttacaaaattcatcatttctattcaaagtggtctccaaagttccg

SEQ ID NO: 25289 - protein, 371 aa, Arabidopsis thaliana
  peptide (1)..(371): Ceres Seq. ID no. 13490811
MSLISKSLARIECSPFFYPRASEITTGKRITSPQIRLYTAAAVGGKTGNGERKQRAKAPAKTPEAVTPVKPLEIASVTATTENELPRPNEIAYESEAANWVNLIGFVDQPVQFEASSDGKFWAGTVISQRSASDSSGFWIPIIFEGDLAKTAARYVSKDDQIHVSGKLFIDSPPPNMTYAQANVQVLVQNLNFIQPMSPSPSPFMVMSSSEKEESGIKKQPARAKQDIVIDEASDSWNHLIENPKEWWDHRENKVNGLVKPRHPDFKSKDSSFSLWLNKAPNWVLPKLEGLEFDVLVPKARVVKQLKGEESWKDLVQNPDKWWDNRIDKRNAKAPDFKHKETGEALWLNESPTWVLPKLPPVKKKQESIVF

SEQ ID NO: 25290 - protein, 195 aa, Arabidopsis thaliana
  peptide (1)..(195): Ceres Seq. ID no. 13490812
MTYAQANVQVLVQNLNFIQPMSPSPSPFMVMSSSEKEESGIKKQPARAKQDIVIDEASDSWNHLIENPKEWWDHRENKVNGLVKPRHPDFKSKDSSFSLWLNKAPNWVLPKLEGLEFDVLVPKARVVKQLKGEESWKDLVQNPDKWWDNRIDKRNAKAPDFKHKETGEALWLNESPTWVLPKLPPVKKKQESIVF

SEQ ID NO: 25291 - DNA, 1197 bp, Arabidopsis thaliana
  misc_feature (1)..(1197): Ceres Seq. ID no. 12739062
  misc_feature (1)..(1197): Ortholog of  Ceres SEQ ID NO 13585976 as cited in SEQ ID NO 0
aacggtgtcgtcgtcgccaaacgatttgcctcttcctaaagggtacaacaagaatggaagaagagtatgagagtcgtcgattgaggagatgggaagagttggacactgacatcttagtaagaattttccagaagtttagcgtctttgagttgacttcgggattagctcatgtttgtagaggatggagagctgcttgttgcgatccgattctttggaagacggtggatttgtcaaacatgagatctagtttcatcaagatcccattagagccttatgtctatgtggaacgccgatctgatgaggccctaacccgcatcctgaaactctccatgaaccttagcggaggaagcacgaggaccttgatttttcatttcaacttgttcttgagtgatgatcagcttacttacaccgcagaaaggtgtccagggttgagacgggtcgtcctaccggcttggaacagaataaagaagactggtatatgcaaagcgataagaatctggaaagatctagagtcactaacaatgccaagcatcgcaaacccgccttatctcttaacagaaattgccaagaactgcaagaattttaaagagctgaagatcatgggtccattcgaggtcttctttgcaaacacgctcatcacttgcctcccaaacatcaaaacactcagcatcagatgctcggcgataaagcgggaagcactgatgaaaatccttgacggattaccaagccttgaagtgctcaacatatcacactctcacctagtggagtacagcgtttggcagcctcagcagaaggtgattgttagagagctcgataagacgataatggagaaaacagcaaggctaaagaaattcttgacttgcatggatcacaagacgtgtgtgatgtgtcagaggactgaaaacgatgaagggattgtgagatggtacaagtatgaggaaggagactggaaggttgatgaagtgagttctcttcatctttgatgtttctgctgtgatcattctctgtgaaggacttaacttgttattgttctcatctttgactgttgaattgtttatttctttgtgttgtttgttttgatttgaatcgtattatgtgtatatatctgtaggctatgccaatgaatgtatgtagtgatcaacttttgatcaccaccaaccttgcacaccaaataggaaaataaaacaatattgttgc

SEQ ID NO: 25292 - protein, 326 aa, Arabidopsis thaliana
  peptide (1)..(326): Ceres Seq. ID no. 12739063
RCRRRQTICLFLKGTTRMEEEYESRRLRRWEELDTDILVRIFQKFSVFELTSGLAHVCRGWRAACCDPILWKTVDLSNMRSSFIKIPLEPYVYVERRSDEALTRILKLSMNLSGGSTRTLIFHFNLFLSDDQLTYTAERCPGLRRVVLPAWNRIKKTGICKAIRIWKDLESLTMPSIANPPYLLTEIAKNCKNFKELKIMGPFEVFFANTLITCLPNIKTLSIRCSAIKREALMKILDGLPSLEVLNISHSHLVEYSVWQPQQKVIVRELDKTIMEKTARLKKFLTCMDHKTCVMCQRTENDEGIVRWYKYEEGDWKVDEVSSLHL

SEQ ID NO: 25293 - protein, 309 aa, Arabidopsis thaliana
  peptide (1)..(309): Ceres Seq. ID no. 12739064
MEEEYESRRLRRWEELDTDILVRIFQKFSVFELTSGLAHVCRGWRAACCDPILWKTVDLSNMRSSFIKIPLEPYVYVERRSDEALTRILKLSMNLSGGSTRTLIFHFNLFLSDDQLTYTAERCPGLRRVVLPAWNRIKKTGICKAIRIWKDLESLTMPSIANPPYLLTEIAKNCKNFKELKIMGPFEVFFANTLITCLPNIKTLSIRCSAIKREALMKILDGLPSLEVLNISHSHLVEYSVWQPQQKVIVRELDKTIMEKTARLKKFLTCMDHKTCVMCQRTENDEGIVRWYKYEEGDWKVDEVSSLHL

SEQ ID NO: 25294 - protein, 248 aa, Arabidopsis thaliana
  peptide (1)..(248): Ceres Seq. ID no. 12739065
MRSSFIKIPLEPYVYVERRSDEALTRILKLSMNLSGGSTRTLIFHFNLFLSDDQLTYTAERCPGLRRVVLPAWNRIKKTGICKAIRIWKDLESLTMPSIANPPYLLTEIAKNCKNFKELKIMGPFEVFFANTLITCLPNIKTLSIRCSAIKREALMKILDGLPSLEVLNISHSHLVEYSVWQPQQKVIVRELDKTIMEKTARLKKFLTCMDHKTCVMCQRTENDEGIVRWYKYEEGDWKVDEVSSLHL

SEQ ID NO: 25295 - DNA, 1149 bp, Arabidopsis thaliana
  misc_feature (1)..(1149): Ceres Seq. ID no. 12321882
  misc_feature (1)..(1149): Ortholog of  Ceres SEQ ID NO 13594560 as cited in SEQ ID NO 51329
  misc_feature (1)..(1149): Ortholog of  Ceres SEQ ID NO 12613701 as cited in SEQ ID NO 67983
aatggatagattagagaaatagaaaaatcaaaagaagctttggcaaagagctaaagatcaaagcttttctttgagaatgagattgtggattgtgagtgtactcgtgcttacacaccttgtccatggagctctctgttgggggaaggatggtcactacactgtttgcaaattagctgagggattctttgaggatgatactattgctgcagtgaagaaacttctgcctgaatcagttgatggtggtggactagcagatttttgctcatggcctgatgaaattaaaaaactctcgcaatggcaatggactagcactttgcactatgttaacacacctgaatacaggtgcaactacgagtattgccgggactgccatgacactcataagcatagggactggtgtgtgacaggagcgatcttcaattacacaaaccagttaatgtctgcttctgaaaactcacagaatatagtccactacaacttgacagaggctctcttgttcttgtcacattatatgggagatgttcatcagcccttgcatactggttttcttggagatctaggtggtaacacaataatagtcaactggtaccataacaaatcaaatttgcaccatgtctgggacaacatgataattgactctgctctagaaacatactacaattcaagccttccacacatgattcaagctcttcaagccaaactcaagaacggctggtcgaatgatgttccgtcgtggaagtcatgtcactttcaccaaaaggcctgtccaaatctgtatgcttctgaaagcattgatctcgcctgcaagtatgcttacaggaacgctactccggggactactttaggagatgagtatttcctttctcggttacccgttgtagagaagagacttgcacaaggtgggattcgcttggcagctactcttaatcgtatcttttctgcaaaaccgaagctcgcaggattatgaatctaagaaaaagatccttgagaacccacgtaacaactctttttaagtgttttttataacactgtgaatagttgagtcatgactaatgagtgaacctccaaaattttcatgcaaaaatttgttattttgggacatggttcaaacttccaataacaaaccacactaacggataacactttgct

SEQ ID NO: 25296 - protein, 296 aa, Arabidopsis thaliana
  peptide (1)..(296): Ceres Seq. ID no. 12321883
MRLWIVSVLVLTHLVHGALCWGKDGHYTVCKLAEGFFEDDTIAAVKKLLPESVDGGGLADFCSWPDEIKKLSQWQWTSTLHYVNTPEYRCNYEYCRDCHDTHKHRDWCVTGAIFNYTNQLMSASENSQNIVHYNLTEALLFLSHYMGDVHQPLHTGFLGDLGGNTIIVNWYHNKSNLHHVWDNMIIDSALETYYNSSLPHMIQALQAKLKNGWSNDVPSWKSCHFHQKACPNLYASESIDLACKYAYRNATPGTTLGDEYFLSRLPVVEKRLAQGGIRLAATLNRIFSAKPKLAGL

SEQ ID NO: 25297 - protein, 176 aa, Arabidopsis thaliana
  peptide (1)..(176): Ceres Seq. ID no. 12321884
MSASENSQNIVHYNLTEALLFLSHYMGDVHQPLHTGFLGDLGGNTIIVNWYHNKSNLHHVWDNMIIDSALETYYNSSLPHMIQALQAKLKNGWSNDVPSWKSCHFHQKACPNLYASESIDLACKYAYRNATPGTTLGDEYFLSRLPVVEKRLAQGGIRLAATLNRIFSAKPKLAGL

SEQ ID NO: 25298 - protein, 151 aa, Arabidopsis thaliana
  peptide (1)..(151): Ceres Seq. ID no. 12321885
MGDVHQPLHTGFLGDLGGNTIIVNWYHNKSNLHHVWDNMIIDSALETYYNSSLPHMIQALQAKLKNGWSNDVPSWKSCHFHQKACPNLYASESIDLACKYAYRNATPGTTLGDEYFLSRLPVVEKRLAQGGIRLAATLNRIFSAKPKLAGL

SEQ ID NO: 25299 - DNA, 1144 bp, Arabidopsis thaliana
  misc_feature (1)..(1144): Ceres Seq. ID no. 13612288
  misc_feature (1)..(1144): Ortholog of  Ceres SEQ ID NO 14312281 as cited in SEQ ID NO 59172
  misc_feature (1)..(1144): Ortholog of  Ceres SEQ ID NO 14302299 as cited in SEQ ID NO 68665
  misc_feature (1)..(1144): Ortholog of  Ceres SEQ ID NO 15174396 as cited in SEQ ID NO 0
attttaatctctcttctcttttttttgtctgtgcaaagatatcactttcttcttcttcttctcccagacatcagcaagattcaggagattaaaaccttaaattaaaacaatacaaactccaaattcaccggaggaaataacttaaaacttgaatctgaaaagatgagctgcaatggttgccgtgttctccggaaaggttgcagcgagaattgtatcctccggccatgtattcaatggattgaaaccgccgatgctcaaggccacgccaccgtcttcgtcgctaaattcttcggccgtgctggtctcatgtcctttatctccgctgttccggattctcaacgtcctgctttgtttcagtcgttgctctacgaagcttgtggaagaactgtcaatccagttaacggagcaatcggaatgttatggactggaaactggaatatctgtcaagcggctgttgaaacagtgcttcgcggcggttctttaagaccgatcccggagcttctcactcacggcggcggtttcgctggctttccttcgcctacatctgaagaagcatctgagatctgcaccgaaatgttgaatctccagcaaaatgattccaccgatcgtaacatctatcatcattcacgattctcaagctctagatctagatctactatggattcttcttctccgacgaaacgtaagagattatcatcggaagaccaaccatcttcggagcttgatctatctctcatccctaattttcccattaagcaagcaacaccttcttctacacggcggcgatcagtaacaccgtcgatgaactcagaggactccgggacgacgacgactacgacggcgttttgtgacaagggtgatgtgtacggtaacggaggaggagaaacgaccaagttgcttaacctttttgtttaatgcaaaacggcggcggttttctcagagttagtctagggttttaaatgtaattttacacattttcttcctttttcctggataaatattggaccggcgaattaacaactacgtcgttttgttctctcggttttgagtcccccccccccccaccattaaccaattgtaaaactttattgagtgaaaaatattatgtctagtttttctgcataatccagtaacaatgtgaact

SEQ ID NO: 25300 - protein, 250 aa, Arabidopsis thaliana
  peptide (1)..(250): Ceres Seq. ID no. 13612289
MSCNGCRVLRKGCSENCILRPCIQWIETADAQGHATVFVAKFFGRAGLMSFISAVPDSQRPALFQSLLYEACGRTVNPVNGAIGMLWTGNWNICQAAVETVLRGGSLRPIPELLTHGGGFAGFPSPTSEEASEICTEMLNLQQNDSTDRNIYHHSRFSSSRSRSTMDSSSPTKRKRLSSEDQPSSELDLSLIPNFPIKQATPSSTRRRSVTPSMNSEDSGTTTTTTAFCDKGDVYGNGGGETTKLLNLFV

SEQ ID NO: 25301 - protein, 202 aa, Arabidopsis thaliana
  peptide (1)..(202): Ceres Seq. ID no. 13612290
MSFISAVPDSQRPALFQSLLYEACGRTVNPVNGAIGMLWTGNWNICQAAVETVLRGGSLRPIPELLTHGGGFAGFPSPTSEEASEICTEMLNLQQNDSTDRNIYHHSRFSSSRSRSTMDSSSPTKRKRLSSEDQPSSELDLSLIPNFPIKQATPSSTRRRSVTPSMNSEDSGTTTTTTAFCDKGDVYGNGGGETTKLLNLFV

SEQ ID NO: 25302 - protein, 166 aa, Arabidopsis thaliana
  peptide (1)..(166): Ceres Seq. ID no. 13612291
MLWTGNWNICQAAVETVLRGGSLRPIPELLTHGGGFAGFPSPTSEEASEICTEMLNLQQNDSTDRNIYHHSRFSSSRSRSTMDSSSPTKRKRLSSEDQPSSELDLSLIPNFPIKQATPSSTRRRSVTPSMNSEDSGTTTTTTAFCDKGDVYGNGGGETTKLLNLFV

SEQ ID NO: 25303 - DNA, 1698 bp, Arabidopsis thaliana
  misc_feature (1)..(1698): Ceres Seq. ID no. 12335362
  misc_feature (1)..(1698): Ortholog of  Ceres SEQ ID NO 13597648 as cited in SEQ ID NO 69125
acttgttcaaggggttggggtttcgacgctaacattctctctctcagtgaacctttagaagttaaatctgtttcatcaccggaaagtttcactaactcttcttctctctctcggagtattgattcccggcgtttagcaatggaagaaagtagacaactcgaatcgtcgattgatcggctgctgaacgaagagaaacagatgaggctcgcagaaaatgtcgccggaactagaaaagcagctaccgagattcttaagctttgtttcgaagctaaggattggaaacttctcaacgaacagattttgaatctctcgaagaaacgtggtcagcttaagcaggctgtacaatccatggtgcaacaagcaatgcagtatattgatcagacactagacatagaaactcggattgagcttattaagactctaaacaatgtagctgctggaaagatatatgtcgaaatcgagagagctcgtttgaccaagatgcttgctaagattaaggaagaacaaggtttgattgctgaagctgcggatctcatgcaagaagttgctgtggagacatttggtgctatggcaaaaactgagaaaattgctttcattcttgaacaagtccgcttgtgtttggatcaaaaagattttgtccgtgcacaaattttatctaggaagatcaacccaagagtgtttgatgcagataccacgaaggagaaaaagaagcctaaggaaggtgaaaacatggtagaggaggctccggctgatatacctacattgttggtgctaaaacggatttactatgagctaatgattcggtattattctcacaacaatgagtacattgagatatgccgtagctacaaggcgatatatgatatcccttctgtaaaggaaaacccagaacaatggattccagtcctgagaaagatttgctggtttttggccttggcaccacatgatccaatgcaatcgagcctactcaatgcaaccttggaagataaaaagttatcagagattcctgatttcaagatgcttctaaaacagattgttacaatggaggtgattcagtggacatctctctggaataaatacaaggacgagtttgagaatgagaaaaacatgattggaggctctttgggtgacaaagctggtgaagatctcaaactaagaataatcgaacacaatattctcgttgtctcaaagtactactcaaggattacctttaagagacttgcagaacttttatgcctaaccactgaggaagcagagaagcatctatctgaaatggttgtgtccaaagccttgatagcaaaaatcgacagaccatcaggaataatctgcttccagattgttaaagacagcaacgaaatcctcaactcgtgggcaacaaacttggagaagcttttggatcttgttgaaaagagttgtcaccaaattcacaaagaaacaatggttcataaagttgcactaagagcttgagaacccggtctagccacacacatcggtggaaagaatctttcaggctctcgttctaacataatcatttgagttttctttctctgcttggttcgaacacattttttttgtgttctttaggagaccttgcaagattatatacaaaactctcttttttttcctttctccatgtggtctttttaatgtttgttacaatgaaacgaaattataatgcaaaaatataataaattaagt

SEQ ID NO: 25304 - protein, 488 aa, Arabidopsis thaliana
  peptide (1)..(488): Ceres Seq. ID no. 12335363
TCSRGWGFDANILSLSEPLEVKSVSSPESFTNSSSLSRSIDSRRLAMEESRQLESSIDRLLNEEKQMRLAENVAGTRKAATEILKLCFEAKDWKLLNEQILNLSKKRGQLKQAVQSMVQQAMQYIDQTLDIETRIELIKTLNNVAAGKIYVEIERARLTKMLAKIKEEQGLIAEAADLMQEVAVETFGAMAKTEKIAFILEQVRLCLDQKDFVRAQILSRKINPRVFDADTTKEKKKPKEGENMVEEAPADIPTLLVLKRIYYELMIRYYSHNNEYIEICRSYKAIYDIPSVKENPEQWIPVLRKICWFLALAPHDPMQSSLLNATLEDKKLSEIPDFKMLLKQIVTMEVIQWTSLWNKYKDEFENEKNMIGGSLGDKAGEDLKLRIIEHNILVVSKYYSRITFKRLAELLCLTTEEAEKHLSEMVVSKALIAKIDRPSGIICFQIVKDSNEILNSWATNLEKLLDLVEKSCHQIHKETMVHKVALRA

SEQ ID NO: 25305 - protein, 442 aa, Arabidopsis thaliana
  peptide (1)..(442): Ceres Seq. ID no. 12335364
MEESRQLESSIDRLLNEEKQMRLAENVAGTRKAATEILKLCFEAKDWKLLNEQILNLSKKRGQLKQAVQSMVQQAMQYIDQTLDIETRIELIKTLNNVAAGKIYVEIERARLTKMLAKIKEEQGLIAEAADLMQEVAVETFGAMAKTEKIAFILEQVRLCLDQKDFVRAQILSRKINPRVFDADTTKEKKKPKEGENMVEEAPADIPTLLVLKRIYYELMIRYYSHNNEYIEICRSYKAIYDIPSVKENPEQWIPVLRKICWFLALAPHDPMQSSLLNATLEDKKLSEIPDFKMLLKQIVTMEVIQWTSLWNKYKDEFENEKNMIGGSLGDKAGEDLKLRIIEHNILVVSKYYSRITFKRLAELLCLTTEEAEKHLSEMVVSKALIAKIDRPSGIICFQIVKDSNEILNSWATNLEKLLDLVEKSCHQIHKETMVHKVALRA

SEQ ID NO: 25306 - protein, 422 aa, Arabidopsis thaliana
  peptide (1)..(422): Ceres Seq. ID no. 12335365
MRLAENVAGTRKAATEILKLCFEAKDWKLLNEQILNLSKKRGQLKQAVQSMVQQAMQYIDQTLDIETRIELIKTLNNVAAGKIYVEIERARLTKMLAKIKEEQGLIAEAADLMQEVAVETFGAMAKTEKIAFILEQVRLCLDQKDFVRAQILSRKINPRVFDADTTKEKKKPKEGENMVEEAPADIPTLLVLKRIYYELMIRYYSHNNEYIEICRSYKAIYDIPSVKENPEQWIPVLRKICWFLALAPHDPMQSSLLNATLEDKKLSEIPDFKMLLKQIVTMEVIQWTSLWNKYKDEFENEKNMIGGSLGDKAGEDLKLRIIEHNILVVSKYYSRITFKRLAELLCLTTEEAEKHLSEMVVSKALIAKIDRPSGIICFQIVKDSNEILNSWATNLEKLLDLVEKSCHQIHKETMVHKVALRA

SEQ ID NO: 25307 - DNA, 1139 bp, Arabidopsis thaliana
  misc_feature (1)..(1139): Ceres Seq. ID no. 12370812
  misc_feature (1)..(1139): Ortholog of  Ceres SEQ ID NO 14312266 as cited in SEQ ID NO 59225
  misc_feature (1)..(1139): Ortholog of  Ceres SEQ ID NO 13597620 as cited in SEQ ID NO 65383
ctttctcagattcgctctttcccgagaaaatttgaagaaacagagattcatcattttctcttcctctcaaaaatcagatctgcaaaactctcagatcactcatgggtttgatttcaaaccctacccgtttgattctcgtcgccaccatcttcttcctcgtttcttcaatctccggtcaggattctgtcgttgagaacaatgagagacaagaatctgaaggatctggtaaagagcttggtcgtcgtggaatggttggtactgaacgaattggagttgatactgttgtagacaatattggtgctcttggtttgaatctagaccttgatgctactgctcctagtgtatttgatgctttgttttcgagtttctcgatgatacttgtcaccgagattggggatgaaacttttataatagcggcattgatggctatgcgacatcctaaagctactgttttatctggtgcactctcagctttgtttgttatgactatactttctactggacttggtaggatagtgccaaacttgatatcgaggaagcacaccaatagtgctgctacagtgctctatgcattttttggtttgcgactactctacattgcttggaggtctactgattcaaagtcaaatcagaagaaagaaatggaggaagttgaagagaagctcgagtcaggtcaagggaagacacccttccgtcgtttattctcaagattttgtaccccaatatttctggagtccttcatcttaacctttctagctgaatggggtgaccgtagccagatcgctacaatagctttggcgactcacaagaacgccataggagtggccattggggcaagtattggacacactgtgtgtacttcactagcagttgttggaggaagcatgctggcttcaaggatctcgcaacgtacggtcgcaactgttggaggcttactcttcctcggcttttcagtctcctcctatttctatcctccattgtagtaaatgtgcttctttcgaaaatgggtgttagagacaatttctaagtaaagtttcaattttttttttgattttaatttaagtttgatttttgtttaatatcaatggccaaaatggccaaaccaaagaatccaacgcctatgcttttacaatttactt

SEQ ID NO: 25308 - protein, 293 aa, Arabidopsis thaliana
  peptide (1)..(293): Ceres Seq. ID no. 12370813
MGLISNPTRLILVATIFFLVSSISGQDSVVENNERQESEGSGKELGRRGMVGTERIGVDTVVDNIGALGLNLDLDATAPSVFDALFSSFSMILVTEIGDETFIIAALMAMRHPKATVLSGALSALFVMTILSTGLGRIVPNLISRKHTNSAATVLYAFFGLRLLYIAWRSTDSKSNQKKEMEEVEEKLESGQGKTPFRRLFSRFCTPIFLESFILTFLAEWGDRSQIATIALATHKNAIGVAIGASIGHTVCTSLAVVGGSMLASRISQRTVATVGGLLFLGFSVSSYFYPPL

SEQ ID NO: 25309 - protein, 244 aa, Arabidopsis thaliana
  peptide (1)..(244): Ceres Seq. ID no. 12370814
MVGTERIGVDTVVDNIGALGLNLDLDATAPSVFDALFSSFSMILVTEIGDETFIIAALMAMRHPKATVLSGALSALFVMTILSTGLGRIVPNLISRKHTNSAATVLYAFFGLRLLYIAWRSTDSKSNQKKEMEEVEEKLESGQGKTPFRRLFSRFCTPIFLESFILTFLAEWGDRSQIATIALATHKNAIGVAIGASIGHTVCTSLAVVGGSMLASRISQRTVATVGGLLFLGFSVSSYFYPPL

SEQ ID NO: 25310 - protein, 203 aa, Arabidopsis thaliana
  peptide (1)..(203): Ceres Seq. ID no. 12370815
MILVTEIGDETFIIAALMAMRHPKATVLSGALSALFVMTILSTGLGRIVPNLISRKHTNSAATVLYAFFGLRLLYIAWRSTDSKSNQKKEMEEVEEKLESGQGKTPFRRLFSRFCTPIFLESFILTFLAEWGDRSQIATIALATHKNAIGVAIGASIGHTVCTSLAVVGGSMLASRISQRTVATVGGLLFLGFSVSSYFYPPL

SEQ ID NO: 25311 - DNA, 1354 bp, Arabidopsis thaliana
  misc_feature (1)..(1354): Ceres Seq. ID no. 12422655
  misc_feature (1)..(1354): Ortholog of  Ceres SEQ ID NO 15177854 as cited in SEQ ID NO 51851
  misc_feature (1)..(1354): Ortholog of  Ceres SEQ ID NO 15177087 as cited in SEQ ID NO 51932
  misc_feature (1)..(1354): Ortholog of  Ceres SEQ ID NO 13662937 as cited in SEQ ID NO 64415
  misc_feature (1)..(1354): Ortholog of  Ceres SEQ ID NO 13595984 as cited in SEQ ID NO 68340
  misc_feature (1)..(1354): Ortholog of  Ceres SEQ ID NO 12635014 as cited in SEQ ID NO 0
acacaacaacaacacatccactcgaattttctatttccgaataacaaaaccgatcggcggagacatgacggcggcacaagggaactctaacgagactctgttttcttcttacaagatgggaagattcgatctctctcatcgagtggttctggcgccgatgacgcggtgcagggcgttgaacggagtaccaaacgcggcgttggcagagtattatgctcaacggaccactcccggcggttttctcatctccgaaggcaccatggtctctcccggatccgcagggttcccacatgtgcctggaatctattcagatgaacaagtagaagcatggaagcaagttgtggaagcagttcacgctaagggaggtttcatcttttgtcaattatggcatgttggacgtgcttctcatgcagtgtatcaacctaatggaggatcaccaatatcgtcaacgaacaaaccaatctcggaaaacaggtggcgagttttgttgcccgatggttcccacgtgaagtacccgaaacctcgggctttagaagcttccgagatacctcgggtggtggaggattattgcctttctgctttgaatgcgattcgagctggtttcgatgggattgagatccacggggcgcatggttacctcattgatcagtttttgaaagacgggatcaatgaccgtactgaccaatacggaggatccattgaaaaccgttgtagattcttgaaacaagtagtggaaggtgtagtttcagccataggagctagtaaagttggtgtgagggtatctccagctatagatcacttggacgcaactgattctaacccattatcactcgggctagccgtggttgatatgctcaataagttacaagatgttaatggcttgaagctcgcttaccttcacgttacacaacctcgctaccacgcctacgggcaaacagagtcgggaaggcaagggagtgatgaggaagaagctaagctaatgaagagcttgagaatggcttataaaggaacctttatgtccagtggaggattcaataaggaactaggcatgcaagctgttcaacaaggtgatgctgatttggtttcatatggcaggctttttatcgcaaacccggatttggtttcgcggttcaagattgatggaaagttgaataaatataatcggaagacgttttacactcaagatccagttgttggctacacggattatcctttcttggctcctttttcccgcctctgagtttgataatcggaggagaaaatgtattgatgttgtataaagacaatatattaatatgtaaaatgacaatgttattgttatccacttaatgaatagtcatgtatcttattgttt

SEQ ID NO: 25312 - protein, 412 aa, Arabidopsis thaliana
  peptide (1)..(412): Ceres Seq. ID no. 12422656
HNNNTSTRIFYFRITKPIGGDMTAAQGNSNETLFSSYKMGRFDLSHRVVLAPMTRCRALNGVPNAALAEYYAQRTTPGGFLISEGTMVSPGSAGFPHVPGIYSDEQVEAWKQVVEAVHAKGGFIFCQLWHVGRASHAVYQPNGGSPISSTNKPISENRWRVLLPDGSHVKYPKPRALEASEIPRVVEDYCLSALNAIRAGFDGIEIHGAHGYLIDQFLKDGINDRTDQYGGSIENRCRFLKQVVEGVVSAIGASKVGVRVSPAIDHLDATDSNPLSLGLAVVDMLNKLQDVNGLKLAYLHVTQPRYHAYGQTESGRQGSDEEEAKLMKSLRMAYKGTFMSSGGFNKELGMQAVQQGDADLVSYGRLFIANPDLVSRFKIDGKLNKYNRKTFYTQDPVVGYTDYPFLAPFSRL

SEQ ID NO: 25313 - protein, 391 aa, Arabidopsis thaliana
  peptide (1)..(391): Ceres Seq. ID no. 12422657
MTAAQGNSNETLFSSYKMGRFDLSHRVVLAPMTRCRALNGVPNAALAEYYAQRTTPGGFLISEGTMVSPGSAGFPHVPGIYSDEQVEAWKQVVEAVHAKGGFIFCQLWHVGRASHAVYQPNGGSPISSTNKPISENRWRVLLPDGSHVKYPKPRALEASEIPRVVEDYCLSALNAIRAGFDGIEIHGAHGYLIDQFLKDGINDRTDQYGGSIENRCRFLKQVVEGVVSAIGASKVGVRVSPAIDHLDATDSNPLSLGLAVVDMLNKLQDVNGLKLAYLHVTQPRYHAYGQTESGRQGSDEEEAKLMKSLRMAYKGTFMSSGGFNKELGMQAVQQGDADLVSYGRLFIANPDLVSRFKIDGKLNKYNRKTFYTQDPVVGYTDYPFLAPFSRL

SEQ ID NO: 25314 - protein, 374 aa, Arabidopsis thaliana
  peptide (1)..(374): Ceres Seq. ID no. 12422658
MGRFDLSHRVVLAPMTRCRALNGVPNAALAEYYAQRTTPGGFLISEGTMVSPGSAGFPHVPGIYSDEQVEAWKQVVEAVHAKGGFIFCQLWHVGRASHAVYQPNGGSPISSTNKPISENRWRVLLPDGSHVKYPKPRALEASEIPRVVEDYCLSALNAIRAGFDGIEIHGAHGYLIDQFLKDGINDRTDQYGGSIENRCRFLKQVVEGVVSAIGASKVGVRVSPAIDHLDATDSNPLSLGLAVVDMLNKLQDVNGLKLAYLHVTQPRYHAYGQTESGRQGSDEEEAKLMKSLRMAYKGTFMSSGGFNKELGMQAVQQGDADLVSYGRLFIANPDLVSRFKIDGKLNKYNRKTFYTQDPVVGYTDYPFLAPFSRL

SEQ ID NO: 25315 - DNA, 927 bp, Arabidopsis thaliana
  misc_feature (1)..(927): Ceres Seq. ID no. 13490882
  misc_feature (1)..(927): Ortholog of  Ceres SEQ ID NO 15225572 as cited in SEQ ID NO 61651
tgaagacaaagcgcagaaaatggtgggagcgactgtagttagtaaatggactcccctatgtgtggcttcgccgccggagagaaactcggcaagtctcaatccacactgttctccagccagggttaattttagaacagcgttggccgcatttcgtcctcagttccgtcttttctctcgcaattccgcgtctcgccgccgtcttcgcgcttccagctccgccgaatcgggaatcttccttcctcaccttgtagcttctatggaggacgttgaggagacttacattatggtgaaacctgatggcatacaacgaggccttgtaggagaaatcatttctcgctttgagaaaaaggggtttaaacttattgggctcaagatgtttcagtgcccaaaagaattggctgaggagcattataaggatcttagtgctaaatcattctttcctaacctgattgagtacatcacttcaggtccagttgtgtgtatggcttgggaaggtgttggtgttgttgcttcagccaggaagctaatagggaaaacagatccgcttcaagctgaacctggtactataagaggagatcttgctgtgcaaaccggaaggaacattgtgcatggtagtgacagccctgaaaacggcaagcgtgagattggtctgtggttcaaagagggcgagctatgcaagtgggattcggctctagctacatggctaagggagtgatccttgagaagacagagtcaattataatggtgtccttacttgttttcttgttaccgatgatgagctttggtgttttgttcctgattttgggcggcaatataatataactgccaatctatggcttgattcttctcatatctgtgatcacttgtcatgtaatcaaaactagttacagattcatctgcatttggttctacgttacagacacctcc

SEQ ID NO: 25316 - protein, 237 aa, Arabidopsis thaliana
  peptide (1)..(237): Ceres Seq. ID no. 13490883
EDKAQKMVGATVVSKWTPLCVASPPERNSASLNPHCSPARVNFRTALAAFRPQFRLFSRNSASRRRLRASSSAESGIFLPHLVASMEDVEETYIMVKPDGIQRGLVGEIISRFEKKGFKLIGLKMFQCPKELAEEHYKDLSAKSFFPNLIEYITSGPVVCMAWEGVGVVASARKLIGKTDPLQAEPGTIRGDLAVQTGRNIVHGSDSPENGKREIGLWFKEGELCKWDSALATWLRE

SEQ ID NO: 25317 - protein, 231 aa, Arabidopsis thaliana
  peptide (1)..(231): Ceres Seq. ID no. 13490884
MVGATVVSKWTPLCVASPPERNSASLNPHCSPARVNFRTALAAFRPQFRLFSRNSASRRRLRASSSAESGIFLPHLVASMEDVEETYIMVKPDGIQRGLVGEIISRFEKKGFKLIGLKMFQCPKELAEEHYKDLSAKSFFPNLIEYITSGPVVCMAWEGVGVVASARKLIGKTDPLQAEPGTIRGDLAVQTGRNIVHGSDSPENGKREIGLWFKEGELCKWDSALATWLRE

SEQ ID NO: 25318 - protein, 152 aa, Arabidopsis thaliana
  peptide (1)..(152): Ceres Seq. ID no. 13490885
MEDVEETYIMVKPDGIQRGLVGEIISRFEKKGFKLIGLKMFQCPKELAEEHYKDLSAKSFFPNLIEYITSGPVVCMAWEGVGVVASARKLIGKTDPLQAEPGTIRGDLAVQTGRNIVHGSDSPENGKREIGLWFKEGELCKWDSALATWLRE

SEQ ID NO: 25319 - DNA, 1165 bp, Arabidopsis thaliana
  misc_feature (1)..(1165): Ceres Seq. ID no. 12321592
  misc_feature (1)..(1165): Ortholog of  Ceres SEQ ID NO 13594548 as cited in SEQ ID NO 51267
  misc_feature (1)..(1165): Ortholog of  Ceres SEQ ID NO 12614847 as cited in SEQ ID NO 61970
gtttttgtcctcttaacaaaatattcttcaaactctctctgttgtttgtttgttgacaaatctctcaaaaccatttgttttgcaatcgcagatccgtttttcttcgggtctcatcacaatgaatggcttctctgatcttaatccttctgagagcaaaccttctctgtcacaactagctccattagaagccattctgtttgatgttgatggaacactctgtgactcagatcccatccaccttattgccttccaagaactgcttcaagagattggttttaacaatggtgtcccaatcgatgagaaattctttgttgagaacattgctggaaaacacaattctgaaattgctctacttctgttccctgatgatgtttcaagagggttaaaattctgtgatgaaaaggaagctctttaccgcaaaattgttgcagagaagataaagccacttgatgggcttataaaactgaccaaatggatcgaagatcgtggattgaaacgagctgcggtaacaaacgctccaaaagaaaacgcagagctcatgatatcgaaacttggtctgactgatttctttcaagcagtgattcttggctctgaatgtgaatttcccaaaccacaccctggaccttacttgaaggctcttgaagtgcttaacgtgtcaaaggagcacacgctagttttcgaagactcgatctctgggataaaagctggagttgcagctggaatgccagtgattggactgactacagggaatccagcaagcctgcttatgcaagcaaaacccgcttttctcatcgagaactatgcggatccaaaactgtgggctgtgttggaagaacttgataacaagtcttaagtctcacttgtttggcttatggaaacccacacatgcatgagcagcctctgaagtttaccttatgtcttagatgatcattgttgaataattcattgggagtttatgacaatgggagctttcaaatatctgattattttgtattgatacatgcacaatgctagatttgtatccaggagatagttgcataaaccaatatactataccctcggatcttagcttattttcattgatatcttgttgttttgtgctgtaaacatatcagcttttgaatacatttggtccatggcgcaaaataagacttttttttttttt

SEQ ID NO: 25320 - protein, 244 aa, Arabidopsis thaliana
  peptide (1)..(244): Ceres Seq. ID no. 12321593
MNGFSDLNPSESKPSLSQLAPLEAILFDVDGTLCDSDPIHLIAFQELLQEIGFNNGVPIDEKFFVENIAGKHNSEIALLLFPDDVSRGLKFCDEKEALYRKIVAEKIKPLDGLIKLTKWIEDRGLKRAAVTNAPKENAELMISKLGLTDFFQAVILGSECEFPKPHPGPYLKALEVLNVSKEHTLVFEDSISGIKAGVAAGMPVIGLTTGNPASLLMQAKPAFLIENYADPKLWAVLEELDNKS

SEQ ID NO: 25321 - DNA, 1129 bp, Arabidopsis thaliana
  misc_feature (1)..(1129): Ceres Seq. ID no. 12329373
  misc_feature (1)..(1129): Ortholog of  Ceres SEQ ID NO 15171289 as cited in SEQ ID NO 51570
aaacaaaaattttcttttccaaaatccccaaacaatagaaacgcgttttaaacgatttgattagttttaaattaaaaagaagatccgagcgatgtctggttcgacccggaaagaaatggatcggatcaaaggaccatggagtcctgaagaagacgatctgttacaatcgttggttcagaagcacggaccaaggaactggtctctgataagcaaatcaatccctggacgttccggtaaatcttgccgtctccgttggtgtaatcagctttctccggaggtagagcaccgtggattcacggcggaggaagatgatacgattatactagcgcacgctcggtttggtaacaagtgggcgacgattgcacggcttctcaatggtcgcactgataacgcgattaagaatcactggaactcaacgctgaagcggaaatgtagcggcggaggcggcggaggagaggaagggcagagttgtgatttcggtggtaatggagggtatgatggtaatttaacagatgaaaaaccgttaaaacggacggcgagtggtggaggaggagttgttgtggtgacggcgttaagtcnaacgggatctgacgtcagcgagcaatcgcaatctagtggatctgttttaccggtttcttcttcttgtcatgtttttaaaccgacggcgagagctggtggagtggtgattgagtcatcatcgtcggaggaggaggagaaagatccgatgacttgtttgagtttgtctttgccttgggtcaatgagtcaacaactccggtggagttgtttccggtgaagagagaagaagaagaagagaaggaaagagagatttctggacttggtggagattttatgacggtggtgcaggagatgattaagacggaggttaggagttacatggcggatttacagctaggaaacggcggaggagctggaggaggagcaagttcgtgtatggtgcaaggaactaatggtcgtaatgtagggtttagagagtttattggattaggtaggatcgagtagtgagtgagaaaagagaagaattgtgtagcaaatgcagagaaagagccaatttcatgatttgagatttgattcattcgaaaaaaaaactgaataaatgtattgattttg

SEQ ID NO: 25322 - protein, 309 aa, Arabidopsis thaliana
  peptide (1)..(309): Ceres Seq. ID no. 12329374
  misc_feature (163)..(163): Xaa is any aa, unknown or other
MSGSTRKEMDRIKGPWSPEEDDLLQSLVQKHGPRNWSLISKSIPGRSGKSCRLRWCNQLSPEVEHRGFTAEEDDTIILAHARFGNKWATIARLLNGRTDNAIKNHWNSTLKRKCSGGGGGGEEGQSCDFGGNGGYDGNLTDEKPLKRTASGGGGVVVVTALSXTGSDVSEQSQSSGSVLPVSSSCHVFKPTARAGGVVIESSSSEEEEKDPMTCLSLSLPWVNESTTPVELFPVKREEEEEKEREISGLGGDFMTVVQEMIKTEVRSYMADLQLGNGGGAGGGASSCMVQGTNGRNVGFREFIGLGRIE

SEQ ID NO: 25323 - protein, 301 aa, Arabidopsis thaliana
  peptide (1)..(301): Ceres Seq. ID no. 12329375
  misc_feature (155)..(155): Xaa is any aa, unknown or other
MDRIKGPWSPEEDDLLQSLVQKHGPRNWSLISKSIPGRSGKSCRLRWCNQLSPEVEHRGFTAEEDDTIILAHARFGNKWATIARLLNGRTDNAIKNHWNSTLKRKCSGGGGGGEEGQSCDFGGNGGYDGNLTDEKPLKRTASGGGGVVVVTALSXTGSDVSEQSQSSGSVLPVSSSCHVFKPTARAGGVVIESSSSEEEEKDPMTCLSLSLPWVNESTTPVELFPVKREEEEEKEREISGLGGDFMTVVQEMIKTEVRSYMADLQLGNGGGAGGGASSCMVQGTNGRNVGFREFIGLGRIE

SEQ ID NO: 25324 - DNA, 1051 bp, Arabidopsis thaliana
  misc_feature (1)..(1051): Ceres Seq. ID no. 12337374
  misc_feature (1)..(1051): Ortholog of  Ceres SEQ ID NO 13598479 as cited in SEQ ID NO 60680
aaaaaacagaaaaaattcgtggaaacgccattaacgagatctagcacaaactcgtagtgtggtgtagaagaagacaaaagcaaggagcttcataataaaaccctagagatatttgtttctccaatttcaaaagacgagacgtgaagaagacgatcgaagatgaacattttcagattagctggtgatatgactcacctagccagtgttcttgtcttgcttctcaagatccacaccatcaaatcctgcgctggtgtttcattgaagactcaagaactctatgccattgtctttgcgacgcgttatttggatattttcacgagttttgtgtctctgtacaacacctctatgaagttggtgttcttaggaagttctttttcgattgtgtggtacatgaagtatcataaggccgtccacaggacttacgacagagagcaagatacgtttcgtcattggttccttgtgcttccttgctttctcttagctcttctgattcatgaaaagtttacctttcttgaggtattgtggacgttttcattgtacttggaggctgttgccatattacctcagcttgtcttgttgcaaaggactagaaatattgacaacttgaccggacaatatatatttctccttggggggtaccgtggattatacatcctcaactggatctaccgttacttcactgagccgcactttgttcactggataacatggatcgccgggtttgttcaaacactgctctatgccgacttcttctattattatttcctaagctggaagaacaacaaaaagctccaattaccagcttaatttctaaagtttcaatgctcgggaaccctacggattcgatttggtgcccgacaaaacatctaccggaatgttaccaatttactctgttggtggttattagaggagaacgagcatagatgtgtaaactccagcaatctaacttattacactttctttagactttctcgtctctcatctttttttttggtcgacttagtgttactaaatatttcgacgcgacagtaatatattcaccacaattcgc

SEQ ID NO: 25325 - protein, 215 aa, Arabidopsis thaliana
  peptide (1)..(215): Ceres Seq. ID no. 12337375
MNIFRLAGDMTHLASVLVLLLKIHTIKSCAGVSLKTQELYAIVFATRYLDIFTSFVSLYNTSMKLVFLGSSFSIVWYMKYHKAVHRTYDREQDTFRHWFLVLPCFLLALLIHEKFTFLEVLWTFSLYLEAVAILPQLVLLQRTRNIDNLTGQYIFLLGGYRGLYILNWIYRYFTEPHFVHWITWIAGFVQTLLYADFFYYYFLSWKNNKKLQLPA

SEQ ID NO: 25326 - protein, 206 aa, Arabidopsis thaliana
  peptide (1)..(206): Ceres Seq. ID no. 12337376
MTHLASVLVLLLKIHTIKSCAGVSLKTQELYAIVFATRYLDIFTSFVSLYNTSMKLVFLGSSFSIVWYMKYHKAVHRTYDREQDTFRHWFLVLPCFLLALLIHEKFTFLEVLWTFSLYLEAVAILPQLVLLQRTRNIDNLTGQYIFLLGGYRGLYILNWIYRYFTEPHFVHWITWIAGFVQTLLYADFFYYYFLSWKNNKKLQLPA

SEQ ID NO: 25327 - protein, 153 aa, Arabidopsis thaliana
  peptide (1)..(153): Ceres Seq. ID no. 12337377
MKLVFLGSSFSIVWYMKYHKAVHRTYDREQDTFRHWFLVLPCFLLALLIHEKFTFLEVLWTFSLYLEAVAILPQLVLLQRTRNIDNLTGQYIFLLGGYRGLYILNWIYRYFTEPHFVHWITWIAGFVQTLLYADFFYYYFLSWKNNKKLQLPA

SEQ ID NO: 25328 - DNA, 908 bp, Arabidopsis thaliana
  misc_feature (1)..(908): Ceres Seq. ID no. 12466432
  misc_feature (1)..(908): Ortholog of  Ceres SEQ ID NO 13594762 as cited in SEQ ID NO 51909
accaaaaattataactcaacacttcactaatcaattattcaaagcagataaaaaaaaaatggctcaagcagtgacttcgatggctggcttacgtggagcatctcaggctgtccttgaaggaagtttacagatcaacggctcaaaccgtttgaacatctcaagagtctcggttgggtctcagagaaccggacttgtgatcagggctcagcagaacgtgtcagtaccagaaagtagtcgccggtcagtgattggactcgtggcggctggtttagccggtggttcattcgttaaagctgttttcgccgaagctattccgatcaaagttggtggtcctccacttccttccggtggcctacctggaacagataactcagaccaagcaagagacttttcattggcattgaaagatagattttacatacaaccattgtcaccaacagaagctgcagctagagccaaagattctgctaaagagatcatcaacgttaagtcatttatcgacaaaaaagcttggccctatgttcagaacgatctccgtttaagagcatcgtacctccgttacgatctcaacaccgttatctccgctaagcctaaggaagagaagcaaagccttaaagatctcaccgcaaagcttttccaaaccattgacaacttggactatgcggcgagatcaaagagtagcccagatgctgagaagtattactcagaaactgtctcgagtttgaacaatgttcttgccaagctcggttaatgaagaaagacttgcgttgtaatctgttgatgtcgatgttattataattactgctatccaagtactttgtctttctccttctcttcttgtctgatcaaatcggttatctctaatttcagtttcaagttttaaccaatatattggctggctctttagc

SEQ ID NO: 25329 - protein, 249 aa, Arabidopsis thaliana
  peptide (1)..(249): Ceres Seq. ID no. 12466433
PKIITQHFTNQLFKADKKKMAQAVTSMAGLRGASQAVLEGSLQINGSNRLNISRVSVGSQRTGLVIRAQQNVSVPESSRRSVIGLVAAGLAGGSFVKAVFAEAIPIKVGGPPLPSGGLPGTDNSDQARDFSLALKDRFYIQPLSPTEAAARAKDSAKEIINVKSFIDKKAWPYVQNDLRLRASYLRYDLNTVISAKPKEEKQSLKDLTAKLFQTIDNLDYAARSKSSPDAEKYYSETVSSLNNVLAKLG

SEQ ID NO: 25330 - protein, 230 aa, Arabidopsis thaliana
  peptide (1)..(230): Ceres Seq. ID no. 12466434
MAQAVTSMAGLRGASQAVLEGSLQINGSNRLNISRVSVGSQRTGLVIRAQQNVSVPESSRRSVIGLVAAGLAGGSFVKAVFAEAIPIKVGGPPLPSGGLPGTDNSDQARDFSLALKDRFYIQPLSPTEAAARAKDSAKEIINVKSFIDKKAWPYVQNDLRLRASYLRYDLNTVISAKPKEEKQSLKDLTAKLFQTIDNLDYAARSKSSPDAEKYYSETVSSLNNVLAKLG

SEQ ID NO: 25331 - protein, 223 aa, Arabidopsis thaliana
  peptide (1)..(223): Ceres Seq. ID no. 12466435
MAGLRGASQAVLEGSLQINGSNRLNISRVSVGSQRTGLVIRAQQNVSVPESSRRSVIGLVAAGLAGGSFVKAVFAEAIPIKVGGPPLPSGGLPGTDNSDQARDFSLALKDRFYIQPLSPTEAAARAKDSAKEIINVKSFIDKKAWPYVQNDLRLRASYLRYDLNTVISAKPKEEKQSLKDLTAKLFQTIDNLDYAARSKSSPDAEKYYSETVSSLNNVLAKLG

SEQ ID NO: 25332 - DNA, 803 bp, Arabidopsis thaliana
  misc_feature (1)..(803): Ceres Seq. ID no. 12396544
  misc_feature (1)..(803): Ortholog of  Ceres SEQ ID NO 13595821 as cited in SEQ ID NO 56524
  misc_feature (1)..(803): Ortholog of  Ceres SEQ ID NO 12784729 as cited in SEQ ID NO 61383
  misc_feature (1)..(803): Ortholog of  Ceres SEQ ID NO 15174365 as cited in SEQ ID NO 0
agaaccctagaattcgaaatctcccaagaacccgaaaaagcgccatgtcgctcactatcccgacgaatctcgttctcaacccgagatctaacaaatctctcactcaatccgtacctaaatcctccgcaagattcgtctgctccgatgacaaatcctcctcctccgcacctcaatccatgaaagctttctccgccgccgtcgccctctcttccatcctcctctctgctcctatgccagctgtcgctgatatctcaggtttgactccttgcaaggactcaaaacagttcgctaaaagagagaagcaacagatcaagaagcttgaatcttctcttaagctctacgctcctgaatctgcccctgctcttgctctcaatgctcagatcgagaaaaccaaacgcaggttcgacaactacgggaagtacggattgttatgcgggtcagacgggttaccgcacttgatagtgaacggagaccagcggcattggggagagttcattactccagggattcttttcctctacattgctggatggattgggtgggttggaagaagctacttaatagctattagtggtgagaagaaacccgcgatgaaagagatcatcatcgatgttcctttggctagtcggatcatcttccgtggtttcatttggcccgttgctgcctacagagagtttctcaatggtgatctcattgctaaggatgtttaaaaagggaacttgttttctgcttttgtgttactctctctaatctctttgttttccattgtacttattgaaaaacaatgcattgtcgaaaacctt

SEQ ID NO: 25333 - protein, 235 aa, Arabidopsis thaliana
  peptide (1)..(235): Ceres Seq. ID no. 12396545
NPRIRNLPRTRKSAMSLTIPTNLVLNPRSNKSLTQSVPKSSARFVCSDDKSSSSAPQSMKAFSAAVALSSILLSAPMPAVADISGLTPCKDSKQFAKREKQQIKKLESSLKLYAPESAPALALNAQIEKTKRRFDNYGKYGLLCGSDGLPHLIVNGDQRHWGEFITPGILFLYIAGWIGWVGRSYLIAISGEKKPAMKEIIIDVPLASRIIFRGFIWPVAAYREFLNGDLIAKDV

SEQ ID NO: 25334 - protein, 221 aa, Arabidopsis thaliana
  peptide (1)..(221): Ceres Seq. ID no. 12396546
MSLTIPTNLVLNPRSNKSLTQSVPKSSARFVCSDDKSSSSAPQSMKAFSAAVALSSILLSAPMPAVADISGLTPCKDSKQFAKREKQQIKKLESSLKLYAPESAPALALNAQIEKTKRRFDNYGKYGLLCGSDGLPHLIVNGDQRHWGEFITPGILFLYIAGWIGWVGRSYLIAISGEKKPAMKEIIIDVPLASRIIFRGFIWPVAAYREFLNGDLIAKDV

SEQ ID NO: 25335 - protein, 177 aa, Arabidopsis thaliana
  peptide (1)..(177): Ceres Seq. ID no. 12396547
MKAFSAAVALSSILLSAPMPAVADISGLTPCKDSKQFAKREKQQIKKLESSLKLYAPESAPALALNAQIEKTKRRFDNYGKYGLLCGSDGLPHLIVNGDQRHWGEFITPGILFLYIAGWIGWVGRSYLIAISGEKKPAMKEIIIDVPLASRIIFRGFIWPVAAYREFLNGDLIAKDV

SEQ ID NO: 25336 - DNA, 1226 bp, Arabidopsis thaliana
  misc_feature (1)..(1226): Ceres Seq. ID no. 12700607
  misc_feature (1)..(1226): Ortholog of  Ceres SEQ ID NO 14302852 as cited in SEQ ID NO 64814
  misc_feature (1)..(1226): Ortholog of  Ceres SEQ ID NO 13598593 as cited in SEQ ID NO 64978
  misc_feature (1)..(1226): Ortholog of  Ceres SEQ ID NO 14303067 as cited in SEQ ID NO 67078
  misc_feature (1)..(1226): Ortholog of  Ceres SEQ ID NO 13595992 as cited in SEQ ID NO 68401
atggaggtcccaaaatcctcattgctaatgataatttttgtggtagcttcatgtttcttgcatgtcaaggcttggcatggtcagacttattgtggtggcaatgcgactccccgatgccagctccggtacatcgactgtcctgaagagtgccctaccgaaatgttccccaactctcagaacaaaatttgttgggttgattgctttaaacccctttgcgaggccgtgtgtcgggcggtaaaacccaactgcgaatcctatggatcaatttgtctagatccgaggttcataggtggtgatggaattgtgttctacttccatggaaagagcaatgaacattttagcattgtctcggaccctgactttcagatcaatgctaggttcactggtcatagacctgctggccgcactagagactttacatggatccaagctctcggcttcctctttaactcccacaaattctcccttgagaccaccaaagtcgccacttgggacagcaaccttgatcacctcaagttcactatcgacggccaagatttaattatccctcaagaaactttatccacttggtactcatccgacaaagacatcaagattgaaaggttgacagagaagaacagtgtgatcgtgactatcaaagacaaagctgagatcatggtcaacgtggttccagtgaccaaagaagatgatagaatccacaactacaaattacctgtagatgactgttttgcccattttgaggtccagttcaagtttattaatctgtccccaaaagtcgatggaatcttgggacgcacttatagacccgattttaagaatccggctaaaccaggagtcgtaatgccagtggtgggaggtgaagatagctttaggacatcttctctgctctctcatgtttgcaaaacttgtttgttctctgaagatcccgccgttgcgagtggctctgtcaagcccaaaagtacatacgcattgttagattgcagccgtggtgcgtcttccggctatggactcgtctgcagaaagtagttaccaatacaaactcagtttgctaagaattacagatattaaaagtatattgttatgttttgtgtacgtataaaatttatatgtttgtcaaaataaaacagaggaataaggtaattaagaaccaaattctaaagaaagtaattgtaactcagttatttacatgtaccagattatctaatccttaagaaaaccattatatt

SEQ ID NO: 25337 - protein, 341 aa, Arabidopsis thaliana
  peptide (1)..(341): Ceres Seq. ID no. 12700608
MEVPKSSLLMIIFVVASCFLHVKAWHGQTYCGGNATPRCQLRYIDCPEECPTEMFPNSQNKICWVDCFKPLCEAVCRAVKPNCESYGSICLDPRFIGGDGIVFYFHGKSNEHFSIVSDPDFQINARFTGHRPAGRTRDFTWIQALGFLFNSHKFSLETTKVATWDSNLDHLKFTIDGQDLIIPQETLSTWYSSDKDIKIERLTEKNSVIVTIKDKAEIMVNVVPVTKEDDRIHNYKLPVDDCFAHFEVQFKFINLSPKVDGILGRTYRPDFKNPAKPGVVMPVVGGEDSFRTSSLLSHVCKTCLFSEDPAVASGSVKPKSTYALLDCSRGASSGYGLVCRK

SEQ ID NO: 25338 - protein, 332 aa, Arabidopsis thaliana
  peptide (1)..(332): Ceres Seq. ID no. 12700609
MIIFVVASCFLHVKAWHGQTYCGGNATPRCQLRYIDCPEECPTEMFPNSQNKICWVDCFKPLCEAVCRAVKPNCESYGSICLDPRFIGGDGIVFYFHGKSNEHFSIVSDPDFQINARFTGHRPAGRTRDFTWIQALGFLFNSHKFSLETTKVATWDSNLDHLKFTIDGQDLIIPQETLSTWYSSDKDIKIERLTEKNSVIVTIKDKAEIMVNVVPVTKEDDRIHNYKLPVDDCFAHFEVQFKFINLSPKVDGILGRTYRPDFKNPAKPGVVMPVVGGEDSFRTSSLLSHVCKTCLFSEDPAVASGSVKPKSTYALLDCSRGASSGYGLVCRK

SEQ ID NO: 25339 - protein, 288 aa, Arabidopsis thaliana
  peptide (1)..(288): Ceres Seq. ID no. 12700610
MFPNSQNKICWVDCFKPLCEAVCRAVKPNCESYGSICLDPRFIGGDGIVFYFHGKSNEHFSIVSDPDFQINARFTGHRPAGRTRDFTWIQALGFLFNSHKFSLETTKVATWDSNLDHLKFTIDGQDLIIPQETLSTWYSSDKDIKIERLTEKNSVIVTIKDKAEIMVNVVPVTKEDDRIHNYKLPVDDCFAHFEVQFKFINLSPKVDGILGRTYRPDFKNPAKPGVVMPVVGGEDSFRTSSLLSHVCKTCLFSEDPAVASGSVKPKSTYALLDCSRGASSGYGLVCRK

SEQ ID NO: 25340 - DNA, 1324 bp, Arabidopsis thaliana
  misc_feature (1)..(1324): Ceres Seq. ID no. 12395186
  misc_feature (1)..(1324): Ortholog of  Ceres SEQ ID NO 13577044 as cited in SEQ ID NO 58682
ctatcgaaactctctctgacttgtttgtgttctctcaaatcctctgataagaatcaatggcgaaggaattagcagagaaagctaaagaagcttttctagatgatgacttcgatgttgctgttgacttatactccaaagccattgacttggatcccaattgcgccgccttcttcgccgatcgtgctcaggccaacatcaaaatcgataacttcactgaagctgttgtagatgcgaacaaagccattgagttggagccaacgttggcaaaagcctatctcagaaagggcactgcttgtatgaagctagaagaatatagtactgctaaagcagccctggaaaagggagcttctgttgcaccgaatgaaccaaagtttaagaagatgatagatgaatgcgatcttcgtattgcagaagaagagaaagatttggttcagccgatgccaccgagtttgccttcaagctctacaacaccactagcaacggaagctgatgctcctcctgttccaattcctgcagcacctgccaaaccgatgttcaggcacgagttctaccagaaaccagaagaagcggtggtgacaattttcgccaaaaaagtacctaaggagaacgtaactgtcgagtttggtgagcagattctgagtgttgtcattgatgttgctggagaggaagcttatcatctccagccgagattgttcgggaagataataccagagaagtgcagatttgaagtattgtcgaccaaagttgagatccgtcttgcgaaagcagagataatcacctgggcctcccttgaatatggtaaagggcaaagtgttttgcccaaacccaatgtctcatcagcgctgtcgcagagaccagtgtacccatcttctaagccagcaaaagactgggacaagttggaagctgaagtgaagaaacaggagaaggatgagaagcttgatggagatgcagctatgaacaaatttttcagcgacatatactcgagtgcagatgaagacatgaggcgggcaatgaacaaatcatttgcagagtcgaatgggacggtactgtcgacaaactggaaagaagttgggactaagaaagtggagagcactccaccagatggcatggagctcaagaagtgggagtattgatcttcttaaaatccccttttctggtttttgttaaaaaaaagtctgacaaatcttttgaacttttaaggtgtttttttttttggtttctgctcgaatttgtctctctccattcttgcgttgtggtctcaaagaacgttctgatactttgattttgtattagaaaactaaaactcgcaagtctgttgttttgg

SEQ ID NO: 25341 - protein, 358 aa, Arabidopsis thaliana
  peptide (1)..(358): Ceres Seq. ID no. 12395187
MAKELAEKAKEAFLDDDFDVAVDLYSKAIDLDPNCAAFFADRAQANIKIDNFTEAVVDANKAIELEPTLAKAYLRKGTACMKLEEYSTAKAALEKGASVAPNEPKFKKMIDECDLRIAEEEKDLVQPMPPSLPSSSTTPLATEADAPPVPIPAAPAKPMFRHEFYQKPEEAVVTIFAKKVPKENVTVEFGEQILSVVIDVAGEEAYHLQPRLFGKIIPEKCRFEVLSTKVEIRLAKAEIITWASLEYGKGQSVLPKPNVSSALSQRPVYPSSKPAKDWDKLEAEVKKQEKDEKLDGDAAMNKFFSDIYSSADEDMRRAMNKSFAESNGTVLSTNWKEVGTKKVESTPPDGMELKKWEY

SEQ ID NO: 25342 - protein, 278 aa, Arabidopsis thaliana
  peptide (1)..(278): Ceres Seq. ID no. 12395188
MKLEEYSTAKAALEKGASVAPNEPKFKKMIDECDLRIAEEEKDLVQPMPPSLPSSSTTPLATEADAPPVPIPAAPAKPMFRHEFYQKPEEAVVTIFAKKVPKENVTVEFGEQILSVVIDVAGEEAYHLQPRLFGKIIPEKCRFEVLSTKVEIRLAKAEIITWASLEYGKGQSVLPKPNVSSALSQRPVYPSSKPAKDWDKLEAEVKKQEKDEKLDGDAAMNKFFSDIYSSADEDMRRAMNKSFAESNGTVLSTNWKEVGTKKVESTPPDGMELKKWEY

SEQ ID NO: 25343 - protein, 250 aa, Arabidopsis thaliana
  peptide (1)..(250): Ceres Seq. ID no. 12395189
MIDECDLRIAEEEKDLVQPMPPSLPSSSTTPLATEADAPPVPIPAAPAKPMFRHEFYQKPEEAVVTIFAKKVPKENVTVEFGEQILSVVIDVAGEEAYHLQPRLFGKIIPEKCRFEVLSTKVEIRLAKAEIITWASLEYGKGQSVLPKPNVSSALSQRPVYPSSKPAKDWDKLEAEVKKQEKDEKLDGDAAMNKFFSDIYSSADEDMRRAMNKSFAESNGTVLSTNWKEVGTKKVESTPPDGMELKKWEY

SEQ ID NO: 25344 - DNA, 1519 bp, Arabidopsis thaliana
  misc_feature (1)..(1519): Ceres Seq. ID no. 12322059
  misc_feature (1)..(1519): Ortholog of  Ceres SEQ ID NO 15176596 as cited in SEQ ID NO 55168
  misc_feature (1)..(1519): Ortholog of  Ceres SEQ ID NO 14301576 as cited in SEQ ID NO 62362
aattaattaattaagaagtctgagagcgtcagttggaggagtccaaaagaggagaagaaggaagcttggcctttgaggagattcaaaggatcgtgttgcttactgtatttaaaaaccctagagttcatcatcatcttcctctcattattgattgctctaatcaggttccgacgagactaataatcctttctcagatcgataacaatgtctcactctgctgtttctcaggctggtgctgtctcagtttcaattgaaaaccaacgttctcttagaagatccgtcttcaagcagaacaatagcataagcttcaacagcaagtcatggtcatcttctttagcattgaaccagaagacaacaagcataagagatgggaaacggtacccgagcacgacaatatgtatgtcggttcaacaaacaagtagttccaaggttactgtctctcctatagagttggaagaccctaaggatcctcctttgaacttgtacaaacccaaggagtcttacaccgctaagattgtctctgtggagcgagtagttggcccgaaagcccctggagaaacttgtcatatcgtcatcgatcatgatggtaaccttccttactgggaaggacagagttacggtgtgattcctccaggtgagaacccgaagaaaccgggagcgccacacaatgtgcgcctttactcaattgcatcaacaaggtacggagatttctttgacggtaaaacagcgagtttgtgtgtacgtagagctgtttattacgaccctgagactggaaaagaagatccttcaaagaacggagtctgcagcaacttcctatgtgattcaaagcccggtgacaagattcaaatcaccggtccatctgggaaggtaatgctattacccgagagtgatccaaacgcgacacacataatgatagccacgggaacaggagtggctccatacagaggctacttacgtcgaatgttcatggaaaacgtcccaaacaagacatttagcggcttagcttggctcttcttaggcgtggccaacaccgatagccttctctatgacgaagagtttaccaagtacctaaaagaccatccagacaactttaggttcgacaaggcattgagcagagaggagaagaacaagaaaggtggaaagatgtacgtgcaggacaagattgaagaatatagtgatgagatcttcaagcttttggacaatggagctcatatttacttctgtgggcttaaaggaatgatgcctgggattcaagatacacttaagagagttgcagaagagagaggtgagagctgggacttgaagctttctcagctcaggaagaacaagcagtggcacgttgaagtctattgagctctttatttgtatttgctgtttttgatttttgatttaagaatcgtaataaatttgaatttggtgtttttctacttttcaaacatgatatgatgataatatctgaaatttgttggttttgagaagagaatattctcagagaataatcaatatatcatttatgtaa

SEQ ID NO: 25345 - protein, 382 aa, Arabidopsis thaliana
  peptide (1)..(382): Ceres Seq. ID no. 12322060
MSHSAVSQAGAVSVSIENQRSLRRSVFKQNNSISFNSKSWSSSLALNQKTTSIRDGKRYPSTTICMSVQQTSSSKVTVSPIELEDPKDPPLNLYKPKESYTAKIVSVERVVGPKAPGETCHIVIDHDGNLPYWEGQSYGVIPPGENPKKPGAPHNVRLYSIASTRYGDFFDGKTASLCVRRAVYYDPETGKEDPSKNGVCSNFLCDSKPGDKIQITGPSGKVMLLPESDPNATHIMIATGTGVAPYRGYLRRMFMENVPNKTFSGLAWLFLGVANTDSLLYDEEFTKYLKDHPDNFRFDKALSREEKNKKGGKMYVQDKIEEYSDEIFKLLDNGAHIYFCGLKGMMPGIQDTLKRVAEERGESWDLKLSQLRKNKQWHVEVY

SEQ ID NO: 25346 - protein, 317 aa, Arabidopsis thaliana
  peptide (1)..(317): Ceres Seq. ID no. 12322061
MSVQQTSSSKVTVSPIELEDPKDPPLNLYKPKESYTAKIVSVERVVGPKAPGETCHIVIDHDGNLPYWEGQSYGVIPPGENPKKPGAPHNVRLYSIASTRYGDFFDGKTASLCVRRAVYYDPETGKEDPSKNGVCSNFLCDSKPGDKIQITGPSGKVMLLPESDPNATHIMIATGTGVAPYRGYLRRMFMENVPNKTFSGLAWLFLGVANTDSLLYDEEFTKYLKDHPDNFRFDKALSREEKNKKGGKMYVQDKIEEYSDEIFKLLDNGAHIYFCGLKGMMPGIQDTLKRVAEERGESWDLKLSQLRKNKQWHVEVY

SEQ ID NO: 25347 - DNA, 980 bp, Arabidopsis thaliana
  misc_feature (1)..(980): Ceres Seq. ID no. 13497471
  misc_feature (1)..(980): Ortholog of  Ceres SEQ ID NO 13574788 as cited in SEQ ID NO 68
  misc_feature (1)..(980): Ortholog of  Ceres SEQ ID NO 12609388 as cited in SEQ ID NO 52081
  misc_feature (1)..(980): Ortholog of  Ceres SEQ ID NO 14309072 as cited in SEQ ID NO 0
aagctttgaacgttagcaaaattatgttacctaccaccagtccctggcttattatatagagagagatattcacatttacaatttcgatattgtttctctaagatcgtaaaatagtacaccaagccatttataaatttcttcactctcagattcaaaataatataaattagaaatgggaacagagatggtcatggttcacgaggttccttttcctccacagatcatcacttccaagccactctctcttctgggccaagggatcacagacattgagatccactttcttcaagtgaagttcactgcgatcggagtttacttagatccttcagatgttaaaacacatcttgataactggaaaggcaaaaccggaaaagaactcgccggcgatgatgacttcttcgacgcccttgcctccgcggagatggagaaggttataagagtggtggtgataaaggagataaaaggagctcagtacggagtgcagctagagaatacggtgagagatcgtttggctgaggaggataagtacgaggaagaagaagaaactgagctcgagaaggtcgttggctttttccagtccaagtacttcaaagctaactccgttatcacttaccatttctcagccaaagatggcatttgcgagatcgggtttgagacggaaggtaaagaagaggagaaactgaaggtggagaatgcgaatgtggtgggaatgatgcagagatggtatttgtccggaagtcgtggagtctcaccgtcgactattgtctccatcgctgattcaatctccgcagttttaacctaagaaccatggccccttacataaaaatttgtatgtgtgtgtgttttatgtagtattttttttttcctcttgtcaagttcctgcttttgtatcatcaaacttttactttggagtttgatatggccgaacaatatggtaattccttaatctcaatttaaatcagctttgctcgtttggattc

SEQ ID NO: 25348 - protein, 209 aa, Arabidopsis thaliana
  peptide (1)..(209): Ceres Seq. ID no. 13497472
MGTEMVMVHEVPFPPQIITSKPLSLLGQGITDIEIHFLQVKFTAIGVYLDPSDVKTHLDNWKGKTGKELAGDDDFFDALASAEMEKVIRVVVIKEIKGAQYGVQLENTVRDRLAEEDKYEEEEETELEKVVGFFQSKYFKANSVITYHFSAKDGICEIGFETEGKEEEKLKVENANVVGMMQRWYLSGSRGVSPSTIVSIADSISAVLT

SEQ ID NO: 25349 - protein, 205 aa, Arabidopsis thaliana
  peptide (1)..(205): Ceres Seq. ID no. 13497473
MVMVHEVPFPPQIITSKPLSLLGQGITDIEIHFLQVKFTAIGVYLDPSDVKTHLDNWKGKTGKELAGDDDFFDALASAEMEKVIRVVVIKEIKGAQYGVQLENTVRDRLAEEDKYEEEEETELEKVVGFFQSKYFKANSVITYHFSAKDGICEIGFETEGKEEEKLKVENANVVGMMQRWYLSGSRGVSPSTIVSIADSISAVLT

SEQ ID NO: 25350 - protein, 203 aa, Arabidopsis thaliana
  peptide (1)..(203): Ceres Seq. ID no. 13497474
MVHEVPFPPQIITSKPLSLLGQGITDIEIHFLQVKFTAIGVYLDPSDVKTHLDNWKGKTGKELAGDDDFFDALASAEMEKVIRVVVIKEIKGAQYGVQLENTVRDRLAEEDKYEEEEETELEKVVGFFQSKYFKANSVITYHFSAKDGICEIGFETEGKEEEKLKVENANVVGMMQRWYLSGSRGVSPSTIVSIADSISAVLT

SEQ ID NO: 25351 - DNA, 1140 bp, Arabidopsis thaliana
  misc_feature (1)..(1140): Ceres Seq. ID no. 12321112
  misc_feature (1)..(1140): Ortholog of  Ceres SEQ ID NO 14316316 as cited in SEQ ID NO 57165
  misc_feature (1)..(1140): Ortholog of  Ceres SEQ ID NO 15170682 as cited in SEQ ID NO 64885
actccgaatcccaaaattgttgccttccttcgtctccgatcattttcgtggtgtctgtaaccccaattacaattcgaatccattagcgaaagaaagagacttcctttgaaagagaagagtctcgttggctcggttttctgttcaaatcagcggatttcctcacatttaattgttcaatcatggcggctaccaatgtcatgcggcgagacgagagccttcttattgatccccaaagaggagatacaagtgtttctcgtggcctctcgcttgagaagaaaattgaggcccttgagagcctggccggacaagttagtaacaggcgatctcggagatggttaaatgatcgtattctgatggaacttgttcctcgtttggatgcccaagaaatcagaggcttgtttgctccaccaccgtggggtgatgatgtcccaccctcagcattttctttgactaatgttggagaatgggacaaatttagaaacatagacatggacaaggaggccaacatcatggattccttgaataggtcatccgtaaggcagaaaggtagcgtggacggtgataaaatcgctgtcttaaatgcttggagaagaatagattgtaggacaagagatgctcttcgacgtagctttttaccagaactaatcgagggatatgagagctgtataagtcacttcatcgaggaaggtggtgaaggagatgttcttgagctcaaggttcaagacccattccatagattgcttttacacggtgtttgtgagtatcacaatttggtatcaacaactgcaacagaacagataggaaggatagcaatgaagacaacgagcatcaaatggaagaagagtggcgattcaggggagaaaccaagcatcagcctagcgcatttccttaggatgtcaaaggaaggagcttggtaacaacacatacactcctttgtagctgtggttttttatgaatatcagcgccaatttaaagggctatttatgcagcaaaaagatctcaagactctctctctctctctttggcctttgctacttccccctatgtggcctcttgtaagcttgtatttgtatcctcaatttatacggttttatgattaaagaacgagatagacaataaattttattgagtgctgattgt

SEQ ID NO: 25352 - protein, 245 aa, Arabidopsis thaliana
  peptide (1)..(245): Ceres Seq. ID no. 12321113
MAATNVMRRDESLLIDPQRGDTSVSRGLSLEKKIEALESLAGQVSNRRSRRWLNDRILMELVPRLDAQEIRGLFAPPPWGDDVPPSAFSLTNVGEWDKFRNIDMDKEANIMDSLNRSSVRQKGSVDGDKIAVLNAWRRIDCRTRDALRRSFLPELIEGYESCISHFIEEGGEGDVLELKVQDPFHRLLLHGVCEYHNLVSTTATEQIGRIAMKTTSIKWKKSGDSGEKPSISLAHFLRMSKEGAW

SEQ ID NO: 25353 - protein, 239 aa, Arabidopsis thaliana
  peptide (1)..(239): Ceres Seq. ID no. 12321114
MRRDESLLIDPQRGDTSVSRGLSLEKKIEALESLAGQVSNRRSRRWLNDRILMELVPRLDAQEIRGLFAPPPWGDDVPPSAFSLTNVGEWDKFRNIDMDKEANIMDSLNRSSVRQKGSVDGDKIAVLNAWRRIDCRTRDALRRSFLPELIEGYESCISHFIEEGGEGDVLELKVQDPFHRLLLHGVCEYHNLVSTTATEQIGRIAMKTTSIKWKKSGDSGEKPSISLAHFLRMSKEGAW

SEQ ID NO: 25354 - protein, 187 aa, Arabidopsis thaliana
  peptide (1)..(187): Ceres Seq. ID no. 12321115
MELVPRLDAQEIRGLFAPPPWGDDVPPSAFSLTNVGEWDKFRNIDMDKEANIMDSLNRSSVRQKGSVDGDKIAVLNAWRRIDCRTRDALRRSFLPELIEGYESCISHFIEEGGEGDVLELKVQDPFHRLLLHGVCEYHNLVSTTATEQIGRIAMKTTSIKWKKSGDSGEKPSISLAHFLRMSKEGAW

SEQ ID NO: 25355 - DNA, 1350 bp, Arabidopsis thaliana
  misc_feature (1)..(1350): Ceres Seq. ID no. 12321118
  misc_feature (1)..(1350): Ortholog of  Ceres SEQ ID NO 13590307 as cited in SEQ ID NO 67154
atcttcgataaatacgcaagagtgagcttcacggtcagacaaaagctgactctacgctctctcaaaagtcgaatatcccaaattcgatccgttttccggcgataatctccgatctagatccgatggcgaaagaaccagttcgtgtgctcgttactggagctgcaggacaaatcggatatgctcttgtacctatgattgcaaggggtatcatgcttggtgctgaccaacctgttatcctccacatgttggatattcctccagctgctgaagctttgaacggtgttaagatggagttgatcgatgctgctttccctcttcttaaaggtgttgttgctacaactgatgccgttgagggatgtactggagtcaatgttgctgttatggttggtggtttcccgaggaaagaaggtatggagaggaaggatgtgatgtccaagaatgtttccatctacaagtctcaggctgctgccttggagaagcatgccgctcctaactgcaaggttcttgttgtggccaacccggcaaacaccaacgcattgatcctcaaggaatttgcaccatcaatccctgaaaagaacatctcttgtttgacaaggcttgaccacaacagggctttgggacagatctctgagaggttgagcgtgccagtgtctgatgttaagaacgtgatcatctggggaaaccactcatcctcacagtacccagatgtcaaccatgctaaagtgcagacctcgtctggagagaagcctgtccgtgagctcgtcaaggacgatgcatggttggacggagaatttatctctacagttcaacaacgtggagctgcaatcatcaaggcgaggaagttgtctagtgcgctctctgctgctagctctgcttgtgaccacatccgtgactgggtccttggaactccagagggtacgttcgtttccatgggagtatactccgatggctcttacagcgttccatcaggacttatctactccttccctgtaacttgtcgcaatggagactggagtattgtccaaggccttccgattgatgaagtatcaaggaagaagatggatttgactgcagaggagctcaaggaagagaaggacttggcgtactcatgcctctcttaaacccttctggagcaaaattttcatctataaggtgtgagatcagttaaagcctttcagggctttgtccgaataagaagtgtgtttgaaagatctccaaacactgttttataacctctttggtctctttgatgagtattgtccctggtctgtttctaaaccaggatatcgtttttttcaatgtgtctgatttggtttacccatgaaaagaagaaaattggcagttgcatgg

SEQ ID NO: 25356 - protein, 332 aa, Arabidopsis thaliana
  peptide (1)..(332): Ceres Seq. ID no. 12321119
MAKEPVRVLVTGAAGQIGYALVPMIARGIMLGADQPVILHMLDIPPAAEALNGVKMELIDAAFPLLKGVVATTDAVEGCTGVNVAVMVGGFPRKEGMERKDVMSKNVSIYKSQAAALEKHAAPNCKVLVVANPANTNALILKEFAPSIPEKNISCLTRLDHNRALGQISERLSVPVSDVKNVIIWGNHSSSQYPDVNHAKVQTSSGEKPVRELVKDDAWLDGEFISTVQQRGAAIIKARKLSSALSAASSACDHIRDWVLGTPEGTFVSMGVYSDGSYSVPSGLIYSFPVTCRNGDWSIVQGLPIDEVSRKKMDLTAEELKEEKDLAYSCLS

SEQ ID NO: 25357 - protein, 309 aa, Arabidopsis thaliana
  peptide (1)..(309): Ceres Seq. ID no. 12321120
MIARGIMLGADQPVILHMLDIPPAAEALNGVKMELIDAAFPLLKGVVATTDAVEGCTGVNVAVMVGGFPRKEGMERKDVMSKNVSIYKSQAAALEKHAAPNCKVLVVANPANTNALILKEFAPSIPEKNISCLTRLDHNRALGQISERLSVPVSDVKNVIIWGNHSSSQYPDVNHAKVQTSSGEKPVRELVKDDAWLDGEFISTVQQRGAAIIKARKLSSALSAASSACDHIRDWVLGTPEGTFVSMGVYSDGSYSVPSGLIYSFPVTCRNGDWSIVQGLPIDEVSRKKMDLTAEELKEEKDLAYSCLS

SEQ ID NO: 25358 - protein, 303 aa, Arabidopsis thaliana
  peptide (1)..(303): Ceres Seq. ID no. 12321121
MLGADQPVILHMLDIPPAAEALNGVKMELIDAAFPLLKGVVATTDAVEGCTGVNVAVMVGGFPRKEGMERKDVMSKNVSIYKSQAAALEKHAAPNCKVLVVANPANTNALILKEFAPSIPEKNISCLTRLDHNRALGQISERLSVPVSDVKNVIIWGNHSSSQYPDVNHAKVQTSSGEKPVRELVKDDAWLDGEFISTVQQRGAAIIKARKLSSALSAASSACDHIRDWVLGTPEGTFVSMGVYSDGSYSVPSGLIYSFPVTCRNGDWSIVQGLPIDEVSRKKMDLTAEELKEEKDLAYSCLS

SEQ ID NO: 25359 - DNA, 1107 bp, Arabidopsis thaliana
  misc_feature (1)..(1107): Ceres Seq. ID no. 13621987
  misc_feature (1)..(1107): Ortholog of  Ceres SEQ ID NO 13593831 as cited in SEQ ID NO 53828
atattacccattgtagaaaagaagaaaaaaagcaaagaacacttgaacgttttctagatagagatggaagggaaagaagaggatgttcgagtgggagctaacaagttcccggagaggcaaccgataggtacatcggctcagacggacaaagactacaaggagccaccaccagctccatttttcgagccaggcgagctgagttcgtggtccttctacagagccggaatcgccgagttcatagccaccttcctgtttctatacataacagtattgacagtgatgggagtgaagagagcaccaaacatgtgtgcctctgttggaatccaaggcattgcttgggctttcggtggcatgatctttgcccttgtctactgtactgctggaatctctggtgggcacataaacccagcggtgacatttggtctgttcttggctcgtaagctgtcattgacgagagctgtcttttacatcgtgatgcaatgtctcggagccatctgcggcgccggagttgtcaaaggcttccagccaaatccttaccaaactctcggcggaggagccaacacagtcgctcacggctacactaagggctctggtttgggtgctgagataatcggaaccttcgtccttgtctacacggtcttctccgccactgacgccaagagaagcgctcgtgactcccacgttccgattttggcaccactcccaatcggattcgctgtgttcttggttcacttggcgacgtttccaatcaccggaacaggaattaacccagctaggagtcttggagctgcaatcatctacaacaaggaccacgcttgggacgaccactggatattctgggtcggaccattcattggagcagctcttgcggctctttaccaccaacttgtcatcagagccattccattcaagtccagatcctgatttgatttctttctttataaaacttcattgttgcatcttggtttgtaattgagcttgaaaatatttgagagatctggatcatgtgtttattttaattaatggacttgtctttttcttatttgctgtggatgatctggttttatcgttaaatggagtttgatattatgattgatttggtacgat

SEQ ID NO: 25360 - protein, 286 aa, Arabidopsis thaliana
  peptide (1)..(286): Ceres Seq. ID no. 13621988
MEGKEEDVRVGANKFPERQPIGTSAQTDKDYKEPPPAPFFEPGELSSWSFYRAGIAEFIATFLFLYITVLTVMGVKRAPNMCASVGIQGIAWAFGGMIFALVYCTAGISGGHINPAVTFGLFLARKLSLTRAVFYIVMQCLGAICGAGVVKGFQPNPYQTLGGGANTVAHGYTKGSGLGAEIIGTFVLVYTVFSATDAKRSARDSHVPILAPLPIGFAVFLVHLATFPITGTGINPARSLGAAIIYNKDHAWDDHWIFWVGPFIGAALAALYHQLVIRAIPFKSRS

SEQ ID NO: 25361 - protein, 214 aa, Arabidopsis thaliana
  peptide (1)..(214): Ceres Seq. ID no. 13621989
MGVKRAPNMCASVGIQGIAWAFGGMIFALVYCTAGISGGHINPAVTFGLFLARKLSLTRAVFYIVMQCLGAICGAGVVKGFQPNPYQTLGGGANTVAHGYTKGSGLGAEIIGTFVLVYTVFSATDAKRSARDSHVPILAPLPIGFAVFLVHLATFPITGTGINPARSLGAAIIYNKDHAWDDHWIFWVGPFIGAALAALYHQLVIRAIPFKSRS

SEQ ID NO: 25362 - protein, 206 aa, Arabidopsis thaliana
  peptide (1)..(206): Ceres Seq. ID no. 13621990
MCASVGIQGIAWAFGGMIFALVYCTAGISGGHINPAVTFGLFLARKLSLTRAVFYIVMQCLGAICGAGVVKGFQPNPYQTLGGGANTVAHGYTKGSGLGAEIIGTFVLVYTVFSATDAKRSARDSHVPILAPLPIGFAVFLVHLATFPITGTGINPARSLGAAIIYNKDHAWDDHWIFWVGPFIGAALAALYHQLVIRAIPFKSRS

SEQ ID NO: 25363 - DNA, 1446 bp, Arabidopsis thaliana
  misc_feature (1)..(1446): Ceres Seq. ID no. 13494217
  misc_feature (1)..(1446): Ortholog of  Ceres SEQ ID NO 13595351 as cited in SEQ ID NO 55934
  misc_feature (1)..(1446): Ortholog of  Ceres SEQ ID NO 13639645 as cited in SEQ ID NO 57488
atagtttttgtttttccttttgctactctacatgactctcgatcgagggaaaaaactagttctcatgtttatccaaaactctatatcacctttttgatgtttttatataagaagacttgttcatccatactctttcaataaccttgacagaaaaaaaaaataaacacaaaatttcaataaccatggagggtgttagtgcaactatgcataagttaaggccttatttgttaatgatctttttgcaatttggagcagcaggaacatatattgttattatggccactcttaaccaaggccagaaccgttacgtcgtaattgtgtatcgtaatcttgtggctgctcttgtccttgcacattttgcactcatctttgaaaggaaagtgaggccgaagatgacactatcggttttgtggaaaataatggcacttggtttcttagagccagtcttggatcagggttttggttacttggggatgaacatgacatcagcaacatatacatctgcgatcatgaacattcttccttctgtcacatttataatagcttggattttaagaatggagaaagttaacatagcggaggtacgaagcaaagcaaagatcattgggacattggtgggtcttggaggggcactagtaatgacattgtacaaaggtccgcttattcctttaccgtggtctaacccgaatatggatcaacaaaacggacatacaaataattcacaagaccataacaattgggttgttggaaccttgttgattctcctcggttgtgttgcttggtctggtttttatgttttacagtcgataacaataaagacgtaccctgccgatctttcattatcagccttaatatgcctagccggggctgtccaaagcttcgcggtagcgcttgtggtggagagacaccctagcggatgggcggttggttgggatgcaaggctttttgcacctctttatacaggaatagttagctcggggataacgtactatgttcaagggatggttatgaagacgagagggccagtttttgttactgcctttaaccctctctgcatgattcttgtagctctcattgcctcttttattcttcatgaacaaatccatttcggatgtgtaataggaggggcagtgatcgccgcgggtttgtatatggttgtttggggaaaaggaaaagactatgaagtatccggattagatatccttgaaaagaatagcctccaagaattgcctatcacaactaaaagtgaggatgacaacaaattggtttcttctataagcgacaacagcaatgtgaccattcctggtggtgcgcatagtaacacatctggaatataagtgaagaaagcatttctcgagttataaatacatatttgtattcgactaaaataaatacatatgtatttgtatgcatttggtatgaaatacatgaaattatttttatgtt

SEQ ID NO: 25364 - protein, 384 aa, Arabidopsis thaliana
  peptide (1)..(384): Ceres Seq. ID no. 13494218
MEGVSATMHKLRPYLLMIFLQFGAAGTYIVIMATLNQGQNRYVVIVYRNLVAALVLAHFALIFERKVRPKMTLSVLWKIMALGFLEPVLDQGFGYLGMNMTSATYTSAIMNILPSVTFIIAWILRMEKVNIAEVRSKAKIIGTLVGLGGALVMTLYKGPLIPLPWSNPNMDQQNGHTNNSQDHNNWVVGTLLILLGCVAWSGFYVLQSITIKTYPADLSLSALICLAGAVQSFAVALVVERHPSGWAVGWDARLFAPLYTGIVSSGITYYVQGMVMKTRGPVFVTAFNPLCMILVALIASFILHEQIHFGCVIGGAVIAAGLYMVVWGKGKDYEVSGLDILEKNSLQELPITTKSEDDNKLVSSISDNSNVTIPGGAHSNTSGI

SEQ ID NO: 25365 - protein, 377 aa, Arabidopsis thaliana
  peptide (1)..(377): Ceres Seq. ID no. 13494219
MHKLRPYLLMIFLQFGAAGTYIVIMATLNQGQNRYVVIVYRNLVAALVLAHFALIFERKVRPKMTLSVLWKIMALGFLEPVLDQGFGYLGMNMTSATYTSAIMNILPSVTFIIAWILRMEKVNIAEVRSKAKIIGTLVGLGGALVMTLYKGPLIPLPWSNPNMDQQNGHTNNSQDHNNWVVGTLLILLGCVAWSGFYVLQSITIKTYPADLSLSALICLAGAVQSFAVALVVERHPSGWAVGWDARLFAPLYTGIVSSGITYYVQGMVMKTRGPVFVTAFNPLCMILVALIASFILHEQIHFGCVIGGAVIAAGLYMVVWGKGKDYEVSGLDILEKNSLQELPITTKSEDDNKLVSSISDNSNVTIPGGAHSNTSGI

SEQ ID NO: 25366 - protein, 368 aa, Arabidopsis thaliana
  peptide (1)..(368): Ceres Seq. ID no. 13494220
MIFLQFGAAGTYIVIMATLNQGQNRYVVIVYRNLVAALVLAHFALIFERKVRPKMTLSVLWKIMALGFLEPVLDQGFGYLGMNMTSATYTSAIMNILPSVTFIIAWILRMEKVNIAEVRSKAKIIGTLVGLGGALVMTLYKGPLIPLPWSNPNMDQQNGHTNNSQDHNNWVVGTLLILLGCVAWSGFYVLQSITIKTYPADLSLSALICLAGAVQSFAVALVVERHPSGWAVGWDARLFAPLYTGIVSSGITYYVQGMVMKTRGPVFVTAFNPLCMILVALIASFILHEQIHFGCVIGGAVIAAGLYMVVWGKGKDYEVSGLDILEKNSLQELPITTKSEDDNKLVSSISDNSNVTIPGGAHSNTSGI

SEQ ID NO: 25367 - DNA, 1194 bp, Arabidopsis thaliana
  misc_feature (1)..(1194): Ceres Seq. ID no. 12327686
  misc_feature (1)..(1194): Ortholog of  Ceres SEQ ID NO 13594727 as cited in SEQ ID NO 52169
  misc_feature (1)..(1194): Ortholog of  Ceres SEQ ID NO 14314050 as cited in SEQ ID NO 59952
  misc_feature (1)..(1194): Ortholog of  Ceres SEQ ID NO 13596474 as cited in SEQ ID NO 62169
  misc_feature (1)..(1194): Ortholog of  Ceres SEQ ID NO 13598714 as cited in SEQ ID NO 62656
  misc_feature (1)..(1194): Ortholog of  Ceres SEQ ID NO 13597519 as cited in SEQ ID NO 64759
  misc_feature (1)..(1194): Ortholog of  Ceres SEQ ID NO 14302388 as cited in SEQ ID NO 65655
  misc_feature (1)..(1194): Ortholog of  Ceres SEQ ID NO 13595926 as cited in SEQ ID NO 67778
  misc_feature (1)..(1194): Ortholog of  Ceres SEQ ID NO 13587054 as cited in SEQ ID NO 0
aataaactatctctttagtaagtcttttaaacaagctatctagacaatgaaaacacaaaccaaagtgatgggaggacatgtcttgcttactgttttcactctttgtatgctttgttcaggggttagggcacagctaagccctgacatttatgctaaatcgtgccccaatctagttcaaattgtccgtaaacaagttgccatcgccctgaaggccgagatacggatggctgcttctctcattcgtcttcatttccacgactgctttgttaatgggtgtgatgcgtcgttattgttggatggagctgacagcgagaaactcgcgatcccaaacattaactctgctagaggatttgaagtaattgatacaatcaaagccgctgtggaaaacgcatgtcctggtgttgtttcttgtgctgatatcctcactttggccgctcgtgactccgttgtattgagtggagggcctgggtggagagtggcattaggaagaaaagatggattggtggcaaatcagaacagtgcaaacaatctaccatctccttttgaacctttagacgccattatcgccaaatttgtagccgtaaaccttaacatcaccgacgtcgtagctttatcaggagctcacacctttggacaagcgaagtgtgctgtcttcagcaaccgtctgttcaactttaccggcgcgggaaatcccgacgcaacacttgagacatcactcttgtctaatctgcaaacagtttgtccgctcggaggaaatagtaacataacagcacctcttgacaggagcactacggacaccttcgacaacaattatttcaagaacctgcttgaaggaaaaggtcttttgagttctgatcagattctgttctcgagtgacttagccgtgaacaccacaaagaaactagtggaggcttatagtcggagccagagcttgtttttcagggacttcacatgtgcgatgatcagaatgggaaacatttcgaatggagctagtggggaggttaggacaaactgcagggttatcaataattagcatgtgtgtgtgttttcgagtttatgtaatgtttgggagttgatcggtctcgtgtgtatcagaatgatcacgtgtgtaataataagaattaatggggtttgttggtttgcctaattaaaagtgatttggtaaacctggaaattttcattgattttaaaatt

SEQ ID NO: 25368 - protein, 328 aa, Arabidopsis thaliana
  peptide (1)..(328): Ceres Seq. ID no. 12327687
MKTQTKVMGGHVLLTVFTLCMLCSGVRAQLSPDIYAKSCPNLVQIVRKQVAIALKAEIRMAASLIRLHFHDCFVNGCDASLLLDGADSEKLAIPNINSARGFEVIDTIKAAVENACPGVVSCADILTLAARDSVVLSGGPGWRVALGRKDGLVANQNSANNLPSPFEPLDAIIAKFVAVNLNITDVVALSGAHTFGQAKCAVFSNRLFNFTGAGNPDATLETSLLSNLQTVCPLGGNSNITAPLDRSTTDTFDNNYFKNLLEGKGLLSSDQILFSSDLAVNTTKKLVEAYSRSQSLFFRDFTCAMIRMGNISNGASGEVRTNCRVINN

SEQ ID NO: 25369 - protein, 321 aa, Arabidopsis thaliana
  peptide (1)..(321): Ceres Seq. ID no. 12327688
MGGHVLLTVFTLCMLCSGVRAQLSPDIYAKSCPNLVQIVRKQVAIALKAEIRMAASLIRLHFHDCFVNGCDASLLLDGADSEKLAIPNINSARGFEVIDTIKAAVENACPGVVSCADILTLAARDSVVLSGGPGWRVALGRKDGLVANQNSANNLPSPFEPLDAIIAKFVAVNLNITDVVALSGAHTFGQAKCAVFSNRLFNFTGAGNPDATLETSLLSNLQTVCPLGGNSNITAPLDRSTTDTFDNNYFKNLLEGKGLLSSDQILFSSDLAVNTTKKLVEAYSRSQSLFFRDFTCAMIRMGNISNGASGEVRTNCRVINN

SEQ ID NO: 25370 - protein, 308 aa, Arabidopsis thaliana
  peptide (1)..(308): Ceres Seq. ID no. 12327689
MLCSGVRAQLSPDIYAKSCPNLVQIVRKQVAIALKAEIRMAASLIRLHFHDCFVNGCDASLLLDGADSEKLAIPNINSARGFEVIDTIKAAVENACPGVVSCADILTLAARDSVVLSGGPGWRVALGRKDGLVANQNSANNLPSPFEPLDAIIAKFVAVNLNITDVVALSGAHTFGQAKCAVFSNRLFNFTGAGNPDATLETSLLSNLQTVCPLGGNSNITAPLDRSTTDTFDNNYFKNLLEGKGLLSSDQILFSSDLAVNTTKKLVEAYSRSQSLFFRDFTCAMIRMGNISNGASGEVRTNCRVINN

SEQ ID NO: 25371 - DNA, 1223 bp, Arabidopsis thaliana
  misc_feature (1)..(1223): Ceres Seq. ID no. 13490775
  misc_feature (1)..(1223): Ortholog of  Ceres SEQ ID NO 15171634 as cited in SEQ ID NO 57593
  misc_feature (1)..(1223): Ortholog of  Ceres SEQ ID NO 14301936 as cited in SEQ ID NO 67361
aatctttaaagcaagtcttcgctcttcaatttatattttaccaaatcatcttctctctttctctatctctcaaaacaaaaagtaaccatgatcaagacaaagacgacgtcccttctctgtttccttctcacagccgttatactaatgaacccatcttcctcctcccccactgacaattacatatacgccgtttgttctccggctaaattctcccctagctccggctacgagacaaatcttaactccctcctctcttccttcgtcacctcaaccgcccaaacccgctacgccaacttcacagttcccaccgggaaaccggaaccaaccgttaccgtatacggtatttaccagtgccgcggcgacctagacccaaccgcctgctcgacgtgcgtatcaagcgccgtcgcacaggtcggagccttatgttcaaactcgtactccgggttcttgcagatggaaaattgtctgatccgttacgacaacaaatcgttccttggggttcaagacaaaacgttgatcctcaacaaatgtggacagccgatggaattcaacgaccaggatgcgttgaccaaagctagtgacgtcatcggttctttaggtaccggagatggatcttacaggacaggtggcaacgggaatgttcagggtgtggctcagtgctccggtgatctaagtacatcacagtgccaagattgcttgtctgatgcaatcggacggctcaaatctgattgtggaatggctcagggaggatatgtttacttgtcgaaatgttacgcgcgtttcagtgttggtggtagtcacgcgcgtcagaccccaggcccaaactttggtcatgaaggagagaagggcaataaggatgataatggagtgggaaaaacattggcgataataataggaatcgtcaccttaatcatcttgctcgttgtgtttctcgcttttgttggaaagtgttgtagaaaattacaagatgagaaatggtgtaaatgaaaggacaaagtgggaaagatatcaatcaacaactcgagtcgagccacactgttagttgtatttttgtaattttttttgttctccctcataagatgtacgtagttatagtatattgataatttgatatagtattgatatgattgtatctccgaatcgatttttgtataattgtcggacttatataggccaaagcgatatcttcttctttgatgtgaatgaaaccttcgatttcttac

SEQ ID NO: 25372 - protein, 299 aa, Arabidopsis thaliana
  peptide (1)..(299): Ceres Seq. ID no. 13490776
MIKTKTTSLLCFLLTAVILMNPSSSSPTDNYIYAVCSPAKFSPSSGYETNLNSLLSSFVTSTAQTRYANFTVPTGKPEPTVTVYGIYQCRGDLDPTACSTCVSSAVAQVGALCSNSYSGFLQMENCLIRYDNKSFLGVQDKTLILNKCGQPMEFNDQDALTKASDVIGSLGTGDGSYRTGGNGNVQGVAQCSGDLSTSQCQDCLSDAIGRLKSDCGMAQGGYVYLSKCYARFSVGGSHARQTPGPNFGHEGEKGNKDDNGVGKTLAIIIGIVTLIILLVVFLAFVGKCCRKLQDEKWCK

SEQ ID NO: 25373 - protein, 280 aa, Arabidopsis thaliana
  peptide (1)..(280): Ceres Seq. ID no. 13490777
MNPSSSSPTDNYIYAVCSPAKFSPSSGYETNLNSLLSSFVTSTAQTRYANFTVPTGKPEPTVTVYGIYQCRGDLDPTACSTCVSSAVAQVGALCSNSYSGFLQMENCLIRYDNKSFLGVQDKTLILNKCGQPMEFNDQDALTKASDVIGSLGTGDGSYRTGGNGNVQGVAQCSGDLSTSQCQDCLSDAIGRLKSDCGMAQGGYVYLSKCYARFSVGGSHARQTPGPNFGHEGEKGNKDDNGVGKTLAIIIGIVTLIILLVVFLAFVGKCCRKLQDEKWCK

SEQ ID NO: 25374 - protein, 177 aa, Arabidopsis thaliana
  peptide (1)..(177): Ceres Seq. ID no. 13490778
MENCLIRYDNKSFLGVQDKTLILNKCGQPMEFNDQDALTKASDVIGSLGTGDGSYRTGGNGNVQGVAQCSGDLSTSQCQDCLSDAIGRLKSDCGMAQGGYVYLSKCYARFSVGGSHARQTPGPNFGHEGEKGNKDDNGVGKTLAIIIGIVTLIILLVVFLAFVGKCCRKLQDEKWCK

SEQ ID NO: 25375 - DNA, 1139 bp, Arabidopsis thaliana
  misc_feature (1)..(1139): Ceres Seq. ID no. 12321108
  misc_feature (1)..(1139): Ortholog of  Ceres SEQ ID NO 15172778 as cited in SEQ ID NO 59302
agaaaccgatagacctctctcattcgatcatttcttcttcttcttcgtcttcgctgcagcctgcatctgttgtttcttctagactttgcagtcacagagatagtgagtgagatagagagagtgataatggcgagtggactaagcgagatcgggagcacgaagatgttcgatggctacaacaaaagatacaaacacttcagtgagacacttggatgttccatgaccttttccatctacttccctccttctgcttctgcttcttcttcccataaatctcctgtgctttactggctttctggcctcacctgcacggacgagaacttcattatcaaatcaggagctcaacgtgctgcttctactcacggcattgctcttgttgctccagacacttctccaagaggactaaatgttgaaggggaggcagacagttacgactttggtgtaggagccggattctacctcaatgctactcaggaaaagtggaagaactggcgtatgtatgactatgttgtcaaagagttgccaaaactcctgagtgaaaacttttcccagcttgacacaacaaaagcatctatatctggacactccatgggtggacatggagctcttactatatacctgaggaacctcgataaatacaagtctgtatctgcgtttgcaccaatcacgaatcccataaattgtgcatggggacagaaggcattcaccaattatctaggtgacaacaaagctgcttgggaggaatacgatgccacttgtcttatttcaaagtacaacaatctttctgcaacaattctaattgatcagggagaaaacgaccagttctaccctgatcagttattgcccagcaagtttgaggaggcgtgcaagaaagtgaatgcaccgctcttattgcgcctccatccaggatacgaccactcctactatttcattgccaccttcatcgaagaccacattagtcaccatgctcaagcccttgagctatagctcacttcatctgcttggaaaccggctttgggtttgtccaagtattagtatctcaataaagcaagtggacttgtaatgttttatgttcaataactcccctgtgtgctcttttgtctacgataataataagaaaatcatctttgcttcatacc

SEQ ID NO: 25376 - protein, 286 aa, Arabidopsis thaliana
  peptide (1)..(286): Ceres Seq. ID no. 12321109
MASGLSEIGSTKMFDGYNKRYKHFSETLGCSMTFSIYFPPSASASSSHKSPVLYWLSGLTCTDENFIIKSGAQRAASTHGIALVAPDTSPRGLNVEGEADSYDFGVGAGFYLNATQEKWKNWRMYDYVVKELPKLLSENFSQLDTTKASISGHSMGGHGALTIYLRNLDKYKSVSAFAPITNPINCAWGQKAFTNYLGDNKAAWEEYDATCLISKYNNLSATILIDQGENDQFYPDQLLPSKFEEACKKVNAPLLLRLHPGYDHSYYFIATFIEDHISHHAQALEL

SEQ ID NO: 25377 - protein, 274 aa, Arabidopsis thaliana
  peptide (1)..(274): Ceres Seq. ID no. 12321110
MFDGYNKRYKHFSETLGCSMTFSIYFPPSASASSSHKSPVLYWLSGLTCTDENFIIKSGAQRAASTHGIALVAPDTSPRGLNVEGEADSYDFGVGAGFYLNATQEKWKNWRMYDYVVKELPKLLSENFSQLDTTKASISGHSMGGHGALTIYLRNLDKYKSVSAFAPITNPINCAWGQKAFTNYLGDNKAAWEEYDATCLISKYNNLSATILIDQGENDQFYPDQLLPSKFEEACKKVNAPLLLRLHPGYDHSYYFIATFIEDHISHHAQALEL

SEQ ID NO: 25378 - protein, 255 aa, Arabidopsis thaliana
  peptide (1)..(255): Ceres Seq. ID no. 12321111
MTFSIYFPPSASASSSHKSPVLYWLSGLTCTDENFIIKSGAQRAASTHGIALVAPDTSPRGLNVEGEADSYDFGVGAGFYLNATQEKWKNWRMYDYVVKELPKLLSENFSQLDTTKASISGHSMGGHGALTIYLRNLDKYKSVSAFAPITNPINCAWGQKAFTNYLGDNKAAWEEYDATCLISKYNNLSATILIDQGENDQFYPDQLLPSKFEEACKKVNAPLLLRLHPGYDHSYYFIATFIEDHISHHAQALEL

SEQ ID NO: 25379 - DNA, 1081 bp, Arabidopsis thaliana
  misc_feature (1)..(1081): Ceres Seq. ID no. 12322213
  misc_feature (1)..(1081): Ortholog of  Ceres SEQ ID NO 13594482 as cited in SEQ ID NO 51285
  misc_feature (1)..(1081): Ortholog of  Ceres SEQ ID NO 13655381 as cited in SEQ ID NO 63359
attttctaccaatcgtcgtcgtctctcacgcaaattcttcattcgttctgtggaaacacagaaatggagactccatatccgaaactcatcgatccttcaaagactcgaataggatggattggcatcgggataatgggatcggccatggtttctcatattatcgccgcaggctattctgtcacagtttacgctcgcgacctccggaaaacaaaagatctgcaaaccaaaggagctcgcatagccaatagccccaaagaggttagcggagatgagcgacgttgtgttcacgattgttggaaacttcaacgatgtccgatcgttgcttctcggtgacgatggtgtactctctggtcttacgcccggtggagtaacagtggacatgactagtagcaaaccaggattggcgcgtgaaatacacgcagaagcgaggcgtaggaattgttgggcggtggatgcgccggtatcaggtggagacgctggagcacgagaggggacgttagggattttcgccggcggagattcagagattgtggagtggttgtccccggtgatgaagaatatagggactgttacttatatgggagaagcagggagtgggcaaagctgcaagatagggaatcagattgctggtgcgagcaacctggttggacttgctgaagggatagtgttcgctgagaaagcgggtttagatacagtgaaatggctcgaggcggtgaaggatggtgcagctggatcggcggttatgcggctgtttggggagatgatggtgaagagggattatagggcgactggctttgcggagtatatggtgaaagatttgggaatggctgcagaggcggcgatgcctggtgctgctctgagcaagcagttgttcactggaatggtggctaatggagatggcaagttaggtattcaaggcgtcgtctctgttattagaagacttaacggcatatcctgaaaacacttgtgttccaatgatttcacgatcaactaggcaaacttgtcttcgatttggtttaagttgataataagaagaacatcgagtctcaccaatctcaataagaaacaaagggcatttatg

SEQ ID NO: 25380 - protein, 229 aa, Arabidopsis thaliana
  peptide (1)..(229): Ceres Seq. ID no. 12322214
MSDVVFTIVGNFNDVRSLLLGDDGVLSGLTPGGVTVDMTSSKPGLAREIHAEARRRNCWAVDAPVSGGDAGAREGTLGIFAGGDSEIVEWLSPVMKNIGTVTYMGEAGSGQSCKIGNQIAGASNLVGLAEGIVFAEKAGLDTVKWLEAVKDGAAGSAVMRLFGEMMVKRDYRATGFAEYMVKDLGMAAEAAMPGAALSKQLFTGMVANGDGKLGIQGVVSVIRRLNGIS

SEQ ID NO: 25381 - protein, 192 aa, Arabidopsis thaliana
  peptide (1)..(192): Ceres Seq. ID no. 12322215
MTSSKPGLAREIHAEARRRNCWAVDAPVSGGDAGAREGTLGIFAGGDSEIVEWLSPVMKNIGTVTYMGEAGSGQSCKIGNQIAGASNLVGLAEGIVFAEKAGLDTVKWLEAVKDGAAGSAVMRLFGEMMVKRDYRATGFAEYMVKDLGMAAEAAMPGAALSKQLFTGMVANGDGKLGIQGVVSVIRRLNGIS

SEQ ID NO: 25382 - protein, 135 aa, Arabidopsis thaliana
  peptide (1)..(135): Ceres Seq. ID no. 12322216
MKNIGTVTYMGEAGSGQSCKIGNQIAGASNLVGLAEGIVFAEKAGLDTVKWLEAVKDGAAGSAVMRLFGEMMVKRDYRATGFAEYMVKDLGMAAEAAMPGAALSKQLFTGMVANGDGKLGIQGVVSVIRRLNGIS

SEQ ID NO: 25383 - DNA, 1304 bp, Arabidopsis thaliana
  misc_feature (1)..(1304): Ceres Seq. ID no. 12739232
  misc_feature (1)..(1304): Ortholog of  Ceres SEQ ID NO 15169316 as cited in SEQ ID NO 54821
  misc_feature (1)..(1304): Ortholog of  Ceres SEQ ID NO 13598294 as cited in SEQ ID NO 61982
atatcgaagtaagactaaagctcaagttaaaacagaaaaaatgtcaacttcagaaaacactccgtttaatggcgttgcctcatccaccattgttcgagctaccattgtccaagcctccaccgtctacaacgatactcccgccactctagaaaaggcgaacaagtttattgtggaggctgcaagcaagggatcggagctggttgtgttcccggaggcgtttatcggtggttatcctcgaggttttaggtttggtttaggggtgggagttcataacgaagaagggcgtgatgagttccgcaagtaccatgcttctgctattaaagttcctggccctgaagtagaaaagttggcggagttggccgggaagaacaatgtgtacttggtaatgggagcgatagagaaggatgggtatacactctattgcacagcacttttcttcagtccacaaggtcagttcttgggtaagcaccgtaaactcatgcccacaagtttggaacgttgcatttggggtcaaggagacggatcaaccatccccgtttacgacactccgattggaaaactcggtgctgctatttgctgggagaataggatgcccctctacagaactgctttgtacgccaaaggcattgagctttattgtgcacctactgctgatggttcgaaagaatggcaatcgtcgatgcttcacattgcgatcgaaggtggatgtttcgtattgtcggcttgccagttctgccttcgtaaagatttccctgatcatcctgactacttgtttaccgattggtacgacgacaaagagcctgactctattgtttcccaaggtggaagtgttattatttcacctttgggacaggttcttgcgggaccaaactttgaatcagagggtctcatcacagctgatcttgatcttggtgatgtagcaagagctaagttgtacttcgattcggttggacattactcgagaccagatgttttacacttgaccgtaaatgagcacccgaagaaaccggtcacattcatttcgaaggtggagaaagcggaagatgactcaaacaagtaatcggttgtgattcgtcagttcatgtcactcctatgaaggagtcaagttcaaaatgttatgttgagtttcaaacttttatgctaaactttttttcttaattttcgttaataatggaagagaaccaattctcttgtatctaaagattatccatctatcatccaatttgagtgttcaattctggatgttgtgttaccctacattctacaaccatgtagccaattattatgaatctggctttgatttc

SEQ ID NO: 25384 - protein, 352 aa, Arabidopsis thaliana
  peptide (1)..(352): Ceres Seq. ID no. 12739233
YRSKTKAQVKTEKMSTSENTPFNGVASSTIVRATIVQASTVYNDTPATLEKANKFIVEAASKGSELVVFPEAFIGGYPRGFRFGLGVGVHNEEGRDEFRKYHASAIKVPGPEVEKLAELAGKNNVYLVMGAIEKDGYTLYCTALFFSPQGQFLGKHRKLMPTSLERCIWGQGDGSTIPVYDTPIGKLGAAICWENRMPLYRTALYAKGIELYCAPTADGSKEWQSSMLHIAIEGGCFVLSACQFCLRKDFPDHPDYLFTDWYDDKEPDSIVSQGGSVIISPLGQVLAGPNFESEGLITADLDLGDVARAKLYFDSVGHYSRPDVLHLTVNEHPKKPVTFISKVEKAEDDSNK

SEQ ID NO: 25385 - protein, 339 aa, Arabidopsis thaliana
  peptide (1)..(339): Ceres Seq. ID no. 12739234
MSTSENTPFNGVASSTIVRATIVQASTVYNDTPATLEKANKFIVEAASKGSELVVFPEAFIGGYPRGFRFGLGVGVHNEEGRDEFRKYHASAIKVPGPEVEKLAELAGKNNVYLVMGAIEKDGYTLYCTALFFSPQGQFLGKHRKLMPTSLERCIWGQGDGSTIPVYDTPIGKLGAAICWENRMPLYRTALYAKGIELYCAPTADGSKEWQSSMLHIAIEGGCFVLSACQFCLRKDFPDHPDYLFTDWYDDKEPDSIVSQGGSVIISPLGQVLAGPNFESEGLITADLDLGDVARAKLYFDSVGHYSRPDVLHLTVNEHPKKPVTFISKVEKAEDDSNK

SEQ ID NO: 25386 - protein, 224 aa, Arabidopsis thaliana
  peptide (1)..(224): Ceres Seq. ID no. 12739235
MGAIEKDGYTLYCTALFFSPQGQFLGKHRKLMPTSLERCIWGQGDGSTIPVYDTPIGKLGAAICWENRMPLYRTALYAKGIELYCAPTADGSKEWQSSMLHIAIEGGCFVLSACQFCLRKDFPDHPDYLFTDWYDDKEPDSIVSQGGSVIISPLGQVLAGPNFESEGLITADLDLGDVARAKLYFDSVGHYSRPDVLHLTVNEHPKKPVTFISKVEKAEDDSNK

SEQ ID NO: 25387 - DNA, 1815 bp, Arabidopsis thaliana
  misc_feature (1)..(1815): Ceres Seq. ID no. 12335562
  misc_feature (1)..(1815): Ortholog of  Ceres SEQ ID NO 14313268 as cited in SEQ ID NO 66794
aaatctcatctctttattctctctctctatctcttctcctcaagaaccctaaaaatctccagaaaaaagatcccaaatttcgtatttcaacgatctgaatctctctctctttcgggtttattttgtttcccgatatggtttagaatttgtgatttaaatggaagctgacgtgtcaatttcctgaaaaaacccttatcgcgaaattttccagattaccaaaaaaaaaaagattgaaacttttttcgatttgtttgaagaagaagcacggtaggaacgacgacgatgaatcgtgctttggtcctacttttatatgtttgtactgtttcttgtttagcttcaagcaaagttattttgatgaggaataacatcactctctcttttgatgacatcgaagctaacttcgctccgtcagtgaagggtacaggtgaaattggagtggtttatgtggctgagcctcttgacgcttgtcaaaatcttatgaataaaccagaacagagctccaatgaaacttctccttttgtgttgattgttagaggaggctgtagttttgaagagaaagttagaaaagctcagagagctggtttcaaagctgctattatctatgacaatgaagaccgtggaacattgatagcaatggcaggtaactctggaggtataaggattcatgcggtctttgttacgaaagaaacgggagaagttttaaaggagtatgcgggtttccccgatacgaaagtttggttgatcccaagttttgagaactcggcgtggtctattatggcggtttcgtttatctcgctgcttgcaatgtcggctgttctcgctacttgtttctttgtgcgtaggcatcgaataagaaggcggacatctcggtcctctcgagtgcgtgagtttcacggtatgagccgccgcttggtgaaagcaatgccgagtcttatattcagttcgtttcatgaagataacactactgcattcacttgtgctatttgccttgaagactacactgttggagacaagctcaggctcttaccttgctgtcacaagtttcatgctgcgtgtgttgactcatggttaacctcttggagaactttctgtccggtgtgcaaacgagatgcaagaacgagcacgggagagcctccagcttcagagagcacgccattgctctcatctgctgcatcgtctttcacttcttcctctctgcactcttcagtcagatcatctgcactattgattggtccttccttgggctcattaccaacttcaatctctttctctcccgcatacgcaagctcatcctatattagacaatcattccagtcttcctctaaccgtcgatcacctccaataagcgtaagtcgaagctcagtggatctcagacaacaagcagcttctccatctccatcaccatcacagagatcatacatttcccatatggcttctccacagtcactaggttacccaactatctcccctttcaacacgaggtacatgtcaccgtatagacctagcccgagcaatgcatcacctgcaatggctggatcatcgaattatccgttgaatccactgcgttacagtgaatcagctggaactttctctccatacgcctctgcaaactcgcttccagactgttagaaagtctacagaaccaaccactcttggttcaggtcatataagattatttcttttgcatttgagttttactacgaaacgtacttctggcgtttgtgtgtggtgtgtgtgtgtgtaacgatgcttttatagtcttttggttgagatgaaacatcatcggatttaggttagagagattttaacacttcg

SEQ ID NO: 25388 - protein, 448 aa, Arabidopsis thaliana
  peptide (1)..(448): Ceres Seq. ID no. 12335563
MNRALVLLLYVCTVSCLASSKVILMRNNITLSFDDIEANFAPSVKGTGEIGVVYVAEPLDACQNLMNKPEQSSNETSPFVLIVRGGCSFEEKVRKAQRAGFKAAIIYDNEDRGTLIAMAGNSGGIRIHAVFVTKETGEVLKEYAGFPDTKVWLIPSFENSAWSIMAVSFISLLAMSAVLATCFFVRRHRIRRRTSRSSRVREFHGMSRRLVKAMPSLIFSSFHEDNTTAFTCAICLEDYTVGDKLRLLPCCHKFHAACVDSWLTSWRTFCPVCKRDARTSTGEPPASESTPLLSSAASSFTSSSLHSSVRSSALLIGPSLGSLPTSISFSPAYASSSYIRQSFQSSSNRRSPPISVSRSSVDLRQQAASPSPSPSQRSYISHMASPQSLGYPTISPFNTRYMSPYRPSPSNASPAMAGSSNYPLNPLRYSESAGTFSPYASANSLPDC

SEQ ID NO: 25389 - protein, 424 aa, Arabidopsis thaliana
  peptide (1)..(424): Ceres Seq. ID no. 12335564
MRNNITLSFDDIEANFAPSVKGTGEIGVVYVAEPLDACQNLMNKPEQSSNETSPFVLIVRGGCSFEEKVRKAQRAGFKAAIIYDNEDRGTLIAMAGNSGGIRIHAVFVTKETGEVLKEYAGFPDTKVWLIPSFENSAWSIMAVSFISLLAMSAVLATCFFVRRHRIRRRTSRSSRVREFHGMSRRLVKAMPSLIFSSFHEDNTTAFTCAICLEDYTVGDKLRLLPCCHKFHAACVDSWLTSWRTFCPVCKRDARTSTGEPPASESTPLLSSAASSFTSSSLHSSVRSSALLIGPSLGSLPTSISFSPAYASSSYIRQSFQSSSNRRSPPISVSRSSVDLRQQAASPSPSPSQRSYISHMASPQSLGYPTISPFNTRYMSPYRPSPSNASPAMAGSSNYPLNPLRYSESAGTFSPYASANSLPDC

SEQ ID NO: 25390 - protein, 383 aa, Arabidopsis thaliana
  peptide (1)..(383): Ceres Seq. ID no. 12335565
MNKPEQSSNETSPFVLIVRGGCSFEEKVRKAQRAGFKAAIIYDNEDRGTLIAMAGNSGGIRIHAVFVTKETGEVLKEYAGFPDTKVWLIPSFENSAWSIMAVSFISLLAMSAVLATCFFVRRHRIRRRTSRSSRVREFHGMSRRLVKAMPSLIFSSFHEDNTTAFTCAICLEDYTVGDKLRLLPCCHKFHAACVDSWLTSWRTFCPVCKRDARTSTGEPPASESTPLLSSAASSFTSSSLHSSVRSSALLIGPSLGSLPTSISFSPAYASSSYIRQSFQSSSNRRSPPISVSRSSVDLRQQAASPSPSPSQRSYISHMASPQSLGYPTISPFNTRYMSPYRPSPSNASPAMAGSSNYPLNPLRYSESAGTFSPYASANSLPDC

SEQ ID NO: 25391 - DNA, 1197 bp, Arabidopsis thaliana
  misc_feature (1)..(1197): Ceres Seq. ID no. 12326979
  misc_feature (1)..(1197): Ortholog of  Ceres SEQ ID NO 13596110 as cited in SEQ ID NO 68647
aaaaagttttcattcttcctccactctctcaattccaaaacactgcgccgggaagacatggacaccgagatggagacagaacaaatataccaggtcgatgtcggaaatctcttggctttcaatcccaatcaccgcttctcatctgctccttcttcaaggggggagcttgtgaaggagatcctaacggagggaacaaaacttgttcaggaaatagccaataaacttttcaactttccttctactgaaacaaatgatggtcctattgtccaattgcctccgcctacaaccaaacttcctagagagaaacatattccaaggcctaagcctcctacgaagtgggaagagtttgcgcttaagaaaggtatacagaagcgcaagaaggaaaaagttgtatgggatgaacaaactaatcagtttaagcgtcgccatggttatgaccgtgttaacgatgataatgatgttcccatcattgaggcgaaagaatcagatgaaccaggagtagatccttttgccaagagactagatgataagaagaagagagttggaaagcaagaaaagaatagacttcagaatctgaaggctgctgaaaaagctggtgctttaccaagccatgtccaacttgctgcaacatcattgcccatatcaggaacgaaagctcaaccaaagaaaattggaaaggatgaacttggagatgtagcaggtttagccgctacttcaaccgctagtggtggaaaattcgataaaaagttgcctggagaaaaacctccaaagaagcagggcaaacatcacaagtatttaccggttgtatcagggcgtggggatgttaacgcagaaaaagaacagacaaataatgtactcagcaagatattctcaaagcattcgcatgagatcctcaatgttggcaaggcgataaacatgtacaacgtcaagaaggagaagaagaagtcaggaaggtcagacaagttgaaacctaagaaggacatcaccaagaagcctgccaacaaagccaagtgaagagactctcccatgtctaatttactcttctatctgtctccatcttctatcacaaaacaaattttgggttgctctgttaaagtaatactttatgagtacgtttattttaatcttattgacttcatattttgcaccataaaacaatttaaagctcgcaaggtctagaaatccagtttgattttc

SEQ ID NO: 25392 - protein, 337 aa, Arabidopsis thaliana
  peptide (1)..(337): Ceres Seq. ID no. 12326980
KKFSFFLHSLNSKTLRREDMDTEMETEQIYQVDVGNLLAFNPNHRFSSAPSSRGELVKEILTEGTKLVQEIANKLFNFPSTETNDGPIVQLPPPTTKLPREKHIPRPKPPTKWEEFALKKGIQKRKKEKVVWDEQTNQFKRRHGYDRVNDDNDVPIIEAKESDEPGVDPFAKRLDDKKKRVGKQEKNRLQNLKAAEKAGALPSHVQLAATSLPISGTKAQPKKIGKDELGDVAGLAATSTASGGKFDKKLPGEKPPKKQGKHHKYLPVVSGRGDVNAEKEQTNNVLSKIFSKHSHEILNVGKAINMYNVKKEKKKSGRSDKLKPKKDITKKPANKAK

SEQ ID NO: 25393 - protein, 318 aa, Arabidopsis thaliana
  peptide (1)..(318): Ceres Seq. ID no. 12326981
MDTEMETEQIYQVDVGNLLAFNPNHRFSSAPSSRGELVKEILTEGTKLVQEIANKLFNFPSTETNDGPIVQLPPPTTKLPREKHIPRPKPPTKWEEFALKKGIQKRKKEKVVWDEQTNQFKRRHGYDRVNDDNDVPIIEAKESDEPGVDPFAKRLDDKKKRVGKQEKNRLQNLKAAEKAGALPSHVQLAATSLPISGTKAQPKKIGKDELGDVAGLAATSTASGGKFDKKLPGEKPPKKQGKHHKYLPVVSGRGDVNAEKEQTNNVLSKIFSKHSHEILNVGKAINMYNVKKEKKKSGRSDKLKPKKDITKKPANKAK

SEQ ID NO: 25394 - protein, 314 aa, Arabidopsis thaliana
  peptide (1)..(314): Ceres Seq. ID no. 12326982
METEQIYQVDVGNLLAFNPNHRFSSAPSSRGELVKEILTEGTKLVQEIANKLFNFPSTETNDGPIVQLPPPTTKLPREKHIPRPKPPTKWEEFALKKGIQKRKKEKVVWDEQTNQFKRRHGYDRVNDDNDVPIIEAKESDEPGVDPFAKRLDDKKKRVGKQEKNRLQNLKAAEKAGALPSHVQLAATSLPISGTKAQPKKIGKDELGDVAGLAATSTASGGKFDKKLPGEKPPKKQGKHHKYLPVVSGRGDVNAEKEQTNNVLSKIFSKHSHEILNVGKAINMYNVKKEKKKSGRSDKLKPKKDITKKPANKAK

SEQ ID NO: 25395 - DNA, 1876 bp, Arabidopsis thaliana
  misc_feature (1)..(1876): Ceres Seq. ID no. 12421228
  misc_feature (1)..(1876): Ortholog of  Ceres SEQ ID NO 13638331 as cited in SEQ ID NO 58047
gagagagtcaatcttcttctctgtttttgtctctttggctatatatattcaaacattgtgtgaacagaacacaaatcaacacaacacacacaactttgtgttctttaagttttgtttcagagatcaatggccgggactggattgtttgctgagattctggatggagaagtatacaaatactacgctgacggagagtggaaaacttcttcctccggtaagagtgtagccatcattaacccggccacgaggaagacacagtacaaggttcaagcatgcacgcaagaagaagtgaacgcagtgatggaacttgcgaaatcggctcagaaatcgtgggcaaagactcctctttggaaaagaactgagcttcttcacaaagcagctgcaatccttaaggacaacaaagctcccatggctgagtctcttgttaaagaaatcgctaaacccgctaaagattctgttactgaggttgtgaggtctggagatttgatctcttattgtgctgaagaaggtgttaggatcttaggtgaagggaagtttcttctctctgatagcttccccggtaatgaccgtactaagtactgcctcacttccaagattccactcggtgtggttttggctattcctccattcaattatccagttaatctcgctgtatcgaagatcgctcctgctttgatcgccggaaactcccttgtcctcaaacctccaactcaaggagctgtttcttgccttcacatggtacattgctttcacttagccggtttcccaaaaggtcttatcagctgcatcaccggaaaaggatctgagatcggcgatttcctcactatgcaccctgctgttaactgcattagtttcacgggtggtgataccggaatctcaatctcaaagaaagctggtatgatccctcttcaaatggaacttggaggtaaagatgcatgcattgttctagatgatgctgatcttgatttagttgcttccaatatcatcaaaggaggattctcttacagcgggcagagatgcactgcggttaaggtagtcctagtgatggaatcagtagcggatgagcttgttgagaaagtgaaagctaaagtggccaaactcacggtgggaccgcccgaagagaactccgatatcacggcagtggtgtcggaatcttcagctaatttcattgaaggattggtgatggatgctaaggagaaaggagcaacgttttgtcaagagtataaaagagaaggtaacttgatttggccgttgcttttggacaatgttagaccggacatgaggatcgcgtgggaggaaccattcggtcctgttgtgccggtcttgaggatcaattctgttgaagaagggattaatcattgcaatgcaagcaactttggccttcagggatgtgtattcactaaagacatcaacaaggcaatactgatcagtgatgcaatggagacaggaaccgttcagatcaactctgcgccagctcgtggaccggaccacttccctttccagggacttaaggacagtggaatagggtcacaaggtgtgacaaatagcatcaatttgatgactaaagtgaagaccactgtcattaacttgcctacaccttcttactctatgggttagtttccctttttttatgttcttcatcttagaatcaaaatcaatcatgtcatgtttgtattggattcaatcgaatactgcgaataaagggagtgattagcgtaagtactatggtttgtaatctctatgtaaccaataagaggatattatgagtgagaggtttggttgtgttgtgttataacaggggacggtttcatctcacgcctgtgattcgagcacacaaaactgaaaacttcttttgataattggagttttatcattt

SEQ ID NO: 25396 - protein, 496 aa, Arabidopsis thaliana
  peptide (1)..(496): Ceres Seq. ID no. 12421229
MAGTGLFAEILDGEVYKYYADGEWKTSSSGKSVAIINPATRKTQYKVQACTQEEVNAVMELAKSAQKSWAKTPLWKRTELLHKAAAILKDNKAPMAESLVKEIAKPAKDSVTEVVRSGDLISYCAEEGVRILGEGKFLLSDSFPGNDRTKYCLTSKIPLGVVLAIPPFNYPVNLAVSKIAPALIAGNSLVLKPPTQGAVSCLHMVHCFHLAGFPKGLISCITGKGSEIGDFLTMHPAVNCISFTGGDTGISISKKAGMIPLQMELGGKDACIVLDDADLDLVASNIIKGGFSYSGQRCTAVKVVLVMESVADELVEKVKAKVAKLTVGPPEENSDITAVVSESSANFIEGLVMDAKEKGATFCQEYKREGNLIWPLLLDNVRPDMRIAWEEPFGPVVPVLRINSVEEGINHCNASNFGLQGCVFTKDINKAILISDAMETGTVQINSAPARGPDHFPFQGLKDSGIGSQGVTNSINLMTKVKTTVINLPTPSYSMG

SEQ ID NO: 25397 - protein, 438 aa, Arabidopsis thaliana
  peptide (1)..(438): Ceres Seq. ID no. 12421230
MELAKSAQKSWAKTPLWKRTELLHKAAAILKDNKAPMAESLVKEIAKPAKDSVTEVVRSGDLISYCAEEGVRILGEGKFLLSDSFPGNDRTKYCLTSKIPLGVVLAIPPFNYPVNLAVSKIAPALIAGNSLVLKPPTQGAVSCLHMVHCFHLAGFPKGLISCITGKGSEIGDFLTMHPAVNCISFTGGDTGISISKKAGMIPLQMELGGKDACIVLDDADLDLVASNIIKGGFSYSGQRCTAVKVVLVMESVADELVEKVKAKVAKLTVGPPEENSDITAVVSESSANFIEGLVMDAKEKGATFCQEYKREGNLIWPLLLDNVRPDMRIAWEEPFGPVVPVLRINSVEEGINHCNASNFGLQGCVFTKDINKAILISDAMETGTVQINSAPARGPDHFPFQGLKDSGIGSQGVTNSINLMTKVKTTVINLPTPSYSMG

SEQ ID NO: 25398 - protein, 402 aa, Arabidopsis thaliana
  peptide (1)..(402): Ceres Seq. ID no. 12421231
MAESLVKEIAKPAKDSVTEVVRSGDLISYCAEEGVRILGEGKFLLSDSFPGNDRTKYCLTSKIPLGVVLAIPPFNYPVNLAVSKIAPALIAGNSLVLKPPTQGAVSCLHMVHCFHLAGFPKGLISCITGKGSEIGDFLTMHPAVNCISFTGGDTGISISKKAGMIPLQMELGGKDACIVLDDADLDLVASNIIKGGFSYSGQRCTAVKVVLVMESVADELVEKVKAKVAKLTVGPPEENSDITAVVSESSANFIEGLVMDAKEKGATFCQEYKREGNLIWPLLLDNVRPDMRIAWEEPFGPVVPVLRINSVEEGINHCNASNFGLQGCVFTKDINKAILISDAMETGTVQINSAPARGPDHFPFQGLKDSGIGSQGVTNSINLMTKVKTTVINLPTPSYSMG

SEQ ID NO: 25399 - DNA, 1352 bp, Arabidopsis thaliana
  misc_feature (1)..(1352): Ceres Seq. ID no. 12325276
  misc_feature (1)..(1352): Ortholog of  Ceres SEQ ID NO 14303631 as cited in SEQ ID NO 62864
acatcaaaacttactacttcttcttcttcttcctttaccaaatcttttcttctttactctttttcatcgtcgagaaaaaatggagttggatcttacacctaagttgcccaagaaggtttacggaggagatggtggatcttactctgcctggtgcccagaggagttgccgatgctcaaacagggtaacattggagccgctaagcttgctcttgagaagaatggcttcgctgtccctcgttactctgattcctctaaggtcgcttatgttcttcaaggatctggaactgctggaattgttctcccagagaaggaggagaaggtgatcgcaatcaagcaaggtgattcgattgctcttccctttggtgtggtcacatggtggttcaacaacgaggatcctgagcttgttatcctcttccttggtgaaacccacaagggtcacaaagcagggcagttcactgagttctatcttactggcacaaacggtatcttcactggtttctccactgagtttgttggcagagcctgggaccttgatgagaacaccgtgaagaaacttgttggttctcaaaccggtaatggcattgtgaagcttgatgcgggctttaagatgccacagcccaaggaggagaaccgtgctgggtttgtcttgaactgtttggaggctcctcttgatgtagacatcaaggatggaggcagggtcgttgtcttgaacaccaagaaccttcctttggttggagaggttggctttggagctgatcttgttcggatcgatgcacactccatgtgttcgcctggtttctcttgtgactctgctcttcaggtgacttacattgtgggtggaagtggaagagtccaggtggttggtggtgatgggaaaagagttcttgagacccatatcaaagctggttctctcttcattgttccaaggttctttgtggtttctaagattgctgatgctgatggcatgtcttggttctccattgtcaccactcctgatccgatcttcacacatttggccgggaatacatcggtgtggaagtctttgtcccctgaggttttgcaggcagcgtttaaggtggctccggaggtggagaagtccttccgatccacgaggacttcatcagccattttcttccctccttccaactgaagaaggagaagaatgagaacaagaaccagcttttatcttttatcgtttgttgctttccctcagagatttttgagggtttttacttttcttgtgattcaaggaagtttcttagtctagttgtttaattctcttcctgccttttccccctggaccggttcttgttctcgttgttttaaaatattaaaaaatcgacctttcctat

SEQ ID NO: 25400 - protein, 382 aa, Arabidopsis thaliana
  peptide (1)..(382): Ceres Seq. ID no. 12325277
HQNLLLLLLLPLPNLFFFTLFHRREKMELDLTPKLPKKVYGGDGGSYSAWCPEELPMLKQGNIGAAKLALEKNGFAVPRYSDSSKVAYVLQGSGTAGIVLPEKEEKVIAIKQGDSIALPFGVVTWWFNNEDPELVILFLGETHKGHKAGQFTEFYLTGTNGIFTGFSTEFVGRAWDLDENTVKKLVGSQTGNGIVKLDAGFKMPQPKEENRAGFVLNCLEAPLDVDIKDGGRVVVLNTKNLPLVGEVGFGADLVRIDAHSMCSPGFSCDSALQVTYIVGGSGRVQVVGGDGKRVLETHIKAGSLFIVPRFFVVSKIADADGMSWFSIVTTPDPIFTHLAGNTSVWKSLSPEVLQAAFKVAPEVEKSFRSTRTSSAIFFPPSN

SEQ ID NO: 25401 - protein, 356 aa, Arabidopsis thaliana
  peptide (1)..(356): Ceres Seq. ID no. 12325278
MELDLTPKLPKKVYGGDGGSYSAWCPEELPMLKQGNIGAAKLALEKNGFAVPRYSDSSKVAYVLQGSGTAGIVLPEKEEKVIAIKQGDSIALPFGVVTWWFNNEDPELVILFLGETHKGHKAGQFTEFYLTGTNGIFTGFSTEFVGRAWDLDENTVKKLVGSQTGNGIVKLDAGFKMPQPKEENRAGFVLNCLEAPLDVDIKDGGRVVVLNTKNLPLVGEVGFGADLVRIDAHSMCSPGFSCDSALQVTYIVGGSGRVQVVGGDGKRVLETHIKAGSLFIVPRFFVVSKIADADGMSWFSIVTTPDPIFTHLAGNTSVWKSLSPEVLQAAFKVAPEVEKSFRSTRTSSAIFFPPSN

SEQ ID NO: 25402 - protein, 326 aa, Arabidopsis thaliana
  peptide (1)..(326): Ceres Seq. ID no. 12325279
MLKQGNIGAAKLALEKNGFAVPRYSDSSKVAYVLQGSGTAGIVLPEKEEKVIAIKQGDSIALPFGVVTWWFNNEDPELVILFLGETHKGHKAGQFTEFYLTGTNGIFTGFSTEFVGRAWDLDENTVKKLVGSQTGNGIVKLDAGFKMPQPKEENRAGFVLNCLEAPLDVDIKDGGRVVVLNTKNLPLVGEVGFGADLVRIDAHSMCSPGFSCDSALQVTYIVGGSGRVQVVGGDGKRVLETHIKAGSLFIVPRFFVVSKIADADGMSWFSIVTTPDPIFTHLAGNTSVWKSLSPEVLQAAFKVAPEVEKSFRSTRTSSAIFFPPSN

SEQ ID NO: 25403 - DNA, 1436 bp, Arabidopsis thaliana
  misc_feature (1)..(1436): Ceres Seq. ID no. 12324868
  misc_feature (1)..(1436): Ortholog of  Ceres SEQ ID NO 13595351 as cited in SEQ ID NO 55934
  misc_feature (1)..(1436): Ortholog of  Ceres SEQ ID NO 13639645 as cited in SEQ ID NO 57488
atatacacaaaccccttagagaaacaaaaagaatacaaaaagaagagagagattagttattaacttattcataataagtgtaattacttcgtatttacttttttttggttagcagtcgactagtaatcaataatgggttactgcgatggtaaatggacaccggtgattattatggttatgatcaattcagcgctgggtttagctaatgctttggttaaaaaagtactcgatggtggtgttaaccatatggttatcgcaacatatcgtcttgctatttcaaccctatttttggcaccaatcgcatttttttgggaacggaaaacgagaccgacactaacgctcaacatcttggttcagcttttcttcagtgctcttgttggggcaagtttgactcagtatttcttcctattggggctatcatacacatcggctacgttggcatgtgcttttattagcatgacgcctgcgattacattcgttatggctctaatattcagggtagagaagctaaacatgaaaagcaaagcaggtatggggatggtgatgggcgcgttgatatgcataggaggagctttattattaacaatgtacaaaggtgttcccttgacaaaacttcggaaactagaaacccatcagttgataaacaataaccacgctatgaaaccagagaattggataataggatgcgtacttctctttgcgggtagtagctgtttcgggtcgtggatgctgatacaagccaaagtgaacgagaaatacccttgtcaatactcgagtactgtcgtattatccttctttggcaccatccaatgcgcccttctaagcctcatcaaatctcgagatatcacggcttggatcctcacagataaacttgatatcgttaccattgtttacgcgggagcagtagcacaaggaatatgtacggttggaacgtcttggtgcatcagaaagagaggacctatctttacttctatatttaccccggtggggcttatatttgcaacactatttgatttcttgatccttcatcgtcaaattttcctaggaagtgttgtcggatctggggttgtaatcttcggactatacatattcttgttgggaaaagtcaggctaatgaaagaagagtgtgaaaagaagttaccttgtcgttttaatgaagatgatcaagaagaagatgatgatgaacaatacaaaaagggtcatcttatggttgttccaatgactccttgataagattagactttttttttttcttcttcttcacttcgtacattatttagtaaaaccattgaccggtgaaaattacatggactagtctaacaacggttcaaaaaactagtcacatgttttttttttttttgctttttcttttctttcccttttttttgttttgcaatgtaaaacttttattgcaataataaaaaaatctcctttgc

SEQ ID NO: 25404 - protein, 365 aa, Arabidopsis thaliana
  peptide (1)..(365): Ceres Seq. ID no. 12324869
MGYCDGKWTPVIIMVMINSALGLANALVKKVLDGGVNHMVIATYRLAISTLFLAPIAFFWERKTRPTLTLNILVQLFFSALVGASLTQYFFLLGLSYTSATLACAFISMTPAITFVMALIFRVEKLNMKSKAGMGMVMGALICIGGALLLTMYKGVPLTKLRKLETHQLINNNHAMKPENWIIGCVLLFAGSSCFGSWMLIQAKVNEKYPCQYSSTVVLSFFGTIQCALLSLIKSRDITAWILTDKLDIVTIVYAGAVAQGICTVGTSWCIRKRGPIFTSIFTPVGLIFATLFDFLILHRQIFLGSVVGSGVVIFGLYIFLLGKVRLMKEECEKKLPCRFNEDDQEEDDDEQYKKGHLMVVPMTP

SEQ ID NO: 25405 - protein, 352 aa, Arabidopsis thaliana
  peptide (1)..(352): Ceres Seq. ID no. 12324870
MVMINSALGLANALVKKVLDGGVNHMVIATYRLAISTLFLAPIAFFWERKTRPTLTLNILVQLFFSALVGASLTQYFFLLGLSYTSATLACAFISMTPAITFVMALIFRVEKLNMKSKAGMGMVMGALICIGGALLLTMYKGVPLTKLRKLETHQLINNNHAMKPENWIIGCVLLFAGSSCFGSWMLIQAKVNEKYPCQYSSTVVLSFFGTIQCALLSLIKSRDITAWILTDKLDIVTIVYAGAVAQGICTVGTSWCIRKRGPIFTSIFTPVGLIFATLFDFLILHRQIFLGSVVGSGVVIFGLYIFLLGKVRLMKEECEKKLPCRFNEDDQEEDDDEQYKKGHLMVVPMTP

SEQ ID NO: 25406 - protein, 350 aa, Arabidopsis thaliana
  peptide (1)..(350): Ceres Seq. ID no. 12324871
MINSALGLANALVKKVLDGGVNHMVIATYRLAISTLFLAPIAFFWERKTRPTLTLNILVQLFFSALVGASLTQYFFLLGLSYTSATLACAFISMTPAITFVMALIFRVEKLNMKSKAGMGMVMGALICIGGALLLTMYKGVPLTKLRKLETHQLINNNHAMKPENWIIGCVLLFAGSSCFGSWMLIQAKVNEKYPCQYSSTVVLSFFGTIQCALLSLIKSRDITAWILTDKLDIVTIVYAGAVAQGICTVGTSWCIRKRGPIFTSIFTPVGLIFATLFDFLILHRQIFLGSVVGSGVVIFGLYIFLLGKVRLMKEECEKKLPCRFNEDDQEEDDDEQYKKGHLMVVPMTP

SEQ ID NO: 25407 - DNA, 1254 bp, Arabidopsis thaliana
  misc_feature (1)..(1254): Ceres Seq. ID no. 12348619
  misc_feature (1)..(1254): Ortholog of  Ceres SEQ ID NO 13596944 as cited in SEQ ID NO 68910
aagtctagagacgagaagcacgtggaaagaagaaactatcaagttggacttggatgatatatatgcagctgtggatttgaatcgtaaaccaaccaaccaatcagatggaccacactctttctcttcttccatttctcttcatcataatcatttcttccttccatgttttgcctgtttcacccacaccttcacacaaactaaaatccgccactaccatcagaaaactcaaccgcggaggaccttacatcggtctcgtgacggtcattgcgaccgaagaaaatgcttttctccgcagtgtcgatttcagacctgaccctactcatcccttcttggatctctctgggagacgttttcgaatagggaagattcatggaaagaaggttgtgtatgttagatgtgggagaggaatggtgaatggagcagcagcaacacaacagatgatagatgtgttcaatgtgaaagggatagtgcattttgggattgctggaaatatgaacaactcaatgtccataggagatgtgagcatccctaagcaaattacgaatgctggcttgtgggattggctgaatccagacaaagtaaagggagttgaggatatagcgtacttagatgtcggaaactataatgttccaaaaggagatggcgacaatgagttagggagtattggatataattacgagcaactatattcagtcactggtcacatcaatgcacctcagaatgtgttttggatcaacacaactcaagagtggcttcatcttgcagctgatctagagaagatggagctatcgcagtgtgtaaatgcaagtttgtgtcttccaaagaaaccaaaattggtagttggattgaaagcagccactgcttacatatttgtggataatgcagcctatagaaatttcttatacgatacttttggagtctcctcctctgatatggagagttctgcagtagccatgacatgcgcatcaaatgggtatccgataattgtgataaggggtttatcagatttagctggagaaggaggagataacactgttcataagtttggatctttggctgccactaacactgccaaagctgttttagagttcattaggaagctcccaccgtactaattcctctagtgtaacctatttatcatgaatgtttgaatctagttctctagttcatatcaacgaacccgtgacaacaaatgatttggattgttatcaaattccattttccatgatcgtaacaatgacaacacttttatcg

SEQ ID NO: 25408 - protein, 336 aa, Arabidopsis thaliana
  peptide (1)..(336): Ceres Seq. ID no. 12348620
MDHTLSLLPFLFIIIISSFHVLPVSPTPSHKLKSATTIRKLNRGGPYIGLVTVIATEENAFLRSVDFRPDPTHPFLDLSGRRFRIGKIHGKKVVYVRCGRGMVNGAAATQQMIDVFNVKGIVHFGIAGNMNNSMSIGDVSIPKQITNAGLWDWLNPDKVKGVEDIAYLDVGNYNVPKGDGDNELGSIGYNYEQLYSVTGHINAPQNVFWINTTQEWLHLAADLEKMELSQCVNASLCLPKKPKLVVGLKAATAYIFVDNAAYRNFLYDTFGVSSSDMESSAVAMTCASNGYPIIVIRGLSDLAGEGGDNTVHKFGSLAATNTAKAVLEFIRKLPPY

SEQ ID NO: 25409 - protein, 235 aa, Arabidopsis thaliana
  peptide (1)..(235): Ceres Seq. ID no. 12348621
MVNGAAATQQMIDVFNVKGIVHFGIAGNMNNSMSIGDVSIPKQITNAGLWDWLNPDKVKGVEDIAYLDVGNYNVPKGDGDNELGSIGYNYEQLYSVTGHINAPQNVFWINTTQEWLHLAADLEKMELSQCVNASLCLPKKPKLVVGLKAATAYIFVDNAAYRNFLYDTFGVSSSDMESSAVAMTCASNGYPIIVIRGLSDLAGEGGDNTVHKFGSLAATNTAKAVLEFIRKLPPY

SEQ ID NO: 25410 - protein, 225 aa, Arabidopsis thaliana
  peptide (1)..(225): Ceres Seq. ID no. 12348622
MIDVFNVKGIVHFGIAGNMNNSMSIGDVSIPKQITNAGLWDWLNPDKVKGVEDIAYLDVGNYNVPKGDGDNELGSIGYNYEQLYSVTGHINAPQNVFWINTTQEWLHLAADLEKMELSQCVNASLCLPKKPKLVVGLKAATAYIFVDNAAYRNFLYDTFGVSSSDMESSAVAMTCASNGYPIIVIRGLSDLAGEGGDNTVHKFGSLAATNTAKAVLEFIRKLPPY

SEQ ID NO: 25411 - DNA, 3261 bp, Arabidopsis thaliana
  misc_feature (1)..(3261): Ceres Seq. ID no. 12562116
  misc_feature (1)..(3261): Ortholog of  Ceres SEQ ID NO 13646569 as cited in SEQ ID NO 20745
tgtgttagcttcccatactgccactaacctttagcggttttctcatcttctctactcttctttctcttttctgagaaacccaaaagacaaaaacgaagaagaagattaggaaatcatcttgagaaacaggaggtagcaggagaatatgggggacaaggaagaagtccttgaggctgttttgaaagaaactgtggatctggagaatgtacctattgaagaagtttttgagagtctgagatgtagcagagaaggtctcactacagaagctgctgatgaaaggctggctctttttgggcataacaagctcgaagagaagaaggaaagcaaattcctgaaatttcttggtttcatgtggaaccctctttcttgggttatggaagctgctgctatcatggctattgctcttgctaatggaggagggaagccacctgattggcaagactttgttggtattattactctgcttgtgattaactccactatcagtttcatagaggagaacaatgccgggaatgctgctgctgcactcatggcacgtcttgccccaaaagcaaaggttcttcgagatggaagatggggtgagcaggatgctgcaattcttgttccgggtgatataatcagcataaagctcggggatattgttccagctgatgctcgccttctcgagggtgatccccttaaaatcgatcagtcttctcttaccggtgaatctctcccagtaaccaaaggtccaggggatggtgtgtattctggctccacttgcaaacagggagagcttgaagcagttgtgattgcaacgggagtccataccttctttggaaaggccgcacatcttgtcgatacgaccaaccacgttggccattttcaacaggtgttaactgccattgggaacttttgcatctgctctatcgcagtggggatgataattgagattgtcgttatgtatcccattcaacaccgtgcatatcgtcctggaattgataaccttcttgtgcttctcattggcggtatcccaattgccatgcctacagttctctctgtgaccatggccattggctcgcataggttatctcagcagggagcaataaccaagaggatgacagcgattgaggaaatggctggcatggatgtgctttgcagcgacaagaccggaactttaacattgaataaacttactgttgacaaaaatcttatcgaggttttcacgaaaggagtggatgcggatacagtagttctaatggcagctcaagcctctagactggaaaaccaagatgccattgatgctgctatagttgggatgcttgctgaccctaaagaggcacgggctggtgttcgagaggttcactttcttccattcaatcccactgacaagaggacggctcttacatatattgacagtgatggtaaaatgcatagggtcagcaaaggtgcacctgagcaaatcctaaatcttgcacacaatagagcagagattgagcggagagtacatgctgtaatagacaagttcgctgaacggggtttgcgatctcttgccgtggcataccaggaagttccggaagggacgaaagaaagtgctggaggcccttggcaatttatgggtctcatgcctctttttgacccacctaggcatgacagtgccgagacaattagaagggctttaaatcttggggtgaatgttaaaatgatcacaggggatcagttggctataggaaaagagactggccgccgtttaggaatgggaaccaacatgtacccctcatctgctttgcttggacagcacaaggatgagtctattggtgccttacccatcgatgatcttatagaaaaggccgacggctttgctggcgtttttcctgagcataaatatgagatagttaagcgactacaagcgaggaagcatatctgtggaatgacaggtgatggagtaaatgatgcgcctgctcttaaaaaggctgatattggcattgcagttgctgatgcaactgatgcagcacgtagtgcttcagatatcgttcttactgaacctggtcttagtgttatcatcagcgctgtcttaaccagccgtgctatcttccagagaatgaaaaattatacaatctatgcggtttccatcactatccgtattgttcttggcttcatgctgctagctcttatatggaagtttgactttccacccttcatggttcttatcattgccattctgaatgatggcacaattatgacaatatcaaaagacagagtgaaaccttcccctcttccagatagctggaaactctcagagatttttgcaactggcgttgtgtttgggagctacatggcgatgatgacagttatatttttctgggctgcatataaaaccgacttcttcccgcgaacatttggagtttcaaccctggagaaaacagcacatgatgatttccggaagcttgcctcggcaatatacctgcaagtcagcatcataagtcaggcgcttatctttgtgacccgatcacggagttggtcttatgtagaacgtcctgggatgttgcttgtggtagcctttatccttgcacaattggtggctactctaattgcagtctatgcgaattggagctttgctgcaatagaagggatcgggtggggatgggccggggtcatctggctttacaatatcgtattctatattcctcttgatatcatcaagttcttgattcgttatgcccttagcggaagagcctgggatcttgttatcgaacaaagggttgcattcacgaggcagaaggatttcgggaaagaacaaagggagctacaatgggcacatgcacagagaaccctgcacggtctgcaagcaccagatgctaagatgttcccggagcgaacccatttcaacgagctttcccaaatggccgaagaagctaagagaagagccgagatcgccaggttgcgggagcttcacacacttaagggtcatgttgaatctgttgtcagactaaaaggtctcgacattgaaaccattcaacaagcttacaccgtctgagagaagcatagagagagcccaagaaccgtctcaaactcattcaaaaaggtcaatattcctgtgtgaaacatcgatacaaattatgcatgtaagtatcagtttcttagtagagtctttttggttgggttttatttgttcttccgagttttaagatatgttctgttattatgatgaagtatgacagaaaatagaaacagagtcctcacaatgaaagacaaattttattctgaaatacatctgatgtt

SEQ ID NO: 25412 - protein, 956 aa, Arabidopsis thaliana
  peptide (1)..(956): Ceres Seq. ID no. 12562117
MGDKEEVLEAVLKETVDLENVPIEEVFESLRCSREGLTTEAADERLALFGHNKLEEKKESKFLKFLGFMWNPLSWVMEAAAIMAIALANGGGKPPDWQDFVGIITLLVINSTISFIEENNAGNAAAALMARLAPKAKVLRDGRWGEQDAAILVPGDIISIKLGDIVPADARLLEGDPLKIDQSSLTGESLPVTKGPGDGVYSGSTCKQGELEAVVIATGVHTFFGKAAHLVDTTNHVGHFQQVLTAIGNFCICSIAVGMIIEIVVMYPIQHRAYRPGIDNLLVLLIGGIPIAMPTVLSVTMAIGSHRLSQQGAITKRMTAIEEMAGMDVLCSDKTGTLTLNKLTVDKNLIEVFTKGVDADTVVLMAAQASRLENQDAIDAAIVGMLADPKEARAGVREVHFLPFNPTDKRTALTYIDSDGKMHRVSKGAPEQILNLAHNRAEIERRVHAVIDKFAERGLRSLAVAYQEVPEGTKESAGGPWQFMGLMPLFDPPRHDSAETIRRALNLGVNVKMITGDQLAIGKETGRRLGMGTNMYPSSALLGQHKDESIGALPIDDLIEKADGFAGVFPEHKYEIVKRLQARKHICGMTGDGVNDAPALKKADIGIAVADATDAARSASDIVLTEPGLSVIISAVLTSRAIFQRMKNYTIYAVSITIRIVLGFMLLALIWKFDFPPFMVLIIAILNDGTIMTISKDRVKPSPLPDSWKLSEIFATGVVFGSYMAMMTVIFFWAAYKTDFFPRTFGVSTLEKTAHDDFRKLASAIYLQVSIISQALIFVTRSRSWSYVERPGMLLVVAFILAQLVATLIAVYANWSFAAIEGIGWGWAGVIWLYNIVFYIPLDIIKFLIRYALSGRAWDLVIEQRVAFTRQKDFGKEQRELQWAHAQRTLHGLQAPDAKMFPERTHFNELSQMAEEAKRRAEIARLRELHTLKGHVESVVRLKGLDIETIQQAYTV

SEQ ID NO: 25413 - protein, 888 aa, Arabidopsis thaliana
  peptide (1)..(888): Ceres Seq. ID no. 12562118
MWNPLSWVMEAAAIMAIALANGGGKPPDWQDFVGIITLLVINSTISFIEENNAGNAAAALMARLAPKAKVLRDGRWGEQDAAILVPGDIISIKLGDIVPADARLLEGDPLKIDQSSLTGESLPVTKGPGDGVYSGSTCKQGELEAVVIATGVHTFFGKAAHLVDTTNHVGHFQQVLTAIGNFCICSIAVGMIIEIVVMYPIQHRAYRPGIDNLLVLLIGGIPIAMPTVLSVTMAIGSHRLSQQGAITKRMTAIEEMAGMDVLCSDKTGTLTLNKLTVDKNLIEVFTKGVDADTVVLMAAQASRLENQDAIDAAIVGMLADPKEARAGVREVHFLPFNPTDKRTALTYIDSDGKMHRVSKGAPEQILNLAHNRAEIERRVHAVIDKFAERGLRSLAVAYQEVPEGTKESAGGPWQFMGLMPLFDPPRHDSAETIRRALNLGVNVKMITGDQLAIGKETGRRLGMGTNMYPSSALLGQHKDESIGALPIDDLIEKADGFAGVFPEHKYEIVKRLQARKHICGMTGDGVNDAPALKKADIGIAVADATDAARSASDIVLTEPGLSVIISAVLTSRAIFQRMKNYTIYAVSITIRIVLGFMLLALIWKFDFPPFMVLIIAILNDGTIMTISKDRVKPSPLPDSWKLSEIFATGVVFGSYMAMMTVIFFWAAYKTDFFPRTFGVSTLEKTAHDDFRKLASAIYLQVSIISQALIFVTRSRSWSYVERPGMLLVVAFILAQLVATLIAVYANWSFAAIEGIGWGWAGVIWLYNIVFYIPLDIIKFLIRYALSGRAWDLVIEQRVAFTRQKDFGKEQRELQWAHAQRTLHGLQAPDAKMFPERTHFNELSQMAEEAKRRAEIARLRELHTLKGHVESVVRLKGLDIETIQQAYTV

SEQ ID NO: 25414 - protein, 880 aa, Arabidopsis thaliana
  peptide (1)..(880): Ceres Seq. ID no. 12562119
MEAAAIMAIALANGGGKPPDWQDFVGIITLLVINSTISFIEENNAGNAAAALMARLAPKAKVLRDGRWGEQDAAILVPGDIISIKLGDIVPADARLLEGDPLKIDQSSLTGESLPVTKGPGDGVYSGSTCKQGELEAVVIATGVHTFFGKAAHLVDTTNHVGHFQQVLTAIGNFCICSIAVGMIIEIVVMYPIQHRAYRPGIDNLLVLLIGGIPIAMPTVLSVTMAIGSHRLSQQGAITKRMTAIEEMAGMDVLCSDKTGTLTLNKLTVDKNLIEVFTKGVDADTVVLMAAQASRLENQDAIDAAIVGMLADPKEARAGVREVHFLPFNPTDKRTALTYIDSDGKMHRVSKGAPEQILNLAHNRAEIERRVHAVIDKFAERGLRSLAVAYQEVPEGTKESAGGPWQFMGLMPLFDPPRHDSAETIRRALNLGVNVKMITGDQLAIGKETGRRLGMGTNMYPSSALLGQHKDESIGALPIDDLIEKADGFAGVFPEHKYEIVKRLQARKHICGMTGDGVNDAPALKKADIGIAVADATDAARSASDIVLTEPGLSVIISAVLTSRAIFQRMKNYTIYAVSITIRIVLGFMLLALIWKFDFPPFMVLIIAILNDGTIMTISKDRVKPSPLPDSWKLSEIFATGVVFGSYMAMMTVIFFWAAYKTDFFPRTFGVSTLEKTAHDDFRKLASAIYLQVSIISQALIFVTRSRSWSYVERPGMLLVVAFILAQLVATLIAVYANWSFAAIEGIGWGWAGVIWLYNIVFYIPLDIIKFLIRYALSGRAWDLVIEQRVAFTRQKDFGKEQRELQWAHAQRTLHGLQAPDAKMFPERTHFNELSQMAEEAKRRAEIARLRELHTLKGHVESVVRLKGLDIETIQQAYTV

SEQ ID NO: 25415 - DNA, 1801 bp, Arabidopsis thaliana
  misc_feature (1)..(1801): Ceres Seq. ID no. 13487593
  misc_feature (1)..(1801): Ortholog of  Ceres SEQ ID NO 13638331 as cited in SEQ ID NO 58047
  misc_feature (1)..(1801): Ortholog of  Ceres SEQ ID NO 15170135 as cited in SEQ ID NO 67647
tgaaccattaggtgatttttttctctgatcttcgagttctgataattgctcttttttctctggctttgttatcgataatttctctggattttctttctggggtgaatttttgcgcagagatgggttcggcgaacaacgagtacgagtttctgagtgagattgggctgacttctcacaacttgggatcttacgttgctggcaaatggcaagccaacggacctcttgtttcaactctcaatcctgctaacaatcagccaattgctcaagttgtggaagcttctctagaggattacgagcaaggtttgaaagcttgcgaggaagcagctaaaatatggatgcaggttacggctcctaagagaggtgatatcgtcagacagattggggatgcactaagatccaaacttgactatcttggtcgtcttctttctcttgaaatgggaaagatccttgctgaaggtattggagaagttcaggaagtaattgacatgtgtgattttgctgttggtttgagccgacaactcaatggatcggttataccttcagaacgccctaaccacatgatgttggagatgtggaatcctcttggcattgttggtgttatcacagcgtttaattttccctgtgcagttcttggttggaatgcttgtattgctcttgtctgtggaaactgtgtagtctggaaaggtgctccaactacaccgttaataactatcgcaatgaccaagctagtagctgaagttttagagaaaaacaacttacccggtgccatttttacggccatgtgtggtggtgctgaaattggtgaagcaatagccaaagacacacgcattcccttagtatcctttactggaagctccagggtgggctcaatggtacaacaaacagtgaatgcgagatctgggaaaactttgcttgagttgagtggaaacaatgcaatcatagtcatggacgatgctgatatacagttagcggctcgatctgttctattcgctgcggttggaactgctggtcaacgttgcacaacttgccgtaggctgcttttgcatgagagtgtctatgacaaagtactcgagcaactgcttacctcatacaaacaagtcaaaatcggcaatcctcttgagaaagggacattgttaggaccattacatactcctgaatcaaaaaagaactttgagaaaggaattgaagtcatcaaatcccagggtggtaaaatactaacgggaggtaaagcagtcgaaggtgaaggaaactttgtggagcctacgataatcgagatatcagcagatgctgctgtcgtcaaagaagagctatttgctccggttctatatgttctaaagtttaagtcatttggagaggctgttgcgataaacaactcggttcctcaaggtctaagcagctcgatattcactcggaaccctgaaaacatcttcaggtggatcggaccactgggaagtgactgtggcattgtgaatgtgaacataccgacgaatggagctgagattggtggagcttttggaggcgagaaagcgactggtggtggtcgtgaagctggaagcgactcatggaaacagtacatgcgtcgatcgacttgtaccatcaactatggaaacgagttacctctagcgcaaggaattaacttcggttagatttttcagagatttactcgttaattaataatgttatgttggttcgatttcgatacttgtattgtatgccttgttctctccaagcctttgacttaagatgattacgcttttaatatatataaaaaaatattgaatatattttgattgttaatttg

SEQ ID NO: 25416 - protein, 508 aa, Arabidopsis thaliana; identical to SEQ ID NO: 24267
  peptide (1)..(508): Ceres Seq. ID no. 13487594

SEQ ID NO: 25417 - protein, 436 aa, Arabidopsis thaliana; identical to SEQ ID NO: 24268
  peptide (1)..(436): Ceres Seq. ID no. 13487595

SEQ ID NO: 25418 - protein, 403 aa, Arabidopsis thaliana
  peptide (1)..(403): Ceres Seq. ID no. 13487596
MGKILAEGIGEVQEVIDMCDFAVGLSRQLNGSVIPSERPNHMMLEMWNPLGIVGVITAFNFPCAVLGWNACIALVCGNCVVWKGAPTTPLITIAMTKLVAEVLEKNNLPGAIFTAMCGGAEIGEAIAKDTRIPLVSFTGSSRVGSMVQQTVNARSGKTLLELSGNNAIIVMDDADIQLAARSVLFAAVGTAGQRCTTCRRLLLHESVYDKVLEQLLTSYKQVKIGNPLEKGTLLGPLHTPESKKNFEKGIEVIKSQGGKILTGGKAVEGEGNFVEPTIIEISADAAVVKEELFAPVLYVLKFKSFGEAVAINNSVPQGLSSSIFTRNPENIFRWIGPLGSDCGIVNVNIPTNGAEIGGAFGGEKATGGGREAGSDSWKQYMRRSTCTINYGNELPLAQGINFG

SEQ ID NO: 25419 - DNA, 1550 bp, Arabidopsis thaliana
  misc_feature (1)..(1550): Ceres Seq. ID no. 12327277
  misc_feature (1)..(1550): Ortholog of  Ceres SEQ ID NO 14316239 as cited in SEQ ID NO 54472
  misc_feature (1)..(1550): Ortholog of  Ceres SEQ ID NO 13654809 as cited in SEQ ID NO 62798
gagactgttttagctacggtcagcttttctctagcgtcggggcctcgatctcttgatttgagcttttcttaggtctgtctctctctgtacactctctccgccgtcgtatctcgccgtcgatttcaatttttccgacgatatgaagctcaccgttaaaactctcaagggcagtcattttgaaattagggttttaccctccgatacgataatggcggtgaagaagaatatagaagattcacaaggaaaagacaattatccatgtgggcagcaattgttgattcacaatggaaaagttttgaaagatgaaactagcctggtggagaacaaagttacggaggaaggatttctcgtcgttatgcttagcaagagcaaatctggaggttcagctggtcaggcttcggttcagacttcttctgtttcacagcctgtttccgctaccacatcttcgactaagcctgcagctccatctacaacccagtcttcacctgttcctgcttcacctattcctgctcaagaacaaccggcggcacagactgacacctatggacaagctgcgtcaacattagttagtggtagtagtcttgagcaaatggtccaacagataatggaaatgggaggtggaagttgggacaaagaaacagttactcgtgcacttcgtgcagcttataacaaccctgagagagcagtggattatttgtactctggaattcctcaaactgctgaagtagctgtgccagtacctgaggctcagattgcaggatccggtgcagcccctgttgcacctgcatctggaggacctaactcatctcctttggatttatttcctcaggaaacagttgctgctgctggctctggagatcttgggacacttgaatttcttagaaacaatgaccagttccaacaattacgcaccatggtccattccaaccctcaaattcttcagcccatgcttcaggaacttggaaagcaaaaccctcaacttctgaggctaattcaagaaaaccaggcagagtttcttcagttagtaaatgagccctatgagggttctgacggggagggggacatgttcgatcaacccgagcaagaaatgccacatgccattaacgttaccccagcagaacaagaagcgattcaacggctcgaggcaatgggatttgatagagccttagtaatagaagcgttcctcgcatgtgaccgaaatgaagaattggcagctaactatctattggagaactcaggtgactttgaagactgagttcacaaaacgttatctcttcttcgaaaaagttttggctcttttcttacgttgaattacatatcttccgtgaattaatgtgtgggatttgatctctctctctctgtgacttagtttgtcctttttttgttttgaatattattttctccgtttgcgatgggggcggttgttacgtttgtgatagatattgaagcagagagatacaaaagtgtgatcacataattctcgagggataaacataaagtgtaatcgatagatatttatcctaaccaacatgttcctatgttgttgtgat

SEQ ID NO: 25420 - protein, 371 aa, Arabidopsis thaliana
  peptide (1)..(371): Ceres Seq. ID no. 12327278
MKLTVKTLKGSHFEIRVLPSDTIMAVKKNIEDSQGKDNYPCGQQLLIHNGKVLKDETSLVENKVTEEGFLVVMLSKSKSGGSAGQASVQTSSVSQPVSATTSSTKPAAPSTTQSSPVPASPIPAQEQPAAQTDTYGQAASTLVSGSSLEQMVQQIMEMGGGSWDKETVTRALRAAYNNPERAVDYLYSGIPQTAEVAVPVPEAQIAGSGAAPVAPASGGPNSSPLDLFPQETVAAAGSGDLGTLEFLRNNDQFQQLRTMVHSNPQILQPMLQELGKQNPQLLRLIQENQAEFLQLVNEPYEGSDGEGDMFDQPEQEMPHAINVTPAEQEAIQRLEAMGFDRALVIEAFLACDRNEELAANYLLENSGDFED

SEQ ID NO: 25421 - protein, 348 aa, Arabidopsis thaliana
  peptide (1)..(348): Ceres Seq. ID no. 12327279
MAVKKNIEDSQGKDNYPCGQQLLIHNGKVLKDETSLVENKVTEEGFLVVMLSKSKSGGSAGQASVQTSSVSQPVSATTSSTKPAAPSTTQSSPVPASPIPAQEQPAAQTDTYGQAASTLVSGSSLEQMVQQIMEMGGGSWDKETVTRALRAAYNNPERAVDYLYSGIPQTAEVAVPVPEAQIAGSGAAPVAPASGGPNSSPLDLFPQETVAAAGSGDLGTLEFLRNNDQFQQLRTMVHSNPQILQPMLQELGKQNPQLLRLIQENQAEFLQLVNEPYEGSDGEGDMFDQPEQEMPHAINVTPAEQEAIQRLEAMGFDRALVIEAFLACDRNEELAANYLLENSGDFED

SEQ ID NO: 25422 - protein, 299 aa, Arabidopsis thaliana
  peptide (1)..(299): Ceres Seq. ID no. 12327280
MLSKSKSGGSAGQASVQTSSVSQPVSATTSSTKPAAPSTTQSSPVPASPIPAQEQPAAQTDTYGQAASTLVSGSSLEQMVQQIMEMGGGSWDKETVTRALRAAYNNPERAVDYLYSGIPQTAEVAVPVPEAQIAGSGAAPVAPASGGPNSSPLDLFPQETVAAAGSGDLGTLEFLRNNDQFQQLRTMVHSNPQILQPMLQELGKQNPQLLRLIQENQAEFLQLVNEPYEGSDGEGDMFDQPEQEMPHAINVTPAEQEAIQRLEAMGFDRALVIEAFLACDRNEELAANYLLENSGDFED

SEQ ID NO: 25423 - DNA, 1555 bp, Arabidopsis thaliana
  misc_feature (1)..(1555): Ceres Seq. ID no. 12357558
  misc_feature (1)..(1555): Ortholog of  Ceres SEQ ID NO 14302216 as cited in SEQ ID NO 66456
atcgaattttctgccacaaagaattttttgaaaactcagattttttattttgttttcagaacatgattggtgaggcaattgctaaaattaattagtacttatgtgttttatgtttgattttttgattagaaaatggacatttagtccgattcttatttgtttgtgttttttttttgtagacgcaataagctatcttcagcctaaactttctggaaattttcatcattagcaacctgaaattatcttaatttgtatataagcaaaactataaatattagtaaagatggaggagatgtcacctgataatatacatggagtcattttagctgtgtcttcgagtatattcatcggttctagcttcatcatcaagaaaaaaggtcttaagaaggccggtgttagcggcgccagagcaggtgaaggaggatatggatacttatatgaaccttggtggtgggctggaatgataacaatgattgttggggagatagccaattttgcagcatatgcatttgcaccggctattctagtaacacctttgggagctttaagtattattttcagcgcagtgctagcacattttattttggaagagaagttgcatatgtttggtatacttggttgtgtcctctgtgttgttggatctacaacgattgttttacatgctcctcacgagcaaggcattgaatccgtcaagcaagtatggcacctggctactgaaccaggtttccttgcatattctgctgtggtcttggttgtggtgcttgcattgatcttctactacgagccgcgttatgggaagacgcatatgatagtatatgttgggatttgctctttaatgggctctcttacagttatgagtgttaaagctgtggccatcgccataaagctgactttttcagggatgaaccagttcaagtactttcatgcatggatattcatcattgtagtgaccatatgttgcattttgcaaatcaactacttgaacaaggctctggataatttcaacacagcagtcatatctccagtgtactatgttatgtttacaacattcaccatcttagctagtatgatcatgttcaaggactgggcttctcaaagtggattgcaaattgctaccgagctatgtggctttgtgaccattttgtcaggaacttttcttctccacaagacaaaagacatgggaaacagtaccagcttacgcggctccacatcacactcgcctagagacactcctgtcttcataaactcaggttccagtcgcagctcccattccactagacctgcaatactataatcacacggctacgatagtagatcatctaacggtctagaacgaggcaacacgacttcaaaagcctcaaagagaactttttttgggtgacaaatgagaaaaaaaacagagcaaatggggtttaattaaggctataatttgttttctggataacggaaggtttagtgaatgatttgttagggatactatttgattgattgcttcatgttgatttgtttctaatattttttgtttgtttctcatatgagatataaagaaagtttt

SEQ ID NO: 25424 - protein, 336 aa, Arabidopsis thaliana
  peptide (1)..(336): Ceres Seq. ID no. 12357559
MEEMSPDNIHGVILAVSSSIFIGSSFIIKKKGLKKAGVSGARAGEGGYGYLYEPWWWAGMITMIVGEIANFAAYAFAPAILVTPLGALSIIFSAVLAHFILEEKLHMFGILGCVLCVVGSTTIVLHAPHEQGIESVKQVWHLATEPGFLAYSAVVLVVVLALIFYYEPRYGKTHMIVYVGICSLMGSLTVMSVKAVAIAIKLTFSGMNQFKYFHAWIFIIVVTICCILQINYLNKALDNFNTAVISPVYYVMFTTFTILASMIMFKDWASQSGLQIATELCGFVTILSGTFLLHKTKDMGNSTSLRGSTSHSPRDTPVFINSGSSRSSHSTRPAIL

SEQ ID NO: 25425 - protein, 333 aa, Arabidopsis thaliana
  peptide (1)..(333): Ceres Seq. ID no. 12357560
MSPDNIHGVILAVSSSIFIGSSFIIKKKGLKKAGVSGARAGEGGYGYLYEPWWWAGMITMIVGEIANFAAYAFAPAILVTPLGALSIIFSAVLAHFILEEKLHMFGILGCVLCVVGSTTIVLHAPHEQGIESVKQVWHLATEPGFLAYSAVVLVVVLALIFYYEPRYGKTHMIVYVGICSLMGSLTVMSVKAVAIAIKLTFSGMNQFKYFHAWIFIIVVTICCILQINYLNKALDNFNTAVISPVYYVMFTTFTILASMIMFKDWASQSGLQIATELCGFVTILSGTFLLHKTKDMGNSTSLRGSTSHSPRDTPVFINSGSSRSSHSTRPAIL

SEQ ID NO: 25426 - protein, 277 aa, Arabidopsis thaliana
  peptide (1)..(277): Ceres Seq. ID no. 12357561
MITMIVGEIANFAAYAFAPAILVTPLGALSIIFSAVLAHFILEEKLHMFGILGCVLCVVGSTTIVLHAPHEQGIESVKQVWHLATEPGFLAYSAVVLVVVLALIFYYEPRYGKTHMIVYVGICSLMGSLTVMSVKAVAIAIKLTFSGMNQFKYFHAWIFIIVVTICCILQINYLNKALDNFNTAVISPVYYVMFTTFTILASMIMFKDWASQSGLQIATELCGFVTILSGTFLLHKTKDMGNSTSLRGSTSHSPRDTPVFINSGSSRSSHSTRPAIL

SEQ ID NO: 25427 - DNA, 1643 bp, Arabidopsis thaliana
  misc_feature (1)..(1643): Ceres Seq. ID no. 13487589
  misc_feature (1)..(1643): Ortholog of  Ceres SEQ ID NO 14311313 as cited in SEQ ID NO 53503
  misc_feature (1)..(1643): Ortholog of  Ceres SEQ ID NO 14311625 as cited in SEQ ID NO 55184
aaactgactatgaaagcggaaaaagttatggagagagagatcgagacaacgccaatagagcctcttagcccaatgtcacatatgctaagttcgccaaatttcttcattgtcataacttttgggtttaaaactcgatgcaaccgatcggcctttgttgatggcatcaacaacacattgatcaatgctcccagattctccagtaaaatggagataaattataagaaaaaaggagaaccggtctggattcctgttaaacttcgagtagatgatcatattattgtgccggatcttgaatattccaacattcaaaatcctgatcagttcgtagaagactatacttcaaacatagctaatattccaatggacatgtccaaacctctttgggaatttcatttactcaacatgaagacatcaaaagcagaatctttggctatagtaaaaatacatcactccattggtgatgggatgtctcttatgtccctactacttgcttgttcacgaaaaatatcagaccctgacgcgctagtttctaataccacggctacaaaaaagccagctgattccatggcttggtggttgtttgttgggttttggtttatgataagagtcaccttcaccactattgttgagttttccaagttaatgcttacagtatgctttttggaagataccaaaaaccctcttatgggtaacccgagtgatggatttcaatcttggaaggttgtccatcggataataagttttgaggatgtcaagttaataaaggacacaatgaacatgaaggtgaatgatgttcttcttggaatgacacaagcaggtctttcaagatatttgagtagcaaatatgatggatcaacggctgagaagaaaaagatcttagaaaaactccgtgttcgtggtgccgtagctataaacttaagaccagcaacaaagatagaggatttggctgatatgatggcgaagggttcaaagtgtagatggggaaacttcataggaacggttatatttccgttgtgggtgaaatcagagaaagatccgttggagtacattcgacgagccaaagctacgatggataggaaaaaaatatctctggaagctttttttttctatggaattattaaattcaccttgaaattttttggaggaaaggcagtagaagcttttggaaagaggatatttggtcacacatcattggcattttcaaatgtgaaaggtcccgatgaagaaataagtttttttcaccatccgatttcatatatcgcaggaagtgcattagttggagcacaagctctcaatatccattttataagctacgtagacaagattgtcatcaatctagctgttgacacaacaacgattcaagatcctaatcgactatgtgatgatatggtggaagcacttgagatcatcaaatctgccacacaaggggaaatatttcacaaaacggaagtttgaaacacatcacctgatgtttgatcagggttatgtaatatataactatatgaagttttgtatttgcaatgaatttttttatggagtatgataaccaaaatatgtggtgaagtgtaagtttgtttgtttggtttgatcttaggtgttttatgaacagttggcaaaatggtaaaagggcataacaaaagatc

SEQ ID NO: 25428 - protein, 484 aa, Arabidopsis thaliana
  peptide (1)..(484): Ceres Seq. ID no. 13487590
KLTMKAEKVMEREIETTPIEPLSPMSHMLSSPNFFIVITFGFKTRCNRSAFVDGINNTLINAPRFSSKMEINYKKKGEPVWIPVKLRVDDHIIVPDLEYSNIQNPDQFVEDYTSNIANIPMDMSKPLWEFHLLNMKTSKAESLAIVKIHHSIGDGMSLMSLLLACSRKISDPDALVSNTTATKKPADSMAWWLFVGFWFMIRVTFTTIVEFSKLMLTVCFLEDTKNPLMGNPSDGFQSWKVVHRIISFEDVKLIKDTMNMKVNDVLLGMTQAGLSRYLSSKYDGSTAEKKKILEKLRVRGAVAINLRPATKIEDLADMMAKGSKCRWGNFIGTVIFPLWVKSEKDPLEYIRRAKATMDRKKISLEAFFFYGIIKFTLKFFGGKAVEAFGKRIFGHTSLAFSNVKGPDEEISFFHHPISYIAGSALVGAQALNIHFISYVDKIVINLAVDTTTIQDPNRLCDDMVEALEIIKSATQGEIFHKTEV

SEQ ID NO: 25429 - protein, 481 aa, Arabidopsis thaliana
  peptide (1)..(481): Ceres Seq. ID no. 13487591
MKAEKVMEREIETTPIEPLSPMSHMLSSPNFFIVITFGFKTRCNRSAFVDGINNTLINAPRFSSKMEINYKKKGEPVWIPVKLRVDDHIIVPDLEYSNIQNPDQFVEDYTSNIANIPMDMSKPLWEFHLLNMKTSKAESLAIVKIHHSIGDGMSLMSLLLACSRKISDPDALVSNTTATKKPADSMAWWLFVGFWFMIRVTFTTIVEFSKLMLTVCFLEDTKNPLMGNPSDGFQSWKVVHRIISFEDVKLIKDTMNMKVNDVLLGMTQAGLSRYLSSKYDGSTAEKKKILEKLRVRGAVAINLRPATKIEDLADMMAKGSKCRWGNFIGTVIFPLWVKSEKDPLEYIRRAKATMDRKKISLEAFFFYGIIKFTLKFFGGKAVEAFGKRIFGHTSLAFSNVKGPDEEISFFHHPISYIAGSALVGAQALNIHFISYVDKIVINLAVDTTTIQDPNRLCDDMVEALEIIKSATQGEIFHKTEV

SEQ ID NO: 25430 - protein, 475 aa, Arabidopsis thaliana
  peptide (1)..(475): Ceres Seq. ID no. 13487592
MEREIETTPIEPLSPMSHMLSSPNFFIVITFGFKTRCNRSAFVDGINNTLINAPRFSSKMEINYKKKGEPVWIPVKLRVDDHIIVPDLEYSNIQNPDQFVEDYTSNIANIPMDMSKPLWEFHLLNMKTSKAESLAIVKIHHSIGDGMSLMSLLLACSRKISDPDALVSNTTATKKPADSMAWWLFVGFWFMIRVTFTTIVEFSKLMLTVCFLEDTKNPLMGNPSDGFQSWKVVHRIISFEDVKLIKDTMNMKVNDVLLGMTQAGLSRYLSSKYDGSTAEKKKILEKLRVRGAVAINLRPATKIEDLADMMAKGSKCRWGNFIGTVIFPLWVKSEKDPLEYIRRAKATMDRKKISLEAFFFYGIIKFTLKFFGGKAVEAFGKRIFGHTSLAFSNVKGPDEEISFFHHPISYIAGSALVGAQALNIHFISYVDKIVINLAVDTTTIQDPNRLCDDMVEALEIIKSATQGEIFHKTEV

SEQ ID NO: 25431 - DNA, 2217 bp, Arabidopsis thaliana
  misc_feature (1)..(2217): Ceres Seq. ID no. 12395520
  misc_feature (1)..(2217): Ortholog of  Ceres SEQ ID NO 15179672 as cited in SEQ ID NO 0
atagagatttggttttttgattcttccaatctcactctctctgtctttctctctccatcaaataccaaattatctggaagctgagtacatcttgttttctgctcattcctctgtttcaacaatggagagtactattgttatgatgatgatgataacaagatctttcttttgcttcttgggatttttatgccttctctgctcttctgttcacggattgctttctcctaaaggtgttaactttgaagtgcaagctttgatggacataaaagcttcattacatgatcctcatggtgttcttgataactgggatagagatgctgttgatccttgtagttggacaatggtcacttgttcttctgaaaactttgtcattggcttaggcacaccaagtcagaatttatctggtacactatctccaagcattaccaacttaacaaatcttcggattgtgctgttgcagaacaacaacataaaaggaaaaattcctgctgagattggtcggcttacgaggcttgagactcttgatctttctgataatttcttccacggtgaaattcctttttcagtaggctatctacaaagcctgcaatatctgaggcttaacaacaattctctctctggagtgtttcctctgtcactatctaatatgactcaacttgcctttcttgatttatcatacaacaatcttagtggtcctgttccaagatttgctgcaaagacgtttagcatcgttgggaacccgctgatatgtccaacgggtaccgaaccagactgcaatggaacaacattgatacctatgtctatgaacttgaatcaaactggagttcctttatacgccggtggatcgaggaatcacaaaatggcaatcgctgttggatccagcgttgggactgtatcattaatcttcattgctgttggtttgtttctctggtggagacaaagacataaccaaaacacattctttgatgttaaagatgggaatcatcatgaggaagtttcacttggaaacctgaggagatttggtttcagggagcttcagattgcgaccaataacttcagcagtaagaacttattggggaaaggtggctatggaaatgtatacaaaggaatacttggagatagtacagtggttgcagtgaaaaggcttaaagatggaggagcattgggaggagagattcagtttcagacagaagttgaaatgatcagtttagctgttcatcgaaatctcttaagactctacggtttctgcatcacacaaactgagaagcttctagtttatccttatatgtctaatggaagcgttgcatctcgaatgaaagcaaaacctgttcttgactggagcataaggaagaggatagccataggagctgcaagagggcttgtgtatctccatgagcaatgtgatccgaagattatccaccgcgatgtcaaagcagcgaatatacttcttgatgactactgtgaagctgtggttggcgattttggtttagctaaactcttggatcatcaagattctcatgtgacaaccgcggttagaggcacggtgggtcacattgctccagagtatctctcaactggtcaatcctctgagaaaacagatgtttttggcttcgggattcttcttcttgagcttgtaaccggacaaagagcttttgagtttggtaaagcggctaaccagaaaggtgtgatgcttgattgggttaaaaagattcatcaagagaagaaacttgagctacttgtggataaagagttgttgaagaagaagagctacgatgagattgagttagacgaaatggtaagagtagctttgttgtgcacacagtacctgccaggacatagaccaaaaatgtctgaagttgttcgaatgctggaaggagatggacttgcagagaaatgggaagcttctcaaagatcagacagtgtttcaaaatgtagcaacaggataaatgaattgatgtcatcttcagacagatactctgatcttaccgatgactctagtttacttgtgcaagcaatggagctctctggtcctagatgaaatctatacatgaatctgaagaagaagaagaacatgcatctgtttcttgaatcaagagggattcttgtttttttgtataatagagaggttttttggagggaaatgttgtgtctctgtaactgtataggcttgttgtgtaagaagttattactgcacttagggttaattcaaagttcttt

SEQ ID NO: 25432 - protein, 638 aa, Arabidopsis thaliana
  peptide (1)..(638): Ceres Seq. ID no. 12395521
MESTIVMMMMITRSFFCFLGFLCLLCSSVHGLLSPKGVNFEVQALMDIKASLHDPHGVLDNWDRDAVDPCSWTMVTCSSENFVIGLGTPSQNLSGTLSPSITNLTNLRIVLLQNNNIKGKIPAEIGRLTRLETLDLSDNFFHGEIPFSVGYLQSLQYLRLNNNSLSGVFPLSLSNMTQLAFLDLSYNNLSGPVPRFAAKTFSIVGNPLICPTGTEPDCNGTTLIPMSMNLNQTGVPLYAGGSRNHKMAIAVGSSVGTVSLIFIAVGLFLWWRQRHNQNTFFDVKDGNHHEEVSLGNLRRFGFRELQIATNNFSSKNLLGKGGYGNVYKGILGDSTVVAVKRLKDGGALGGEIQFQTEVEMISLAVHRNLLRLYGFCITQTEKLLVYPYMSNGSVASRMKAKPVLDWSIRKRIAIGAARGLVYLHEQCDPKIIHRDVKAANILLDDYCEAVVGDFGLAKLLDHQDSHVTTAVRGTVGHIAPEYLSTGQSSEKTDVFGFGILLLELVTGQRAFEFGKAANQKGVMLDWVKKIHQEKKLELLVDKELLKKKSYDEIELDEMVRVALLCTQYLPGHRPKMSEVVRMLEGDGLAEKWEASQRSDSVSKCSNRINELMSSSDRYSDLTDDSSLLVQAMELSGPR

SEQ ID NO: 25433 - protein, 632 aa, Arabidopsis thaliana
  peptide (1)..(632): Ceres Seq. ID no. 12395522
MMMMITRSFFCFLGFLCLLCSSVHGLLSPKGVNFEVQALMDIKASLHDPHGVLDNWDRDAVDPCSWTMVTCSSENFVIGLGTPSQNLSGTLSPSITNLTNLRIVLLQNNNIKGKIPAEIGRLTRLETLDLSDNFFHGEIPFSVGYLQSLQYLRLNNNSLSGVFPLSLSNMTQLAFLDLSYNNLSGPVPRFAAKTFSIVGNPLICPTGTEPDCNGTTLIPMSMNLNQTGVPLYAGGSRNHKMAIAVGSSVGTVSLIFIAVGLFLWWRQRHNQNTFFDVKDGNHHEEVSLGNLRRFGFRELQIATNNFSSKNLLGKGGYGNVYKGILGDSTVVAVKRLKDGGALGGEIQFQTEVEMISLAVHRNLLRLYGFCITQTEKLLVYPYMSNGSVASRMKAKPVLDWSIRKRIAIGAARGLVYLHEQCDPKIIHRDVKAANILLDDYCEAVVGDFGLAKLLDHQDSHVTTAVRGTVGHIAPEYLSTGQSSEKTDVFGFGILLLELVTGQRAFEFGKAANQKGVMLDWVKKIHQEKKLELLVDKELLKKKSYDEIELDEMVRVALLCTQYLPGHRPKMSEVVRMLEGDGLAEKWEASQRSDSVSKCSNRINELMSSSDRYSDLTDDSSLLVQAMELSGPR

SEQ ID NO: 25434 - protein, 631 aa, Arabidopsis thaliana
  peptide (1)..(631): Ceres Seq. ID no. 12395523
MMMITRSFFCFLGFLCLLCSSVHGLLSPKGVNFEVQALMDIKASLHDPHGVLDNWDRDAVDPCSWTMVTCSSENFVIGLGTPSQNLSGTLSPSITNLTNLRIVLLQNNNIKGKIPAEIGRLTRLETLDLSDNFFHGEIPFSVGYLQSLQYLRLNNNSLSGVFPLSLSNMTQLAFLDLSYNNLSGPVPRFAAKTFSIVGNPLICPTGTEPDCNGTTLIPMSMNLNQTGVPLYAGGSRNHKMAIAVGSSVGTVSLIFIAVGLFLWWRQRHNQNTFFDVKDGNHHEEVSLGNLRRFGFRELQIATNNFSSKNLLGKGGYGNVYKGILGDSTVVAVKRLKDGGALGGEIQFQTEVEMISLAVHRNLLRLYGFCITQTEKLLVYPYMSNGSVASRMKAKPVLDWSIRKRIAIGAARGLVYLHEQCDPKIIHRDVKAANILLDDYCEAVVGDFGLAKLLDHQDSHVTTAVRGTVGHIAPEYLSTGQSSEKTDVFGFGILLLELVTGQRAFEFGKAANQKGVMLDWVKKIHQEKKLELLVDKELLKKKSYDEIELDEMVRVALLCTQYLPGHRPKMSEVVRMLEGDGLAEKWEASQRSDSVSKCSNRINELMSSSDRYSDLTDDSSLLVQAMELSGPR

SEQ ID NO: 25435 - DNA, 1194 bp, Arabidopsis thaliana
  misc_feature (1)..(1194): Ceres Seq. ID no. 12327003
  misc_feature (1)..(1194): Ortholog of  Ceres SEQ ID NO 14306617 as cited in SEQ ID NO 53026
actctgttttcatcatctctttctctcgtctctctcaaaccctaaatacactctttctcttcttgttgtctccattctctctgtgtcatcaagcttcttttttgtgtgggttatttgaaagacactttctctgctggtatcattggagtctagggttttgttattgacatgcgtggtgtgtcagaattggaggtggggaagagtaatcttccggcggagagtgagctggaattgggattagggctcagcctcggtggtggcgcgtggaaagagcgtgggaggattcttactgctaaggattttccttccgttgggtctaaacgctctgctgaatcttcctctcaccaaggagcttctcctcctcgttcaagtcaagtggtaggatggccaccaattgggttacacaggatgaacagtttggttaataaccaagctatgaaggcagcaagagcggaagaaggagacggggagaagaaagttgtgaagaatgatgagctcaaagatgtgtcaatgaaggtgaatccgaaagttcagggcttagggtttgttaaggtgaatatggatggagttggtataggcagaaaagtggatatgagagctcattcgtcttacgaaaacttggctcagacgcttgaggaaatgttctttggaatgacaggtactacttgtcgagaaaaggttaaacctttaaggcttttagatggatcatcagactttgtactcacttatgaagataaggaaggggattggatgcttgttggagatgttccatggagaatgtttatcaactcggtgaaaaggcttcggatcatgggaacctcagaagctagtggactagctccaagacgtcaagagcagaaggatagacaaagaaacaaccctgtttagcttcccttccaaagctggcattgtttatgtattgtttgaggtttgcaatttactcgatactttttgaagaaagtattttggagaatatggataaaagcatgcagaagcttagatatgatttgaatccggttttcggatatggttttgcttaggtcattcaattcgtagttttccagtttgtttcttctttggctgtgtaccaattatctatgttctgtgagagaaagctcttgtttatttgttctctcagattgtaaatagttgaagttatctaattaatgtgataagagttatgtttatgattcc

SEQ ID NO: 25436 - protein, 239 aa, Arabidopsis thaliana
  peptide (1)..(239): Ceres Seq. ID no. 12327004
MRGVSELEVGKSNLPAESELELGLGLSLGGGAWKERGRILTAKDFPSVGSKRSAESSSHQGASPPRSSQVVGWPPIGLHRMNSLVNNQAMKAARAEEGDGEKKVVKNDELKDVSMKVNPKVQGLGFVKVNMDGVGIGRKVDMRAHSSYENLAQTLEEMFFGMTGTTCREKVKPLRLLDGSSDFVLTYEDKEGDWMLVGDVPWRMFINSVKRLRIMGTSEASGLAPRRQEQKDRQRNNPV

SEQ ID NO: 25437 - protein, 159 aa, Arabidopsis thaliana
  peptide (1)..(159): Ceres Seq. ID no. 12327005
MNSLVNNQAMKAARAEEGDGEKKVVKNDELKDVSMKVNPKVQGLGFVKVNMDGVGIGRKVDMRAHSSYENLAQTLEEMFFGMTGTTCREKVKPLRLLDGSSDFVLTYEDKEGDWMLVGDVPWRMFINSVKRLRIMGTSEASGLAPRRQEQKDRQRNNPV

SEQ ID NO: 25438 - protein, 150 aa, Arabidopsis thaliana
  peptide (1)..(150): Ceres Seq. ID no. 12327006
MKAARAEEGDGEKKVVKNDELKDVSMKVNPKVQGLGFVKVNMDGVGIGRKVDMRAHSSYENLAQTLEEMFFGMTGTTCREKVKPLRLLDGSSDFVLTYEDKEGDWMLVGDVPWRMFINSVKRLRIMGTSEASGLAPRRQEQKDRQRNNPV

SEQ ID NO: 25439 - DNA, 685 bp, Arabidopsis thaliana
  misc_feature (1)..(685): Ceres Seq. ID no. 12336133
  misc_feature (1)..(685): Ortholog of  Ceres SEQ ID NO 12635643 as cited in SEQ ID NO 340
  misc_feature (1)..(685): Ortholog of  Ceres SEQ ID NO 13661877 as cited in SEQ ID NO 61689
aagttgtcttccacaacaaaagagtaccctgaaacagatctttcgtataatcagtgacgtagagatcgaagacgatgatgagctctgcatccgccatgaaagctgttggatttttgcttctgcttaccattctaacattagcttatgcgaagaagtcaggtgatgtgacagagttgcagattggtgttaagtacaagcctcagaaatgtgatctccaggctcacaaaggggataagatcaaggttcactatcggggaaagttaactgatggaactgtctttgattcaagttttgagagaggtgaccctattgagtttgagcttggaactggtcaagtcatcccaggatgggaccagggtttattgggagcttgtgtaggtgagaagagaaagttgaaaatcccatccaagcttggttatggtgataacggctcaccaccaaaaatcccgggtggggcgacactgatattcgacaccgagcttgttgctgtgaacggagaaccatccagcgaagcgaaatcaaagaatgagctttgattacaccataattgtttttcatttaaaaggaaaccttgagtagtcatcgatgttggcatttgaatcttaaacagcctagaatcatttactttgctagttgaagacaataattatattttggtcataacattagttatgttggcagttct

SEQ ID NO: 25440 - protein, 153 aa, Arabidopsis thaliana
  peptide (1)..(153): Ceres Seq. ID no. 12336134
MMSSASAMKAVGFLLLLTILTLAYAKKSGDVTELQIGVKYKPQKCDLQAHKGDKIKVHYRGKLTDGTVFDSSFERGDPIEFELGTGQVIPGWDQGLLGACVGEKRKLKIPSKLGYGDNGSPPKIPGGATLIFDTELVAVNGEPSSEAKSKNEL

SEQ ID NO: 25441 - protein, 152 aa, Arabidopsis thaliana
  peptide (1)..(152): Ceres Seq. ID no. 12336135
MSSASAMKAVGFLLLLTILTLAYAKKSGDVTELQIGVKYKPQKCDLQAHKGDKIKVHYRGKLTDGTVFDSSFERGDPIEFELGTGQVIPGWDQGLLGACVGEKRKLKIPSKLGYGDNGSPPKIPGGATLIFDTELVAVNGEPSSEAKSKNEL

SEQ ID NO: 25442 - protein, 146 aa, Arabidopsis thaliana
  peptide (1)..(146): Ceres Seq. ID no. 12336136
MKAVGFLLLLTILTLAYAKKSGDVTELQIGVKYKPQKCDLQAHKGDKIKVHYRGKLTDGTVFDSSFERGDPIEFELGTGQVIPGWDQGLLGACVGEKRKLKIPSKLGYGDNGSPPKIPGGATLIFDTELVAVNGEPSSEAKSKNEL

SEQ ID NO: 25443 - DNA, 1432 bp, Arabidopsis thaliana
  misc_feature (1)..(1432): Ceres Seq. ID no. 12322021
  misc_feature (1)..(1432): Ortholog of  Ceres SEQ ID NO 14315241 as cited in SEQ ID NO 52516
  misc_feature (1)..(1432): Ortholog of  Ceres SEQ ID NO 13594349 as cited in SEQ ID NO 58161
  misc_feature (1)..(1432): Ortholog of  Ceres SEQ ID NO 13663419 as cited in SEQ ID NO 66561
tttgatccaaccatggctcgactccttctcctcttcttcttcttccttattctactccattacgcttcttgttccagacacgaacaagaaaaagaccgaatctttcaccttcccggtgaaccaaacgatgtctccttctctcacttctctggttacattaccgtcaacgagtcagcaggaagagcactattctactggctcactgagtcaccaccgagtgaaaaccctgagtctaagcctcttgtcctctggctcaacggtggacctggttgttcctccgtagcttacggtgccgctgaagaaatcggaccttttagaatcaatcctgatggcaaaactctttaccacaatccttactcttggaacaaattggcgaatttgctcttccttgaatctcctgctggtgttggtttctcgtattcgaatactacctccgatttgtatactgccggagatcagagaactgcggaagatgcttatgtgtttcttgtgaaatggtttgagaggtttcctcaatacaaacacagagagttctacattgctggagaaagctatgcaggtcattatgttcctcagttgtcacagattgtttatgagaaacgcaatccagctatcaactttaaaggcttcattgttgggaatgctgtgattgatgactaccatgattacgtgggtttatttgaatattggtgggctcatgggttgatatctgatctcacttaccacaacttacggatcacgtgtgaatttggatcatccgagcacccgtcctctaaatgcaccaaggccatggaagctgcagacttggagcaaggcaatattgatccttatagcatttacactgtcacttgtaaaaaggaggctgcagctcttaggtctcgcttctcgagagttcgtcatccatggatgtggagagcctatgacccttgcacagagaaatactccggcatgtatttcaattctccggaggttcaaaaggctatgcatgctaatataacaggactagcttatccatggaaagggtgcagtgacatcgttggagagaaatgggcagattctcctctgtctatgcttccaatctacaaagaactcatcgccgcaggtctcaggatatgggttttcagcggagacactgattcagtggttcccattactggaacacgatactccattagagccctcaagttacaaccactctccaaatggtacccttggaacgatgatggacaggttggtggatggagccaagtttacaaagggctgactctggtgacaatacatggagcaggacatgaggtacctcttttccgccctcgtcgagcttttcttctttttcagtcgtttctcgacaacaagccattgccaatgtaaattgtaagacactgtgataagaccagagttttttataataagaagtaagaatctctttttc

SEQ ID NO: 25444 - protein, 456 aa, Arabidopsis thaliana
  peptide (1)..(456): Ceres Seq. ID no. 12322022
FDPTMARLLLLFFFFLILLHYASCSRHEQEKDRIFHLPGEPNDVSFSHFSGYITVNESAGRALFYWLTESPPSENPESKPLVLWLNGGPGCSSVAYGAAEEIGPFRINPDGKTLYHNPYSWNKLANLLFLESPAGVGFSYSNTTSDLYTAGDQRTAEDAYVFLVKWFERFPQYKHREFYIAGESYAGHYVPQLSQIVYEKRNPAINFKGFIVGNAVIDDYHDYVGLFEYWWAHGLISDLTYHNLRITCEFGSSEHPSSKCTKAMEAADLEQGNIDPYSIYTVTCKKEAAALRSRFSRVRHPWMWRAYDPCTEKYSGMYFNSPEVQKAMHANITGLAYPWKGCSDIVGEKWADSPLSMLPIYKELIAAGLRIWVFSGDTDSVVPITGTRYSIRALKLQPLSKWYPWNDDGQVGGWSQVYKGLTLVTIHGAGHEVPLFRPRRAFLLFQSFLDNKPLPM

SEQ ID NO: 25445 - protein, 452 aa, Arabidopsis thaliana
  peptide (1)..(452): Ceres Seq. ID no. 12322023
MARLLLLFFFFLILLHYASCSRHEQEKDRIFHLPGEPNDVSFSHFSGYITVNESAGRALFYWLTESPPSENPESKPLVLWLNGGPGCSSVAYGAAEEIGPFRINPDGKTLYHNPYSWNKLANLLFLESPAGVGFSYSNTTSDLYTAGDQRTAEDAYVFLVKWFERFPQYKHREFYIAGESYAGHYVPQLSQIVYEKRNPAINFKGFIVGNAVIDDYHDYVGLFEYWWAHGLISDLTYHNLRITCEFGSSEHPSSKCTKAMEAADLEQGNIDPYSIYTVTCKKEAAALRSRFSRVRHPWMWRAYDPCTEKYSGMYFNSPEVQKAMHANITGLAYPWKGCSDIVGEKWADSPLSMLPIYKELIAAGLRIWVFSGDTDSVVPITGTRYSIRALKLQPLSKWYPWNDDGQVGGWSQVYKGLTLVTIHGAGHEVPLFRPRRAFLLFQSFLDNKPLPM

SEQ ID NO: 25446 - DNA, 1448 bp, Arabidopsis thaliana
  misc_feature (1)..(1448): Ceres Seq. ID no. 13487620
  misc_feature (1)..(1448): Ortholog of  Ceres SEQ ID NO 12465151 as cited in SEQ ID NO 67782
ctcgaagatcagcgagagagagagaagtagattgagaggcgagagagataatggcagatgaaggtaaggaggagacaggaatgggtcaggtcgaggaagatttttctgtgtggaagaagaacacaccatttctctacgatcttttgatctctcacccactcgaatggccatctctcaccgtccattgggttccatcgacgccaaatccttacgtagcagactcttacttcggtgtccacaagcttatactcggtactcatacttccggtagtgctcaagattttctcatggtcgccgacgtcgttaccccgacaccaaacgcagaacctgggataggcggcgctaatcaggatccctttattcctaaggtggagattaggcagaggatacgtgttgatggagaagtgaacagagcgcggtgtatgcctcaaaagccgacgcttgtgggtgcaaagacgagtgggtgtgaggtgtttctgtttgattacgccaaacatgctgcaaagtctcaaacgagtgagtgtgatcctgatctgaggctagtgggacatgacaaggaagggtatggattgtcttggagtcctttcaaggaaggttatcttttgagtggttcacaggatcagaagatctgtctttgggatgtttcagctacaccgcaagataaggttttgaatgcaatgtttgtgtatgagggacatgaaagtgctatcgcagatgtgtcatggcacatgaagaatgagaacctttttggttctgcgggtgaggatggccgattggtgatatgggacacacggacaaaccaaatgcaacaccaagtgaaagttcacgagagagaggtcaactatctatctttcaatccgttcaacgaatgggtattggccacagcttcctcagactccactgttgctttgtttgacctccggaaacttaatgcgccattgcatgtcatgagcagccatgagggagaggtcttccaagtggagtgggatcctaaccatgaaacagtactcgcatcttcaggggaggacagaaggctgatggtctgggacctgaacagggttggagaagagcagcttgagatagagttggatgcagaagatggtccaccagagttactcttctctcacggaggccacaaggctaagatatcagactttgcttggaacaaaaacgagccttgggtcattgcaagtgtagctgaagacaacagtcttcaggtgtggcagatggcagaaagcatctatcgcgatgaagaggatgccgaggacatcaaagaagatattacacaacaatcatgaaaattaagaaacgatttggtctctccattacttaaagtgtcttatcttgctttagccagtttctgaaagacaagctttgcgtctgtattaggattaacatgaatcatctctgtttgttaatgtaaccatgttggattttgttggtttcct

SEQ ID NO: 25447 - protein, 415 aa, Arabidopsis thaliana
  peptide (1)..(415): Ceres Seq. ID no. 13487621
MADEGKEETGMGQVEEDFSVWKKNTPFLYDLLISHPLEWPSLTVHWVPSTPNPYVADSYFGVHKLILGTHTSGSAQDFLMVADVVTPTPNAEPGIGGANQDPFIPKVEIRQRIRVDGEVNRARCMPQKPTLVGAKTSGCEVFLFDYAKHAAKSQTSECDPDLRLVGHDKEGYGLSWSPFKEGYLLSGSQDQKICLWDVSATPQDKVLNAMFVYEGHESAIADVSWHMKNENLFGSAGEDGRLVIWDTRTNQMQHQVKVHEREVNYLSFNPFNEWVLATASSDSTVALFDLRKLNAPLHVMSSHEGEVFQVEWDPNHETVLASSGEDRRLMVWDLNRVGEEQLEIELDAEDGPPELLFSHGGHKAKISDFAWNKNEPWVIASVAEDNSLQVWQMAESIYRDEEDAEDIKEDITQQS

SEQ ID NO: 25448 - protein, 405 aa, Arabidopsis thaliana
  peptide (1)..(405): Ceres Seq. ID no. 13487622
MGQVEEDFSVWKKNTPFLYDLLISHPLEWPSLTVHWVPSTPNPYVADSYFGVHKLILGTHTSGSAQDFLMVADVVTPTPNAEPGIGGANQDPFIPKVEIRQRIRVDGEVNRARCMPQKPTLVGAKTSGCEVFLFDYAKHAAKSQTSECDPDLRLVGHDKEGYGLSWSPFKEGYLLSGSQDQKICLWDVSATPQDKVLNAMFVYEGHESAIADVSWHMKNENLFGSAGEDGRLVIWDTRTNQMQHQVKVHEREVNYLSFNPFNEWVLATASSDSTVALFDLRKLNAPLHVMSSHEGEVFQVEWDPNHETVLASSGEDRRLMVWDLNRVGEEQLEIELDAEDGPPELLFSHGGHKAKISDFAWNKNEPWVIASVAEDNSLQVWQMAESIYRDEEDAEDIKEDITQQS

SEQ ID NO: 25449 - protein, 336 aa, Arabidopsis thaliana
  peptide (1)..(336): Ceres Seq. ID no. 13487623
MVADVVTPTPNAEPGIGGANQDPFIPKVEIRQRIRVDGEVNRARCMPQKPTLVGAKTSGCEVFLFDYAKHAAKSQTSECDPDLRLVGHDKEGYGLSWSPFKEGYLLSGSQDQKICLWDVSATPQDKVLNAMFVYEGHESAIADVSWHMKNENLFGSAGEDGRLVIWDTRTNQMQHQVKVHEREVNYLSFNPFNEWVLATASSDSTVALFDLRKLNAPLHVMSSHEGEVFQVEWDPNHETVLASSGEDRRLMVWDLNRVGEEQLEIELDAEDGPPELLFSHGGHKAKISDFAWNKNEPWVIASVAEDNSLQVWQMAESIYRDEEDAEDIKEDITQQS

SEQ ID NO: 25450 - DNA, 810 bp, Arabidopsis thaliana
  misc_feature (1)..(810): Ceres Seq. ID no. 13486998
  misc_feature (1)..(810): Ortholog of  Ceres SEQ ID NO 13599401 as cited in SEQ ID NO 0
aatactacatgctctaatcacgtccttgtagaggaaaagaaaaaaaaatggctgcttcatcttcctctttcactctctgtaatcacaccacacttcgtactctccctctgagaaagacccttgtcaccaaaacccaattttcagttcccacaaaatcatcagaatctaacttctttggctccacactcactcactcattgtatatctccccagtctcttcctcttctctcaaaggcttaatctttgccaaggttaacaagggtcaggctgcaccagacttcacactaaaggatcaaaacggaaagccggtgagcctcaaaaagtataaagggaagcctgttgttctctacttctaccctgcagatgaaacccctggctgcaccaagcaggcttgtgctttcagagactcttatgagaaattcaagaaagctggtgcagaggtcattggcattagtggagatgactctgcttctcacaaggcgtttgcaagcaaatacaaactaccgtatacattgttaagcgacgaagggaataaggtgagaaaagattggggagtgcctggagacctgtttggagcattgccagggagacagacttacgttcttgacaaaaacggtgttgttcagctcatctacaacaaccagttccagcctgagaaacacatcgacgagaccttgaagtttctcaaagctgcttgatcattctctctttctcttctttcatgcatgtctcatgtctgtctccatgagaccatgaccttcttatattgtttctgttgaatatgaattttcaataataccatgttatacc

SEQ ID NO: 25451 - protein, 216 aa, Arabidopsis thaliana
  peptide (1)..(216): Ceres Seq. ID no. 13486999
MAASSSSFTLCNHTTLRTLPLRKTLVTKTQFSVPTKSSESNFFGSTLTHSLYISPVSSSSLKGLIFAKVNKGQAAPDFTLKDQNGKPVSLKKYKGKPVVLYFYPADETPGCTKQACAFRDSYEKFKKAGAEVIGISGDDSASHKAFASKYKLPYTLLSDEGNKVRKDWGVPGDLFGALPGRQTYVLDKNGVVQLIYNNQFQPEKHIDETLKFLKAA

SEQ ID NO: 25452 - DNA, 1177 bp, Arabidopsis thaliana
  misc_feature (1)..(1177): Ceres Seq. ID no. 12370381
  misc_feature (1)..(1177): Ortholog of  Ceres SEQ ID NO 13599444 as cited in SEQ ID NO 517
  misc_feature (1)..(1177): Ortholog of  Ceres SEQ ID NO 15169431 as cited in SEQ ID NO 60449
  misc_feature (1)..(1177): Ortholog of  Ceres SEQ ID NO 12615444 as cited in SEQ ID NO 62593
  misc_feature (1)..(1177): Ortholog of  Ceres SEQ ID NO 14302204 as cited in SEQ ID NO 63150
agaagtctgagcttaaaccctaaacccctttctccacgatcttccttttcctctctctgcgacttgaagcaaagtttccagaaaaagagatgaacaacgtcaaagttccaaagataccaggtggtggtgccatttcgacgttgcttaaggttgggattattggtgggcttggtctctatggtgctacgcacagtctctacaatgttgaaggaggacatcgagccatcatgttcaatcgtttagtcggtattaaagataaggtttaccctgagggtacacaccttatgattccttggtttgaaaggccggtcatctatgacgttcgtgctcgaccttaccttgttgagagtacatccggaagccgtgatcttcagatggtgaaaattgggcttagggttctcacacgtcccatggcagaccagttacctgaaatctacagaagccttggtgagaactacagcgagagagttctaccttctataatcaacgagactttgaaagctgtggttgctcagtacaatgcaagccagcttattactcagagagaggcggtcagtagggagatcaggaagattctgactgaacgagcagcaaacttcaatgttgcgcttgacgatgtgtccatcacaaacctgacattcgggaaggagttcacagctgccattgaagcaaagcaggtggcggctcaagaggctgagcgggctaagttcattgttgagaaggccgaacaagacaagagaagtgctgttatccgcgcccagggagaagccaagagtgctcagctcattggtcaagcaattgcaaacaaccaagcgtttatcacgctcaggaagatcgaggctgcaagagagattgcacagaccatagcaaactcggcgaacaaggtttacttgagctcagacgatcttttgcttaacctacaagggatgaatttggatgttgatgcaaagaactagagaggtttcttaagtaaaactgcatgtgggtcatttcgtcttttaagttcctagaatccgttggaacaaaagcttgatttgtactactaaatactacttttaaaattcttgggatcagtctatctcaaggtgaaagttgaaaaagaagatactgtcttgctgaatgagttaattgtaataaacttgtcgtttgggggagaaaaacacttgcatttggattt

SEQ ID NO: 25453 - protein, 288 aa, Arabidopsis thaliana
  peptide (1)..(288): Ceres Seq. ID no. 12370382
MNNVKVPKIPGGGAISTLLKVGIIGGLGLYGATHSLYNVEGGHRAIMFNRLVGIKDKVYPEGTHLMIPWFERPVIYDVRARPYLVESTSGSRDLQMVKIGLRVLTRPMADQLPEIYRSLGENYSERVLPSIINETLKAVVAQYNASQLITQREAVSREIRKILTERAANFNVALDDVSITNLTFGKEFTAAIEAKQVAAQEAERAKFIVEKAEQDKRSAVIRAQGEAKSAQLIGQAIANNQAFITLRKIEAAREIAQTIANSANKVYLSSDDLLLNLQGMNLDVDAKN

SEQ ID NO: 25454 - protein, 242 aa, Arabidopsis thaliana
  peptide (1)..(242): Ceres Seq. ID no. 12370383
MFNRLVGIKDKVYPEGTHLMIPWFERPVIYDVRARPYLVESTSGSRDLQMVKIGLRVLTRPMADQLPEIYRSLGENYSERVLPSIINETLKAVVAQYNASQLITQREAVSREIRKILTERAANFNVALDDVSITNLTFGKEFTAAIEAKQVAAQEAERAKFIVEKAEQDKRSAVIRAQGEAKSAQLIGQAIANNQAFITLRKIEAAREIAQTIANSANKVYLSSDDLLLNLQGMNLDVDAKN

SEQ ID NO: 25455 - protein, 223 aa, Arabidopsis thaliana
  peptide (1)..(223): Ceres Seq. ID no. 12370384
MIPWFERPVIYDVRARPYLVESTSGSRDLQMVKIGLRVLTRPMADQLPEIYRSLGENYSERVLPSIINETLKAVVAQYNASQLITQREAVSREIRKILTERAANFNVALDDVSITNLTFGKEFTAAIEAKQVAAQEAERAKFIVEKAEQDKRSAVIRAQGEAKSAQLIGQAIANNQAFITLRKIEAAREIAQTIANSANKVYLSSDDLLLNLQGMNLDVDAKN

SEQ ID NO: 25456 - DNA, 1158 bp, Arabidopsis thaliana
  misc_feature (1)..(1158): Ceres Seq. ID no. 13488122
  misc_feature (1)..(1158): Ortholog of  Ceres SEQ ID NO 14306479 as cited in SEQ ID NO 53033
attcagtcggaccaacttgtgaccgaagaaagcaaattgagactacgcaccaactagtcctttggtttgtatcttaagataaaggtttcttttatggacggttcttcgtttctcgacatctctctcgatctcaacaccaatcctttctccgcaaaacttccgaagaaggaggtctcagttttggcttctactcacttaaagaggaaatggttggagcaagacgagagcgcaagtgagttacgagaggagctaaacagagttaattcagagaacaagaagctaacagagatgttagctagagtctgtgagagctacaacgaactacataatcatttggagaagcttcagagtcgccagagccctgaaatcgagcagaccgatataccgataaagaaaagaaaacaagacccggatgagttcttaggctttcctattggactcagtagtggaaaaactgagaacagctccagcaacgaagatcatcatcatcatcatcagcaacatgagcagaaaaatcagcttctttcatgtaaaagaccagtcactgatagcttcaacaaagcaaaagtttcgactgtctacgtgcctactgaaacatcggacacaagcttgacagttaaagatggatttcaatggaggaaatacggacaaaaggttacaagagacaacccgtcacctagagcttactttagatgctcgtttgcaccgtcttgtccagtaaaaaagaaggtacaacgcagcgcagaggatccatcgttacttgtagcgacatacgaagggacgcataaccacttgggtccaaatgcttctgaaggggatgctacaagccagggtgggtcaagcacagtgactttggatctggttaatggctgtcatagactagcgttggagaaaaacgaaaggaataatacgatgcaagaggttctgattcaacaaatggcgtcatcgttaacaaaagattcgaaatttacagctgctcttgctgctgctatatctgggaggttaatggagcaatctagaacatgaacgtttttagtgaatgtattgtttttgtttgtttagaatgattcttcgttttcgaattgtgtctttcgattaggagataaaagatgtatataaatattataagtagatgaagaaatcgtataagtattcgag

SEQ ID NO: 25457 - protein, 310 aa, Arabidopsis thaliana
  peptide (1)..(310): Ceres Seq. ID no. 13488123
MDGSSFLDISLDLNTNPFSAKLPKKEVSVLASTHLKRKWLEQDESASELREELNRVNSENKKLTEMLARVCESYNELHNHLEKLQSRQSPEIEQTDIPIKKRKQDPDEFLGFPIGLSSGKTENSSSNEDHHHHHQQHEQKNQLLSCKRPVTDSFNKAKVSTVYVPTETSDTSLTVKDGFQWRKYGQKVTRDNPSPRAYFRCSFAPSCPVKKKVQRSAEDPSLLVATYEGTHNHLGPNASEGDATSQGGSSTVTLDLVNGCHRLALEKNERNNTMQEVLIQQMASSLTKDSKFTAALAAAISGRLMEQSRT

SEQ ID NO: 25458 - protein, 245 aa, Arabidopsis thaliana
  peptide (1)..(245): Ceres Seq. ID no. 13488124
MLARVCESYNELHNHLEKLQSRQSPEIEQTDIPIKKRKQDPDEFLGFPIGLSSGKTENSSSNEDHHHHHQQHEQKNQLLSCKRPVTDSFNKAKVSTVYVPTETSDTSLTVKDGFQWRKYGQKVTRDNPSPRAYFRCSFAPSCPVKKKVQRSAEDPSLLVATYEGTHNHLGPNASEGDATSQGGSSTVTLDLVNGCHRLALEKNERNNTMQEVLIQQMASSLTKDSKFTAALAAAISGRLMEQSRT

SEQ ID NO: 25459 - DNA, 1146 bp, Arabidopsis thaliana
  misc_feature (1)..(1146): Ceres Seq. ID no. 12336445
  misc_feature (1)..(1146): Ortholog of  Ceres SEQ ID NO 13599585 as cited in SEQ ID NO 988
  misc_feature (1)..(1146): Ortholog of  Ceres SEQ ID NO 13594624 as cited in SEQ ID NO 55765
  misc_feature (1)..(1146): Ortholog of  Ceres SEQ ID NO 15177682 as cited in SEQ ID NO 0
atttcaaaccacacattcaaactaactctgcaaaagaaaaaaaaactcagagcagaggagatcgagagagacaaagagagacaaagagagagagagagagagagagagagagagagagagagagatcttcaacaagcaatgtctatatccatggcgttattctctccgccgatctcttcctcacttcaaaaccctaatctcatccccaagatctcaacctctcttctctccaccaaacgtttctctctaatctccgtccctagagcttcctccgacaatggtacgacttcccccgtcgtgaaaattccgaaggcctgcgtctgtagctgtagaggaagttccggttaaatctccggcggaaagctcctccgcttctgaaaacggcgccgttggaggtgaagcgactgattcgagtactgagacggtaatcaaatatcaaaatgcgaagtgggttaatggaacttgggatctgaaacagttcgagaaagatggcaaaactgattgggattctgttatcgtttctgaggcaaagaggagaaaatggcttgaagataacccggaaacaacgagtaacgacgagcttgttgtcttcgatacttcgattattccatggtgggcatggatgaagagataccatctacctgaagctgaacttctcaatggtcgtgctgcgatgatagggttcttcatggcttactttgttgatagtcttaccggagtaggacttgttgatcaaatggggaatttcttctgcaaaacactcttgtttgtggctgtagctggagttctcttcatccgtaagaatgaagatttagacaaacttaaggatctgttcgatgagactacgttatatgacaaacaatggcaagctgcatggaaagagccagattcatcaacagtttcttcaaagaagtgaacaagttcttacaatctttcattttcctttttttgttatgcaataatctgtgaatcagtgaaagtttatctctactgaactactgatcttcagattttgtaatctttctgctttaaaaatctctatgaagtagtctcaaagataatgtatcgaaggtctttgacttgtaaagcagacctatttcgttttgacgcttgataatttaatcaataagagattttttttttaat

SEQ ID NO: 25460 - protein, 115 aa, Arabidopsis thaliana
  peptide (1)..(115): Ceres Seq. ID no. 12336446
ISNHTFKLTLQKKKKLRAEEIERDKERQRERERERERERERDLQQAMSISMALFSPPISSSLQNPNLIPKISTSLLSTKRFSLISVPRASSDNGTTSPVVKIPKACVCSCRGSSG

SEQ ID NO: 25461 - protein, 97 aa, Arabidopsis thaliana
  peptide (1)..(97): Ceres Seq. ID no. 12336447
MKRYHLPEAELLNGRAAMIGFFMAYFVDSLTGVGLVDQMGNFFCKTLLFVAVAGVLFIRKNEDLDKLKDLFDETTLYDKQWQAAWKEPDSSTVSSKK

SEQ ID NO: 25462 - protein, 80 aa, Arabidopsis thaliana
  peptide (1)..(80): Ceres Seq. ID no. 12336448
MIGFFMAYFVDSLTGVGLVDQMGNFFCKTLLFVAVAGVLFIRKNEDLDKLKDLFDETTLYDKQWQAAWKEPDSSTVSSKK

SEQ ID NO: 25463 - protein, 69 aa, Arabidopsis thaliana
  peptide (1)..(69): Ceres Seq. ID no. 12336449
MSISMALFSPPISSSLQNPNLIPKISTSLLSTKRFSLISVPRASSDNGTTSPVVKIPKACVCSCRGSSG

SEQ ID NO: 25464 - DNA, 1029 bp, Arabidopsis thaliana
  misc_feature (1)..(1029): Ceres Seq. ID no. 13490799
  misc_feature (1)..(1029): Ortholog of  Ceres SEQ ID NO 13638097 as cited in SEQ ID NO 57043
  misc_feature (1)..(1029): Ortholog of  Ceres SEQ ID NO 13596416 as cited in SEQ ID NO 62177
  misc_feature (1)..(1029): Ortholog of  Ceres SEQ ID NO 13659338 as cited in SEQ ID NO 66875
tttttttttcctttgggactcactgagattactactaccaaatccaacaatggcgatttctttcgcaatcgatccttccatatctccttgcttctccttctcctctccatcttcttcatcaaaaaccttacctttacgaaacaacctccatttccatggcagaccttcaccaatatctccactcatttcaaaacccagtcgaaaattcccaatcttctctgctcaccaaactaataacagtgaagaagcgaattcaaagcagcaagcagatgtaaaaaccctaattaggtcatataaacaagctcttctcaacggagacgaaacctcagttacagaaatcgaaacgatgttttgcaaaatcgagaaggagaagaataaaatggatcaaaaggttttatctttatcaatgaagatagcttcagagaaagagatgaaaattcgattacaagctgattttgataatacaaggaagaagcttgataaagataggcttagtacagagtctaatgcaaaagttcagattcttaagtctcttttacctattattgatagttttgagaaagctaagttacaggttagagttgatactgataaggagaagaagattgatacgagttatcaagggatttataggcaatttgttgaggttttgagatatcttcgtgtttcggttattgcaactgttggcaagccttttgatcctttgttgcacgaggctatttcacgggaagaatctgaggcggttaaagcagggataataaccgaggagctgaacaagggatttgttctaggagatcgtgttctgagaccagcaaaggttaaagtttctttaggacccgtcaacaagaagactccttcagctgctgaggaaataacaccttctgcttgagttcgatgtcgggtaaaagtttcaatgtcttgtgctaatgtccattttttattcacctatcaaagggataccaaaattgcaacaatgtctaatgagaaagttctttggcttcagagtttatgattcatgttttacgattt

SEQ ID NO: 25465 - protein, 295 aa, Arabidopsis thaliana
  peptide (1)..(295): Ceres Seq. ID no. 13490800
FFFLWDSLRLLLPNPTMAISFAIDPSISPCFSFSSPSSSSKTLPLRNNLHFHGRPSPISPLISKPSRKFPIFSAHQTNNSEEANSKQQADVKTLIRSYKQALLNGDETSVTEIETMFCKIEKEKNKMDQKVLSLSMKIASEKEMKIRLQADFDNTRKKLDKDRLSTESNAKVQILKSLLPIIDSFEKAKLQVRVDTDKEKKIDTSYQGIYRQFVEVLRYLRVSVIATVGKPFDPLLHEAISREESEAVKAGIITEELNKGFVLGDRVLRPAKVKVSLGPVNKKTPSAAEEITPSA

SEQ ID NO: 25466 - protein, 279 aa, Arabidopsis thaliana
  peptide (1)..(279): Ceres Seq. ID no. 13490801
MAISFAIDPSISPCFSFSSPSSSSKTLPLRNNLHFHGRPSPISPLISKPSRKFPIFSAHQTNNSEEANSKQQADVKTLIRSYKQALLNGDETSVTEIETMFCKIEKEKNKMDQKVLSLSMKIASEKEMKIRLQADFDNTRKKLDKDRLSTESNAKVQILKSLLPIIDSFEKAKLQVRVDTDKEKKIDTSYQGIYRQFVEVLRYLRVSVIATVGKPFDPLLHEAISREESEAVKAGIITEELNKGFVLGDRVLRPAKVKVSLGPVNKKTPSAAEEITPSA

SEQ ID NO: 25467 - protein, 180 aa, Arabidopsis thaliana
  peptide (1)..(180): Ceres Seq. ID no. 13490802
MFCKIEKEKNKMDQKVLSLSMKIASEKEMKIRLQADFDNTRKKLDKDRLSTESNAKVQILKSLLPIIDSFEKAKLQVRVDTDKEKKIDTSYQGIYRQFVEVLRYLRVSVIATVGKPFDPLLHEAISREESEAVKAGIITEELNKGFVLGDRVLRPAKVKVSLGPVNKKTPSAAEEITPSA

SEQ ID NO: 25468 - DNA, 927 bp, Arabidopsis thaliana
  misc_feature (1)..(927): Ceres Seq. ID no. 12560106
  misc_feature (1)..(927): Ortholog of  Ceres SEQ ID NO 13592961 as cited in SEQ ID NO 20522
  misc_feature (1)..(927): Ortholog of  Ceres SEQ ID NO 13595998 as cited in SEQ ID NO 68161
atttttgaaaagtttctaacctctaggccacccactcatggctactctgttcatgaagctggtgagcttctttctaattctatctactttttgtctcactactgtgaactcggagccacagtgccataatttcaaatcgatcattagtttcggtgattctattgccgacactggaaacttgctcgccctctccgatcctaccaatctccctaaggtcgcgtttctaccgtacggagaaaccttcttccaccatccgaccggccgtttctcaaacggccgcctcatcatcgatttcattgctgaatttttgggttttccgcttgtgcctcctttttatggatctcaaaatgcaaattttgagaaaggagttaattttgcgggttggaggagcaacggcactggaacgttcctttcttgaagagagaggcattcattttccttacaccaacgttagtttagcccgtacagcttaagtagcttcaaggagagtttgcctaacttatgtgtctctccttcagactgcagagatatgataagaaaatctttgattctcatgggagaaattggagggaatgactataactacgcattctttgtgggcaaaaacattgaagagatcaaagagctggttccgcttgttattgaaactatctcttctgcaatcacggagttgattggtatgggggggaaaacatttctggtgcccggagagttcccgctcggatgctcagtagcctatttgagtttatatcaaacatcaaacatagaagaatatgatcctctaacaggatgtttgaaatggctgaacaagttttcagaataccacgacgagcagcttcaagcagaactcaacagacttcagaagttgtacccatgtcaacatcatatacgctgactactacaacacactgttgcgtcttgcccaag

SEQ ID NO: 25469 - protein, 126 aa, Arabidopsis thaliana
  peptide (1)..(126): Ceres Seq. ID no. 12560107
MATLFMKLVSFFLILSTFCLTTVNSEPQCHNFKSIISFGDSIADTGNLLALSDPTNLPKVAFLPYGETFFHHPTGRFSNGRLIIDFIAEFLGFPLVPPFYGSQNANFEKGVNFAGWRSNGTGTFLS

SEQ ID NO: 25470 - protein, 121 aa, Arabidopsis thaliana
  peptide (1)..(121): Ceres Seq. ID no. 12560108
MKLVSFFLILSTFCLTTVNSEPQCHNFKSIISFGDSIADTGNLLALSDPTNLPKVAFLPYGETFFHHPTGRFSNGRLIIDFIAEFLGFPLVPPFYGSQNANFEKGVNFAGWRSNGTGTFLS

SEQ ID NO: 25471 - protein, 121 aa, Arabidopsis thaliana
  peptide (1)..(121): Ceres Seq. ID no. 12560109
MIRKSLILMGEIGGNDYNYAFFVGKNIEEIKELVPLVIETISSAITELIGMGGKTFLVPGEFPLGCSVAYLSLYQTSNIEEYDPLTGCLKWLNKFSEYHDEQLQAELNRLQKLYPCQHHIR

SEQ ID NO: 25472 - DNA, 696 bp, Arabidopsis thaliana
  misc_feature (1)..(696): Ceres Seq. ID no. 13496315
  misc_feature (1)..(696): Ortholog of  Ceres SEQ ID NO 13595613 as cited in SEQ ID NO 59866
tctctctctctctctctctctctctttccctccgccatgacaagctcttcatctccttcacgcaaggcgttaagcaagatcgcgtgtaataggttacaaaaggagttatcagagtggcaagtaaatccaccgactgggtttaagcacagagttactgataatcttcaaaaatgggtaattgaggtaacaggagcacctggtacgctttacgctaatgaaacttataatcttcaggttgagtttcctcaacattatcctatggaagctcctcaggtgatttttgttccaccagctccgttacatcctcatatttacagcaatggacatatttgtttagatattctgtatgactcatggtctccagcaatgacagtgagttcagtctgtatcagcattctctcgatgctatcaagttcacccgaaaagcaacgccccactgataatgatcgatatgtgaagaactgcaagaacgggaggtctcctaaagagacaaggtggtggttccatgacgacaaggtttaatgatgacgaccttaagatgtctctcctttcagttacaaaagaggtttatataatttcccaagactgataatactaattgaaattcctcatggcctcccacttttttttctgtaacggatcattatgtataaatgacatctgaaatgtttcagtgtctgaattaacaccttgtgc

SEQ ID NO: 25473 - protein, 173 aa, Arabidopsis thaliana
  peptide (1)..(173): Ceres Seq. ID no. 13496316
SLSLSLSLFPSAMTSSSSPSRKALSKIACNRLQKELSEWQVNPPTGFKHRVTDNLQKWVIEVTGAPGTLYANETYNLQVEFPQHYPMEAPQVIFVPPAPLHPHIYSNGHICLDILYDSWSPAMTVSSVCISILSMLSSSPEKQRPTDNDRYVKNCKNGRSPKETRWWFHDDKV

SEQ ID NO: 25474 - protein, 161 aa, Arabidopsis thaliana
  peptide (1)..(161): Ceres Seq. ID no. 13496317
MTSSSSPSRKALSKIACNRLQKELSEWQVNPPTGFKHRVTDNLQKWVIEVTGAPGTLYANETYNLQVEFPQHYPMEAPQVIFVPPAPLHPHIYSNGHICLDILYDSWSPAMTVSSVCISILSMLSSSPEKQRPTDNDRYVKNCKNGRSPKETRWWFHDDKV

SEQ ID NO: 25475 - protein, 87 aa, Arabidopsis thaliana
  peptide (1)..(87): Ceres Seq. ID no. 13496318
MEAPQVIFVPPAPLHPHIYSNGHICLDILYDSWSPAMTVSSVCISILSMLSSSPEKQRPTDNDRYVKNCKNGRSPKETRWWFHDDKV

SEQ ID NO: 25476 - DNA, 1098 bp, Arabidopsis thaliana
  misc_feature (1)..(1098): Ceres Seq. ID no. 12371845
  misc_feature (1)..(1098): Ortholog of  Ceres SEQ ID NO 15175591 as cited in SEQ ID NO 57544
ttcgttccctggttcgaaacagcagctagacgaaaactgtgtaatggctatatcactgaagaggaaccgtttcttcattccttatacgaatctcgtcttcttcttcttcttgtgtatctctctgctcgataaaactgtatccatcaggatttcgaatcagatctcggatactgtcgttgattctcccgatcgtcctttgaaatctgcggttttcgctcttggaagcttctggagatcggaggcggcgtttggttgtatcaatggcgtcgtacgaacctccgccggttacgccggtggaacgaagacgaatccggagtataggaacttaggtgatcacgccgagtccgtacaggttgaatatgatccaaggataattggttatcgtcagctcttagatgtattttggtctagtcatgattctagacaagtgtttggacaaggtcctgatgtgggtaatcaatacagatcctgtattttcactaattctacagaagagttgagactggcttctaccagcaaagaaagggagcaacttaatacaagaagcagtatcgtgaccactcaaattcaacagctaggaacgttttatcgcgcagagcctgatcaccagaagttcgagctgaaacaacatccatttcttattcagctaattggaaacatggtagaagaagagcttgagagatcagctctagccacaaaactaaacggttacgcagccgagctctgcccgcctagaatccagaaacatatcgactctagagttaatgagatcattagaaaaggttggcccgtcttgagagacatctaatatataagccttgtgagatcttcgcgttcttggatttgattgcttagtcgcagatgtaagttttggttcattcttttggccaggaattggtcacaacaatgtttatgttcttactcttgccccttgagtggtgattgttcagcgttttgtcttgtttctttatgatctctcaaatagaatatgctttttgttttcatgtaagcagattcatttagattttcattgtatcattatggtattgattaccaattcattgatattatatatatatatgatatactttgattgcc

SEQ ID NO: 25477 - protein, 268 aa, Arabidopsis thaliana
  peptide (1)..(268): Ceres Seq. ID no. 12371846
SFPGSKQQLDENCVMAISLKRNRFFIPYTNLVFFFFLCISLLDKTVSIRISNQISDTVVDSPDRPLKSAVFALGSFWRSEAAFGCINGVVRTSAGYAGGTKTNPEYRNLGDHAESVQVEYDPRIIGYRQLLDVFWSSHDSRQVFGQGPDVGNQYRSCIFTNSTEELRLASTSKEREQLNTRSSIVTTQIQQLGTFYRAEPDHQKFELKQHPFLIQLIGNMVEEELERSALATKLNGYAAELCPPRIQKHIDSRVNEIIRKGWPVLRDI

SEQ ID NO: 25478 - protein, 254 aa, Arabidopsis thaliana
  peptide (1)..(254): Ceres Seq. ID no. 12371847
MAISLKRNRFFIPYTNLVFFFFLCISLLDKTVSIRISNQISDTVVDSPDRPLKSAVFALGSFWRSEAAFGCINGVVRTSAGYAGGTKTNPEYRNLGDHAESVQVEYDPRIIGYRQLLDVFWSSHDSRQVFGQGPDVGNQYRSCIFTNSTEELRLASTSKEREQLNTRSSIVTTQIQQLGTFYRAEPDHQKFELKQHPFLIQLIGNMVEEELERSALATKLNGYAAELCPPRIQKHIDSRVNEIIRKGWPVLRDI

SEQ ID NO: 25479 - DNA, 697 bp, Arabidopsis thaliana
  misc_feature (1)..(697): Ceres Seq. ID no. 12678113
  misc_feature (1)..(697): Ortholog of  Ceres SEQ ID NO 13594809 as cited in SEQ ID NO 51847
  misc_feature (1)..(697): Ortholog of  Ceres SEQ ID NO 12617639 as cited in SEQ ID NO 65219
  misc_feature (1)..(697): Ortholog of  Ceres SEQ ID NO 14309033 as cited in SEQ ID NO 0
  misc_feature (1)..(697): Ortholog of  Ceres SEQ ID NO 15173998 as cited in SEQ ID NO 0
  misc_feature (1)..(697): Ortholog of  Ceres SEQ ID NO 15178333 as cited in SEQ ID NO 0
atcctctcactgcctcttttctcactcactgttacttcgctaaaaccctaatttcgccattcccttctctaagacatttagaaatggctttctgcaacaaacttagcggtatcttgagacaaggggtttctcagagctcaaatggtccagttacatctatgcttggctctcttcgttacatgtcctctaagctttttgttggtggtctctcttggggaactgatgacagctccttaaagcaagctttcactagctttggtgaagtcacagaagcaacggtgattgcagacagagagacagggaggtcgaggggattcggatttgttagcttcagctgtgaggattctgctaacaatgccataaaagaaatggatggaaaggagctgaatggtaggcaaatccgtgtgaatcttgcaaccgaaagatcgagtgccccgagatcatcatttggtggtggtggcggttacggtggtggcggtggtggtggctactaaagcaaacaagccagaggatttgagagagagaggagcctcagaactttcagtagttagttagtttgtttgtttcctctttgtttaactgcaaataaccttaactggttttgttaaacttatttagccctgttttttggttgtgtctgaataccgtagtattgttgctccatcttctgcaaatctattagcatcgagttcgattc

SEQ ID NO: 25480 - protein, 163 aa, Arabidopsis thaliana
  peptide (1)..(163): Ceres Seq. ID no. 12678114
PLTASFLTHCYFAKTLISPFPSLRHLEMAFCNKLSGILRQGVSQSSNGPVTSMLGSLRYMSSKLFVGGLSWGTDDSSLKQAFTSFGEVTEATVIADRETGRSRGFGFVSFSCEDSANNAIKEMDGKELNGRQIRVNLATERSSAPRSSFGGGGGYGGGGGGGY

SEQ ID NO: 25481 - protein, 136 aa, Arabidopsis thaliana
  peptide (1)..(136): Ceres Seq. ID no. 12678115
MAFCNKLSGILRQGVSQSSNGPVTSMLGSLRYMSSKLFVGGLSWGTDDSSLKQAFTSFGEVTEATVIADRETGRSRGFGFVSFSCEDSANNAIKEMDGKELNGRQIRVNLATERSSAPRSSFGGGGGYGGGGGGGY

SEQ ID NO: 25482 - protein, 111 aa, Arabidopsis thaliana
  peptide (1)..(111): Ceres Seq. ID no. 12678116
MLGSLRYMSSKLFVGGLSWGTDDSSLKQAFTSFGEVTEATVIADRETGRSRGFGFVSFSCEDSANNAIKEMDGKELNGRQIRVNLATERSSAPRSSFGGGGGYGGGGGGGY

SEQ ID NO: 25483 - DNA, 1081 bp, Arabidopsis thaliana
  misc_feature (1)..(1081): Ceres Seq. ID no. 13486839
  misc_feature (1)..(1081): Ortholog of  Ceres SEQ ID NO 13594482 as cited in SEQ ID NO 51285
  misc_feature (1)..(1081): Ortholog of  Ceres SEQ ID NO 12617583 as cited in SEQ ID NO 64897
aaaaggctccggctttatcattctcagaccatcatcactaagcagtaagtaagcactataatcgcagaagatagataaaatggaagtagggtttctgggtttgggaatcatgggaaaagccatgtcaatgaatctattgaagaatggattcaaagtcactgtatggaacagaacactctccaagtgtgatgagcttgtggagcatggtgcatcagtatgtgagagtccagctgaagtaatcaagaaatgcaaatacactattgctatgctctctgatccttgtgctgctctttcggttgttttcgataaaggcggtgttttggagcagatatgtgaaggaaaaggttatatcgatatgtcgactgttgatgcagagacttctttgaagatcaatgaggcaatcaccgggaagggtggtcggttcgtagaaggtccggtttcaggtagcaaaaagccagctgaagatggccaactcattatccttgctgctggtgacaaggcactctttgaggaatcaatcccagcttttgatgtcttggggaagagatcgttttacttgggacaagttggaaacggagctaaaatgaagctaatagtgaacatgataatgggaagcatgatgaatgcattctctgaggggcttgtattggctgacaagagtggacttagctctgacactcttttggatattctggatctgggagcaatgactaacccgatgttcaaggggaaaggaccttcaatgaacaagagtagtttacccaccagcatttccattgaaacatcagcagaaagacatgaggctagctcttgctcttggcgatgaaaacgcggtttccatgcctgtagccgcggctgcaaacgaggcttttaagaaggcgagaagcttgggactaggagatctcgacttctctgctgtgattgaagctgtgaaattctcccgcgaatagcaaactgtttcaaaacatccactcatttggattggctgagatactgaaatcattgttatcttcccaaatagagatttactcatttggccaaacacacattttactccttcaccaaataaaaagtcttaacc

SEQ ID NO: 25484 - protein, 248 aa, Arabidopsis thaliana
  peptide (1)..(248): Ceres Seq. ID no. 13486840
MEVGFLGLGIMGKAMSMNLLKNGFKVTVWNRTLSKCDELVEHGASVCESPAEVIKKCKYTIAMLSDPCAALSVVFDKGGVLEQICEGKGYIDMSTVDAETSLKINEAITGKGGRFVEGPVSGSKKPAEDGQLIILAAGDKALFEESIPAFDVLGKRSFYLGQVGNGAKMKLIVNMIMGSMMNAFSEGLVLADKSGLSSDTLLDILDLGAMTNPMFKGKGPSMNKSSLPTSISIETSAERHEASSCSWR

SEQ ID NO: 25485 - protein, 238 aa, Arabidopsis thaliana
  peptide (1)..(238): Ceres Seq. ID no. 13486841
MGKAMSMNLLKNGFKVTVWNRTLSKCDELVEHGASVCESPAEVIKKCKYTIAMLSDPCAALSVVFDKGGVLEQICEGKGYIDMSTVDAETSLKINEAITGKGGRFVEGPVSGSKKPAEDGQLIILAAGDKALFEESIPAFDVLGKRSFYLGQVGNGAKMKLIVNMIMGSMMNAFSEGLVLADKSGLSSDTLLDILDLGAMTNPMFKGKGPSMNKSSLPTSISIETSAERHEASSCSWR

SEQ ID NO: 25486 - protein, 234 aa, Arabidopsis thaliana
  peptide (1)..(234): Ceres Seq. ID no. 13486842
MSMNLLKNGFKVTVWNRTLSKCDELVEHGASVCESPAEVIKKCKYTIAMLSDPCAALSVVFDKGGVLEQICEGKGYIDMSTVDAETSLKINEAITGKGGRFVEGPVSGSKKPAEDGQLIILAAGDKALFEESIPAFDVLGKRSFYLGQVGNGAKMKLIVNMIMGSMMNAFSEGLVLADKSGLSSDTLLDILDLGAMTNPMFKGKGPSMNKSSLPTSISIETSAERHEASSCSWR

SEQ ID NO: 25487 - DNA, 1129 bp, Arabidopsis thaliana; identical to SEQ ID NO: 23424
  misc_feature (1)..(1129): Ceres Seq. ID no. 12325093
  misc_feature (1)..(1129): Ortholog of  Ceres SEQ ID NO 13597551 as cited in SEQ ID NO 65266

SEQ ID NO: 25488 - protein, 332 aa, Arabidopsis thaliana; identical to SEQ ID NO: 23425
  peptide (1)..(332): Ceres Seq. ID no. 12325094

SEQ ID NO: 25489 - protein, 316 aa, Arabidopsis thaliana; identical to SEQ ID NO: 23426
  peptide (1)..(316): Ceres Seq. ID no. 12325095

SEQ ID NO: 25490 - protein, 220 aa, Arabidopsis thaliana; identical to SEQ ID NO: 23427
  peptide (1)..(220): Ceres Seq. ID no. 12325096

SEQ ID NO: 25491 - DNA, 970 bp, Arabidopsis thaliana
  misc_feature (1)..(970): Ceres Seq. ID no. 13503912
  misc_feature (1)..(970): Ortholog of  Ceres SEQ ID NO 12587429 as cited in SEQ ID NO 63113
  misc_feature (1)..(970): Ortholog of  Ceres SEQ ID NO 12586351 as cited in SEQ ID NO 64028
  misc_feature (1)..(970): Ortholog of  Ceres SEQ ID NO 13654441 as cited in SEQ ID NO 67814
ataatccccaaagagattttaagaaaaaggtgtaagaaataaacaaccgagttttgagatatggaggagaagaagagcaaagtgatattacatgggacgtggataagcacatactcaaagagggtcgaaatcgctcttaaactcaagggtgtactctacgagtacctcgaagaagatcttcagaacaaaagtgaatcgctgattcaactcaacccggtgcacaagaagattcctgttcttgtccatgatgggaaaccagtggctgaatcacttgtgattcttgaatatatcgatgagacgtggacaaactctcctcgtttcttcccagaggatccttatgaaagggcccaggtccggttctgggtcagctacatcaaccaacaggtgtttgaggtcatgggtcaagtcatgtcccaggagggtgaagctcaagcaaagtctgtagaagaggcaagaaaaagattcaaagttcttgatgagggactcaagaagcatttcccgaataaaaacatcagaaggaatgatgatgttgggcttttggaaatcaccatcattgctactctcggaggctacaaagctcatcgtgaagcaatcggtgtagacataattggtccagtgaacactccgactttatacaactggatagagcgcctgcaagatctaagtgtgataaaagaagtcgaagtgcctcatgatacgttggtgacatttatccagaagtatagacaaaagtgtctccagcaggctgcaaatgcataattagatcaagatgctggtctagtgatgaatcatctggatttaatattgtctcagaggataatagaataagagttagataactatttaaagtaagaaataattccctgagagttgtgtatgaacttatcgtagctattactgtatgataatgaactaaagaaaaccgtttgcggtatctccatgctctatagttgatacgctttgttgttat

SEQ ID NO: 25492 - protein, 232 aa, Arabidopsis thaliana
  peptide (1)..(232): Ceres Seq. ID no. 13503913
MEEKKSKVILHGTWISTYSKRVEIALKLKGVLYEYLEEDLQNKSESLIQLNPVHKKIPVLVHDGKPVAESLVILEYIDETWTNSPRFFPEDPYERAQVRFWVSYINQQVFEVMGQVMSQEGEAQAKSVEEARKRFKVLDEGLKKHFPNKNIRRNDDVGLLEITIIATLGGYKAHREAIGVDIIGPVNTPTLYNWIERLQDLSVIKEVEVPHDTLVTFIQKYRQKCLQQAANA

SEQ ID NO: 25493 - protein, 120 aa, Arabidopsis thaliana
  peptide (1)..(120): Ceres Seq. ID no. 13503914
MGQVMSQEGEAQAKSVEEARKRFKVLDEGLKKHFPNKNIRRNDDVGLLEITIIATLGGYKAHREAIGVDIIGPVNTPTLYNWIERLQDLSVIKEVEVPHDTLVTFIQKYRQKCLQQAANA

SEQ ID NO: 25494 - protein, 116 aa, Arabidopsis thaliana
  peptide (1)..(116): Ceres Seq. ID no. 13503915
MSQEGEAQAKSVEEARKRFKVLDEGLKKHFPNKNIRRNDDVGLLEITIIATLGGYKAHREAIGVDIIGPVNTPTLYNWIERLQDLSVIKEVEVPHDTLVTFIQKYRQKCLQQAANA

SEQ ID NO: 25495 - DNA, 1334 bp, Arabidopsis thaliana
  misc_feature (1)..(1334): Ceres Seq. ID no. 13617376
  misc_feature (1)..(1334): Ortholog of  Ceres SEQ ID NO 14311568 as cited in SEQ ID NO 51732
  misc_feature (1)..(1334): Ortholog of  Ceres SEQ ID NO 14303877 as cited in SEQ ID NO 53500
  misc_feature (1)..(1334): Ortholog of  Ceres SEQ ID NO 15169781 as cited in SEQ ID NO 54829
  misc_feature (1)..(1334): Ortholog of  Ceres SEQ ID NO 15173757 as cited in SEQ ID NO 57537
  misc_feature (1)..(1334): Ortholog of  Ceres SEQ ID NO 13654231 as cited in SEQ ID NO 68285
atctacgcatgaaaatatgattctgtcttttttttgtttgtctatctttcaatactttaaaaagtgtatttctagaggcgatttgtcatttcccgaataggaatttgagtaaaaaaaaacactctgttttttatttccactaatatcaaatcggcgaatatagttcccaccattcttatctccttgtcgtcactcggaattttttaaataataggatcgctttaataatataatctctataatttatagttccttttccaatattggcgtctccgttgaagctttccacaaatctcaaatttgtttggagactctcaaatgtatccttctctcgacgatgatttcgtctctgatttgttttgcttcgatcaaagcaatggagcagaacttgatgattacacacagtttggtgtaaatttgcagactgatcaagaggatacctttccagattttgtgtcatatggtgtgaatttgcagcaggagccagatgaagtctttagtattggagcttctcaattggatttgtcctcgtataatggagttttgtcgctagagccagaacaggtggggcaacaagattgtgaagttgtgcaggaagaagaagtagagatcaattctggttcatctggtggagctgttaaggaagaacaggaacatttagatgacgattgctccagaaagcgggcaaggactggatcgtgtagcagaggaggaggaactaaagcgtgtcgtgaaaggttgaggagggagaagctaaatgagaggtttatggatttgagctcggttttggagcctgggaggactcctaagactgataaaccggctatactcgatgatgcaatccgtatattgaatcaacttagagatgaagctcttaagcttgaagaaactaaccagaagcttttagaggagatcaagagtctcaaggcggagaagaacgagctgagggaggaaaagctggtgttgaaggcggataaagagaagacagaacaacagttaaagtctatgacggctccatcttcagggttcatacctcatattccagctgcatttaaccacaacaaaatggctgtttatccaagttacggttacatgccaatgtggcattatatgcctcaatccgttcgtgacacatctcgtgatcaagaactcaggcctcctgctgcttaaactctcaattgtttttttttggtacccatagggaactcatagagatttctgaatcacttggtttaggattcttccgtttggcaagtgtaaaagctttactcttgatcttgggttgtatttttcttataaaataaatataactccagaaacttgtgattcttctc

SEQ ID NO: 25496 - protein, 283 aa, Arabidopsis thaliana
  peptide (1)..(283): Ceres Seq. ID no. 13617377
MYPSLDDDFVSDLFCFDQSNGAELDDYTQFGVNLQTDQEDTFPDFVSYGVNLQQEPDEVFSIGASQLDLSSYNGVLSLEPEQVGQQDCEVVQEEEVEINSGSSGGAVKEEQEHLDDDCSRKRARTGSCSRGGGTKACRERLRREKLNERFMDLSSVLEPGRTPKTDKPAILDDAIRILNQLRDEALKLEETNQKLLEEIKSLKAEKNELREEKLVLKADKEKTEQQLKSMTAPSSGFIPHIPAAFNHNKMAVYPSYGYMPMWHYMPQSVRDTSRDQELRPPAA

SEQ ID NO: 25497 - DNA, 1483 bp, Arabidopsis thaliana
  misc_feature (1)..(1483): Ceres Seq. ID no. 12357662
  misc_feature (1)..(1483): Ortholog of  Ceres SEQ ID NO 15178096 as cited in SEQ ID NO 52497
atcaatcatcatcatcactctctctcaatccaacaaagaaaaaaaaagtcttcttctttttttacaagtctgagaattttctacagaaacaaaaatctgattgtttttcccactttgcatctgttttgaggatgccagctacggattttcaaggatcatttggaaggtcgttgctaagtttacggcgagaccaagttgactcatcaacagtcgtctccggaagtagtagccaccacgagccaagcaccatggaggttgagctagattcgtttcaaagacaagtcgctgagaaattcatcgatctcaacgcttcttcaaacgaccttctctctctcgaatggatcggaaagcttcttgattctttcctctgttgtcaagaagagtttcgagctatcgtattcaaccaccgatctcagatctctaaatctccgatggaccgtttgatttcagattacttcgaacgcagcatcaaagctctagatgtctgtaacgccatccgcgacggtatcgaacagatccgtcaatgggagaaacttgccgatattgtgatctctgctttagatagtcaccgtccgatcggagaaggtcagctccggcgagctaagaaagctctgattgatttagcaatcggaatgcttgacgagaaagatcatccttctggaaccaatctagctcatcgtaaccgttcattcggaagagtcaaagacagtcaccaccgttcgattggtcatttcagatctctttcttggagtgtttcaagatcatggtcagcttctaagcagttacaagctttagcgagtaacttggcaacgcctcgaccaaacgatgtcgttgctagcaatggtttagctgtaccggtttacacaatgacttcggttttgctttttgtgatgtgggttttggtagctgcgattccttgtcaagaccgtggattgcaagttaacttctttgtgcctaggcatttccaatgggcagctccggttatgtcgttgcacgataagattgttgaggaatctaagagaagagataggaagaattgttgtggtttgcttaaggagattgataggattgagaagagttcgaggttgatgaatgaattgatcgattcgattcatttcccgttgaatgatgacaaggaagttgaggtgaaacagagagttgatgagcttgttcaagttcgtgaagctttgagaaatggtttggatccgtttgagaggaaagtaagagaagttttccatcggattgtgagaagcagaactgagagtcttgattctctttgatcttgcacatgtttgtctgaatatgatgaatgattcatgtttggattttttgttttgtttttgtttttctctatttatcctttttgatcacttgtaaaaaagaaactcaaagagtgtagaagtgtcatcttctctttgtgatgctgatagtgattctgttcttctttgtgtagctacttgcttagattgaagttattttttcc

SEQ ID NO: 25498 - protein, 425 aa, Arabidopsis thaliana
  peptide (1)..(425): Ceres Seq. ID no. 12357663
QSSSSLSLNPTKKKKVFFFFYKSENFLQKQKSDCFSHFASVLRMPATDFQGSFGRSLLSLRRDQVDSSTVVSGSSSHHEPSTMEVELDSFQRQVAEKFIDLNASSNDLLSLEWIGKLLDSFLCCQEEFRAIVFNHRSQISKSPMDRLISDYFERSIKALDVCNAIRDGIEQIRQWEKLADIVISALDSHRPIGEGQLRRAKKALIDLAIGMLDEKDHPSGTNLAHRNRSFGRVKDSHHRSIGHFRSLSWSVSRSWSASKQLQALASNLATPRPNDVVASNGLAVPVYTMTSVLLFVMWVLVAAIPCQDRGLQVNFFVPRHFQWAAPVMSLHDKIVEESKRRDRKNCCGLLKEIDRIEKSSRLMNELIDSIHFPLNDDKEVEVKQRVDELVQVREALRNGLDPFERKVREVFHRIVRSRTESLDSL

SEQ ID NO: 25499 - protein, 382 aa, Arabidopsis thaliana
  peptide (1)..(382): Ceres Seq. ID no. 12357664
MPATDFQGSFGRSLLSLRRDQVDSSTVVSGSSSHHEPSTMEVELDSFQRQVAEKFIDLNASSNDLLSLEWIGKLLDSFLCCQEEFRAIVFNHRSQISKSPMDRLISDYFERSIKALDVCNAIRDGIEQIRQWEKLADIVISALDSHRPIGEGQLRRAKKALIDLAIGMLDEKDHPSGTNLAHRNRSFGRVKDSHHRSIGHFRSLSWSVSRSWSASKQLQALASNLATPRPNDVVASNGLAVPVYTMTSVLLFVMWVLVAAIPCQDRGLQVNFFVPRHFQWAAPVMSLHDKIVEESKRRDRKNCCGLLKEIDRIEKSSRLMNELIDSIHFPLNDDKEVEVKQRVDELVQVREALRNGLDPFERKVREVFHRIVRSRTESLDSL

SEQ ID NO: 25500 - protein, 343 aa, Arabidopsis thaliana
  peptide (1)..(343): Ceres Seq. ID no. 12357665
MEVELDSFQRQVAEKFIDLNASSNDLLSLEWIGKLLDSFLCCQEEFRAIVFNHRSQISKSPMDRLISDYFERSIKALDVCNAIRDGIEQIRQWEKLADIVISALDSHRPIGEGQLRRAKKALIDLAIGMLDEKDHPSGTNLAHRNRSFGRVKDSHHRSIGHFRSLSWSVSRSWSASKQLQALASNLATPRPNDVVASNGLAVPVYTMTSVLLFVMWVLVAAIPCQDRGLQVNFFVPRHFQWAAPVMSLHDKIVEESKRRDRKNCCGLLKEIDRIEKSSRLMNELIDSIHFPLNDDKEVEVKQRVDELVQVREALRNGLDPFERKVREVFHRIVRSRTESLDSL

SEQ ID NO: 25501 - DNA, 1437 bp, Arabidopsis thaliana; identical to SEQ ID NO: 21900
  misc_feature (1)..(1437): Ceres Seq. ID no. 13497598
  misc_feature (1)..(1437): Ortholog of  Ceres SEQ ID NO 13654557 as cited in SEQ ID NO 68444

SEQ ID NO: 25502 - protein, 428 aa, Arabidopsis thaliana; identical to SEQ ID NO: 21901
  peptide (1)..(428): Ceres Seq. ID no. 13497599

SEQ ID NO: 25503 - protein, 406 aa, Arabidopsis thaliana; identical to SEQ ID NO: 21902
  peptide (1)..(406): Ceres Seq. ID no. 13497600

SEQ ID NO: 25504 - protein, 388 aa, Arabidopsis thaliana; identical to SEQ ID NO: 21903
  peptide (1)..(388): Ceres Seq. ID no. 13497601

SEQ ID NO: 25505 - DNA, 1417 bp, Arabidopsis thaliana
  misc_feature (1)..(1417): Ceres Seq. ID no. 13486896
  misc_feature (1)..(1417): Ortholog of  Ceres SEQ ID NO 14311407 as cited in SEQ ID NO 54067
  misc_feature (1)..(1417): Ortholog of  Ceres SEQ ID NO 14313107 as cited in SEQ ID NO 58915
  misc_feature (1)..(1417): Ortholog of  Ceres SEQ ID NO 15226556 as cited in SEQ ID NO 67908
atttccctttttctctgtaattttcaattcccaaaataaagaagctttcgtttctctctcgcattgacccttcttctccagttttatgttttgcctctctcccacttctgtaaataatcttctcacatccccgcacgattattctctagccgatcaacgaacacagagacgctaatgtatttgactcgattcgaatcattagtcttctaatcacaccgattgatttccacccacagatttcttgtctgaaatttagggttagcgaaggtttggatcaatgatgcaaggtgaagtacaattgcagccaccggattcacagaaactaagtgattccgctcctttgttaggagatcacaccaattcttcttcggcgtctccttctgctgcgtctgtggtggcaggaaatagcgatgagataaaggctgaagaagatttagagaacgatgcttcttcagctccttgttgtcgtatttgtttggaggacgatagtgaattgttaggcgatgaattgatttcaccttgtatgtgtaaaggcactcaacaattcgtgcatcgctcatgtctcgatcattggcgatcggttaaagaaggttttgctttctctcactgtactacttgcaaagcacagtttcatctgagagtcgaaccctttgaggataacaattcgtggcgtagaaaagctaaattcagactctttgtcgcaagagatgtgcttttggttttcttagctgtgcagactgttatcgctgtgatggccggattcgcatatatgatggacaaagacggagagtttcgcaactctttcaacgatgattgggatcgtattttgtcgaaacatcccatcccgttttattactgcattggggttatatccttctttgtgctgactggatttcttggaatcattctacattgctctgctctcaacggtaatgacccgaggatggctggatgccagaactgctgttatggatggggtgtcttggattgtttccctgcttcaatggaagcttgtttcgctcttgttgttgtttttgtcgtcatctttgccattcttggtttagcgtatgggtttcttgctgcaactatggctatccaaaggatatggcagagacattaccatattctcaccaagcgagagctcacaaaggagtacattgtggaggatcttcacggaagttacactcccccgaagctggatgcagagcacgaaggaagactgaaaatgctgaaacttctgtgaccgtgttttttaactgtcaaataaaggttgtaaggagtttcgggcacatgagagagacgagttcatacgtatatgttcacagagtgtctttcttttctttatcatgcgatgaaaagtacctaatggatattttgtcttatatatatttattataattatggtatgaggtgatgc

SEQ ID NO: 25506 - protein, 321 aa, Arabidopsis thaliana
  peptide (1)..(321): Ceres Seq. ID no. 13486897
MMQGEVQLQPPDSQKLSDSAPLLGDHTNSSSASPSAASVVAGNSDEIKAEEDLENDASSAPCCRICLEDDSELLGDELISPCMCKGTQQFVHRSCLDHWRSVKEGFAFSHCTTCKAQFHLRVEPFEDNNSWRRKAKFRLFVARDVLLVFLAVQTVIAVMAGFAYMMDKDGEFRNSFNDDWDRILSKHPIPFYYCIGVISFFVLTGFLGIILHCSALNGNDPRMAGCQNCCYGWGVLDCFPASMEACFALVVVFVVIFAILGLAYGFLAATMAIQRIWQRHYHILTKRELTKEYIVEDLHGSYTPPKLDAEHEGRLKMLKLL

SEQ ID NO: 25507 - protein, 320 aa, Arabidopsis thaliana
  peptide (1)..(320): Ceres Seq. ID no. 13486898
MQGEVQLQPPDSQKLSDSAPLLGDHTNSSSASPSAASVVAGNSDEIKAEEDLENDASSAPCCRICLEDDSELLGDELISPCMCKGTQQFVHRSCLDHWRSVKEGFAFSHCTTCKAQFHLRVEPFEDNNSWRRKAKFRLFVARDVLLVFLAVQTVIAVMAGFAYMMDKDGEFRNSFNDDWDRILSKHPIPFYYCIGVISFFVLTGFLGIILHCSALNGNDPRMAGCQNCCYGWGVLDCFPASMEACFALVVVFVVIFAILGLAYGFLAATMAIQRIWQRHYHILTKRELTKEYIVEDLHGSYTPPKLDAEHEGRLKMLKLL

SEQ ID NO: 25508 - protein, 239 aa, Arabidopsis thaliana
  peptide (1)..(239): Ceres Seq. ID no. 13486899
MCKGTQQFVHRSCLDHWRSVKEGFAFSHCTTCKAQFHLRVEPFEDNNSWRRKAKFRLFVARDVLLVFLAVQTVIAVMAGFAYMMDKDGEFRNSFNDDWDRILSKHPIPFYYCIGVISFFVLTGFLGIILHCSALNGNDPRMAGCQNCCYGWGVLDCFPASMEACFALVVVFVVIFAILGLAYGFLAATMAIQRIWQRHYHILTKRELTKEYIVEDLHGSYTPPKLDAEHEGRLKMLKLL

SEQ ID NO: 25509 - DNA, 1059 bp, Arabidopsis thaliana
  misc_feature (1)..(1059): Ceres Seq. ID no. 12322024
  misc_feature (1)..(1059): Ortholog of  Ceres SEQ ID NO 14307424 as cited in SEQ ID NO 54228
  misc_feature (1)..(1059): Ortholog of  Ceres SEQ ID NO 13664279 as cited in SEQ ID NO 61603
  misc_feature (1)..(1059): Ortholog of  Ceres SEQ ID NO 13584254 as cited in SEQ ID NO 63465
agtgtgaaagagcaaaagcataaatagcatcgagagagacactgttctcattcattcgcaaattcgttgaccatatttgatagaatcaagcgatgatgaatcttagggttttgttcctcgctctccttctccttgcatctcctctgcttcaagttgctagatgtcaatcggatgccgaggatcattcaagtcttgttgacgatgttgtgggagaaaacactgatgatgcggttgaggaagatgaccatgatttggatatgaacttgtcctcatttccaggagttgagactgtttgtgttttccccaaaaacagtgccaaattggttccagctggagaagagactgagctccttgttggtcttaaaaatgaagggaaaactagagtaggtgtgatgggaattagggccagcgttcatcttccttatgatcataagttgttggttcagaatctaaccatgttgagacttaacaatgcatccatcccaacgtctcttcaagcaacattcccatacatctttgcagtcagccagtacttgcagcctggagcatttgatctggtgggttatatcatatacgatgtggaaggaaagccataccagagtgtcttctacaatggaaccatagaggtagttgaatctggaggtcttctcagcggcgaatctgttttccttttaacactcggaatcggtctcctcctcctcctcggtctatgggcatacagccaagttcagcgtctcaccaagaaaaccaaaaaggtttccaaggtggaagtaggaactaggtctaccgatgcatcactcgatgaatggctcgagggaactactttggccaagacatcgtctgggaaaacaaagaacaagaagaactaaaggagagctgttttgctccttccagttgttatagactcagcttcggcgttttgaaagagtttccaagtttaaagttcagtcttgaggaaatttagggttttaaacgacactttttttgttccagcattgtactctttagacaatctttacttcttgtcataaatattctcctcatgaaacaagttaactt

SEQ ID NO: 25510 - protein, 258 aa, Arabidopsis thaliana
  peptide (1)..(258): Ceres Seq. ID no. 12322025
MMNLRVLFLALLLLASPLLQVARCQSDAEDHSSLVDDVVGENTDDAVEEDDHDLDMNLSSFPGVETVCVFPKNSAKLVPAGEETELLVGLKNEGKTRVGVMGIRASVHLPYDHKLLVQNLTMLRLNNASIPTSLQATFPYIFAVSQYLQPGAFDLVGYIIYDVEGKPYQSVFYNGTIEVVESGGLLSGESVFLLTLGIGLLLLLGLWAYSQVQRLTKKTKKVSKVEVGTRSTDASLDEWLEGTTLAKTSSGKTKNKKN

SEQ ID NO: 25511 - protein, 257 aa, Arabidopsis thaliana
  peptide (1)..(257): Ceres Seq. ID no. 12322026
MNLRVLFLALLLLASPLLQVARCQSDAEDHSSLVDDVVGENTDDAVEEDDHDLDMNLSSFPGVETVCVFPKNSAKLVPAGEETELLVGLKNEGKTRVGVMGIRASVHLPYDHKLLVQNLTMLRLNNASIPTSLQATFPYIFAVSQYLQPGAFDLVGYIIYDVEGKPYQSVFYNGTIEVVESGGLLSGESVFLLTLGIGLLLLLGLWAYSQVQRLTKKTKKVSKVEVGTRSTDASLDEWLEGTTLAKTSSGKTKNKKN

SEQ ID NO: 25512 - protein, 203 aa, Arabidopsis thaliana
  peptide (1)..(203): Ceres Seq. ID no. 12322027
MNLSSFPGVETVCVFPKNSAKLVPAGEETELLVGLKNEGKTRVGVMGIRASVHLPYDHKLLVQNLTMLRLNNASIPTSLQATFPYIFAVSQYLQPGAFDLVGYIIYDVEGKPYQSVFYNGTIEVVESGGLLSGESVFLLTLGIGLLLLLGLWAYSQVQRLTKKTKKVSKVEVGTRSTDASLDEWLEGTTLAKTSSGKTKNKKN

SEQ ID NO: 25513 - DNA, 1081 bp, Arabidopsis thaliana; identical to SEQ ID NO: 25379
  misc_feature (1)..(1081): Ceres Seq. ID no. 12322213
  misc_feature (1)..(1081): Ortholog of  Ceres SEQ ID NO 13594482 as cited in SEQ ID NO 51285
  misc_feature (1)..(1081): Ortholog of  Ceres SEQ ID NO 13655381 as cited in SEQ ID NO 63359

SEQ ID NO: 25514 - protein, 229 aa, Arabidopsis thaliana; identical to SEQ ID NO: 25380
  peptide (1)..(229): Ceres Seq. ID no. 12322214

SEQ ID NO: 25515 - protein, 192 aa, Arabidopsis thaliana; identical to SEQ ID NO: 25381
  peptide (1)..(192): Ceres Seq. ID no. 12322215

SEQ ID NO: 25516 - protein, 135 aa, Arabidopsis thaliana; identical to SEQ ID NO: 25382
  peptide (1)..(135): Ceres Seq. ID no. 12322216

SEQ ID NO: 25517 - DNA, 1159 bp, Arabidopsis thaliana
  misc_feature (1)..(1159): Ceres Seq. ID no. 12337951
  misc_feature (1)..(1159): Ortholog of  Ceres SEQ ID NO 15175857 as cited in SEQ ID NO 59046
aaaatcaaacaatctcttcaatcaaatctcttcttcaatcaaatcttcaaatcccttcaaagatgccttcaatgccagaagagccgctcctaacaccaaccccagacagattctgtatgttcccaattcactacccacagatctgggaaatgtacaaaaaagccgaagcatcattctggaccgccgaagaagtagatctatcacaagacaaccgcgactgggaaaacagtctcaacgacggtgaacgtcacttcatcaaacacgtcctcgctttcttcgctgcatctgacggaatcgtactagagaatctcgcttctcgcttcatgtccgatgttcaagtctcggaggcgcgtgctttctacggtttccagatcgcgattgaaaacatccactcggagatgtatagtctccttctcgatacttatatcaaagataacaaagagagagatcatctctttcgtgccattgaaacaatcccttgcgtcgccaagaaagctcaatgggctatgaaatggatcgacggttctcagactttcgccgaacgaatcatcgctttcgcttgcgtcgaaggtatcttcttctccggaagcttttgttcaatcttctggctgaagaaacggggactcatgcctggattaacattctcaaacgaattgatctctcgtgacgaaggtttacactgcgacttcgcttgtctactctacacgctactcaaaacaaagcttagcgaagaacgcgtgaaatcaatcgtctgcgacgcggtcgaaatcgagagagagtttgtgtgcgacgcgcttccgtgcgcgttggttgggatgaaccgtgatttgatgagtcagtatattgagtttgttgcggataggcttttgggtgcgcttgggtacgggaaggtgtacggtgttactaatccgtttgattggatggaacttatttcgcttcaagggaaaacgaatttcttcgagaaacgtgttggtgattaccaaaaggcttccgttatgtctagcgttaatggtaacggcgcgtttgataaccatgtcttctctctcgacgaagatttttaaagagcgtttgttttgatgctataattacgattctactcttgtattattaccgtgtattatccttggtttttgaattaatgaataattagttgctttcc

SEQ ID NO: 25518 - protein, 352 aa, Arabidopsis thaliana
  peptide (1)..(352): Ceres Seq. ID no. 12337952
NQTISSIKSLLQSNLQIPSKMPSMPEEPLLTPTPDRFCMFPIHYPQIWEMYKKAEASFWTAEEVDLSQDNRDWENSLNDGERHFIKHVLAFFAASDGIVLENLASRFMSDVQVSEARAFYGFQIAIENIHSEMYSLLLDTYIKDNKERDHLFRAIETIPCVAKKAQWAMKWIDGSQTFAERIIAFACVEGIFFSGSFCSIFWLKKRGLMPGLTFSNELISRDEGLHCDFACLLYTLLKTKLSEERVKSIVCDAVEIEREFVCDALPCALVGMNRDLMSQYIEFVADRLLGALGYGKVYGVTNPFDWMELISLQGKTNFFEKRVGDYQKASVMSSVNGNGAFDNHVFSLDEDF

SEQ ID NO: 25519 - protein, 332 aa, Arabidopsis thaliana
  peptide (1)..(332): Ceres Seq. ID no. 12337953
MPSMPEEPLLTPTPDRFCMFPIHYPQIWEMYKKAEASFWTAEEVDLSQDNRDWENSLNDGERHFIKHVLAFFAASDGIVLENLASRFMSDVQVSEARAFYGFQIAIENIHSEMYSLLLDTYIKDNKERDHLFRAIETIPCVAKKAQWAMKWIDGSQTFAERIIAFACVEGIFFSGSFCSIFWLKKRGLMPGLTFSNELISRDEGLHCDFACLLYTLLKTKLSEERVKSIVCDAVEIEREFVCDALPCALVGMNRDLMSQYIEFVADRLLGALGYGKVYGVTNPFDWMELISLQGKTNFFEKRVGDYQKASVMSSVNGNGAFDNHVFSLDEDF

SEQ ID NO: 25520 - protein, 329 aa, Arabidopsis thaliana
  peptide (1)..(329): Ceres Seq. ID no. 12337954
MPEEPLLTPTPDRFCMFPIHYPQIWEMYKKAEASFWTAEEVDLSQDNRDWENSLNDGERHFIKHVLAFFAASDGIVLENLASRFMSDVQVSEARAFYGFQIAIENIHSEMYSLLLDTYIKDNKERDHLFRAIETIPCVAKKAQWAMKWIDGSQTFAERIIAFACVEGIFFSGSFCSIFWLKKRGLMPGLTFSNELISRDEGLHCDFACLLYTLLKTKLSEERVKSIVCDAVEIEREFVCDALPCALVGMNRDLMSQYIEFVADRLLGALGYGKVYGVTNPFDWMELISLQGKTNFFEKRVGDYQKASVMSSVNGNGAFDNHVFSLDEDF

SEQ ID NO: 25521 - DNA, 1167 bp, Arabidopsis thaliana
  misc_feature (1)..(1167): Ceres Seq. ID no. 13495852
  misc_feature (1)..(1167): Ortholog of  Ceres SEQ ID NO 14312266 as cited in SEQ ID NO 59225
  misc_feature (1)..(1167): Ortholog of  Ceres SEQ ID NO 13597620 as cited in SEQ ID NO 65383
attcatcttttagctcttcagcgaatgttcgtctcgtctatttgctctctctcgacgactgttaattaactccggcgattgatcactccgtcttctttgtaacacagccggagaaaaatcgaaagtttcgtttttttcttctccttcgtagctaattcgcggtcgattttataattcggcagccatgagctcggttttgcagggttttacgaagtcacttgctatgacctttgtatcggagattggtgacaagacgtttttcgctgcagcaattttggctatgcgttatcctaggagacttgtgttggctggttgtttatcggctctgattgttatgactatcctctctgctactcttggatgggctgctcctaatctgatctctcgcaaatggactcatcacataacaacattgttgttctttggttttgggctatggtctttgtgggacggtttcaaagaaggaggagggggttcggaagaattggctgaagtcgaagcagaactggatgctgatttgaaggctaatggtaaatctccaaaagacagtagtaagagagaagatgaaaacaaaaagcagaatagggcgttcctcacgcaatttttctctccaatttttctcaaggctttttcgattaatttctttggagaatggggtgacaagagtcagcttgctacaattggtttagctgcagatgaaaatccatttggggtggtccttggtggagttgtggcacagtttttgtgcaccactgctgctgtaattggaggaaagagcttagcgtctcaaatttccgaaagaatagtggctctttctggtggaatgcttttcatcatttttggcatccaatcgtatcttacttctgttgaggcttaatgctttcttatggtttgtagggagactgatgaagaggaagaacgttactatccatagtttattagacatttaattttgtttattagacatttacacaagtgattacaaaacaaatctgagagtttgattgtctacagtgaaaacattgaaatgtgctgaagcagccatccgacttcaataaagtttttttggtaatcagttttaatcctcttttgttttttggagtcatttggattttgaaatgttttgcaaggatttgactcaatgagatacaaaatgtggttttgttt

SEQ ID NO: 25522 - protein, 230 aa, Arabidopsis thaliana
  peptide (1)..(230): Ceres Seq. ID no. 13495853
MSSVLQGFTKSLAMTFVSEIGDKTFFAAAILAMRYPRRLVLAGCLSALIVMTILSATLGWAAPNLISRKWTHHITTLLFFGFGLWSLWDGFKEGGGGSEELAEVEAELDADLKANGKSPKDSSKREDENKKQNRAFLTQFFSPIFLKAFSINFFGEWGDKSQLATIGLAADENPFGVVLGGVVAQFLCTTAAVIGGKSLASQISERIVALSGGMLFIIFGIQSYLTSVEA

SEQ ID NO: 25523 - protein, 217 aa, Arabidopsis thaliana
  peptide (1)..(217): Ceres Seq. ID no. 13495854
MTFVSEIGDKTFFAAAILAMRYPRRLVLAGCLSALIVMTILSATLGWAAPNLISRKWTHHITTLLFFGFGLWSLWDGFKEGGGGSEELAEVEAELDADLKANGKSPKDSSKREDENKKQNRAFLTQFFSPIFLKAFSINFFGEWGDKSQLATIGLAADENPFGVVLGGVVAQFLCTTAAVIGGKSLASQISERIVALSGGMLFIIFGIQSYLTSVEA

SEQ ID NO: 25524 - protein, 198 aa, Arabidopsis thaliana
  peptide (1)..(198): Ceres Seq. ID no. 13495855
MRYPRRLVLAGCLSALIVMTILSATLGWAAPNLISRKWTHHITTLLFFGFGLWSLWDGFKEGGGGSEELAEVEAELDADLKANGKSPKDSSKREDENKKQNRAFLTQFFSPIFLKAFSINFFGEWGDKSQLATIGLAADENPFGVVLGGVVAQFLCTTAAVIGGKSLASQISERIVALSGGMLFIIFGIQSYLTSVEA

SEQ ID NO: 25525 - DNA, 1411 bp, Arabidopsis thaliana
  misc_feature (1)..(1411): Ceres Seq. ID no. 12324730
  misc_feature (1)..(1411): Ortholog of  Ceres SEQ ID NO 13647847 as cited in SEQ ID NO 20430
  misc_feature (1)..(1411): Ortholog of  Ceres SEQ ID NO 15171696 as cited in SEQ ID NO 59997
attttttcagtctctctgcttctcactgttgtgctttctgtcttgtctctgtctttcccattgtcattctctcaccaatgggaatctcctttagcaacaacaacagaagacgagacaacaataatcgtcgccacctccaccactatcctccgccgccgccttactattacctcgaccctcctcctcctcctccgccatttccaccgcattatgactataactactccaattaccatctctctccgcctctaccgccacagccacagatcaactcttgttcttacggccattaccattatcaccctcagcctcctcagtatttcaccactgctcagcccaattggtggggcccaatgatgagaccggcgtactactgtccgcctcagccgcaaacgcaaccgcctaagccatacctggagcaacagaacgcgaaaaaggtgaggaatgatgtcaatgtgcatagagatacagtgaggcttgaagtggacgatctcgttcctggtcaccatctagtttccttcgtcttcgatgctcttttcgacggcagtttcactatcaccttctttgcaaaggaggaaccaaattgcaccattatcccacagtttccagaggtttattcacccacaagattccattttcagaaaggtcctggacagaagtttctgcagccttcagggacaggaactgacctgagcttctttgttcttgatgatctgtctaaacccttagaagaagatgtgtatccgcttgtaatatcagctgagacgataatctctccaaattcaatctcagagcaatcatcagttcataagcaagtcacacaagcggttctcgagaaagataatgatggatctttcaaagtgaaagttgtgaagcagattctttggattgaaggagttcgatatgaactccgtgagttgtatggctcgaccactcaaggtgcagcctcgggcttagatgagagtggttcgggtacagaatgtgttatctgcatgactgaggctaaggacacggctgtgctgccttgcagacatttgtgcatgtgtagcgactgtgctaaagaattgaggcttcagtccaacaaatgtccgatttgtcgacaacccatcgaagagctcttagagatcaaaatgaacagtagtgatgaacaacactagtacaaaaaaggttctttctttacataaaacaccattcttgattctttcttcatttttctctgaaaccctccatatctgaatctgtatttccgctatcattgttgtgcaacttccttcattccgcatatagatttgtttgatctaatgctttgtatttgcaagatataagcatcatcagtacatgtatagataacttcctaacactctcaccaaactacttaatgtttgtaattgaatgcttttgttggtttgcc

SEQ ID NO: 25526 - protein, 384 aa, Arabidopsis thaliana
  peptide (1)..(384): Ceres Seq. ID no. 12324731
FFSLSASHCCAFCLVSVFPIVILSPMGISFSNNNRRRDNNNRRHLHHYPPPPPYYYLDPPPPPPPFPPHYDYNYSNYHLSPPLPPQPQINSCSYGHYHYHPQPPQYFTTAQPNWWGPMMRPAYYCPPQPQTQPPKPYLEQQNAKKVRNDVNVHRDTVRLEVDDLVPGHHLVSFVFDALFDGSFTITFFAKEEPNCTIIPQFPEVYSPTRFHFQKGPGQKFLQPSGTGTDLSFFVLDDLSKPLEEDVYPLVISAETIISPNSISEQSSVHKQVTQAVLEKDNDGSFKVKVVKQILWIEGVRYELRELYGSTTQGAASGLDESGSGTECVICMTEAKDTAVLPCRHLCMCSDCAKELRLQSNKCPICRQPIEELLEIKMNSSDEQH

SEQ ID NO: 25527 - protein, 359 aa, Arabidopsis thaliana
  peptide (1)..(359): Ceres Seq. ID no. 12324732
MGISFSNNNRRRDNNNRRHLHHYPPPPPYYYLDPPPPPPPFPPHYDYNYSNYHLSPPLPPQPQINSCSYGHYHYHPQPPQYFTTAQPNWWGPMMRPAYYCPPQPQTQPPKPYLEQQNAKKVRNDVNVHRDTVRLEVDDLVPGHHLVSFVFDALFDGSFTITFFAKEEPNCTIIPQFPEVYSPTRFHFQKGPGQKFLQPSGTGTDLSFFVLDDLSKPLEEDVYPLVISAETIISPNSISEQSSVHKQVTQAVLEKDNDGSFKVKVVKQILWIEGVRYELRELYGSTTQGAASGLDESGSGTECVICMTEAKDTAVLPCRHLCMCSDCAKELRLQSNKCPICRQPIEELLEIKMNSSDEQH

SEQ ID NO: 25528 - protein, 267 aa, Arabidopsis thaliana
  peptide (1)..(267): Ceres Seq. ID no. 12324733
MMRPAYYCPPQPQTQPPKPYLEQQNAKKVRNDVNVHRDTVRLEVDDLVPGHHLVSFVFDALFDGSFTITFFAKEEPNCTIIPQFPEVYSPTRFHFQKGPGQKFLQPSGTGTDLSFFVLDDLSKPLEEDVYPLVISAETIISPNSISEQSSVHKQVTQAVLEKDNDGSFKVKVVKQILWIEGVRYELRELYGSTTQGAASGLDESGSGTECVICMTEAKDTAVLPCRHLCMCSDCAKELRLQSNKCPICRQPIEELLEIKMNSSDEQH

SEQ ID NO: 25529 - DNA, 1380 bp, Arabidopsis thaliana
  misc_feature (1)..(1380): Ceres Seq. ID no. 13497590
  misc_feature (1)..(1380): Ortholog of  Ceres SEQ ID NO 15178181 as cited in SEQ ID NO 58740
  misc_feature (1)..(1380): Ortholog of  Ceres SEQ ID NO 12614739 as cited in SEQ ID NO 68587
gacatatatttatcttcttgaaaagcgaatgatgtctataaattgttttcgaacagcgaaggctccgcttcaatcatttgtagcagtaagaacgaattcgagacctagaaattcatcgaaccgtctcgtttctgtattcggacgcaagtcttcttctccttcatttgttactctcagagttgtttcatcgaaggcttacgagaaagagcttgatgctgctaagaaagctgcttcactcgctgctcgtctctgtcagaaagttcaaaaggctttgttgcaatcagatgtgcaatcaaaatctgataaaagtccagtgaccgttgctgattatggttcacaagcagttgttagtttagtcttagaaaaagagctcagttctgaacccttttcattggtggctgaagaggactcaggcgatctacgcaaggatggttctcaggatactctggagcgcatcacaaaactcgtgaacgacactttggctaccgaggaatcgtttaatggctctactttgtctactgatgatctacttagagccattgactgtggaacatctgaaggtggtccaaatggtcgacactgggtcttggatccaattgatggcactaaaggatttctgaggggagatcaatacgcagtagcactaggattgctcgaggaagggaaagtagttttaggtgtgcttgcttgtccaaacttgccgttagcatccatagcaggaaacaacaagaacaaatcttcgtcagacgaaattggatgcctcttctttgctacaattggttcagggacatatatgcagctcctagattcaaaatcttctcctgtaaaagtgcaagtctctagtgttgagaatcctgaagaggcatcgttcttcgagtcattcgaaggagctcactctctacatgacttatccagcaccattgccaataaactcggtgtcaaagctccaccagtccgtattgatagccaagcaaagtatggagctttatcaagaggagatggagctatatacttacggtttcctcataaaggataccgcgaaaagatttgggaccatgtcgctggtgctatagttgttacagaggcgggtggaatagtgacagatgcagcaggaaagccactggatttctcgaaagggaagtatcttgatttggacacaggcattatcgttgctaacgagaagctaatgcctctgcttttgaaagcagttcgtgactccatagctgagcaagagaaagcttcagctctctgatttgtttttttctctcgtacgttctttgtttctctgtaactgttgtttcattttctttcaccgaatttcaccagtgagaatttcttccattttcgaaaaagaaataaaaatgaaattctgttttgggc

SEQ ID NO: 25530 - protein, 416 aa, Arabidopsis thaliana
  peptide (1)..(416): Ceres Seq. ID no. 13497591
TYIYLLEKRMMSINCFRTAKAPLQSFVAVRTNSRPRNSSNRLVSVFGRKSSSPSFVTLRVVSSKAYEKELDAAKKAASLAARLCQKVQKALLQSDVQSKSDKSPVTVADYGSQAVVSLVLEKELSSEPFSLVAEEDSGDLRKDGSQDTLERITKLVNDTLATEESFNGSTLSTDDLLRAIDCGTSEGGPNGRHWVLDPIDGTKGFLRGDQYAVALGLLEEGKVVLGVLACPNLPLASIAGNNKNKSSSDEIGCLFFATIGSGTYMQLLDSKSSPVKVQVSSVENPEEASFFESFEGAHSLHDLSSTIANKLGVKAPPVRIDSQAKYGALSRGDGAIYLRFPHKGYREKIWDHVAGAIVVTEAGGIVTDAAGKPLDFSKGKYLDLDTGIIVANEKLMPLLLKAVRDSIAEQEKASAL

SEQ ID NO: 25531 - protein, 407 aa, Arabidopsis thaliana
  peptide (1)..(407): Ceres Seq. ID no. 13497592
MMSINCFRTAKAPLQSFVAVRTNSRPRNSSNRLVSVFGRKSSSPSFVTLRVVSSKAYEKELDAAKKAASLAARLCQKVQKALLQSDVQSKSDKSPVTVADYGSQAVVSLVLEKELSSEPFSLVAEEDSGDLRKDGSQDTLERITKLVNDTLATEESFNGSTLSTDDLLRAIDCGTSEGGPNGRHWVLDPIDGTKGFLRGDQYAVALGLLEEGKVVLGVLACPNLPLASIAGNNKNKSSSDEIGCLFFATIGSGTYMQLLDSKSSPVKVQVSSVENPEEASFFESFEGAHSLHDLSSTIANKLGVKAPPVRIDSQAKYGALSRGDGAIYLRFPHKGYREKIWDHVAGAIVVTEAGGIVTDAAGKPLDFSKGKYLDLDTGIIVANEKLMPLLLKAVRDSIAEQEKASAL

SEQ ID NO: 25532 - protein, 406 aa, Arabidopsis thaliana
  peptide (1)..(406): Ceres Seq. ID no. 13497593
MSINCFRTAKAPLQSFVAVRTNSRPRNSSNRLVSVFGRKSSSPSFVTLRVVSSKAYEKELDAAKKAASLAARLCQKVQKALLQSDVQSKSDKSPVTVADYGSQAVVSLVLEKELSSEPFSLVAEEDSGDLRKDGSQDTLERITKLVNDTLATEESFNGSTLSTDDLLRAIDCGTSEGGPNGRHWVLDPIDGTKGFLRGDQYAVALGLLEEGKVVLGVLACPNLPLASIAGNNKNKSSSDEIGCLFFATIGSGTYMQLLDSKSSPVKVQVSSVENPEEASFFESFEGAHSLHDLSSTIANKLGVKAPPVRIDSQAKYGALSRGDGAIYLRFPHKGYREKIWDHVAGAIVVTEAGGIVTDAAGKPLDFSKGKYLDLDTGIIVANEKLMPLLLKAVRDSIAEQEKASAL

SEQ ID NO: 25533 - DNA, 1155 bp, Arabidopsis thaliana
  misc_feature (1)..(1155): Ceres Seq. ID no. 12321578
  misc_feature (1)..(1155): Ortholog of  Ceres SEQ ID NO 13582350 as cited in SEQ ID NO 56734
  misc_feature (1)..(1155): Ortholog of  Ceres SEQ ID NO 12476493 as cited in SEQ ID NO 58163
  misc_feature (1)..(1155): Ortholog of  Ceres SEQ ID NO 14310807 as cited in SEQ ID NO 58696
  misc_feature (1)..(1155): Ortholog of  Ceres SEQ ID NO 12578315 as cited in SEQ ID NO 62451
  misc_feature (1)..(1155): Ortholog of  Ceres SEQ ID NO 12615466 as cited in SEQ ID NO 62761
  misc_feature (1)..(1155): Ortholog of  Ceres SEQ ID NO 13597295 as cited in SEQ ID NO 63743
  misc_feature (1)..(1155): Ortholog of  Ceres SEQ ID NO 12617090 as cited in SEQ ID NO 64005
  misc_feature (1)..(1155): Ortholog of  Ceres SEQ ID NO 15226458 as cited in SEQ ID NO 64042
  misc_feature (1)..(1155): Ortholog of  Ceres SEQ ID NO 13597439 as cited in SEQ ID NO 64081
  misc_feature (1)..(1155): Ortholog of  Ceres SEQ ID NO 13597233 as cited in SEQ ID NO 64370
  misc_feature (1)..(1155): Ortholog of  Ceres SEQ ID NO 13599438 as cited in SEQ ID NO 0
agaatcagatcatccatggaaacagcgtcgagagtggaactgattgttaaaggcaacttaccggaggttccttctcagtacattcagccaccggaagctcgacctaatctccattactccggcgatgcagcttcgatcccaaccgtcgatctctcgagctccgattccgcgagagaagccatcggtgacgcttgtcgcgactggggagccttccacgtaatcaaccatggtgttccaatccatctccttgatcggatgaggtctttaggtctctctttcttccaagactctcccatggaagagaagctacgttacgcctgcgactctacctccgccgcatctgaaggttacggtagccgtatgttgcttggtgctaaagatgacgtcgttttggattggagagattactttgatcatcacacgtttcctccctctcgtcgtaacccttctcattggccgattcatccttctgactacagacaagttgttggagaatatggtgatgagatgaagaaactagctcagatgctattagggctaatctcagagagtttgggtcttccttgttcatctatagaagaagctgttggtgaaatctatcagaacattactgtgagctattaccctccttgtcctcagcctgagctcactcttggtcttcagtctcattccgattttggtgccattactctcttgattcaagatgatgttgaaggtcttcagctttacaaggatgctcaatggctcactgttcctcctatctctgatgctattctcattcttattgccgatcaaaccgagatcattaccaatggaagatacaaaagtgctcaacatagagctgtgactaatgcgaatcgggcgcggttatcagtcgctacctttcatgatccctccaagactgcaaggatagcaccagtttctcaactctccccaccgtcttacaaggaagttgtgtatggtcaatatgtttcttcctggtactctaaaggtcctgagggtaaacgaaacctcgatgctcttctctactaagtttatgctaatgagtatgtggacgccaattgccacggctgaaaagtggtttcacaatagtggctgtaaaaactcaaaagacacaaacgataaataataataaactgaatgaatcctagtcgc

SEQ ID NO: 25534 - protein, 343 aa, Arabidopsis thaliana
  peptide (1)..(343): Ceres Seq. ID no. 12321579
RIRSSMETASRVELIVKGNLPEVPSQYIQPPEARPNLHYSGDAASIPTVDLSSSDSAREAIGDACRDWGAFHVINHGVPIHLLDRMRSLGLSFFQDSPMEEKLRYACDSTSAASEGYGSRMLLGAKDDVVLDWRDYFDHHTFPPSRRNPSHWPIHPSDYRQVVGEYGDEMKKLAQMLLGLISESLGLPCSSIEEAVGEIYQNITVSYYPPCPQPELTLGLQSHSDFGAITLLIQDDVEGLQLYKDAQWLTVPPISDAILILIADQTEIITNGRYKSAQHRAVTNANRARLSVATFHDPSKTARIAPVSQLSPPSYKEVVYGQYVSSWYSKGPEGKRNLDALLY

SEQ ID NO: 25535 - protein, 338 aa, Arabidopsis thaliana
  peptide (1)..(338): Ceres Seq. ID no. 12321580
METASRVELIVKGNLPEVPSQYIQPPEARPNLHYSGDAASIPTVDLSSSDSAREAIGDACRDWGAFHVINHGVPIHLLDRMRSLGLSFFQDSPMEEKLRYACDSTSAASEGYGSRMLLGAKDDVVLDWRDYFDHHTFPPSRRNPSHWPIHPSDYRQVVGEYGDEMKKLAQMLLGLISESLGLPCSSIEEAVGEIYQNITVSYYPPCPQPELTLGLQSHSDFGAITLLIQDDVEGLQLYKDAQWLTVPPISDAILILIADQTEIITNGRYKSAQHRAVTNANRARLSVATFHDPSKTARIAPVSQLSPPSYKEVVYGQYVSSWYSKGPEGKRNLDALLY

SEQ ID NO: 25536 - protein, 258 aa, Arabidopsis thaliana
  peptide (1)..(258): Ceres Seq. ID no. 12321581
MRSLGLSFFQDSPMEEKLRYACDSTSAASEGYGSRMLLGAKDDVVLDWRDYFDHHTFPPSRRNPSHWPIHPSDYRQVVGEYGDEMKKLAQMLLGLISESLGLPCSSIEEAVGEIYQNITVSYYPPCPQPELTLGLQSHSDFGAITLLIQDDVEGLQLYKDAQWLTVPPISDAILILIADQTEIITNGRYKSAQHRAVTNANRARLSVATFHDPSKTARIAPVSQLSPPSYKEVVYGQYVSSWYSKGPEGKRNLDALLY

SEQ ID NO: 25537 - DNA, 867 bp, Arabidopsis thaliana
  misc_feature (1)..(867): Ceres Seq. ID no. 12321582
  misc_feature (1)..(867): Ortholog of  Ceres SEQ ID NO 14303437 as cited in SEQ ID NO 54411
  misc_feature (1)..(867): Ortholog of  Ceres SEQ ID NO 12611816 as cited in SEQ ID NO 56754
  misc_feature (1)..(867): Ortholog of  Ceres SEQ ID NO 15170943 as cited in SEQ ID NO 59454
atcttcaatttttcatatttcgtttttaatttggttttcttttttcctctctatttcttcggctgagaggcggcgactatggcggaggaacagaagatagcgttagaatcagaatctccggcgaaggttacgactcctgctccagcagatacaccggctccagctccggcagagattccggctccagctccagctccgactccggctgatgtcacgaaagacgttgcagaggagaaaattcaaaacccacctccggagcaaattttcgatgactccaaagcccttactgttgttgagaaacctgtagaagagcctgcaccggcgaaacctgcgtctgcatcgctcgatagagatgttaagctagctgatttgtcaaaggaaaagagattgtctttcgtcagagcgtgggaagaaagcgaaaagagcaaagcagagaacaaagctgagaagaagattgcagatgttcatgcttgggaaaacagcaagaaagcagctgtcgaagcgcaactcaagaaaatcgaggagcaactagagaagaagaaagcagagtatgcagagaggatgaagaataaggttgcagcgattcacaaggaagcagaagagagaagagcaatgattgaagctaagcgtggagaagacgttcttaaagcagaagaaacggctgctaaatacagagccactggaattgttccaaaggcaacttgtggatgtttctaatcttgaatttgcgaatcaaagtttcaagacttcgtaactgtaaagtgtaatcaaatttctctgttctctttaatggcttgtaatgttgtttgtatattgattttgtgtgtgacaatcagagtgaaaaatatgtttcattgttttctttcc

SEQ ID NO: 25538 - protein, 212 aa, Arabidopsis thaliana
  peptide (1)..(212): Ceres Seq. ID no. 12321583
MAEEQKIALESESPAKVTTPAPADTPAPAPAEIPAPAPAPTPADVTKDVAEEKIQNPPPEQIFDDSKALTVVEKPVEEPAPAKPASASLDRDVKLADLSKEKRLSFVRAWEESEKSKAENKAEKKIADVHAWENSKKAAVEAQLKKIEEQLEKKKAEYAERMKNKVAAIHKEAEERRAMIEAKRGEDVLKAEETAAKYRATGIVPKATCGCF

SEQ ID NO: 25539 - DNA, 1650 bp, Arabidopsis thaliana
  misc_feature (1)..(1650): Ceres Seq. ID no. 13497507
  misc_feature (1)..(1650): Ortholog of  Ceres SEQ ID NO 15176219 as cited in SEQ ID NO 58640
  misc_feature (1)..(1650): Ortholog of  Ceres SEQ ID NO 14303413 as cited in SEQ ID NO 59769
aaccaagtcaatcattcttcattgatcttctccgatttgaaatcgccggcgaaaatggaatcctccggcgacaagcaaacttcttctctttaccctactgttgacacatccaatcccgaagctcctataaaccctagctcatcatcttctactaacaatctctatccttctctcgatatgaatgatctcgctcgtaatctcttccctgaacaaccagagacgagttctattccggtttcagctcctcccgctgcgacggaggaagtaattttgaaaatctccggcgcgattcttcatttaatcgacaaatcttacagcgtcgagctcgcttgcggtgatcttgagatcatccgtattgttcaaggagagaatgttgtcgctgttctcgctagtgtctccgatgagattcaatggccgttgactaaggatgagaactctgtcaaggtcgatgagtctcattacttcttcacgcttcgtcctaccaaagagatctcacatgattcaagcgacgaagaagacggagatggagggaaaaacactaacgagatgttgaactacggacttacaattgcttctaaaggtcaagagcatttactggtggagcttgagaagatcttggaggattatagtagtttctctgtgcaggaggtgtcagaggaagcgaaggaagcaggtgaaaaggttttggatgtgacggtggcgagagagacgtctccggtggagcttactggggaaaggaaagagattgtggagaggcaatgttctgcttattggactactttggctccgaatgtggaggattatagcgggaaggcggcgaagctgattgcaactggctcaggacatttgataaaagggattctttggtgtggagatgtgactatggataggcttatttggggaaatggtttcatgaaaaggaggttgtcaaaggctgagaaggagagtgaagttcaccctgacaccttgaaaagaatcagaagagtgaagaggatgaccaaaatgacagagagtgtagcaaacagcatactgtctggagtccttaaagtttctggattcttcacaagttcagtggcaaacaccaaagtaggaaagaaattcttcagccttcttcctggagaagtcatccttgcatctcttgacggattcaataaggtctgtgacgctgttgaagtagctgggaggaatgtaatgtcaacctcttccactgttacaaccgaactcgttgatcacaagtatggtggtaaagcggctgaggcgacaaacgaagggctcgatgcagcaggatatgcgcttggcacagcctgggttgctttcaaaataagaaaggctattaacccgaagagtgtactcaagccttcgacgcttgcaaaaaccgccattagatctgcagcttcacaaaaaaaagcctagtaaggctgcctgatgaagcaaaacagactcattggtcctgtttgtttgtatcgtcttgttgtcttttgataaataagttaaactaaaaagaggtgtggattagtagttgttgtgaagtgtttatgtttctctatgagaatcatgtaatgtctctgatttgattcggaatatgtgctgtatgtgtaagtggtcaaatcaagattccttgaaattagttttcatgtttttttaacgtgc

SEQ ID NO: 25540 - protein, 470 aa, Arabidopsis thaliana
  peptide (1)..(470): Ceres Seq. ID no. 13497508
NQVNHSSLIFSDLKSPAKMESSGDKQTSSLYPTVDTSNPEAPINPSSSSSTNNLYPSLDMNDLARNLFPEQPETSSIPVSAPPAATEEVILKISGAILHLIDKSYSVELACGDLEIIRIVQGENVVAVLASVSDEIQWPLTKDENSVKVDESHYFFTLRPTKEISHDSSDEEDGDGGKNTNEMLNYGLTIASKGQEHLLVELEKILEDYSSFSVQEVSEEAKEAGEKVLDVTVARETSPVELTGERKEIVERQCSAYWTTLAPNVEDYSGKAAKLIATGSGHLIKGILWCGDVTMDRLIWGNGFMKRRLSKAEKESEVHPDTLKRIRRVKRMTKMTESVANSILSGVLKVSGFFTSSVANTKVGKKFFSLLPGEVILASLDGFNKVCDAVEVAGRNVMSTSSTVTTELVDHKYGGKAAEATNEGLDAAGYALGTAWVAFKIRKAINPKSVLKPSTLAKTAIRSAASQKKA

SEQ ID NO: 25541 - protein, 452 aa, Arabidopsis thaliana
  peptide (1)..(452): Ceres Seq. ID no. 13497509
MESSGDKQTSSLYPTVDTSNPEAPINPSSSSSTNNLYPSLDMNDLARNLFPEQPETSSIPVSAPPAATEEVILKISGAILHLIDKSYSVELACGDLEIIRIVQGENVVAVLASVSDEIQWPLTKDENSVKVDESHYFFTLRPTKEISHDSSDEEDGDGGKNTNEMLNYGLTIASKGQEHLLVELEKILEDYSSFSVQEVSEEAKEAGEKVLDVTVARETSPVELTGERKEIVERQCSAYWTTLAPNVEDYSGKAAKLIATGSGHLIKGILWCGDVTMDRLIWGNGFMKRRLSKAEKESEVHPDTLKRIRRVKRMTKMTESVANSILSGVLKVSGFFTSSVANTKVGKKFFSLLPGEVILASLDGFNKVCDAVEVAGRNVMSTSSTVTTELVDHKYGGKAAEATNEGLDAAGYALGTAWVAFKIRKAINPKSVLKPSTLAKTAIRSAASQKKA

SEQ ID NO: 25542 - protein, 411 aa, Arabidopsis thaliana
  peptide (1)..(411): Ceres Seq. ID no. 13497510
MNDLARNLFPEQPETSSIPVSAPPAATEEVILKISGAILHLIDKSYSVELACGDLEIIRIVQGENVVAVLASVSDEIQWPLTKDENSVKVDESHYFFTLRPTKEISHDSSDEEDGDGGKNTNEMLNYGLTIASKGQEHLLVELEKILEDYSSFSVQEVSEEAKEAGEKVLDVTVARETSPVELTGERKEIVERQCSAYWTTLAPNVEDYSGKAAKLIATGSGHLIKGILWCGDVTMDRLIWGNGFMKRRLSKAEKESEVHPDTLKRIRRVKRMTKMTESVANSILSGVLKVSGFFTSSVANTKVGKKFFSLLPGEVILASLDGFNKVCDAVEVAGRNVMSTSSTVTTELVDHKYGGKAAEATNEGLDAAGYALGTAWVAFKIRKAINPKSVLKPSTLAKTAIRSAASQKKA

SEQ ID NO: 25543 - DNA, 1216 bp, Arabidopsis thaliana
  misc_feature (1)..(1216): Ceres Seq. ID no. 12422586
  misc_feature (1)..(1216): Ortholog of  Ceres SEQ ID NO 14302757 as cited in SEQ ID NO 56631
gagataacgttcttctccaaaattgcttgaggaagtggttttgttgtgtctctctgggtttgaaatatgagcggagatagacttgaatttgaaaaccctatagaggatgcggtttcgaggctcagattctcccctcaatcaaacaatctcctcgttgcttcttgggattcttatctgagattgtataatgtggagagctcttcgctaagtctagaattaaactctcaagctgctcttcttgattgttgtttcgagaatgaatcaacttcatatgcctctggttctgatggattcatccgaaggtatgatttaaacgctggaacgtttgatacaattggaagacatgatgacattgcaacatccattgtctactcttatgaaaaaggtgaagttatctctactgggtttgatgagaagatcaaattctgggatacaagacaaagagaaagtcttgtgttttcgactgatgctggtggagcagtgggatgtgtcactgtatctggaaacaacttagttgtttgtgtgaacgcatcgatgcatatatacgatttacgtaacttagatgaagcttttcaatcgtatgcatcccaagtggaggtgccaatcagatgtatcacctctgtaccttattccagaggatatgcagttgggtcagtagacggacgagtagctgtggatttccccaatacatcatgctccagtgagattaaatacagtttccgatgccatcccaagagtaggaatggaagacttgatggtgtatgcataaatgcaatcgaattcagtccatgtggatcagggacttttgtaacaggtgacaatgaagggtacgtgatctcatggaatgctaaaagcagaagaagactcaatgagttgccaaggtactcaaatagcatagcgtctttagcatttgaccacactggagaactcttagccattgcatcaagccacacttaccaagatgctaaagagaaggaagaagctcctcaagtgttcatacacaggctttgaaagattcgtaagcttcttgaatctcagtgtctacttgtatctatctagttattttttttgtgtgtttttggtagcacgttttagcttgatctcagaactgactcgtgtcaaccaacatgtaatgattgtatctctcacgtctctttatactacttgttctctaaactttgttttgactttttagtcaactatatgctttgacttt

SEQ ID NO: 25544 - protein, 314 aa, Arabidopsis thaliana
  peptide (1)..(314): Ceres Seq. ID no. 12422587
MSGDRLEFENPIEDAVSRLRFSPQSNNLLVASWDSYLRLYNVESSSLSLELNSQAALLDCCFENESTSYASGSDGFIRRYDLNAGTFDTIGRHDDIATSIVYSYEKGEVISTGFDEKIKFWDTRQRESLVFSTDAGGAVGCVTVSGNNLVVCVNASMHIYDLRNLDEAFQSYASQVEVPIRCITSVPYSRGYAVGSVDGRVAVDFPNTSCSSEIKYSFRCHPKSRNGRLDGVCINAIEFSPCGSGTFVTGDNEGYVISWNAKSRRRLNELPRYSNSIASLAFDHTGELLAIASSHTYQDAKEKEEAPQVFIHRL

SEQ ID NO: 25545 - protein, 158 aa, Arabidopsis thaliana
  peptide (1)..(158): Ceres Seq. ID no. 12422588
MHIYDLRNLDEAFQSYASQVEVPIRCITSVPYSRGYAVGSVDGRVAVDFPNTSCSSEIKYSFRCHPKSRNGRLDGVCINAIEFSPCGSGTFVTGDNEGYVISWNAKSRRRLNELPRYSNSIASLAFDHTGELLAIASSHTYQDAKEKEEAPQVFIHRL

SEQ ID NO: 25546 - DNA, 1609 bp, Arabidopsis thaliana
  misc_feature (1)..(1609): Ceres Seq. ID no. 12578699
  misc_feature (1)..(1609): Ortholog of  Ceres SEQ ID NO 13590307 as cited in SEQ ID NO 67154
ccatagttccagttctgaaatctcactttcacagtttgtgtctgtgcgataatggccatggcagagctctcaacccccaaaacgacgtcgccttttctcaactcttcgtctcggcttcgtctctcttcaaaattgcacctttcaaaccactttcgccatcttcttcttccacctctccacacaacaactcccaactccaaaatctcttgctccgtttctcaaaatagccaagctcctgttgctgtgcaagaaaatggattggtgaagacgaagaaagagtgttatggagtgttctgcctcacctatgatcttaaagctgaagaagagacaagatcatggaagaagttaattaatattgcagtttcaggtgctgcaggaatgatttctaaccatcttctcttcaaacttgcttcaggggaagtatttggtccagatcaacccattgcattgaaactgctaggatcagagagatcaattcaagctcttgaaggtgttgcaatggaactggaggattcattgttcccattgttgagagaagttgatataggaacagatccaaatgaagtgttccaagatgtggagtgggctattctgattggagcaaaacctcgaggccctggaatggaacgtgctgacttgttggacatcaatggccaaatctttgctgagcagggcaaagctctgaacaaagctgcctctcctaacgtcaaggttcttgtagtgggaaacccttgcaacaccaatgccttgatttgtcttaaaaatgctcccaacattcctgcaaagaacttccatgccctcacgaggttagacgaaaatcgtgccaaatgccagcttgctcttaaagccggtgttttctatgacaaagtgtctaatatgaccatatggggaaatcactccacgactcaggtgccagacttcttaaatgccagaattaatggcctgcctgtgaaggaggttattacagatcacaaatggttagaagagggattcactgagagtgtgcagaagagaggtgggttattaattcagaaatggggtcgatcttctgctgcttctactgctgtttccattgttgatgctataaagtctcttgtaactcctactcctgagggtgattggttttcgactggggtgtacacggatggaaatccttatggtattgaagagggccttgtcttcagtatgccatgccggtcgaagggagatggagattatgaacttgtcaaggatgtagaaattgatgactaccttcgccaacgaatcgccaagtcggaagcggaactgttggctgagaagagatgtgttgcacacctcactggagagggcattgcctactgtgatcttggtccggtagatactatgcttcctggggaagtttgatttttgcaggacgttgaacatctcaagtaagcattctcttccgggttgttagctgtacagagcacagccacattacttatgatgattgttcagaataagaaaatgaaactcttatttcttatttacatgcatctgtatgtgatttttcttgagcaatgctccaaaagtcatatacagtagtatttgtaaacacttgaaacgtttctatgctttattccagtttcag

SEQ ID NO: 25547 - protein, 443 aa, Arabidopsis thaliana
  peptide (1)..(443): Ceres Seq. ID no. 12578700
MAMAELSTPKTTSPFLNSSSRLRLSSKLHLSNHFRHLLLPPLHTTTPNSKISCSVSQNSQAPVAVQENGLVKTKKECYGVFCLTYDLKAEEETRSWKKLINIAVSGAAGMISNHLLFKLASGEVFGPDQPIALKLLGSERSIQALEGVAMELEDSLFPLLREVDIGTDPNEVFQDVEWAILIGAKPRGPGMERADLLDINGQIFAEQGKALNKAASPNVKVLVVGNPCNTNALICLKNAPNIPAKNFHALTRLDENRAKCQLALKAGVFYDKVSNMTIWGNHSTTQVPDFLNARINGLPVKEVITDHKWLEEGFTESVQKRGGLLIQKWGRSSAASTAVSIVDAIKSLVTPTPEGDWFSTGVYTDGNPYGIEEGLVFSMPCRSKGDGDYELVKDVEIDDYLRQRIAKSEAELLAEKRCVAHLTGEGIAYCDLGPVDTMLPGEV

SEQ ID NO: 25548 - protein, 441 aa, Arabidopsis thaliana
  peptide (1)..(441): Ceres Seq. ID no. 12578701
MAELSTPKTTSPFLNSSSRLRLSSKLHLSNHFRHLLLPPLHTTTPNSKISCSVSQNSQAPVAVQENGLVKTKKECYGVFCLTYDLKAEEETRSWKKLINIAVSGAAGMISNHLLFKLASGEVFGPDQPIALKLLGSERSIQALEGVAMELEDSLFPLLREVDIGTDPNEVFQDVEWAILIGAKPRGPGMERADLLDINGQIFAEQGKALNKAASPNVKVLVVGNPCNTNALICLKNAPNIPAKNFHALTRLDENRAKCQLALKAGVFYDKVSNMTIWGNHSTTQVPDFLNARINGLPVKEVITDHKWLEEGFTESVQKRGGLLIQKWGRSSAASTAVSIVDAIKSLVTPTPEGDWFSTGVYTDGNPYGIEEGLVFSMPCRSKGDGDYELVKDVEIDDYLRQRIAKSEAELLAEKRCVAHLTGEGIAYCDLGPVDTMLPGEV

SEQ ID NO: 25549 - protein, 334 aa, Arabidopsis thaliana
  peptide (1)..(334): Ceres Seq. ID no. 12578702
MISNHLLFKLASGEVFGPDQPIALKLLGSERSIQALEGVAMELEDSLFPLLREVDIGTDPNEVFQDVEWAILIGAKPRGPGMERADLLDINGQIFAEQGKALNKAASPNVKVLVVGNPCNTNALICLKNAPNIPAKNFHALTRLDENRAKCQLALKAGVFYDKVSNMTIWGNHSTTQVPDFLNARINGLPVKEVITDHKWLEEGFTESVQKRGGLLIQKWGRSSAASTAVSIVDAIKSLVTPTPEGDWFSTGVYTDGNPYGIEEGLVFSMPCRSKGDGDYELVKDVEIDDYLRQRIAKSEAELLAEKRCVAHLTGEGIAYCDLGPVDTMLPGEV

SEQ ID NO: 25550 - DNA, 1350 bp, Arabidopsis thaliana
  misc_feature (1)..(1350): Ceres Seq. ID no. 13486964
  misc_feature (1)..(1350): Ortholog of  Ceres SEQ ID NO 13582388 as cited in SEQ ID NO 56812
  misc_feature (1)..(1350): Ortholog of  Ceres SEQ ID NO 14305353 as cited in SEQ ID NO 57710
aaaaaaaaaaaataaaaaagaagagacaaaggggagagagagaaaagaagagcgaacaaattccttctttttcccctctttctctctctctcccactctctcatcttcttcttcttatgattttcaacttattacaacaacaacaacaacaaaataatcttgcaaagtttcagtctcaggtggttcacagttaatgctacttgcaatgatgaatccatcccaatttcgataacctctactgaggcatccaaatgttgaacggaaaagaagagcctaagcagaagaaaggttggtcagagtcgctgctagaatttcggtcagggtttggggaaaagatgaaagttgtgtcgaagaaacgttggaaatctcttggtcctcttcatctgaaaagcaaatcagttgcacggttttgcttcttttcgaagttgaagtcaaacaaccatggtccaggccgtgcaccagtgtatctcaatgtttatgacttgactcctattaacggatatatctattgggcaggccttggtatatttcactctggtgtagaagttcatggagtagagtatgcttttggtgcccatgattatgcaacgagtggtgtttttgaggttgaaccaaggcaatgcccgggcttcaagttcaagaaatcgatattcattggaaccacgaatttaaacccaacacaagtgagagagtttatggaagacatggcttgcagttactacgggaatatgtatcacttgattgttaagaactgcaaccatttctgccaggacgtttgctacaagcttaccgggaaaaagatcccaaaatgggtgaatcggcttgcacaaataggttctgtgtgcagctgcatacttcccgagtccctcaagataacagcggtctgccacgatccagacgggcaaatcccggaggaagaaaacgaaaagagaagtcttagaagctcattcagctgtttatcatccatctccatgagacaaaaacagctttcaacatcatcattgttcctacaatcacctctcagaggctgcttacctccttggcaactcaaacgctcaaaatctaacagcagctccttgaaagaaaggtagacattccaacaaaaaccattgcggtctctcattcgtttcgttagcaacacaaaccacgatttatccttcttctatctttgtaatggagttcgaaaacagatttcccgcgccatcgcttttcatttgattttaacaggctttcataagccattcttcatcttctttctgtttgtattgcttccaaatttgaatcttttctcattttcaaaatcatgtattgcatcaacgctgtttatatctaaactagctctcttagttc

SEQ ID NO: 25551 - protein, 279 aa, Arabidopsis thaliana
  peptide (1)..(279): Ceres Seq. ID no. 13486965
MLNGKEEPKQKKGWSESLLEFRSGFGEKMKVVSKKRWKSLGPLHLKSKSVARFCFFSKLKSNNHGPGRAPVYLNVYDLTPINGYIYWAGLGIFHSGVEVHGVEYAFGAHDYATSGVFEVEPRQCPGFKFKKSIFIGTTNLNPTQVREFMEDMACSYYGNMYHLIVKNCNHFCQDVCYKLTGKKIPKWVNRLAQIGSVCSCILPESLKITAVCHDPDGQIPEEENEKRSLRSSFSCLSSISMRQKQLSTSSLFLQSPLRGCLPPWQLKRSKSNSSSLKER

SEQ ID NO: 25552 - protein, 251 aa, Arabidopsis thaliana
  peptide (1)..(251): Ceres Seq. ID no. 13486966
MKVVSKKRWKSLGPLHLKSKSVARFCFFSKLKSNNHGPGRAPVYLNVYDLTPINGYIYWAGLGIFHSGVEVHGVEYAFGAHDYATSGVFEVEPRQCPGFKFKKSIFIGTTNLNPTQVREFMEDMACSYYGNMYHLIVKNCNHFCQDVCYKLTGKKIPKWVNRLAQIGSVCSCILPESLKITAVCHDPDGQIPEEENEKRSLRSSFSCLSSISMRQKQLSTSSLFLQSPLRGCLPPWQLKRSKSNSSSLKER

SEQ ID NO: 25553 - DNA, 1245 bp, Arabidopsis thaliana
  misc_feature (1)..(1245): Ceres Seq. ID no. 12656004
  misc_feature (1)..(1245): Ortholog of  Ceres SEQ ID NO 13596891 as cited in SEQ ID NO 62868
  misc_feature (1)..(1245): Ortholog of  Ceres SEQ ID NO 12617235 as cited in SEQ ID NO 63990
  misc_feature (1)..(1245): Ortholog of  Ceres SEQ ID NO 13655371 as cited in SEQ ID NO 68945
atcatagtgatcaaaagtacgtaaaatcggaaatgacgaacgcagaagcagtaacggtgaccaacaagcaaatcatattcccagactatgttactggatttccaaaagaatctgatcttaaaataaccacaactaccattgatctaaggcttccggagggatccacctcagtactggtgaagaatctttacttgtcttgcgatccttacatgcgcatttgcatgggaaagcccgatcccttgtcttcttcccttgttccaccttacaagaccggcgtgccaatcattgggcttggagtgtctaaagtgattgattcaggacatccagattacaaaaagggagacttactttggggactagttggatgggaggagtacagtgttattactttaactacttactcacacttcaaaatcgaacataccgatgttccattatcttactacactggacttcttggtatgcctggtatgactgcttatgctggattttacgaagtttgttcacctaaaaaaggagagactgtcttcgtgtcagctgcatccggcgcggttggtcagctcgtgggacaatttgcaaagttgatgggttgttatgtcgttggtagtgctggcagtaaagaaaaggtttatctactcaagacaaagtttgggtttgatgatgctttcaattacaaggaagagaaggactttagtgctgccctaaagaggtattttccggaagggatcgacatatattttgagaacgttggaggcaaaatgttagatgccgtactcataaacatgaagttgcatggtcgtgtcgcagtatgtggaatgatctcacagtataatttagtggatccagaaggcgtacacaacttacccaccattctttacaagaggatacaacttcaagggtttggtgtttgtgatttctacgacaaatatcctaagtttttggattttgtgcttccttacattagagaagggaagataacatacgttgaggatatagcggaaggattcgagagtggaccttctgctcttttaggactcttcgaaggtaagaacgtcgggaaacaactatttgtggttgctcgtgagtgagacgttgaaggtttcatattatatggtgttgttctttgaaaagtagattatgattctttgtttttagttttgttcggacaagtcatttccttgacacatgggaataataatcgcatttgtttttaacttaaaattgagacgtttcaacctttttggg

SEQ ID NO: 25554 - protein, 361 aa, Arabidopsis thaliana
  peptide (1)..(361): Ceres Seq. ID no. 12656005
HSDQKYVKSEMTNAEAVTVTNKQIIFPDYVTGFPKESDLKITTTTIDLRLPEGSTSVLVKNLYLSCDPYMRICMGKPDPLSSSLVPPYKTGVPIIGLGVSKVIDSGHPDYKKGDLLWGLVGWEEYSVITLTTYSHFKIEHTDVPLSYYTGLLGMPGMTAYAGFYEVCSPKKGETVFVSAASGAVGQLVGQFAKLMGCYVVGSAGSKEKVYLLKTKFGFDDAFNYKEEKDFSAALKRYFPEGIDIYFENVGGKMLDAVLINMKLHGRVAVCGMISQYNLVDPEGVHNLPTILYKRIQLQGFGVCDFYDKYPKFLDFVLPYIREGKITYVEDIAEGFESGPSALLGLFEGKNVGKQLFVVARE

SEQ ID NO: 25555 - protein, 351 aa, Arabidopsis thaliana
  peptide (1)..(351): Ceres Seq. ID no. 12656006
MTNAEAVTVTNKQIIFPDYVTGFPKESDLKITTTTIDLRLPEGSTSVLVKNLYLSCDPYMRICMGKPDPLSSSLVPPYKTGVPIIGLGVSKVIDSGHPDYKKGDLLWGLVGWEEYSVITLTTYSHFKIEHTDVPLSYYTGLLGMPGMTAYAGFYEVCSPKKGETVFVSAASGAVGQLVGQFAKLMGCYVVGSAGSKEKVYLLKTKFGFDDAFNYKEEKDFSAALKRYFPEGIDIYFENVGGKMLDAVLINMKLHGRVAVCGMISQYNLVDPEGVHNLPTILYKRIQLQGFGVCDFYDKYPKFLDFVLPYIREGKITYVEDIAEGFESGPSALLGLFEGKNVGKQLFVVARE

SEQ ID NO: 25556 - protein, 292 aa, Arabidopsis thaliana
  peptide (1)..(292): Ceres Seq. ID no. 12656007
MRICMGKPDPLSSSLVPPYKTGVPIIGLGVSKVIDSGHPDYKKGDLLWGLVGWEEYSVITLTTYSHFKIEHTDVPLSYYTGLLGMPGMTAYAGFYEVCSPKKGETVFVSAASGAVGQLVGQFAKLMGCYVVGSAGSKEKVYLLKTKFGFDDAFNYKEEKDFSAALKRYFPEGIDIYFENVGGKMLDAVLINMKLHGRVAVCGMISQYNLVDPEGVHNLPTILYKRIQLQGFGVCDFYDKYPKFLDFVLPYIREGKITYVEDIAEGFESGPSALLGLFEGKNVGKQLFVVARE

SEQ ID NO: 25557 - DNA, 1668 bp, Arabidopsis thaliana
  misc_feature (1)..(1668): Ceres Seq. ID no. 12357789
  misc_feature (1)..(1668): Ortholog of  Ceres SEQ ID NO 14307210 as cited in SEQ ID NO 54833
gttgattttagtatttgccgaagttggaactttaagatcaaagaagaaaatggagagatccatttcctttaatcctcgaggcgataacgagctccctgatgatcggagcagcgatgtcggatatgctgctaatgatcggaggcttgcttattctcgctcgtttcagcaatctcacggtccacgaacgccggcggtaacggaagcggctaagccttttctcgataggacggtctcgagcatcgatatgccgccggatatttactccgttgatggaaatgatgtgtttttcggggaagggaaagatgtagacatggcaaaagtgtctgttttggaaatggtttgggaggtttttggagtagtgacaagtggaaatcggcagatgaagagactgtttctgctaattgcgcttaatgtgttgtattctacaacagagctctctattggtatcttcactggtcgtgtaggtttggtctctgatgcattccatttgacatttggttgtggtctcttgacattttctttatttgcaatggcaacttcaaggaagaagcctgatcatgcttactcatacgggtacaaaagacttgaagttttatctgctttcactaatgctacagctgttccttatgttcatgtcattctccttagctgtggaagctcttcatgcatttatacaagatgaatcagagcataagcattatttgattgtatcagcggtaacaaatctgctggtgaacctactaggtgtttggtttttccggaattatgctcgtgtcaatattgcctttgttggtggctttggtattcatttgtagaaattggccacccttgtcagttttcgctttaaagccaaagaagtaagggtgtttggttaagatagaatcagtacgaggattagttgaaagagagagtcagcataattgtaaactgatctgtcaaacgactattcgttgcttcttgaaattatctgtcccttctttacatatctaaaaaccacatgttatcttgaatttttttcttatattcataatatgcaatatgctgcagcctacagaaaagcagaagatatgaattatcactccgtttgcttgcacgtcatatcagattccatccgcagtgcaggtttgatactggcatcttggctcctctcgctcggggttgaaaatgcagaggtcctatgtttaggattggtatcggtcacagtgtttatgcttgttatgccactcttcaaagccactggtggtgtcttgcttcagatggcacccccaaacattccttcttctgctttaagcaaatgcttgcgacagattacttctcgagaagatgtaacggaggttttacaggcacgtttctgggaggttgtgcctggtcacactgttggctcactcagactccaggtgaagagcggaatagatgaaagaccattactgcaatatgtatatgatgtataccatgatttgggtgtacaagacttgaccctgcaaactgattacacctaagctgcatctgcctcttctttgtttttaaatgctgatttgaagatttttggatgtatactagagatcatggttctttaggaatataaatattgtgaattttcaagttgtgactttgtgatattgttttgtttgtttttcatttatgtgaattttcaaccacacaaagacc

SEQ ID NO: 25558 - protein, 226 aa, Arabidopsis thaliana
  peptide (1)..(226): Ceres Seq. ID no. 12357790
LILVFAEVGTLRSKKKMERSISFNPRGDNELPDDRSSDVGYAANDRRLAYSRSFQQSHGPRTPAVTEAAKPFLDRTVSSIDMPPDIYSVDGNDVFFGEGKDVDMAKVSVLEMVWEVFGVVTSGNRQMKRLFLLIALNVLYSTTELSIGIFTGRVGLVSDAFHLTFGCGLLTFSLFAMATSRKKPDHAYSYGYKRLEVLSAFTNATAVPYVHVILLSCGSSSCIYTR

SEQ ID NO: 25559 - protein, 210 aa, Arabidopsis thaliana
  peptide (1)..(210): Ceres Seq. ID no. 12357791
MERSISFNPRGDNELPDDRSSDVGYAANDRRLAYSRSFQQSHGPRTPAVTEAAKPFLDRTVSSIDMPPDIYSVDGNDVFFGEGKDVDMAKVSVLEMVWEVFGVVTSGNRQMKRLFLLIALNVLYSTTELSIGIFTGRVGLVSDAFHLTFGCGLLTFSLFAMATSRKKPDHAYSYGYKRLEVLSAFTNATAVPYVHVILLSCGSSSCIYTR

SEQ ID NO: 25560 - protein, 155 aa, Arabidopsis thaliana
  peptide (1)..(155): Ceres Seq. ID no. 12357792
MQYAAAYRKAEDMNYHSVCLHVISDSIRSAGLILASWLLSLGVENAEVLCLGLVSVTVFMLVMPLFKATGGVLLQMAPPNIPSSALSKCLRQITSREDVTEVLQARFWEVVPGHTVGSLRLQVKSGIDERPLLQYVYDVYHDLGVQDLTLQTDYT

SEQ ID NO: 25561 - DNA, 3341 bp, Arabidopsis thaliana
  misc_feature (1)..(3341): Ceres Seq. ID no. 12602487
  misc_feature (1)..(3341): Ortholog of  Ceres SEQ ID NO 15169623 as cited in SEQ ID NO 67523
gtcaaatatttctgcacggaagcttcgaaaagaggtcatcaatggagtcttcactcttttctccatcttcctcttcttactcttctctcttcactgcaaaacctacgcgtcttttatcaccaaaacccaaattcacattctccatcagatcctccattgagaaacccaaacccaaactcgagaccaattcatcgaaatcccaatcatgggtcagtcccgattggctcacaacactcactcgtaccctttcctcaggaaaaaacgacgagtcaggtataccaatcgcgaacgcgaagctcgacgatgtcgctgatctcctcggaggtgctctcttcttacctctctacaaatggatgaatgagtacggacccatttaccgtctcgctgctggtcctcgtaatttcgtaattgtgagcgacccagcgatagctaaacatgttttgaggaattatccaaagtacgctaaaggcttagtcgctgaagtctctgaatttctatttggttcgggtttcgctatcgctgaaggacctctttggacagcgaggcgtagagcggtggttccatcgcttcacaggaggtatttgtctgtgattgtggagagagtattctgcaaatgtgcagagaggcttgttgagaagttgcagccttatgcagaagacggaagtgctgtgaatatggaagcgaagttctctcagatgacacttgatgtcattgggttgtctctttttaactacaatttcgattctttgactactgatagtcctgtcattgaagctgtttacactgctcttaaagaagctgagcttcgttctactgatcttctgccatattggaagatcgatgcattgtgtaagatagtcccgagacaggtgaaagctgaaaaggctgtaactttgataagggaaactgttgaagaccttattgctaagtgtaaagaaattgtcgaaagagaaggcgaaagaatcaatgatgaggagtatgtaaatgatgctgacccaagtatcctgcgtttcttgcttgcaagcagagaagaggtatcaagtgtgcagttacgggatgatcttctctcaatgctcgtagcgggtcatgaaaccactggatctgtcctcacttggacactttatctcctaagtaagaactcatctgcattaaggaaagcacaagaagaagtagacagagtgttagaaggaagaaacccggctttcgaggatataaaggagttgaagtacatcactcgttgtataaacgagtcaatgcgtctctatcctcatcctcctgtcttgataagaagagctcaagttcctgacattcttcctgggaactataaggtcaataccggacaagacattatgatttcagtctataacatccatcgttcttccgaggtatgggaaaaagctgaggaatttctgcctgaacgattcgacatagatggcgcaatccctaacgaaacaaacactgatttcaaattcatcccattcagtggagggcctagaaaatgtgtaggcgatcagtttgcattgatggaggcaattgtggcactcgcggtgtttcttcagcggttaaacgttgagctggttcctgatcagaccattagcatgaccacaggagcaaccatacacaccaccaatggattgtatatgaaggtgagccaaaggtaaaaaccagaatttatgttttcatgataattgattggtgtgaatggacttgtttcatagtactcttgagaaataaccacaaaaaaatgaattatggaaaatagttgtaccatcggaaatgtgaattttgaacagtgagatgctagtaccattaaagtttggtaattgtgttatcatttcaaatcaaactttcatacagcttgtgtttgttctccatttttcagtaattacgaaaatcaaaattttatttttttttgaatttctaaataatagactaaggtctaaaaccatcccattccatatggaccacacgtaacattaaccttaaaaaccatataaaaccatataaaaccaatactagtgggttctatagcgatgtgtagtttcactttcacgtacgaggaagattaaaaaaaatggagaacgaaagctcagagagtagaaacagagctcgtcttgccattatggagcttgctaacatgattagcgttcccatgtctctcaatgccgccgtgcgactaggcattgccgacgccatttggaacggcggagccaattctcctctctctgccgccgagatcctccctcgcctccacctaccatctcacactaccattggtggcgaccccgagaatcttcagcgtatacttcggatgctcaccagctacggtgtcttctccgaacaccttgttggatccattgagaggaaatactctcttacggacgtcggaaaaactcttgtaaccgactccggcggcctctcttacgctgcctacgtcctccaacatcaccaggaggcgttgatgcgagcatggccactagttcacacggcagtggtggagccggagacagagccgtacgtgaaagcaaacggcgaggcggcatacgctcagtatgggaaaagtgaggagatgaatggtctaatgcaaaaggcaatgtctggcgtatctgtaccgttcatgaaagctatattagacggctacgatgggtttaaatcagtggatattttggttgacgtaggaggtagtgcaggggattgtctgcgtatgatccttcaacaatttcctaacgtccgtgaagggattaatttcgatttacctgaagttgttgccaaagcccccaatattcctggagtgactcacgtgggtggggatatgttccaatcagttcctagcgctgacgctatcttcatgaagtgggtgttaacgacatggacggatgaagaatgcaagcagataatgaagaattgctacaacgcgttaccagttggaggaaagctgattgcgtgtgagccggtcttgcctaaggaaaccgatgaaagtcaccggactcgtgccttgttagaaggtgacatctttgtcatgaccatctatagaaccaaaggtaagcatagaaccgaagaagagtttatagagcttggtctctccgcgggattccctacttttcgacctttctacattgattacttctacaccatcttagagtttcagaagtaatattcaagcatttttcttctcatatttctaaaagcttcaaaataatgaatcaaaagacctctttgttaattgagttgagatatctagtgaagacattaatattttcatcaagatgtaataatctaaagtctatattctaagtgcatccttaaaaggcattttccatatatataagtttcatctttcg

SEQ ID NO: 25562 - protein, 552 aa, Arabidopsis thaliana
  peptide (1)..(552): Ceres Seq. ID no. 12602488
QIFLHGSFEKRSSMESSLFSPSSSSYSSLFTAKPTRLLSPKPKFTFSIRSSIEKPKPKLETNSSKSQSWVSPDWLTTLTRTLSSGKNDESGIPIANAKLDDVADLLGGALFLPLYKWMNEYGPIYRLAAGPRNFVIVSDPAIAKHVLRNYPKYAKGLVAEVSEFLFGSGFAIAEGPLWTARRRAVVPSLHRRYLSVIVERVFCKCAERLVEKLQPYAEDGSAVNMEAKFSQMTLDVIGLSLFNYNFDSLTTDSPVIEAVYTALKEAELRSTDLLPYWKIDALCKIVPRQVKAEKAVTLIRETVEDLIAKCKEIVEREGERINDEEYVNDADPSILRFLLASREEVSSVQLRDDLLSMLVAGHETTGSVLTWTLYLLSKNSSALRKAQEEVDRVLEGRNPAFEDIKELKYITRCINESMRLYPHPPVLIRRAQVPDILPGNYKVNTGQDIMISVYNIHRSSEVWEKAEEFLPERFDIDGAIPNETNTDFKFIPFSGGPRKCVGDQFALMEAIVALAVFLQRLNVELVPDQTISMTTGATIHTTNGLYMKVSQR

SEQ ID NO: 25563 - protein, 539 aa, Arabidopsis thaliana
  peptide (1)..(539): Ceres Seq. ID no. 12602489
MESSLFSPSSSSYSSLFTAKPTRLLSPKPKFTFSIRSSIEKPKPKLETNSSKSQSWVSPDWLTTLTRTLSSGKNDESGIPIANAKLDDVADLLGGALFLPLYKWMNEYGPIYRLAAGPRNFVIVSDPAIAKHVLRNYPKYAKGLVAEVSEFLFGSGFAIAEGPLWTARRRAVVPSLHRRYLSVIVERVFCKCAERLVEKLQPYAEDGSAVNMEAKFSQMTLDVIGLSLFNYNFDSLTTDSPVIEAVYTALKEAELRSTDLLPYWKIDALCKIVPRQVKAEKAVTLIRETVEDLIAKCKEIVEREGERINDEEYVNDADPSILRFLLASREEVSSVQLRDDLLSMLVAGHETTGSVLTWTLYLLSKNSSALRKAQEEVDRVLEGRNPAFEDIKELKYITRCINESMRLYPHPPVLIRRAQVPDILPGNYKVNTGQDIMISVYNIHRSSEVWEKAEEFLPERFDIDGAIPNETNTDFKFIPFSGGPRKCVGDQFALMEAIVALAVFLQRLNVELVPDQTISMTTGATIHTTNGLYMKVSQR

SEQ ID NO: 25564 - protein, 435 aa, Arabidopsis thaliana
  peptide (1)..(435): Ceres Seq. ID no. 12602490
MNEYGPIYRLAAGPRNFVIVSDPAIAKHVLRNYPKYAKGLVAEVSEFLFGSGFAIAEGPLWTARRRAVVPSLHRRYLSVIVERVFCKCAERLVEKLQPYAEDGSAVNMEAKFSQMTLDVIGLSLFNYNFDSLTTDSPVIEAVYTALKEAELRSTDLLPYWKIDALCKIVPRQVKAEKAVTLIRETVEDLIAKCKEIVEREGERINDEEYVNDADPSILRFLLASREEVSSVQLRDDLLSMLVAGHETTGSVLTWTLYLLSKNSSALRKAQEEVDRVLEGRNPAFEDIKELKYITRCINESMRLYPHPPVLIRRAQVPDILPGNYKVNTGQDIMISVYNIHRSSEVWEKAEEFLPERFDIDGAIPNETNTDFKFIPFSGGPRKCVGDQFALMEAIVALAVFLQRLNVELVPDQTISMTTGATIHTTNGLYMKVSQR

SEQ ID NO: 25565 - DNA, 1317 bp, Arabidopsis thaliana
  misc_feature (1)..(1317): Ceres Seq. ID no. 12322014
  misc_feature (1)..(1317): Ortholog of  Ceres SEQ ID NO 15171943 as cited in SEQ ID NO 54306
  misc_feature (1)..(1317): Ortholog of  Ceres SEQ ID NO 13655812 as cited in SEQ ID NO 64743
  misc_feature (1)..(1317): Ortholog of  Ceres SEQ ID NO 15178828 as cited in SEQ ID NO 0
aaacaaatttcaagttctttaaacgatttccttttcaagaaaaatccttctccttcttctttttaccacatagatcttcttgatctacaatggattctgtttctctttctgaggttactgtcattaaaggaacaacacatttgggttttatgcacagtttcagacagccattttgtggtgtcaaaatatctccaaagttctatttatccaaagttgatggaccaaaggcaatatcttcgagcagcaacacaaagagtcaatttgtttatggaggaggaagcatagctgcaacttcagattcaggttataagatgaatggagtaaacctaaaaagcagaacattgatgagttctgcagttaaagaaagatcattacttgatgcttatgatgatgagtatggtggagtaatagtagatcatggaaaattaccatcaaacccttatgctttcgcttctatgcttcgagcttctctatccgattggagaagaaagggaaagaaaggagtttggttaaagttacctgtggaacaatcagaattagtcccaatagctataaaggaaggttttgagtatcatcatgcagagaaaggatatgtaatgttaacatattggataccagaggaggaacctagtatgcttcctgcaaatgcttcacatcaagttggtgttggaggttttgtattaaatcaacataaagaggtgcttgtggtacaagaaaagtattctgctccttcgattactggtctatggaagttaccaacagggtttattaatgaatctgaagagattttctctggtgctgtaagagaagtcaaggaagaaactggggtagatacagagttctcagaggttatagctttcagacatgctcacaacgttgcatttgagaaatctgatctgttcttcatctgtatgttgagaccactctctgataagataatcatcgatgctcttgagatcaaagccgcaaagtggatgccattggctgaatttgtggagcaaccgatgataagaggagacaaaatgtttaaaagagtgattgaaatatgcgaggcgagattaagccatcggtactgcggtctttctcctcatcgacttgtctctacttttgatggcaaaccttcttctctctattacaacgttgttgatgatgatcatgatccttcccactccaattgtagcactgagttttatagatagacgggtaaaacagaaccaaatcaagtggttcgattctgtatatacttattctcatgtaatgtatgttgttatttgatactctctcttcagtatagtaaatagtaatagatcctctgcc

SEQ ID NO: 25566 - protein, 369 aa, Arabidopsis thaliana
  peptide (1)..(369): Ceres Seq. ID no. 12322015
MDSVSLSEVTVIKGTTHLGFMHSFRQPFCGVKISPKFYLSKVDGPKAISSSSNTKSQFVYGGGSIAATSDSGYKMNGVNLKSRTLMSSAVKERSLLDAYDDEYGGVIVDHGKLPSNPYAFASMLRASLSDWRRKGKKGVWLKLPVEQSELVPIAIKEGFEYHHAEKGYVMLTYWIPEEEPSMLPANASHQVGVGGFVLNQHKEVLVVQEKYSAPSITGLWKLPTGFINESEEIFSGAVREVKEETGVDTEFSEVIAFRHAHNVAFEKSDLFFICMLRPLSDKIIIDALEIKAAKWMPLAEFVEQPMIRGDKMFKRVIEICEARLSHRYCGLSPHRLVSTFDGKPSSLYYNVVDDDHDPSHSNCSTEFYR

SEQ ID NO: 25567 - protein, 349 aa, Arabidopsis thaliana
  peptide (1)..(349): Ceres Seq. ID no. 12322016
MHSFRQPFCGVKISPKFYLSKVDGPKAISSSSNTKSQFVYGGGSIAATSDSGYKMNGVNLKSRTLMSSAVKERSLLDAYDDEYGGVIVDHGKLPSNPYAFASMLRASLSDWRRKGKKGVWLKLPVEQSELVPIAIKEGFEYHHAEKGYVMLTYWIPEEEPSMLPANASHQVGVGGFVLNQHKEVLVVQEKYSAPSITGLWKLPTGFINESEEIFSGAVREVKEETGVDTEFSEVIAFRHAHNVAFEKSDLFFICMLRPLSDKIIIDALEIKAAKWMPLAEFVEQPMIRGDKMFKRVIEICEARLSHRYCGLSPHRLVSTFDGKPSSLYYNVVDDDHDPSHSNCSTEFYR

SEQ ID NO: 25568 - protein, 295 aa, Arabidopsis thaliana
  peptide (1)..(295): Ceres Seq. ID no. 12322017
MNGVNLKSRTLMSSAVKERSLLDAYDDEYGGVIVDHGKLPSNPYAFASMLRASLSDWRRKGKKGVWLKLPVEQSELVPIAIKEGFEYHHAEKGYVMLTYWIPEEEPSMLPANASHQVGVGGFVLNQHKEVLVVQEKYSAPSITGLWKLPTGFINESEEIFSGAVREVKEETGVDTEFSEVIAFRHAHNVAFEKSDLFFICMLRPLSDKIIIDALEIKAAKWMPLAEFVEQPMIRGDKMFKRVIEICEARLSHRYCGLSPHRLVSTFDGKPSSLYYNVVDDDHDPSHSNCSTEFYR

SEQ ID NO: 25569 - DNA, 1404 bp, Arabidopsis thaliana
  misc_feature (1)..(1404): Ceres Seq. ID no. 12335633
  misc_feature (1)..(1404): Ortholog of  Ceres SEQ ID NO 13654557 as cited in SEQ ID NO 68444
aaaccctaatttctcaaagagtctaaagagacggagagtgagagaagagagaaacatttcgagacaaatggccgccgccgctgctcgtcctctcgtcaccatccaaaccttggatggtgacatgtccaccgatcaatcctccaccgtcgtacttcccgacgtcatgacggcgccagttcgaccagacatcgttaacttcgttcacgcccaaatctccaacaacagccgtcagccatacgccgtatcgaagaaggccggtcaccagacctccgccgagtcctggggaaccggacgtgccgtgtctcgtatccctcgtgttcccggtggtggtactcaccgtgctggtcaagctgcgttcggtaacatgtgtcgtggtggtcgtatgttcgctccaaccaagatctggcgccgctggcaccgtcgtgtcaatgtcaacatgaagcgtcacgcaatcgtctcagctatcgctgcaactgctgttcctgcgcttgtgatggctcgtggtcacaagatcgagaatgttcctgagatgcctcttgttgtgagtgactccgccgaagctgtggagaagacctcagctgcgatcaaggttttgaaacagatcggtgcttatgatgatgctgagaaggcaaagaacagcattggaatccgtcctggtaaaggtaaaatgaggaaccgtcgttacatttctaggaaaggtcctctggtggtttatggaactgaaggatctaagatagttaaggcgtttagaaaccttcctggtgttgagctttgtcatgtggagaggcttaatttgttgaagcttgctcctggtggtcaccttggtcggtttgtgatctggaccaagtctgcctttgagaagcttgagtctatctatggttcgtttgagaagccatcagagaagaagaaggggtatgtgcttcctcgtgcaaagatggtgaatgctgatcttgccaggattatcaattcagatgagattcagagtgttgtgaatccgatcaagaaggatgcgaagagggctgttcttaagaagaatccattgaagaatctcaatgtgatgttgaagttgaatccttatgctaagaccgcgaagaggatgtcactgttagctgaagcacagagagttaaggctaagaaggagaagctcgccaagaagaggaaaaccgttaccaaggaggaggcgttggcaatcaaagcagcaggcaagtcgtggtacaagactatgatctccgacagtgattacaccgagtttgataacttcaccaaatggctcggtgctagccagtaataatctcgtctgctttggaacactttccatattttagtcaaaagattttggtttttttaatctgttttgtctttgggtgtctggatatcaagttgaattatgaacaagtttcactc

SEQ ID NO: 25570 - protein, 428 aa, Arabidopsis thaliana; identical to SEQ ID NO: 21901
  peptide (1)..(428): Ceres Seq. ID no. 12335634

SEQ ID NO: 25571 - protein, 406 aa, Arabidopsis thaliana; identical to SEQ ID NO: 21902
  peptide (1)..(406): Ceres Seq. ID no. 12335635

SEQ ID NO: 25572 - protein, 388 aa, Arabidopsis thaliana; identical to SEQ ID NO: 21903
  peptide (1)..(388): Ceres Seq. ID no. 12335636

SEQ ID NO: 25573 - DNA, 1729 bp, Arabidopsis thaliana
  misc_feature (1)..(1729): Ceres Seq. ID no. 13488450
  misc_feature (1)..(1729): Ortholog of  Ceres SEQ ID NO 14310452 as cited in SEQ ID NO 54426
  misc_feature (1)..(1729): Ortholog of  Ceres SEQ ID NO 15169663 as cited in SEQ ID NO 64659
  misc_feature (1)..(1729): Ortholog of  Ceres SEQ ID NO 13656177 as cited in SEQ ID NO 64997
agaactcgctctcttttctcagccaacaaacactagtctcttctgatttgtaccctaacgtttactcgacttatctaaagccgtgaacctcgccggaattcttaaagtcgcgatttttccttaacgccgtttgattcccttacggcctttgaggtccaggagatagcaaatttgttggtgagtactgaaaaatggaggaagagaacgaagtagtgaagacgtttgcagagcttggtgtgcgtgaggagcttgttaaagcttgcgagagattgggatggaagaacccttccaaaattcaagccgaagcccttccttttgctcttgaagggaaagatgtaattggacttgcgcaaaccggttctggtaaaaccggagcttttgcaattcctatattgcaagcactacttgagtatgtttatgattctgagcctaagaaaggacgtagaccggatcctgctttcttcgcttgtgttttatctccaactcgagaacttgcaatccagattgctgaacagtttgaagctcttggtgctgatataagtcttaggtgtgctgtgcttgttggaggtatagacaggatgcaacaaactattgctcttgggaaacggcctcatgttattgttgcaacacctggtcgtctttgggatcatatgtctgatacaaaaggcttttctctgaaatcattgaaatatctggttcttgatgaagcagatagactgttgaatgaagattttgagaaatctcttaaccagattttggaagagatccctcttgagcggaaaacatttcttttttcagcgactatgactaaaaaggttcgaaaacttcaaagggcatgtttgaggaatcctgtgaagattgaagctgcctccaaatattccactgtcgatactcttaagcagcagtatcggtttgttgccgctaaatacaaggattgctatctggtatacattctgagtgaaatgcctgaatcaacatctatgattttcacccgaacatgtgatggtactcgctttctggctttggtgcttcggagccttggttttagagctattcctatcagtggtcaaatgactcagtcaaagagactgggagctttaaataagttcaaagcaggggaatgtaatatcttggtttgtaccgatgtggctagtagagggctcgatatcccatcagttgatgtggttatcaattatgatattcccacaaattcaaaggattacatccatagagtaggaagaaccgctcgtgctggacgttctggtgttgggatatcacttgtaaaccagtatgagctcgaatggtatatacaaatagaaaaactcattggcaagaaactacctgaatatcccgctgaggaagatgaagtcttgtcattgttggagagagttgcagaagcgaaaaagctatctgcaatgaatatgaaagaatcaggaggtaggaagagaaggggagaagatgatgaagaaagtgagaggttcttgggaggtaacaaggacagaggcaacaaggaaagaggtggtaacaaagacaagaagtcttctaagaagttcaaacgataaaatagctctgtttttactgttttccgataactcaccaaagttttgaattgaagttttccatatgaactagggaaatttaatccattttgtactcgtaatttgtatgttcttttctttttgctttgtttctcaatgacagattatacaatttaagttgaaagatgttt

SEQ ID NO: 25574 - protein, 456 aa, Arabidopsis thaliana
  peptide (1)..(456): Ceres Seq. ID no. 13488451
MEEENEVVKTFAELGVREELVKACERLGWKNPSKIQAEALPFALEGKDVIGLAQTGSGKTGAFAIPILQALLEYVYDSEPKKGRRPDPAFFACVLSPTRELAIQIAEQFEALGADISLRCAVLVGGIDRMQQTIALGKRPHVIVATPGRLWDHMSDTKGFSLKSLKYLVLDEADRLLNEDFEKSLNQILEEIPLERKTFLFSATMTKKVRKLQRACLRNPVKIEAASKYSTVDTLKQQYRFVAAKYKDCYLVYILSEMPESTSMIFTRTCDGTRFLALVLRSLGFRAIPISGQMTQSKRLGALNKFKAGECNILVCTDVASRGLDIPSVDVVINYDIPTNSKDYIHRVGRTARAGRSGVGISLVNQYELEWYIQIEKLIGKKLPEYPAEEDEVLSLLERVAEAKKLSAMNMKESGGRKRRGEDDEESERFLGGNKDRGNKERGGNKDKKSSKKFKR

SEQ ID NO: 25575 - protein, 327 aa, Arabidopsis thaliana
  peptide (1)..(327): Ceres Seq. ID no. 13488452
MQQTIALGKRPHVIVATPGRLWDHMSDTKGFSLKSLKYLVLDEADRLLNEDFEKSLNQILEEIPLERKTFLFSATMTKKVRKLQRACLRNPVKIEAASKYSTVDTLKQQYRFVAAKYKDCYLVYILSEMPESTSMIFTRTCDGTRFLALVLRSLGFRAIPISGQMTQSKRLGALNKFKAGECNILVCTDVASRGLDIPSVDVVINYDIPTNSKDYIHRVGRTARAGRSGVGISLVNQYELEWYIQIEKLIGKKLPEYPAEEDEVLSLLERVAEAKKLSAMNMKESGGRKRRGEDDEESERFLGGNKDRGNKERGGNKDKKSSKKFKR

SEQ ID NO: 25576 - protein, 303 aa, Arabidopsis thaliana
  peptide (1)..(303): Ceres Seq. ID no. 13488453
MSDTKGFSLKSLKYLVLDEADRLLNEDFEKSLNQILEEIPLERKTFLFSATMTKKVRKLQRACLRNPVKIEAASKYSTVDTLKQQYRFVAAKYKDCYLVYILSEMPESTSMIFTRTCDGTRFLALVLRSLGFRAIPISGQMTQSKRLGALNKFKAGECNILVCTDVASRGLDIPSVDVVINYDIPTNSKDYIHRVGRTARAGRSGVGISLVNQYELEWYIQIEKLIGKKLPEYPAEEDEVLSLLERVAEAKKLSAMNMKESGGRKRRGEDDEESERFLGGNKDRGNKERGGNKDKKSSKKFKR

SEQ ID NO: 25577 - DNA, 820 bp, Arabidopsis thaliana
  misc_feature (1)..(820): Ceres Seq. ID no. 12482846
  misc_feature (1)..(820): Ortholog of  Ceres SEQ ID NO 13600220 as cited in SEQ ID NO 0
aattgatggagttttgattattatttgtaggcatctagacccaactacttttggagattatccacaaatcatgaaagaccttcttggtcacagattgcccaaattcacttcttcacaaaaagcaaaattgaaagattcgaccgatttcgtagggcttaactactatacttcaacattttcaaaccataatgaaaagccagatccgtctacaccaagttggaagcaagattctcttgttgcttgggaacctaagaatgtagatcacagcgccattggtagccagcctcttaccgctgcattgcccgtctacgctaaaggttttagaagtcttttaaagtacatcaaagataaatacgcaaacccggaaattatgatcatggaaaatggatatggagataaacttaaggacaaagattcggttgaggttggtactgctgattataacaggaaatactatcttcagaggcatcttctagctatgaacgaagctatttgcattgacaaagtgagagttacgggatactttgtatggtcattattagataactttgaatggcaagatggttataataacagattcggactctattacgtcgatttcaaaaataacctcacacgttatgagaaagaatcagccaagtactacaaagatttcctcggtcaaggtgttcgtccatccgcgctcaagaaggatgagctttaagttatattttgaggatttggttttctgttcaatgcttctttcctatgttttagtttgtgattgatcatgattcatgaagtcttggttaataataataaaagtgttttgtattccttc

SEQ ID NO: 25578 - protein, 233 aa, Arabidopsis thaliana
  peptide (1)..(233): Ceres Seq. ID no. 12482847
IDGVLIIICRHLDPTTFGDYPQIMKDLLGHRLPKFTSSQKAKLKDSTDFVGLNYYTSTFSNHNEKPDPSTPSWKQDSLVAWEPKNVDHSAIGSQPLTAALPVYAKGFRSLLKYIKDKYANPEIMIMENGYGDKLKDKDSVEVGTADYNRKYYLQRHLLAMNEAICIDKVRVTGYFVWSLLDNFEWQDGYNNRFGLYYVDFKNNLTRYEKESAKYYKDFLGQGVRPSALKKDEL

SEQ ID NO: 25579 - protein, 210 aa, Arabidopsis thaliana
  peptide (1)..(210): Ceres Seq. ID no. 12482848
MKDLLGHRLPKFTSSQKAKLKDSTDFVGLNYYTSTFSNHNEKPDPSTPSWKQDSLVAWEPKNVDHSAIGSQPLTAALPVYAKGFRSLLKYIKDKYANPEIMIMENGYGDKLKDKDSVEVGTADYNRKYYLQRHLLAMNEAICIDKVRVTGYFVWSLLDNFEWQDGYNNRFGLYYVDFKNNLTRYEKESAKYYKDFLGQGVRPSALKKDEL

SEQ ID NO: 25580 - DNA, 964 bp, Arabidopsis thaliana
  misc_feature (1)..(964): Ceres Seq. ID no. 12327196
  misc_feature (1)..(964): Ortholog of  Ceres SEQ ID NO 15179153 as cited in SEQ ID NO 1066
  misc_feature (1)..(964): Ortholog of  Ceres SEQ ID NO 15176047 as cited in SEQ ID NO 55988
  misc_feature (1)..(964): Ortholog of  Ceres SEQ ID NO 13582167 as cited in SEQ ID NO 56203
  misc_feature (1)..(964): Ortholog of  Ceres SEQ ID NO 13658295 as cited in SEQ ID NO 66515
accaatcggtccgttcccatactctcctttaatggcttctgagagatatttaagtttagcaaaaaaatcctaagcttctacaatggcgaatcttcccaccgttctcgtcaccggcgctagtggcagaacaggccagattgtgtataagaagctgaaggaggggtcagacaagtttgtagcaaagggtttagttagaagtgctcaaggaaaagagaaaattggaggagaagctgatgttttcattggggatataacagatgctgatagcattaaccctgcgtttcaaggaatcgatgcgcttgtgattctcactagtgctgtgcctaaaatgaaacctggttttgatcccactaaaggtggaagacctgagttcattttcgaagatggacagtatcctgaacaagttgattggattggacagaagaatcaaattgatgcagccaaggttgctggtgttaagcatattgtcgtggtcgggtcaatgggtggtaccaatccggatcatcctttgaacaaactgggaaatgggaatatactggtttggaagagaaaggctgaacagtaccttgctgattctggaactccttacacaattatcagagctggaggacttctagataaggaaggcggtgtacgagagctgctagttggtaaagacgatgagctacttcagacagacacgaaaaccgtccccagggctgatgttgcagaagtctgcattcaggcattgctgttcgaggaggccaagaacaaagctttcgatctcggctcaaagccagagggaaccagtaccccaaccaaagacttcaaggctctcttctctcaagtcacctctcgtttttaaatcattatctttgttgccaataagaacatttgggatcaaaccttctaaaataaattctgtagtgtctatttgaaaggatacgttctttcaattcaatgagaatattggggttgaatgttc

SEQ ID NO: 25581 - protein, 253 aa, Arabidopsis thaliana
  peptide (1)..(253): Ceres Seq. ID no. 12327197
MANLPTVLVTGASGRTGQIVYKKLKEGSDKFVAKGLVRSAQGKEKIGGEADVFIGDITDADSINPAFQGIDALVILTSAVPKMKPGFDPTKGGRPEFIFEDGQYPEQVDWIGQKNQIDAAKVAGVKHIVVVGSMGGTNPDHPLNKLGNGNILVWKRKAEQYLADSGTPYTIIRAGGLLDKEGGVRELLVGKDDELLQTDTKTVPRADVAEVCIQALLFEEAKNKAFDLGSKPEGTSTPTKDFKALFSQVTSRF

SEQ ID NO: 25582 - protein, 171 aa, Arabidopsis thaliana
  peptide (1)..(171): Ceres Seq. ID no. 12327198
MKPGFDPTKGGRPEFIFEDGQYPEQVDWIGQKNQIDAAKVAGVKHIVVVGSMGGTNPDHPLNKLGNGNILVWKRKAEQYLADSGTPYTIIRAGGLLDKEGGVRELLVGKDDELLQTDTKTVPRADVAEVCIQALLFEEAKNKAFDLGSKPEGTSTPTKDFKALFSQVTSRF

SEQ ID NO: 25583 - DNA, 949 bp, Arabidopsis thaliana
  misc_feature (1)..(949): Ceres Seq. ID no. 12423207
  misc_feature (1)..(949): Ortholog of  Ceres SEQ ID NO 13661756 as cited in SEQ ID NO 61398
ctccacgattctgaccaaaaaaaggagaaggaataagagaaaagtgagtttgttgtttgtatcgatcagaaaatggcgacgtcgatgatacagaggatgttcaagcaagggacgaagatcgtctgcgtcggccgtaactacgccgctcacgccaaagaactaggcaacgccgtccccaaggaaccagttatattcttgaagccaacatcatcatacttagaaaatggaggaacaattgagatcccacatcctttggattcacttcaccatgaagtagaactcgctttagtgattggacagaaagctagagatgtacctgaatcaatagccatggattacattggaggatatgcggttgctcttgatatgactgctagggaactccaagcttctgctaaggcatctggtctcccatggacggttgcgaaaggacaagataccttcactcctatcagctctgttctgccaaaggcgatggtgcgtgatcccgataatctagaactttggctcaaggttgatggtgaaacaagacagaagggtttgaccaaagatatgatattcaaggtcccctacctcattagctacataagttctataatgaccctttacgaaggagatgtcatcttgacaggcacaccagaaggtgttggacctgtaaagataggtcagaagataacggccggaatcaccggtctatctgaagttcaattcgatgtggagaggcgtgtaaagcccttgagctaataagtggttttatttatctttcatacaaaaatgtcaattttataaaagcatctctaaaattttcatcacttactgtgtttcctaaggaagggagaaataaaactcgttactcattttatttgtaatctctataacaatggctctaagaccggtttaaattgtttatatgggagagtatttgtaaagttgtgatatttactgttgc

SEQ ID NO: 25584 - protein, 223 aa, Arabidopsis thaliana
  peptide (1)..(223): Ceres Seq. ID no. 12423208
MATSMIQRMFKQGTKIVCVGRNYAAHAKELGNAVPKEPVIFLKPTSSYLENGGTIEIPHPLDSLHHEVELALVIGQKARDVPESIAMDYIGGYAVALDMTARELQASAKASGLPWTVAKGQDTFTPISSVLPKAMVRDPDNLELWLKVDGETRQKGLTKDMIFKVPYLISYISSIMTLYEGDVILTGTPEGVGPVKIGQKITAGITGLSEVQFDVERRVKPLS

SEQ ID NO: 25585 - protein, 219 aa, Arabidopsis thaliana
  peptide (1)..(219): Ceres Seq. ID no. 12423209
MIQRMFKQGTKIVCVGRNYAAHAKELGNAVPKEPVIFLKPTSSYLENGGTIEIPHPLDSLHHEVELALVIGQKARDVPESIAMDYIGGYAVALDMTARELQASAKASGLPWTVAKGQDTFTPISSVLPKAMVRDPDNLELWLKVDGETRQKGLTKDMIFKVPYLISYISSIMTLYEGDVILTGTPEGVGPVKIGQKITAGITGLSEVQFDVERRVKPLS

SEQ ID NO: 25586 - protein, 215 aa, Arabidopsis thaliana
  peptide (1)..(215): Ceres Seq. ID no. 12423210
MFKQGTKIVCVGRNYAAHAKELGNAVPKEPVIFLKPTSSYLENGGTIEIPHPLDSLHHEVELALVIGQKARDVPESIAMDYIGGYAVALDMTARELQASAKASGLPWTVAKGQDTFTPISSVLPKAMVRDPDNLELWLKVDGETRQKGLTKDMIFKVPYLISYISSIMTLYEGDVILTGTPEGVGPVKIGQKITAGITGLSEVQFDVERRVKPLS

SEQ ID NO: 25587 - DNA, 880 bp, Arabidopsis thaliana
  misc_feature (1)..(880): Ceres Seq. ID no. 12738463
  misc_feature (1)..(880): Ortholog of  Ceres SEQ ID NO 15172968 as cited in SEQ ID NO 51755
  misc_feature (1)..(880): Ortholog of  Ceres SEQ ID NO 12610046 as cited in SEQ ID NO 55841
  misc_feature (1)..(880): Ortholog of  Ceres SEQ ID NO 13663630 as cited in SEQ ID NO 67065
aaacgtttcttcgaaagatcaattaacaaaacaatcatcttcttcctcaatttcttcttctacttctcatctcttttctgttcttctttgttaaacccaatctgggtctatcatcgtcttcgaggagcctgcgtgctagggtttctccgccttcttccttcccttattttagatctcaaaaggtagaagcagctcattacaggaaccatgatgtcctttgaaatgaatgaccggaaaaaaatcgggttaggcctgacaggatttggcgtattcttctcgtttttgggaatagtctttgtctttgataagggattacttgccatgggaaatattcttttcatctcgggggttagtctaaccattggcttcaagtctaccatgcagttcttcatgaagcgtcaaaattataagggaaccatctcttttggcgtcggtttcttctttgttatcatcgggtggcctatcttgggaatgatgttggagacctatggctttttcgtactcttcagtggcttctggcctaccttggcagtctttgctcagaagatacccgttctcggttggattattcagcaaccatatattagatcgttctttgacaagtaccggggcaagcgtgtgccggtctagtcttccatcccgagtagagagacgattcactgagctagatgcagctgaacaggcgattaaagtttttggaagaagaagttggtgactcctgtagaaaactaaaaccataggagaaagaaaataggaaggaaaagaacgtacaatttgaagctgtgtgtctatgtacttgagagaaaaactcagtgacttaatgctctttgatggagtttgtaaacgttttggttgtttaactctgacaaatcggttagtc

SEQ ID NO: 25588 - protein, 140 aa, Arabidopsis thaliana
  peptide (1)..(140): Ceres Seq. ID no. 12738464
MMSFEMNDRKKIGLGLTGFGVFFSFLGIVFVFDKGLLAMGNILFISGVSLTIGFKSTMQFFMKRQNYKGTISFGVGFFFVIIGWPILGMMLETYGFFVLFSGFWPTLAVFAQKIPVLGWIIQQPYIRSFFDKYRGKRVPV

SEQ ID NO: 25589 - protein, 139 aa, Arabidopsis thaliana
  peptide (1)..(139): Ceres Seq. ID no. 12738465
MSFEMNDRKKIGLGLTGFGVFFSFLGIVFVFDKGLLAMGNILFISGVSLTIGFKSTMQFFMKRQNYKGTISFGVGFFFVIIGWPILGMMLETYGFFVLFSGFWPTLAVFAQKIPVLGWIIQQPYIRSFFDKYRGKRVPV

SEQ ID NO: 25590 - protein, 135 aa, Arabidopsis thaliana
  peptide (1)..(135): Ceres Seq. ID no. 12738466
MNDRKKIGLGLTGFGVFFSFLGIVFVFDKGLLAMGNILFISGVSLTIGFKSTMQFFMKRQNYKGTISFGVGFFFVIIGWPILGMMLETYGFFVLFSGFWPTLAVFAQKIPVLGWIIQQPYIRSFFDKYRGKRVPV

SEQ ID NO: 25591 - DNA, 1305 bp, Arabidopsis thaliana
  misc_feature (1)..(1305): Ceres Seq. ID no. 13500051
  misc_feature (1)..(1305): Ortholog of  Ceres SEQ ID NO 15171268 as cited in SEQ ID NO 51297
  misc_feature (1)..(1305): Ortholog of  Ceres SEQ ID NO 15170521 as cited in SEQ ID NO 55668
  misc_feature (1)..(1305): Ortholog of  Ceres SEQ ID NO 13598249 as cited in SEQ ID NO 62509
  misc_feature (1)..(1305): Ortholog of  Ceres SEQ ID NO 13598595 as cited in SEQ ID NO 64671
  misc_feature (1)..(1305): Ortholog of  Ceres SEQ ID NO 13654241 as cited in SEQ ID NO 68348
acagggaaaagcagagcactctttatctcttcttctctctttcttctactctgtgatcaaactatcgaagaaaaaacaaaccctagatttatccgcccctcttcttcctctgatgataagaaagtcgaagactttgagaatctaaagctgaaaaattttgttttttttcattgagggaatcgaatcgagttatgtacaaggatcggagtggaggaggaataatgggtggtggtggatcatcgagatcggagatccttggtggagctattgatcggaaacgaatcaatgatgctttagacaaacatcttaagaaatcttcaccttctacatctagggttttcacttctaaggacaaagattctgtcccttctacttcaactgctaaatctcagcttcattctcgttcccccgatgttgaatctgacacggatagtgaaggatcagatgtgagtggttcagaaggtgatgatacctcttggatctcatggttttgtaatttgagagggaatgagtttttctgtgaagtagatgaagattatatacaagatgatttcaatctctgtggtttgagtggtcaagttccttactatgattatgcacttgatctcattttagatgttgaatcatcaaatggtgatatgtttactgaagaacagcatgagatggtggaatcagctgctgagatgttatatggtcttattcatgttcgttatattctcactactaaaggaatggctgctatgatggagaagtataagaattatgatttcgggagatgccccagagttttctgttgcggacagtcttgtcttccggttgggcaatctgatatcccgaggtccagcactgtgaagatatactgcccaaaatgcgaggatatttactacccgcggtctaaataccaaggcaacattgatggagcttactttggaactactttccctcatttgtttctcatggcctatgggaacatgaaaccgcagaagccggctcaaaactacgttcctaagatctttggctttaaggtacacaacaagcaatgatactctctcctctcaacattcctgtggttgaatacaatttcggtggctcaactacccttcttctgatggtcacgggtttgaaatggatgatactaaactgcgtttggagggatgagaagagctgatgaagaaaggtcgacacttaaaaagtttttcgctgtgtaatctcgaaagttctaagtagaatcttcaacatagaaccgttctttgatgggtcttgtgaaattctttacctgtgagtaatcaattaaatcatttaccg

SEQ ID NO: 25592 - protein, 283 aa, Arabidopsis thaliana
  peptide (1)..(283): Ceres Seq. ID no. 15223084
MYKDRSGGGIMGGGGSSRSEILGGAIDRKRINDALDKHLKKSSPSTSRVFTSKDKDSVPSTSTAKSQLHSRSPDVESDTDSEGSDVSGSEGDDTSWISWFCNLRGNEFFCEVDEDYIQDDFNLCGLSGQVPYYDYALDLILDVESSNGDMFTEEQHEMVESAAEMLYGLIHVRYILTTKGMAAMMEKYKNYDFGRCPRVFCCGQSCLPVGQSDIPRSSTVKIYCPKCEDIYYPRSKYQGNIDGAYFGTTFPHLFLMAYGNMKPQKPAQNYVPKIFGFKVHNKQ

SEQ ID NO: 25593 - protein, 273 aa, Arabidopsis thaliana
  peptide (1)..(273): Ceres Seq. ID no. 15223085
MGGGGSSRSEILGGAIDRKRINDALDKHLKKSSPSTSRVFTSKDKDSVPSTSTAKSQLHSRSPDVESDTDSEGSDVSGSEGDDTSWISWFCNLRGNEFFCEVDEDYIQDDFNLCGLSGQVPYYDYALDLILDVESSNGDMFTEEQHEMVESAAEMLYGLIHVRYILTTKGMAAMMEKYKNYDFGRCPRVFCCGQSCLPVGQSDIPRSSTVKIYCPKCEDIYYPRSKYQGNIDGAYFGTTFPHLFLMAYGNMKPQKPAQNYVPKIFGFKVHNKQ

SEQ ID NO: 25594 - DNA, 623 bp, Arabidopsis thaliana
  misc_feature (1)..(623): Ceres Seq. ID no. 12335342
  misc_feature (1)..(623): Ortholog of  Ceres SEQ ID NO 13595613 as cited in SEQ ID NO 59866
acacacaatctctctctctcacactcactgtaataaacacaaatgacgagttcttctgaatcaactcgcaagggtctgaccaaaatcgccacgaaccggttgcagaaagagttcatggagtggcaaaccaatcctccttctggtttcaagcacagagtctctgataatctccaacgatggatcattgaagtgcatggagttccaggaactctttacgccaatgaaacttaccaacttcaagttgagttccctgagcattatcctatggaagctccacaggttatctttcagcatccagctccacttcatcctcatatttacagcaacggtcacatttgtttagatgtcttgtatgattcgtggtcaccggcgatgagactaagttccatctgtctcagcattctctcaatgctctccagctcatccgtgaagcaaaagccgaaagacaatgaccattacttgaaaaactgcaaacatggaagatctcccaaagaaactaggtggcgtttccatgacgataaagtataacatctcctataatattgtgattacaaacgaattgtaagatctcaggtcgagttcttgatctgttgctatctttaaaacaagaacagcttctttct

SEQ ID NO: 25595 - protein, 161 aa, Arabidopsis thaliana
  peptide (1)..(161): Ceres Seq. ID no. 12335343
MTSSSESTRKGLTKIATNRLQKEFMEWQTNPPSGFKHRVSDNLQRWIIEVHGVPGTLYANETYQLQVEFPEHYPMEAPQVIFQHPAPLHPHIYSNGHICLDVLYDSWSPAMRLSSICLSILSMLSSSSVKQKPKDNDHYLKNCKHGRSPKETRWRFHDDKV

SEQ ID NO: 25596 - protein, 137 aa, Arabidopsis thaliana
  peptide (1)..(137): Ceres Seq. ID no. 12335344
MEWQTNPPSGFKHRVSDNLQRWIIEVHGVPGTLYANETYQLQVEFPEHYPMEAPQVIFQHPAPLHPHIYSNGHICLDVLYDSWSPAMRLSSICLSILSMLSSSSVKQKPKDNDHYLKNCKHGRSPKETRWRFHDDKV

SEQ ID NO: 25597 - protein, 87 aa, Arabidopsis thaliana
  peptide (1)..(87): Ceres Seq. ID no. 12335345
MEAPQVIFQHPAPLHPHIYSNGHICLDVLYDSWSPAMRLSSICLSILSMLSSSSVKQKPKDNDHYLKNCKHGRSPKETRWRFHDDKV

SEQ ID NO: 25598 - DNA, 1694 bp, Arabidopsis thaliana
  misc_feature (1)..(1694): Ceres Seq. ID no. 12336125
  misc_feature (1)..(1694): Ortholog of  Ceres SEQ ID NO 15175507 as cited in SEQ ID NO 20619
  misc_feature (1)..(1694): Ortholog of  Ceres SEQ ID NO 13639663 as cited in SEQ ID NO 57850
  misc_feature (1)..(1694): Ortholog of  Ceres SEQ ID NO 14302150 as cited in SEQ ID NO 0
agcctcttcataagagagaagtcctctcagagaaacggcagccacatcaaccaacccaaacatcgaaagagagacacttttctctctctctttctctatctccttccaatctctctagggttttcgttacaacggcgaaaagatgttcggtagaggaccctcgaagaagagcgacaacactaagttctacgagatcttaggtgttcctaagagcgcttcaccagaagatctcaagaaagcttacaaaaaagccgctatcaagaatcatcctgataagggtggagatcccgagaagtttaaggagttagcacaagcttatgaagtgcttagtgacccggagaagcgtgagatttatgaccagtatggagaggatgcactcaaggaaggaatgggtggtggaggaggtggacatgatccatttgatattttctcatccttctttggtggaggcccctttggaggtaataccagccggcaaaggaggcagaggcgtggtgaggatgttgttcatcccttgaaggtatctcttgaggatgtgtaccttggtacaatgaagaagctttcactttctaggaatgctctctgctctaagtgtaacggaaagggatcaaaatctggagcctccttgaaatgtggagggtgtcagggatctggtatgaaggtgtctattaggcagcttggacctggaatgatccagcagatgcagcatgcatgtaatgaatgcaaagggacaggtgagaccatcaatgatcgggacaggtgtccacaatgcaaaggagacaaggtcattcctgagaagaaggtgcttgaagtgaatgtggagaagggaatgcaacacagtcagaagatcacatttgaaggacaagcagatgaagcgcctgacactgtcactggagatatagtgtttgtccttcagcagaaagagcacccaaagttcaagagaaagggagaagacctctttgtggagcacacactttctctaaccgaagctttgtgtggcttccaatttgttctgactcacttggatggcagaagtcttctcattaaatctaatcctggggaggtcgtgaaacctgattcatacaaggcaataagcgatgaaggaatgccgatataccagaggccattcatgaagggtaagctctacatccacttcacagtggagttcccggactcgttgagcccagatcagaccaaagcactggaagctgttctacctaagccgtcaacagctcagttgagtgacatggagatagatgaatgcgaggagaccacgctccacgatgtcaacattgaggatgagatgaggaggaaggcacaagctcaaagagaggcttatgatgatgacgatgaagatgatgaccatccgggtggtgctcaaagggtgcaatgtgcccagcagtaagtaactccttagagagactttgacccacatgggtttgggctccaaccaatttgtctcttgctttttcattctaagtgtattggagtctttatgggagtttggtacggtttaagaatttgcccacttcggtggaacatcgaaacttgttttctctttttcctctgactttaaaaattaaggccttattacaattttgtgttttttctttatgattaaatttgtagtaatttaatgtctaagaacatatatactgtgtgttttctatattgatatggatttaaaattcaat

SEQ ID NO: 25599 - protein, 420 aa, Arabidopsis thaliana
  peptide (1)..(420): Ceres Seq. ID no. 12336126
MFGRGPSKKSDNTKFYEILGVPKSASPEDLKKAYKKAAIKNHPDKGGDPEKFKELAQAYEVLSDPEKREIYDQYGEDALKEGMGGGGGGHDPFDIFSSFFGGGPFGGNTSRQRRQRRGEDVVHPLKVSLEDVYLGTMKKLSLSRNALCSKCNGKGSKSGASLKCGGCQGSGMKVSIRQLGPGMIQQMQHACNECKGTGETINDRDRCPQCKGDKVIPEKKVLEVNVEKGMQHSQKITFEGQADEAPDTVTGDIVFVLQQKEHPKFKRKGEDLFVEHTLSLTEALCGFQFVLTHLDGRSLLIKSNPGEVVKPDSYKAISDEGMPIYQRPFMKGKLYIHFTVEFPDSLSPDQTKALEAVLPKPSTAQLSDMEIDECEETTLHDVNIEDEMRRKAQAQREAYDDDDEDDDHPGGAQRVQCAQQ

SEQ ID NO: 25600 - protein, 338 aa, Arabidopsis thaliana
  peptide (1)..(338): Ceres Seq. ID no. 12336127
MGGGGGGHDPFDIFSSFFGGGPFGGNTSRQRRQRRGEDVVHPLKVSLEDVYLGTMKKLSLSRNALCSKCNGKGSKSGASLKCGGCQGSGMKVSIRQLGPGMIQQMQHACNECKGTGETINDRDRCPQCKGDKVIPEKKVLEVNVEKGMQHSQKITFEGQADEAPDTVTGDIVFVLQQKEHPKFKRKGEDLFVEHTLSLTEALCGFQFVLTHLDGRSLLIKSNPGEVVKPDSYKAISDEGMPIYQRPFMKGKLYIHFTVEFPDSLSPDQTKALEAVLPKPSTAQLSDMEIDECEETTLHDVNIEDEMRRKAQAQREAYDDDDEDDDHPGGAQRVQCAQQ

SEQ ID NO: 25601 - protein, 284 aa, Arabidopsis thaliana
  peptide (1)..(284): Ceres Seq. ID no. 12336128
MKKLSLSRNALCSKCNGKGSKSGASLKCGGCQGSGMKVSIRQLGPGMIQQMQHACNECKGTGETINDRDRCPQCKGDKVIPEKKVLEVNVEKGMQHSQKITFEGQADEAPDTVTGDIVFVLQQKEHPKFKRKGEDLFVEHTLSLTEALCGFQFVLTHLDGRSLLIKSNPGEVVKPDSYKAISDEGMPIYQRPFMKGKLYIHFTVEFPDSLSPDQTKALEAVLPKPSTAQLSDMEIDECEETTLHDVNIEDEMRRKAQAQREAYDDDDEDDDHPGGAQRVQCAQQ

SEQ ID NO: 25602 - DNA, 1263 bp, Arabidopsis thaliana
  misc_feature (1)..(1263): Ceres Seq. ID no. 12580020
  misc_feature (1)..(1263): Ortholog of  Ceres SEQ ID NO 14308080 as cited in SEQ ID NO 55218
cctcttctctcatatctttgaaatggatcacgatgggtttcgtaattggggttactatgaaccagctgctgctacctttaaaggtaatctcggtttgcagctaatgtctaccattgatcggaacactaaaccgtttttacctgggcgggatccgaatctaatgatggggcctaacgggtcatatcaccaccaagagcctcctatccacatgagctacaattggattaaccaacagaaggataagttcttcaatatgttgcctgttacaacagccactcctaactacggtaatttccttcccgaaacttcgtctgctccgtcgatgcagatgaatctccatcatcatcttcaaaccgaggagaatccggttaagttggaagaagagattgttgttcagactaagaagagaaagaccaatgcaaaagctggctcgactccaaaggctaagaagccaaggaaaccaaaggatgagaacagtaacaacaacaacaacaacaacacgaatgttactcgagttaaacccgctaagaaaagtgttgacttggtgatcaatggagtgagtatggacatttcgggtcttcctgttcctatctgcacttgcactggagctcctcagcaatgctaccgttggggatgtggcggttggcagtctgcttgttgtaccacaaacatctcaatgcatccattaccaatgagtactaaacgccgtggagcgaggatctcgggaaggaagatgagtcaaggcgcgtttaagaaggttcttgagaaacttgcttctgatgggtttaactttgggaatccgattgatcttaagagccattgggcaagacatggaactaacaagttcgtcacaatcagatgattagttgcttgattagtaaaacagaacaagtgagtgtttctcttccgggatggaatctctcaatgatggtgtatgtatatacaacaaatctgaaatctgtgaccttttcaaaaattctgtctgcaatctgagttcgattctgttttcaggtaaaccatcttcgttgtagggtttggaagcagagttctctgttttctttaccacttttttttatcacacttttgctttgttttttgtttgtttgtctatctgtgtgtctgaggaagaagaaggtgtctgagaaaaaatctgcagggaaatttatttttttgtacttttttttttcttccttttgttatctttttataaacattttactgacttgtaacagatattcttttaattaaatgtttttatttttc

SEQ ID NO: 25603 - protein, 286 aa, Arabidopsis thaliana
  peptide (1)..(286): Ceres Seq. ID no. 12580021
LFSHIFEMDHDGFRNWGYYEPAAATFKGNLGLQLMSTIDRNTKPFLPGRDPNLMMGPNGSYHHQEPPIHMSYNWINQQKDKFFNMLPVTTATPNYGNFLPETSSAPSMQMNLHHHLQTEENPVKLEEEIVVQTKKRKTNAKAGSTPKAKKPRKPKDENSNNNNNNNTNVTRVKPAKKSVDLVINGVSMDISGLPVPICTCTGAPQQCYRWGCGGWQSACCTTNISMHPLPMSTKRRGARISGRKMSQGAFKKVLEKLASDGFNFGNPIDLKSHWARHGTNKFVTIR

SEQ ID NO: 25604 - protein, 279 aa, Arabidopsis thaliana
  peptide (1)..(279): Ceres Seq. ID no. 12580022
MDHDGFRNWGYYEPAAATFKGNLGLQLMSTIDRNTKPFLPGRDPNLMMGPNGSYHHQEPPIHMSYNWINQQKDKFFNMLPVTTATPNYGNFLPETSSAPSMQMNLHHHLQTEENPVKLEEEIVVQTKKRKTNAKAGSTPKAKKPRKPKDENSNNNNNNNTNVTRVKPAKKSVDLVINGVSMDISGLPVPICTCTGAPQQCYRWGCGGWQSACCTTNISMHPLPMSTKRRGARISGRKMSQGAFKKVLEKLASDGFNFGNPIDLKSHWARHGTNKFVTIR

SEQ ID NO: 25605 - protein, 252 aa, Arabidopsis thaliana
  peptide (1)..(252): Ceres Seq. ID no. 12580023
MSTIDRNTKPFLPGRDPNLMMGPNGSYHHQEPPIHMSYNWINQQKDKFFNMLPVTTATPNYGNFLPETSSAPSMQMNLHHHLQTEENPVKLEEEIVVQTKKRKTNAKAGSTPKAKKPRKPKDENSNNNNNNNTNVTRVKPAKKSVDLVINGVSMDISGLPVPICTCTGAPQQCYRWGCGGWQSACCTTNISMHPLPMSTKRRGARISGRKMSQGAFKKVLEKLASDGFNFGNPIDLKSHWARHGTNKFVTIR

SEQ ID NO: 25606 - DNA, 1128 bp, Arabidopsis thaliana
  misc_feature (1)..(1128): Ceres Seq. ID no. 12396073
  misc_feature (1)..(1128): Ortholog of  Ceres SEQ ID NO 15177607 as cited in SEQ ID NO 59136
  misc_feature (1)..(1128): Ortholog of  Ceres SEQ ID NO 15179183 as cited in SEQ ID NO 0
aaaaagcacgaggaaggatcaaatcggaaacttaacagaatttagctaccaattactgtctccggcgagatctcaatttgatccttcacggtggcgtcgacgtccgggcaacaacaagctctctcgagaagaaagccattatcatcatcatcatcatcttcatcatctcctcctccgtcttcctcacctgttcgagctcctgcggcgaagaaaccgagtccggaatacccattttggcagcagaactggtttatcggtctgctattcgtgatggctttaggattcttctgtctcgctatcttcctttacctaagtctcgatcctgattccggttacacgtctgcctccgccgctgcttctggtaaagaaggtgtcgagattacttatggaagtgcgatcaagttgatgcacgagaaaactaaatttcgattacattctcacgatgtgccgtatggatccggcagtggtcagcaatcagtcactggttttccaggcgtcgttgattccaacagctattggattgttaaacctgtgcctgggacaacagaaaagcaaggtgatgctgtcaagagtggagcaaccattaggttgcagcatatgaagaccagaaaatggcttcacagtcacttgcatgcatctcctatatcagggaacttagaggttagctgctttggagatgatacaaattccgatactggggatcactggaagcttataattgaaggaagtgggaagacatggaaacaggaccaaagagtccgtcttcaacacatagacactagtggctacctccatagccatgacaagaagtaccaacgtatagctggtggtcagcaagaggtgtgtggaattcgggagaagaaggcggataacatttggttggcagcagaaggagtctaccttccccttaatgagagcagcaagtaaggttaagagtgaaaaaacttctctggaggactttgaatcttatctcttactctctaaactcacaatcaagaaaatagagatatatatttcttaattttcgattggtaatacttttagtggcacgaatatatcttgttttggtagatattctgcatttatctcttttttaggtcacccttaagagacactatcttattatcc

SEQ ID NO: 25607 - protein, 218 aa, Arabidopsis thaliana
  peptide (1)..(218): Ceres Seq. ID no. 12396074
MALGFFCLAIFLYLSLDPDSGYTSASAAASGKEGVEITYGSAIKLMHEKTKFRLHSHDVPYGSGSGQQSVTGFPGVVDSNSYWIVKPVPGTTEKQGDAVKSGATIRLQHMKTRKWLHSHLHASPISGNLEVSCFGDDTNSDTGDHWKLIIEGSGKTWKQDQRVRLQHIDTSGYLHSHDKKYQRIAGGQQEVCGIREKKADNIWLAAEGVYLPLNESSK

SEQ ID NO: 25608 - protein, 173 aa, Arabidopsis thaliana
  peptide (1)..(173): Ceres Seq. ID no. 12396075
MHEKTKFRLHSHDVPYGSGSGQQSVTGFPGVVDSNSYWIVKPVPGTTEKQGDAVKSGATIRLQHMKTRKWLHSHLHASPISGNLEVSCFGDDTNSDTGDHWKLIIEGSGKTWKQDQRVRLQHIDTSGYLHSHDKKYQRIAGGQQEVCGIREKKADNIWLAAEGVYLPLNESSK

SEQ ID NO: 25609 - protein, 109 aa, Arabidopsis thaliana
  peptide (1)..(109): Ceres Seq. ID no. 12396076
MKTRKWLHSHLHASPISGNLEVSCFGDDTNSDTGDHWKLIIEGSGKTWKQDQRVRLQHIDTSGYLHSHDKKYQRIAGGQQEVCGIREKKADNIWLAAEGVYLPLNESSK

SEQ ID NO: 25610 - DNA, 1407 bp, Arabidopsis thaliana
  misc_feature (1)..(1407): Ceres Seq. ID no. 12336104
  misc_feature (1)..(1407): Ortholog of  Ceres SEQ ID NO 15168476 as cited in SEQ ID NO 60262
atgctgattcctctccttttcttcctcaactcataaacccgatcggccgattccttcacaattatccttaaaattttcgattttgattattgggtttctctctgatcatggcggttgttgagactggagcagcagctactgctgctgatgcaggaggagtcgtgatccagccgccgccgtcttcaccaccatcttcaatgactagtcaagattccggcgtttcttccgatgatcagaaccatcactctaggatcgatcaagttctccggcacgatcaaggtctttacagcaagatcgggtcacacgtggcgagatccgacggcgttgacggtggtgagagctttaagcgtgatatgagagagcttcaggagcttttctctaagcttaatcctatggctgaagagttgttcctccttctctgaataaacaaggaggtaacggtgttaacggtggtttcttcacctctgctggttccttcttccgcaacaatggctttgctggtaccggaaatggcggatacggtaacgaaaacggtggtttccgacggaagaagagttttggtcaagggaaacgaaggatgaatgctcgaacaagcatggctcagcgagaagatgttatccgtagaaccgtctacgtctctgatctcgatcaacaggtcactgaagagcagcttgctggtttgtttgtgagctgtggacaggttgttgactgtcgcatatgcggtgacccaaactcggtccttcggtttgcattcatagagttcactgatgaagagggtgcgatgactgctctaaatttatcggggactatgttgggattctatcctgtgaaagttttaccatccaaaacagctatagcaccggttaacccgacatttttgcctaggactgaagatgagagtgagatgtgtgcaagaactatctactgtactaacatagacaagaaggtgactcaatcagacgtgaagatcttttttgagtacttctgcggagaggtttatcgcctgaggctgcttggagattatcaacactcgactcgtattgcttttgtagagttcgtaatggcggaaagcgcaatagctgctctcaactgcagtggagttgttcttggttctttacctataagggtgagtccttcaaagacgcctgttcgtccgagatcaccgaggcatccaatgcattgatcttagctttacaggttttcacatatctcatgtctccgcaatatatatatcgctgtgtcgtcttaaaaacagcattacacagacatgtaaagatgtttgtctgcatctctcatctcttgttttcgaaatgtaactctgggatctgatgatgcttctttcttcttcctttacctgagaatcttttgggtaaaaaaaacctcgtagagagtttttatttatctctt

SEQ ID NO: 25611 - protein, 201 aa, Arabidopsis thaliana
  peptide (1)..(201): Ceres Seq. ID no. 12336105
MNARTSMAQREDVIRRTVYVSDLDQQVTEEQLAGLFVSCGQVVDCRICGDPNSVLRFAFIEFTDEEGAMTALNLSGTMLGFYPVKVLPSKTAIAPVNPTFLPRTEDESEMCARTIYCTNIDKKVTQSDVKIFFEYFCGEVYRLRLLGDYQHSTRIAFVEFVMAESAIAALNCSGVVLGSLPIRVSPSKTPVRPRSPRHPMH

SEQ ID NO: 25612 - protein, 195 aa, Arabidopsis thaliana
  peptide (1)..(195): Ceres Seq. ID no. 12336106
MAQREDVIRRTVYVSDLDQQVTEEQLAGLFVSCGQVVDCRICGDPNSVLRFAFIEFTDEEGAMTALNLSGTMLGFYPVKVLPSKTAIAPVNPTFLPRTEDESEMCARTIYCTNIDKKVTQSDVKIFFEYFCGEVYRLRLLGDYQHSTRIAFVEFVMAESAIAALNCSGVVLGSLPIRVSPSKTPVRPRSPRHPMH

SEQ ID NO: 25613 - protein, 133 aa, Arabidopsis thaliana
  peptide (1)..(133): Ceres Seq. ID no. 12336107
MTALNLSGTMLGFYPVKVLPSKTAIAPVNPTFLPRTEDESEMCARTIYCTNIDKKVTQSDVKIFFEYFCGEVYRLRLLGDYQHSTRIAFVEFVMAESAIAALNCSGVVLGSLPIRVSPSKTPVRPRSPRHPMH

SEQ ID NO: 25614 - DNA, 1131 bp, Arabidopsis thaliana
  misc_feature (1)..(1131): Ceres Seq. ID no. 12396409
  misc_feature (1)..(1131): Ortholog of  Ceres SEQ ID NO 12388947 as cited in SEQ ID NO 64451
aacaacagataaatttgttggtttcaagtaatatcaatttcccggcgaaatctccaccagagttatgggaatcaccggaagtctaacgccagatcagctcgattttttccactctcaagggtatttggtaatcgaatcgttcgcgagtgaggatgagataagaggcttaaggaagaggatggatgagttgcttaatcagtttgattgttccgtctcctctatcttctccaccaaaaatcagaagcacaccacagataattacttctttgagagcgctgagaaaatctccttcttctttgaagaaaaagcttttggtgatgatgggaaattgaagcaacccaaacaactctctataaacaaagttgggcatgcactgcatgagcttgacccattgtataaggatttcacatattcgtcaaagttttcaagtttggcatcatccttaggttacaggagaccagttgtcatgcagtctatgtatattttcaagcaacctggaattggaggcgaagttgtgccgcaccaagataattcttttgtgtacacggatccacagagttgtactggtctctggattgctcttgaagattctacattagttaatggttgtctttgggcaattcctggatctcataagaatggtttagttagaaggtttatccgtggtgacaacggtataacctttgatcagccatccccatcttacgagcagaaagattttgtgtctattgaaatgaaagcaggctcattgattgccattcatggtgatctaatccatcaaagtttcgagaatctatcctcgaagtcaagacatgcctatagcttacatgtagtagaatctgatggatgtaaatgggcaaaagacaactggatacaaagagcaaaaatgccggagcctctctatgttcttccttgattcaagccagtcgtggaaaaacactgtgagttactgtttatcaaatttcttttaagatcactatctttgtgagaactatgaacagtaataagaacatggctaaaagggccttcttgtgtcgtttacttgttgaaatacaatttgtttcttcttggtctctgtagttctgtctttaaataaccaaactctgtggtcaataaagtgtgacagtgatt

SEQ ID NO: 25615 - protein, 283 aa, Arabidopsis thaliana
  peptide (1)..(283): Ceres Seq. ID no. 12396410
MGITGSLTPDQLDFFHSQGYLVIESFASEDEIRGLRKRMDELLNQFDCSVSSIFSTKNQKHTTDNYFFESAEKISFFFEEKAFGDDGKLKQPKQLSINKVGHALHELDPLYKDFTYSSKFSSLASSLGYRRPVVMQSMYIFKQPGIGGEVVPHQDNSFVYTDPQSCTGLWIALEDSTLVNGCLWAIPGSHKNGLVRRFIRGDNGITFDQPSPSYEQKDFVSIEMKAGSLIAIHGDLIHQSFENLSSKSRHAYSLHVVESDGCKWAKDNWIQRAKMPEPLYVLP

SEQ ID NO: 25616 - protein, 245 aa, Arabidopsis thaliana
  peptide (1)..(245): Ceres Seq. ID no. 12396411
MDELLNQFDCSVSSIFSTKNQKHTTDNYFFESAEKISFFFEEKAFGDDGKLKQPKQLSINKVGHALHELDPLYKDFTYSSKFSSLASSLGYRRPVVMQSMYIFKQPGIGGEVVPHQDNSFVYTDPQSCTGLWIALEDSTLVNGCLWAIPGSHKNGLVRRFIRGDNGITFDQPSPSYEQKDFVSIEMKAGSLIAIHGDLIHQSFENLSSKSRHAYSLHVVESDGCKWAKDNWIQRAKMPEPLYVLP

SEQ ID NO: 25617 - protein, 149 aa, Arabidopsis thaliana
  peptide (1)..(149): Ceres Seq. ID no. 12396412
MQSMYIFKQPGIGGEVVPHQDNSFVYTDPQSCTGLWIALEDSTLVNGCLWAIPGSHKNGLVRRFIRGDNGITFDQPSPSYEQKDFVSIEMKAGSLIAIHGDLIHQSFENLSSKSRHAYSLHVVESDGCKWAKDNWIQRAKMPEPLYVLP

SEQ ID NO: 25618 - DNA, 1284 bp, Arabidopsis thaliana
  misc_feature (1)..(1284): Ceres Seq. ID no. 13487713
  misc_feature (1)..(1284): Ortholog of  Ceres SEQ ID NO 15174863 as cited in SEQ ID NO 51281
  misc_feature (1)..(1284): Ortholog of  Ceres SEQ ID NO 12614972 as cited in SEQ ID NO 61986
  misc_feature (1)..(1284): Ortholog of  Ceres SEQ ID NO 14302317 as cited in SEQ ID NO 63244
  misc_feature (1)..(1284): Ortholog of  Ceres SEQ ID NO 12625706 as cited in SEQ ID NO 64144
  misc_feature (1)..(1284): Ortholog of  Ceres SEQ ID NO 13584933 as cited in SEQ ID NO 65009
  misc_feature (1)..(1284): Ortholog of  Ceres SEQ ID NO 12634984 as cited in SEQ ID NO 0
  misc_feature (1)..(1284): Ortholog of  Ceres SEQ ID NO 13599377 as cited in SEQ ID NO 0
aaaagccaatctgatctttgtccaaacacagaccatcatcactcatttcctacagaactcagcacaattctttcaaattctctttctaatcttcaatggaatcagaaaccctaaccgccaaggctacgatcacgaccacgaccctaccgagtcacgacgagaccaagacagaatcaacagagttcgagaaaaatcaaaaacggtatcaagacctcatctccacgtttcctcacgagaaaggctggagaccgaaagagcccctgatcgagtatggtggttactggtggctaccgtctctcctcgaaggttgtattcacgcgcaagagttctttcaagcacgacccagtgacttcctcgtctgtagctacccaaagacaggcaccacttggctcaaagccctgactttcgccatcgcaaatcgttcccgcttcgatgattcctccaaccctctcctgaaacgtaaccctcacgagtttgttccttacattgagatagatttccctttcttccctgaagttgatgttctcaaagacaaagggaacactctgttttcgactcatatcccatacgagttattacctgattcggttgtgaaatccggttgtaagatggtttacatatggagagaaccaaaggacactttcatctccatgtggactttccttcacaaggaaaggacagagcttggacctgtcagcaatcttgaggagtcttttgatatgttctgtcgtggtctgtctgggtatggtccttatcttaatcatatcctggcgtattggaaagcataccaagagaatccagataggatcttgttcctcaagtacgagacgatgagagctgatcctttaccgtacgtgaagagtctggctgagtttatgggtcatggattcacagccgaggaagaggagaaaggtgttgttgagaaagtggtgaatctttgcagcttcgagacgttgaagaatcttgaagctaacaaaggggagaaagacagagaggatcgtcctggtgtttacgcgaatagcgcgtatttcaggaaaggaaaggtgggagattggtcgaactatctgactccggagatggctgctcgtatagatgggttaatggaagagaaatttaagggcaccggcttgcttgaacatggtaaatgaatgactaactcttgttccgagcaatgactgatctttatatgctttgtttacaacataagtttgcttcttatgttagtatggctccaatgtattaagttatatagtggaagaataaatgttgcttgtgtttctatcc

SEQ ID NO: 25619 - protein, 350 aa, Arabidopsis thaliana
  peptide (1)..(350): Ceres Seq. ID no. 13487714
MESETLTAKATITTTTLPSHDETKTESTEFEKNQKRYQDLISTFPHEKGWRPKEPLIEYGGYWWLPSLLEGCIHAQEFFQARPSDFLVCSYPKTGTTWLKALTFAIANRSRFDDSSNPLLKRNPHEFVPYIEIDFPFFPEVDVLKDKGNTLFSTHIPYELLPDSVVKSGCKMVYIWREPKDTFISMWTFLHKERTELGPVSNLEESFDMFCRGLSGYGPYLNHILAYWKAYQENPDRILFLKYETMRADPLPYVKSLAEFMGHGFTAEEEEKGVVEKVVNLCSFETLKNLEANKGEKDREDRPGVYANSAYFRKGKVGDWSNYLTPEMAARIDGLMEEKFKGTGLLEHGK

SEQ ID NO: 25620 - protein, 179 aa, Arabidopsis thaliana
  peptide (1)..(179): Ceres Seq. ID no. 13487715
MVYIWREPKDTFISMWTFLHKERTELGPVSNLEESFDMFCRGLSGYGPYLNHILAYWKAYQENPDRILFLKYETMRADPLPYVKSLAEFMGHGFTAEEEEKGVVEKVVNLCSFETLKNLEANKGEKDREDRPGVYANSAYFRKGKVGDWSNYLTPEMAARIDGLMEEKFKGTGLLEHGK

SEQ ID NO: 25621 - DNA, 1303 bp, Arabidopsis thaliana
  misc_feature (1)..(1303): Ceres Seq. ID no. 12605177
  misc_feature (1)..(1303): Ortholog of  Ceres SEQ ID NO 13598413 as cited in SEQ ID NO 68934
actacacacacctaacgcgaaacctctacgtttcttcgtcttcgcgactcgtgagattgttgtaatcacagttcgggaaagacttaacatttaagatttacgggtttgtttgatcgattagtctcatctgggtttttctccaagttaaattctttgtttctgagatggatcaagcttcgtcttcttcgactatggaggaagacaagaagtcttccactgatcctgtgaatgtcgatgataacgaggagagagaagctatagagattgctctgttccaagtgcctgaatgctatgtttatttgatacctccaaggaaaaccgcagcttcgtacagagcagatgagtgggacgtgaacaaatgggcatgggaaggagctttgaaagtggtgagcaaaggagaagaatgcattataaaactagtagataaaaccacaggggaactttacgctcaggcatttctaagagagggggaacttcatcctgtagaagcagtaatcgacagtagcagatattttgttctccgtgttgaagaaaagatagatggtcgtgttcgacatgcttttatcggactcggattccgggaaagaacagaagcatatgatttccaagcagcactacatgaccatatgaagtatttgaacaagaagaaaacagcagaagaaatggaacaacactatcagaacacttcatccgttgattacagcttaaaggaaggagaaaccattgttctccaactcaaaaatagaagcgataaagacagcaagtcaaaaacggtagagaagagtctgggcaatctctcgttggaggataaaggcaagtcaatagaaaccaccattccttcaatcatcctgccacctccacctccgggaccgctttcccctgtcacaactgctcagaagtccccgtcaagtctgccgccaagcctcagcctccaaagatcgtctgaacaacaagatttagatacaaagcgagaagaagaagaagaagagaagaaagaagacctaaaagccaaagatggaggggttgaagatgcaccagatgatgactttggagatttccaagctgcgggttgatttaaacttataatcttttttaccatacacaaagatcgttttataagtaatgtgactgatcaaagtttggattgtttgctactgagagcttatcttctgtacaattccaaaatacaagcctatttctctgaacttgtgattagatagacaaaactctaaaggtttcattttctccatatacagatatgagctttgcaagagaaacatcagataaatatcaaaaaattcgc

SEQ ID NO: 25622 - protein, 302 aa, Arabidopsis thaliana
  peptide (1)..(302): Ceres Seq. ID no. 12605178
MDQASSSSTMEEDKKSSTDPVNVDDNEEREAIEIALFQVPECYVYLIPPRKTAASYRADEWDVNKWAWEGALKVVSKGEECIIKLVDKTTGELYAQAFLREGELHPVEAVIDSSRYFVLRVEEKIDGRVRHAFIGLGFRERTEAYDFQAALHDHMKYLNKKKTAEEMEQHYQNTSSVDYSLKEGETIVLQLKNRSDKDSKSKTVEKSLGNLSLEDKGKSIETTIPSIILPPPPPGPLSPVTTAQKSPSSLPPSLSLQRSSEQQDLDTKREEEEEEKKEDLKAKDGGVEDAPDDDFGDFQAAG

SEQ ID NO: 25623 - protein, 293 aa, Arabidopsis thaliana
  peptide (1)..(293): Ceres Seq. ID no. 12605179
MEEDKKSSTDPVNVDDNEEREAIEIALFQVPECYVYLIPPRKTAASYRADEWDVNKWAWEGALKVVSKGEECIIKLVDKTTGELYAQAFLREGELHPVEAVIDSSRYFVLRVEEKIDGRVRHAFIGLGFRERTEAYDFQAALHDHMKYLNKKKTAEEMEQHYQNTSSVDYSLKEGETIVLQLKNRSDKDSKSKTVEKSLGNLSLEDKGKSIETTIPSIILPPPPPGPLSPVTTAQKSPSSLPPSLSLQRSSEQQDLDTKREEEEEEKKEDLKAKDGGVEDAPDDDFGDFQAAG

SEQ ID NO: 25624 - DNA, 1180 bp, Arabidopsis thaliana
  misc_feature (1)..(1180): Ceres Seq. ID no. 12334043
  misc_feature (1)..(1180): Ortholog of  Ceres SEQ ID NO 12474685 as cited in SEQ ID NO 88
  misc_feature (1)..(1180): Ortholog of  Ceres SEQ ID NO 13638574 as cited in SEQ ID NO 51223
  misc_feature (1)..(1180): Ortholog of  Ceres SEQ ID NO 12610790 as cited in SEQ ID NO 56123
  misc_feature (1)..(1180): Ortholog of  Ceres SEQ ID NO 13655636 as cited in SEQ ID NO 63519
  misc_feature (1)..(1180): Ortholog of  Ceres SEQ ID NO 13655896 as cited in SEQ ID NO 64970
  misc_feature (1)..(1180): Ortholog of  Ceres SEQ ID NO 12627322 as cited in SEQ ID NO 67162
acactgagaaactctcaatctgagcagatatttacccaatcagggattcaggaagagaagcagagaaagaaatggagataacactgaacagtggcttcaagatgccgatcgtcggcttaggagtatggagaatggagaaggaagggattcgagaccttatcctcaatgccatcaagatcggctatcgccatctcgactgtgctgctgattataggaatgagaccgaagttggtgatgctcttacagaagcattcaagactggtctggttaagagggaggatctcttcattacaaccaagctatggaattcagaccatggccatgtcattgaggcctgcaaagacagtctcaagaaacttcaacttgattacctcgatctcttcctcgttcattttcccgtagcaacgaaacacaccggagtagggacaaccgatagtgctttgggcgatgacggggtattggacatagacacgaccatctctctggaaactacatggcacgacatggaaaagcttgtttctatgggtttagtccgcagcattggaatcagtaactatgatgtctttctaacgagagattgcttggcttactccaagatcaaacctgctgtgaatcagatcgagacacatccttacttccaacgtgattctcttgtcaaattctgccagaaacatggtatctgtgtcactgctcatactcctctcggaggtgccacagccaatgccgagtggtttggcaccgtgtcatgcctggatgatccagttctcaaagatgtggccgagaagtacaaaaagacagtggcacaagttgtcctgaggtggggaatccagagaaaaacggtggtgataccaaagacatcaaagcctgcgagattggaagagaactttcaggttttcgacttcgaactatcgaaagaggacatggaagtgatcaaaagcatggagaggaaataccgcacgaaccaaccagccaagttttggaacattgatctctacgcttgatcacactctctctatctacatgaataaatgaagcttaagaagataaacaacgagaagaagccatagctttacctgaaacattctcaaatgtttgtgagcctatctttcatacataaactcatgttgttaaacagattatgatttcttaagtactacaatatcacacattgatggaaagt

SEQ ID NO: 25625 - protein, 309 aa, Arabidopsis thaliana
  peptide (1)..(309): Ceres Seq. ID no. 12334044
MEITLNSGFKMPIVGLGVWRMEKEGIRDLILNAIKIGYRHLDCAADYRNETEVGDALTEAFKTGLVKREDLFITTKLWNSDHGHVIEACKDSLKKLQLDYLDLFLVHFPVATKHTGVGTTDSALGDDGVLDIDTTISLETTWHDMEKLVSMGLVRSIGISNYDVFLTRDCLAYSKIKPAVNQIETHPYFQRDSLVKFCQKHGICVTAHTPLGGATANAEWFGTVSCLDDPVLKDVAEKYKKTVAQVVLRWGIQRKTVVIPKTSKPARLEENFQVFDFELSKEDMEVIKSMERKYRTNQPAKFWNIDLYA

SEQ ID NO: 25626 - protein, 299 aa, Arabidopsis thaliana
  peptide (1)..(299): Ceres Seq. ID no. 12334045
MPIVGLGVWRMEKEGIRDLILNAIKIGYRHLDCAADYRNETEVGDALTEAFKTGLVKREDLFITTKLWNSDHGHVIEACKDSLKKLQLDYLDLFLVHFPVATKHTGVGTTDSALGDDGVLDIDTTISLETTWHDMEKLVSMGLVRSIGISNYDVFLTRDCLAYSKIKPAVNQIETHPYFQRDSLVKFCQKHGICVTAHTPLGGATANAEWFGTVSCLDDPVLKDVAEKYKKTVAQVVLRWGIQRKTVVIPKTSKPARLEENFQVFDFELSKEDMEVIKSMERKYRTNQPAKFWNIDLYA

SEQ ID NO: 25627 - protein, 289 aa, Arabidopsis thaliana
  peptide (1)..(289): Ceres Seq. ID no. 12334046
MEKEGIRDLILNAIKIGYRHLDCAADYRNETEVGDALTEAFKTGLVKREDLFITTKLWNSDHGHVIEACKDSLKKLQLDYLDLFLVHFPVATKHTGVGTTDSALGDDGVLDIDTTISLETTWHDMEKLVSMGLVRSIGISNYDVFLTRDCLAYSKIKPAVNQIETHPYFQRDSLVKFCQKHGICVTAHTPLGGATANAEWFGTVSCLDDPVLKDVAEKYKKTVAQVVLRWGIQRKTVVIPKTSKPARLEENFQVFDFELSKEDMEVIKSMERKYRTNQPAKFWNIDLYA

SEQ ID NO: 25628 - DNA, 1626 bp, Arabidopsis thaliana
  misc_feature (1)..(1626): Ceres Seq. ID no. 13491969
  misc_feature (1)..(1626): Ortholog of  Ceres SEQ ID NO 13663419 as cited in SEQ ID NO 66561
aatctttagaaactaagagagaatggaattaacactaaaattgctggttctgcttctgtttatcttaaatcatcatgttggttctggctctatcgtcaagtttcttcccggttttgaaggccctcttcctttcgaacttgaaaccgggtacattggtattggtgaggaagaggaagtgcaattgttctattatttcatcaaatctgagagaaatccaaaagaagaccctcttcttctctggttaagtggaggacctggatgttcttctatcactggccttcttttccagaatggacctttggctttgaagtccgaggtttacaatggaagtgttccttctttggtctctactacatattcgtggactaagacggcgaacataatattcttggatcaacctgttggagctggcttctcctactcaagagctccacttattgatacacctactgacacaggagaagttaagaggattcatgagtttctccaaaagtggctaagcaagcatccacagttttcttccaaccatttttatgctggcggagattcttattccggtatgattgttccggccctcgttcaagaaatctcgaaaggaaattatatatgttgcaaccctcctataaatctaaagggttatgtactcgggaacccgataacgcacgaagacgacccaaactatcgcattccattttctcatggaatggcactaatttcagatgaactatacgagtcaattagggaagcctgcaaaggaaattatttcaatgtggatccacgaaacacaaaatgtttgaaacttgtcgaggaatttcataagtgtaccgacaaactaaatgaattccatatactatcaccagattgcgacacggcatctcctgattgctatttatatccattttatctcattagcttttgggccaatgacgagagcgtccgcgatgctcttcatgttaataagaggagtattggaaaatgggagcgatgtaactatctgagtaaaccatacaacaaagacatcaagagcagcgtaccataccatatgaataacagtgttagtggctaccgatctctcatctacagtggtgatcatgatttggtggttcctttccttgcaacacaagcctggataaaatctctaaattactctatcattgatgaatggagaccttggatgattagagatcaaatcactggatacacgagaacttattccaataagatgacatttgctactgtcaaaggaagtgggcacacagcggagaataaaccacaagagagttttatcatgtttcgaaggtggattaatggccaacctttgtaaaaattacaattatgaattatctactatgtgagctatttgttcctgaggaggtttagaactctaccactagttcgacatgctatagttaccaataaatgaggtcttatttgggtctagggagactacaggccaaagacttggaacttcttggtttattgttatatgttgttaggtaacatttttgtgttattcatagattttaccttttggtacttttatcttctcacagattatattgttctgtgttgtgctgttattttttacaattaaacttagatttttaataaattcttttttgtccc

SEQ ID NO: 25629 - protein, 433 aa, Arabidopsis thaliana; identical to SEQ ID NO: 25004
  peptide (1)..(433): Ceres Seq. ID no. 13491970

SEQ ID NO: 25630 - protein, 254 aa, Arabidopsis thaliana; identical to SEQ ID NO: 25005
  peptide (1)..(254): Ceres Seq. ID no. 13491971

SEQ ID NO: 25631 - DNA, 822 bp, Arabidopsis thaliana
  misc_feature (1)..(822): Ceres Seq. ID no. 12370598
  misc_feature (1)..(822): Ortholog of  Ceres SEQ ID NO 15171235 as cited in SEQ ID NO 52469
  misc_feature (1)..(822): Ortholog of  Ceres SEQ ID NO 15172705 as cited in SEQ ID NO 56069
  misc_feature (1)..(822): Ortholog of  Ceres SEQ ID NO 12635657 as cited in SEQ ID NO 0
  misc_feature (1)..(822): Ortholog of  Ceres SEQ ID NO 12635879 as cited in SEQ ID NO 0
  misc_feature (1)..(822): Ortholog of  Ceres SEQ ID NO 13599649 as cited in SEQ ID NO 0
  misc_feature (1)..(822): Ortholog of  Ceres SEQ ID NO 14309205 as cited in SEQ ID NO 0
  misc_feature (1)..(822): Ortholog of  Ceres SEQ ID NO 15177492 as cited in SEQ ID NO 0
attttcagattcaccgttttagaaattaaatcctctctataagaacctctccaaaaaccctaatttgtcatcatcactttcacaatcttcttcatcgatttctctcttccaaatctcccaaaagatgtcgaaccctagagttttcttcgacatgagtctcagcggtactcccatcggacggatcgagatggagcttttcgctgatacaaccccaaacacggcggagaatttccgtgctctctgtaccggcgagaaaggaatgggaaagctaggtaagccacttcacttcaaaggatcgatcttccaccgtgtgattcccggattcatgtgtcaaggaggtgatttcaccgccaagaacggaaccggtggtgaatcgatctacggtgctaagttcaaggacgagaactttatcaagaagcatacaggagctgggattctctcaatggctaactctggtcctaacactaacggatctcagttcttcatctgtaccgataagacgtcgtggttagatggtaagcacgttgtgtttggacaagttgttaaaggcttggacgtcgtgaaggcgattgagaaagttggatctgattctggaaagacttccaaagtcgttaccatcactgattgtggtcagctttcttagatctaagtgagaaagtgagagactttgatctttatgagtaataatggtgtcttttgctttcggttgttcttcctcttaccttaatggattattctgtttagggtttgagttttcgtttcagagtttgtaacaaaacccttttgtgttttctggggtttgaaataattatgagcttactc

SEQ ID NO: 25632 - protein, 172 aa, Arabidopsis thaliana
  peptide (1)..(172): Ceres Seq. ID no. 12370599
MSNPRVFFDMSLSGTPIGRIEMELFADTTPNTAENFRALCTGEKGMGKLGKPLHFKGSIFHRVIPGFMCQGGDFTAKNGTGGESIYGAKFKDENFIKKHTGAGILSMANSGPNTNGSQFFICTDKTSWLDGKHVVFGQVVKGLDVVKAIEKVGSDSGKTSKVVTITDCGQLS

SEQ ID NO: 25633 - protein, 163 aa, Arabidopsis thaliana
  peptide (1)..(163): Ceres Seq. ID no. 12370600
MSLSGTPIGRIEMELFADTTPNTAENFRALCTGEKGMGKLGKPLHFKGSIFHRVIPGFMCQGGDFTAKNGTGGESIYGAKFKDENFIKKHTGAGILSMANSGPNTNGSQFFICTDKTSWLDGKHVVFGQVVKGLDVVKAIEKVGSDSGKTSKVVTITDCGQLS

SEQ ID NO: 25634 - protein, 151 aa, Arabidopsis thaliana
  peptide (1)..(151): Ceres Seq. ID no. 12370601
MELFADTTPNTAENFRALCTGEKGMGKLGKPLHFKGSIFHRVIPGFMCQGGDFTAKNGTGGESIYGAKFKDENFIKKHTGAGILSMANSGPNTNGSQFFICTDKTSWLDGKHVVFGQVVKGLDVVKAIEKVGSDSGKTSKVVTITDCGQLS

SEQ ID NO: 25635 - DNA, 892 bp, Arabidopsis thaliana
  misc_feature (1)..(892): Ceres Seq. ID no. 13499876
  misc_feature (1)..(892): Ortholog of  Ceres SEQ ID NO 12610385 as cited in SEQ ID NO 55938
  misc_feature (1)..(892): Ortholog of  Ceres SEQ ID NO 13661939 as cited in SEQ ID NO 61170
  misc_feature (1)..(892): Ortholog of  Ceres SEQ ID NO 14309041 as cited in SEQ ID NO 0
  misc_feature (1)..(892): Ortholog of  Ceres SEQ ID NO 14309611 as cited in SEQ ID NO 0
caaccattgttgcgtgtttggttatctcttctttcttctctctcacctaaatcaagggatttgttctgatcaactttgaacagaatttacaacaaatccctagaaaaatctgacccttccttcttcctctggaagatttaagatacttgttgataaggatattcggaagaagcttttgaaatttttggcaaaagtctcatttgatccgacttttctgttgaaggtgaaatagatacaaaaaaaaatgggctcagaggaaaacaacagcacaagctttccaccaacagagccaaagctctgtgataacggatgtggattcttcgggtcaccatccaacatgaatctctgctcgaaatgttacagaagcttaagagccgaggaagatcaaaccgcggtagcgaaagctgcggtgaagaactctttaaagcttccatcttgcagtatcattgcacctggacaaaaacatcctctggaaattaaaccagctcatttggaaaccgttgttgtaaccgctgagccgtcttcggtgcctgtagccgcggaacaggacgaggctgagccgtcgagacctgttagaccgaacaacaggtgtttcagctgtaacaagaaggttggtgtaatggggtttaagtgcaaatgcggtagcacgttttgcgggagtcataggtacccggagaagcatgagtgtagcttcgatttcaaagaagttggacgtgatgcaatcgcaaaggcgaatcctttggttaaggctgataaagttcagaggatttgaagaaaacaaactttgttatttttaagtatttctttgtcttctgcatttgatcagtttctgcctgggatgttcgatgtttggtttccatgaataaaaatgaaaattgctgctcttgctttc

SEQ ID NO: 25636 - protein, 175 aa, Arabidopsis thaliana
  peptide (1)..(175): Ceres Seq. ID no. 13499877
MGSEENNSTSFPPTEPKLCDNGCGFFGSPSNMNLCSKCYRSLRAEEDQTAVAKAAVKNSLKLPSCSIIAPGQKHPLEIKPAHLETVVVTAEPSSVPVAAEQDEAEPSRPVRPNNRCFSCNKKVGVMGFKCKCGSTFCGSHRYPEKHECSFDFKEVGRDAIAKANPLVKADKVQRI

SEQ ID NO: 25637 - protein, 144 aa, Arabidopsis thaliana
  peptide (1)..(144): Ceres Seq. ID no. 13499878
MNLCSKCYRSLRAEEDQTAVAKAAVKNSLKLPSCSIIAPGQKHPLEIKPAHLETVVVTAEPSSVPVAAEQDEAEPSRPVRPNNRCFSCNKKVGVMGFKCKCGSTFCGSHRYPEKHECSFDFKEVGRDAIAKANPLVKADKVQRI

SEQ ID NO: 25638 - DNA, 1197 bp, Arabidopsis thaliana
  misc_feature (1)..(1197): Ceres Seq. ID no. 12339651
  misc_feature (1)..(1197): Ortholog of  Ceres SEQ ID NO 13595658 as cited in SEQ ID NO 59888
  misc_feature (1)..(1197): Ortholog of  Ceres SEQ ID NO 13661330 as cited in SEQ ID NO 61614
  misc_feature (1)..(1197): Ortholog of  Ceres SEQ ID NO 13596025 as cited in SEQ ID NO 62024
  misc_feature (1)..(1197): Ortholog of  Ceres SEQ ID NO 13662324 as cited in SEQ ID NO 62162
  misc_feature (1)..(1197): Ortholog of  Ceres SEQ ID NO 12625713 as cited in SEQ ID NO 64160
  misc_feature (1)..(1197): Ortholog of  Ceres SEQ ID NO 15170103 as cited in SEQ ID NO 66345
atcgactactctcactctctttctattctctcttccgccgctttttccatcgttcgaaagtaaagttgctcgctttactcgttcaagcattcaactagaatccgatcgaatcctcctgcaacagcaatgatgaatcggatcctcttgtttatgatcctggcttttgtctcatctctttcagcagttgagccaatttcgttcaagatcacgaatcgttgccggaacacgatatggcccggtttgctctctggtgctaactctgcgccgctccccacaactggctttcgtctctctagaggaaaatctaaaaccgtcgcaataccagagtcgtggtccggtcgtctctgggcacgaaccttgtgttcacaagatcggagttcaggttctttcgtctgcttaaccggagattgcggctcgggaaaagtcgaatgttcaggctccggcagctaaacctccagcaactctcgccgagtttactctcaatggcacaggaggactagatttttacgacgttagcctcgtcgacggttacaatctcccgatgctaatcttgcccaagaaaatcgtcattggaggatgcggagccaccgggtgtctcgtggacttgaacggcgcgtgtcccagagacctaaagctggtgacgcgtgggaatgggaacggtgttgcttgccgtagcgcgtgcgaggcattcggagacccaaggtattgctgcagcgatgcgtacgccacgccggacacgtgtcagccttcggtttactcgctcttctttaagcatgcgtgcccacgagcatacagctacgcctatgacgataagacgagcacttacacttgcgccaccggagccgattacttcatcatcttctgtccgccaccgtatacaagcgagaagcttttaggatcgaggaaagatggtgcaacactgccactagtaaacaagagcatgattcatttgccgcatccgcacagcagctgagccatcttcttattatatgtcttaagtccttcttacatcaggtccgtcttacatgggtactcgcattgtctgttgaggttactatactgttttcatttcctctttcttgttgcaggcagatagaaaattcatgtgtagaaaaatgtcattacggttaataccaaggtagaattactgtaaatctttacttgttttacacttgttacttctttcgaaattgttcc

SEQ ID NO: 25639 - protein, 143 aa, Arabidopsis thaliana
  peptide (1)..(143): Ceres Seq. ID no. 12339652
MLILPKKIVIGGCGATGCLVDLNGACPRDLKLVTRGNGNGVACRSACEAFGDPRYCCSDAYATPDTCQPSVYSLFFKHACPRAYSYAYDDKTSTYTCATGADYFIIFCPPPYTSEKLLGSRKDGATLPLVNKSMIHLPHPHSS

SEQ ID NO: 25640 - protein, 107 aa, Arabidopsis thaliana
  peptide (1)..(107): Ceres Seq. ID no. 12339653
MMNRILLFMILAFVSSLSAVEPISFKITNRCRNTIWPGLLSGANSAPLPTTGFRLSRGKSKTVAIPESWSGRLWARTLCSQDRSSGSFVCLTGDCGSGKVECSGSGS

SEQ ID NO: 25641 - protein, 106 aa, Arabidopsis thaliana
  peptide (1)..(106): Ceres Seq. ID no. 12339654
MNRILLFMILAFVSSLSAVEPISFKITNRCRNTIWPGLLSGANSAPLPTTGFRLSRGKSKTVAIPESWSGRLWARTLCSQDRSSGSFVCLTGDCGSGKVECSGSGS

SEQ ID NO: 25642 - DNA, 1490 bp, Arabidopsis thaliana; identical to SEQ ID NO: 23420
  misc_feature (1)..(1490): Ceres Seq. ID no. 13497463
  misc_feature (1)..(1490): Ortholog of  Ceres SEQ ID NO 14308586 as cited in SEQ ID NO 55143
  misc_feature (1)..(1490): Ortholog of  Ceres SEQ ID NO 14314308 as cited in SEQ ID NO 57259
  misc_feature (1)..(1490): Ortholog of  Ceres SEQ ID NO 15226216 as cited in SEQ ID NO 62291

SEQ ID NO: 25643 - protein, 325 aa, Arabidopsis thaliana; identical to SEQ ID NO: 23421
  peptide (1)..(325): Ceres Seq. ID no. 13497464

SEQ ID NO: 25644 - protein, 310 aa, Arabidopsis thaliana; identical to SEQ ID NO: 23422
  peptide (1)..(310): Ceres Seq. ID no. 13497465

SEQ ID NO: 25645 - protein, 270 aa, Arabidopsis thaliana; identical to SEQ ID NO: 23423
  peptide (1)..(270): Ceres Seq. ID no. 13497466

SEQ ID NO: 25646 - DNA, 1242 bp, Arabidopsis thaliana
  misc_feature (1)..(1242): Ceres Seq. ID no. 12331564
  misc_feature (1)..(1242): Ortholog of  Ceres SEQ ID NO 12636774 as cited in SEQ ID NO 372
  misc_feature (1)..(1242): Ortholog of  Ceres SEQ ID NO 12582113 as cited in SEQ ID NO 58349
  misc_feature (1)..(1242): Ortholog of  Ceres SEQ ID NO 15175861 as cited in SEQ ID NO 59381
  misc_feature (1)..(1242): Ortholog of  Ceres SEQ ID NO 12578315 as cited in SEQ ID NO 62451
  misc_feature (1)..(1242): Ortholog of  Ceres SEQ ID NO 12615466 as cited in SEQ ID NO 62761
  misc_feature (1)..(1242): Ortholog of  Ceres SEQ ID NO 14314080 as cited in SEQ ID NO 63105
  misc_feature (1)..(1242): Ortholog of  Ceres SEQ ID NO 13597295 as cited in SEQ ID NO 63743
  misc_feature (1)..(1242): Ortholog of  Ceres SEQ ID NO 12617090 as cited in SEQ ID NO 64005
  misc_feature (1)..(1242): Ortholog of  Ceres SEQ ID NO 13597439 as cited in SEQ ID NO 64081
  misc_feature (1)..(1242): Ortholog of  Ceres SEQ ID NO 13597233 as cited in SEQ ID NO 64370
  misc_feature (1)..(1242): Ortholog of  Ceres SEQ ID NO 13598327 as cited in SEQ ID NO 68040
  misc_feature (1)..(1242): Ortholog of  Ceres SEQ ID NO 13599438 as cited in SEQ ID NO 0
agatttgagactatctatttacattctgattatttcttaagaagaaacggccatggaagtcaaaggagccacccggagctctatcatagttccttctgttcaagagatggtgaaggagaagatgatcacgacggttcctccgaggtatgtacggtctgatcaagacgtagctgagatagccgttgattctggtctaagaaaccagatcccaatcatagacttcagtcttctgtgttcttcaacctccatggattccgagattgacaagcttgactctgcttgcaaagagtggggattttttcagcttgtaaaccatggaatggagtcaagtttcttgaacaaagtaaagtcagaggttcaagacttcttcaaccttcccatggaagagaagaagaatttgtggcaacaacccgatgagatcgaagggtttagacaagtatttgtggtttcagaagagcagaaactcgattgggcagatatgttcttccttacaatgcaacctgttcgattacgcaagcctcacttgttccccaagttacctctgccctttagagatacactagacatgtattcgactgaagtgaaaagcattgctaagatcttacttgggaaaatagcggtagcactgaagatcaaacccgaggaaatggataggttgtttgatgatgagttagggcagagaattaggctgaattactacccgccttgtccagagcccgataaggttattggtctaactccgcattctgattctacaggactcaccatactgttgcaggctaatgaagttgaaggtctccaaatcaagaaaaatggcaagtgggtttctgtcaaacctctcccaaatgctttggttgtcaatgtcggagacatcttagagatcataacgaatagcacataccgaagtatagagcatcgtggagttgtgaactcagagaaagagagactttcggtggcggcattccacaatattggattgggtaaagaaattggtccgatgagaagtctcgtggaaaggcacaaggctgcatttttcaaaagcgtgactactgaagagtatttccatggcttgttttcccgtgagctcgatggaaaagcttaccttgatgttatgagactctaaaggaaacaattcataaaattattggcttgtgccccaagaaaacaatcacattttctgacccttcctattgtagtgtatatactctgtttctcctctgtttcatgcttttgcaaataggc

SEQ ID NO: 25647 - protein, 356 aa, Arabidopsis thaliana
  peptide (1)..(356): Ceres Seq. ID no. 12331565
MEVKGATRSSIIVPSVQEMVKEKMITTVPPRYVRSDQDVAEIAVDSGLRNQIPIIDFSLLCSSTSMDSEIDKLDSACKEWGFFQLVNHGMESSFLNKVKSEVQDFFNLPMEEKKNLWQQPDEIEGFRQVFVVSEEQKLDWADMFFLTMQPVRLRKPHLFPKLPLPFRDTLDMYSTEVKSIAKILLGKIAVALKIKPEEMDRLFDDELGQRIRLNYYPPCPEPDKVIGLTPHSDSTGLTILLQANEVEGLQIKKNGKWVSVKPLPNALVVNVGDILEIITNSTYRSIEHRGVVNSEKERLSVAAFHNIGLGKEIGPMRSLVERHKAAFFKSVTTEEYFHGLFSRELDGKAYLDVMRL

SEQ ID NO: 25648 - protein, 338 aa, Arabidopsis thaliana
  peptide (1)..(338): Ceres Seq. ID no. 12331566
MVKEKMITTVPPRYVRSDQDVAEIAVDSGLRNQIPIIDFSLLCSSTSMDSEIDKLDSACKEWGFFQLVNHGMESSFLNKVKSEVQDFFNLPMEEKKNLWQQPDEIEGFRQVFVVSEEQKLDWADMFFLTMQPVRLRKPHLFPKLPLPFRDTLDMYSTEVKSIAKILLGKIAVALKIKPEEMDRLFDDELGQRIRLNYYPPCPEPDKVIGLTPHSDSTGLTILLQANEVEGLQIKKNGKWVSVKPLPNALVVNVGDILEIITNSTYRSIEHRGVVNSEKERLSVAAFHNIGLGKEIGPMRSLVERHKAAFFKSVTTEEYFHGLFSRELDGKAYLDVMRL

SEQ ID NO: 25649 - protein, 333 aa, Arabidopsis thaliana
  peptide (1)..(333): Ceres Seq. ID no. 12331567
MITTVPPRYVRSDQDVAEIAVDSGLRNQIPIIDFSLLCSSTSMDSEIDKLDSACKEWGFFQLVNHGMESSFLNKVKSEVQDFFNLPMEEKKNLWQQPDEIEGFRQVFVVSEEQKLDWADMFFLTMQPVRLRKPHLFPKLPLPFRDTLDMYSTEVKSIAKILLGKIAVALKIKPEEMDRLFDDELGQRIRLNYYPPCPEPDKVIGLTPHSDSTGLTILLQANEVEGLQIKKNGKWVSVKPLPNALVVNVGDILEIITNSTYRSIEHRGVVNSEKERLSVAAFHNIGLGKEIGPMRSLVERHKAAFFKSVTTEEYFHGLFSRELDGKAYLDVMRL

SEQ ID NO: 25650 - DNA, 1046 bp, Arabidopsis thaliana
  misc_feature (1)..(1046): Ceres Seq. ID no. 13488537
  misc_feature (1)..(1046): Ortholog of  Ceres SEQ ID NO 13595202 as cited in SEQ ID NO 56273
tgaacgcaggcagagattcttcgaacttgatatttgggaaacttgcaatccgattctgtcaccagtgttttgccttcataaatggagtttgttgttgaagaaggaaagctagtgaatgaagattgctcgactttagttctcccagcattgtcaattgggaatgtaggacagctcgctgttgatcttctagtgtcatctactggtgcagagagagttggttatcttgatgatccaaatctgcttccttgtgttggaaatgatgcttatggccctcttccttgtggcgagatcgcccttcctctcgaggtttatgagtcatcttcaattgctactacccttgctcagcaacggtctccagttgcaaagggaatgatgattaaatttgcggagaatatagccaattttgctgcttcaagtggaaagaagcacatcattgtgttatcgagtttagacttccaaaggctgcataacttggatatgtcgagaggcccacaggtgtattatctgtctaacgctgaatctgatggaagagatggtcactgtgaaaggcttgggtttggaagattgcacgagtatgattcagaaggaagatgttggaagtaccttagctctgtctttgaaaagaacagtgtagaagagctggcgttgccttcagaagatgaacttgaagacatggactactatccaagcttgccatttgcagctcttttctcagcttttaaggcaagaggcttgaagatgacatgcctgctatgttactgttctgaaggagacaacattcctgaagcatttcttctagctgaggcttcatctaagcttatgggtctgactcctgacaagttccatggggaagaaggtgggaaatgggagataccgtattcatggaagagtatgtatggagctcctccggatatgtctatgttttaagactgttgttggagctcacagtgtcagacaccgaggttgttgtagtggtacaattatgatccaatgagaagtttatgaacatttgagatggtttaatccgatagagacaccttttcttt

SEQ ID NO: 25651 - protein, 281 aa, Arabidopsis thaliana
  peptide (1)..(281): Ceres Seq. ID no. 13488538
MEFVVEEGKLVNEDCSTLVLPALSIGNVGQLAVDLLVSSTGAERVGYLDDPNLLPCVGNDAYGPLPCGEIALPLEVYESSSIATTLAQQRSPVAKGMMIKFAENIANFAASSGKKHIIVLSSLDFQRLHNLDMSRGPQVYYLSNAESDGRDGHCERLGFGRLHEYDSEGRCWKYLSSVFEKNSVEELALPSEDELEDMDYYPSLPFAALFSAFKARGLKMTCLLCYCSEGDNIPEAFLLAEASSKLMGLTPDKFHGEEGGKWEIPYSWKSMYGAPPDMSMF

SEQ ID NO: 25652 - protein, 185 aa, Arabidopsis thaliana
  peptide (1)..(185): Ceres Seq. ID no. 13488539
MMIKFAENIANFAASSGKKHIIVLSSLDFQRLHNLDMSRGPQVYYLSNAESDGRDGHCERLGFGRLHEYDSEGRCWKYLSSVFEKNSVEELALPSEDELEDMDYYPSLPFAALFSAFKARGLKMTCLLCYCSEGDNIPEAFLLAEASSKLMGLTPDKFHGEEGGKWEIPYSWKSMYGAPPDMSMF

SEQ ID NO: 25653 - protein, 184 aa, Arabidopsis thaliana
  peptide (1)..(184): Ceres Seq. ID no. 13488540
MIKFAENIANFAASSGKKHIIVLSSLDFQRLHNLDMSRGPQVYYLSNAESDGRDGHCERLGFGRLHEYDSEGRCWKYLSSVFEKNSVEELALPSEDELEDMDYYPSLPFAALFSAFKARGLKMTCLLCYCSEGDNIPEAFLLAEASSKLMGLTPDKFHGEEGGKWEIPYSWKSMYGAPPDMSMF

SEQ ID NO: 25654 - DNA, 806 bp, Arabidopsis thaliana
  misc_feature (1)..(806): Ceres Seq. ID no. 12323422
  misc_feature (1)..(806): Ortholog of  Ceres SEQ ID NO 13599232 as cited in SEQ ID NO 991
gctctaagacccagtttgactcgttgatcaacgaaaggtaacgacaaaactcagatttccgatttcattactatgaatcgattcgaatttctgagtttctgactttgtttcagtgtgagtttgaggtgaaagatgacggcgacgatagatcggaggttatcaacgctgaatccaaacgcgccggtgtttgatccggtggaatttcgtgaggtggaggatttttcaccgaaatggtgggatctagtaacgacttcgaaatggttccgtgacttttggctcagtgctaactctgagtatgagttcctcggcggcgacgatttctcagttatggaagaagagttcgaggagatgatcgcatcgtctgatggtggatccatggctgatacagttacaggtaacgatttgtttactgttttaaaattagttgagatttagggattcgaaacattcagatctgaggatttttgtgtgttttaatggcagaagcagatgtggctagttatttgaagatgcttttgaatatagcggagtctacgaaagagaagatttatagatcgaaggtttcgtcttgttcaccaaagtataatcagaagaagtacatgaatccgaactttaattgtcgccggaatcatcatatctatcagccacggtgaagcttctagaaggaacaaagctcttcttcttcttctttcgagatgataatcagagtcgtgtctgtgtttatggctgaatctgatcttttctgctttcttgttttttgtaattctgtgaatattcctactttctataataacatcactttatgc

SEQ ID NO: 25655 - protein, 100 aa, Arabidopsis thaliana
  peptide (1)..(100): Ceres Seq. ID no. 12323423
MTATIDRRLSTLNPNAPVFDPVEFREVEDFSPKWWDLVTTSKWFRDFWLSANSEYEFLGGDDFSVMEEEFEEMIASSDGGSMADTVTGNDLFTVLKLVEI

SEQ ID NO: 25656 - protein, 58 aa, Arabidopsis thaliana
  peptide (1)..(58): Ceres Seq. ID no. 12323424
MAEADVASYLKMLLNIAESTKEKIYRSKVSSCSPKYNQKKYMNPNFNCRRNHHIYQPR

SEQ ID NO: 25657 - DNA, 975 bp, Arabidopsis thaliana
  misc_feature (1)..(975): Ceres Seq. ID no. 12481710
  misc_feature (1)..(975): Ortholog of  Ceres SEQ ID NO 15176379 as cited in SEQ ID NO 59735
cttcaaaaaactctccactcaactctctctggtcagctgtctcttccccattctctagggttttcaagctcaacctcaagctccactacgatctcttcttcttctctaatctcagttgaaagatgcaaggtgtgattcgatccttcgtctccggtggaaatgttgtgaaaggctctgtgctgcaacatctccgtgtgattaacccggcgattcagccttctgtgttttgttcacgctctgaatcaactcaacctgcacgtatggaggaatctggattcgagagcacaactatttccgatgtcatgaaatccaaaggcaaaagtgctgatggatcttggctttggtgtactactgatgacactgtttatgatgctgttaaatccatgacacaacacaatgttggtgccttggtggttgtgaaacctggtgagcaacaagctcttgctggtatcattacagagagagattatctacggaagatcattgtgcaagggagatcatccaaatcaacaaaagttggagacattatgactgaagagaataagcttatcactgtgacaccggagaccaaggtcttgcgtgctatgcaactgatgacagataaccgaatcaggcatattccggtaatcaaagacaagggcatgattggaatggtgtccataggagatgttgtccgtgcagtggttcatgagcatagagaggagcttcaacgcctaaatgcgtatattcagggaggttactagatcttgaataatggaaagaaaagagttccctgttgtgtcgtctggtcttgtgctgctgaatctgaaaagcttccagatcagtgtaaatatgcagtcctcgttgttattgttgttgttgttgtgtttgatgttttgtgttgtttcgttgtttaacttgtcaaaactaaggccttgtgctgcttctcttcttgcgcttacttagcaagagaataaaaccaaaaactctgatctc

SEQ ID NO: 25658 - protein, 206 aa, Arabidopsis thaliana
  peptide (1)..(206): Ceres Seq. ID no. 12481711
MQGVIRSFVSGGNVVKGSVLQHLRVINPAIQPSVFCSRSESTQPARMEESGFESTTISDVMKSKGKSADGSWLWCTTDDTVYDAVKSMTQHNVGALVVVKPGEQQALAGIITERDYLRKIIVQGRSSKSTKVGDIMTEENKLITVTPETKVLRAMQLMTDNRIRHIPVIKDKGMIGMVSIGDVVRAVVHEHREELQRLNAYIQGGY

SEQ ID NO: 25659 - protein, 160 aa, Arabidopsis thaliana
  peptide (1)..(160): Ceres Seq. ID no. 12481712
MEESGFESTTISDVMKSKGKSADGSWLWCTTDDTVYDAVKSMTQHNVGALVVVKPGEQQALAGIITERDYLRKIIVQGRSSKSTKVGDIMTEENKLITVTPETKVLRAMQLMTDNRIRHIPVIKDKGMIGMVSIGDVVRAVVHEHREELQRLNAYIQGGY

SEQ ID NO: 25660 - protein, 146 aa, Arabidopsis thaliana
  peptide (1)..(146): Ceres Seq. ID no. 12481713
MKSKGKSADGSWLWCTTDDTVYDAVKSMTQHNVGALVVVKPGEQQALAGIITERDYLRKIIVQGRSSKSTKVGDIMTEENKLITVTPETKVLRAMQLMTDNRIRHIPVIKDKGMIGMVSIGDVVRAVVHEHREELQRLNAYIQGGY

SEQ ID NO: 25661 - DNA, 1045 bp, Arabidopsis thaliana
  misc_feature (1)..(1045): Ceres Seq. ID no. 13487337
  misc_feature (1)..(1045): Ortholog of  Ceres SEQ ID NO 13594474 as cited in SEQ ID NO 51277
  misc_feature (1)..(1045): Ortholog of  Ceres SEQ ID NO 12635560 as cited in SEQ ID NO 0
aaaaaaccaaaaaaaagaaaggagagaggccgacttggggtataagccagagttcttcttctttttcaagcttcttcttctcatcagtcatcaccggaatctaatttatactcgcaaaactcagcgattcgtttcgtttctgacaagtttccaattctacagcaatggatctcaatctcgatgcacctcactccatgggaacgaccatcatcggcgtcacttacaatggaggtgtcgtcctcggagccgactcacgtaccagcaccggtatgtacgtagcgaatcgagcttctgataagattacacaactgacagataatgtctacgtctgccgctctggatcggctgctgattctcaagttgtatctgactatgtccgctacttccttcaccagcatacaattcagcatggacaacccgcaactgttaaggtttctgccaaccttatcaggatgctcgcatataataacaagaacatgctccaaactggtctcatcgttggaggatgggataaatatgagggtgggaagatctacgggatcccactcggtggaactgtagtcgagcaaccgtttgccattggaggctctggttcgagctatctctacgggttcttcgaccaggcttggaaagataacatgaccaaagaagaagcagagcaacttgttgtgaaggcggtttcactagccatcgcccgtgatggagccagtggtggtgtcgtacggactgtcataatcaactcagagggagtgacgagaaacttttaccctggagataagttgcagctttggcacgaagaattggagccccaaaactcactcttagacattctgaacgctgctggtcctgaaccaatggccatgtgatctgcaaacaacgatcattatcttactctgttgggcaaacattttagatatttcattacagtttccagtgtctttaagactttaaactctgtttgaggttctgttgtaatgaatgacccgatctttctgttttaaacggatatcgtgtttcttatggctatggttttaattcctctgtc

SEQ ID NO: 25662 - protein, 233 aa, Arabidopsis thaliana
  peptide (1)..(233): Ceres Seq. ID no. 13487338
MDLNLDAPHSMGTTIIGVTYNGGVVLGADSRTSTGMYVANRASDKITQLTDNVYVCRSGSAADSQVVSDYVRYFLHQHTIQHGQPATVKVSANLIRMLAYNNKNMLQTGLIVGGWDKYEGGKIYGIPLGGTVVEQPFAIGGSGSSYLYGFFDQAWKDNMTKEEAEQLVVKAVSLAIARDGASGGVVRTVIINSEGVTRNFYPGDKLQLWHEELEPQNSLLDILNAAGPEPMAM

SEQ ID NO: 25663 - protein, 223 aa, Arabidopsis thaliana
  peptide (1)..(223): Ceres Seq. ID no. 13487339
MGTTIIGVTYNGGVVLGADSRTSTGMYVANRASDKITQLTDNVYVCRSGSAADSQVVSDYVRYFLHQHTIQHGQPATVKVSANLIRMLAYNNKNMLQTGLIVGGWDKYEGGKIYGIPLGGTVVEQPFAIGGSGSSYLYGFFDQAWKDNMTKEEAEQLVVKAVSLAIARDGASGGVVRTVIINSEGVTRNFYPGDKLQLWHEELEPQNSLLDILNAAGPEPMAM

SEQ ID NO: 25664 - protein, 198 aa, Arabidopsis thaliana
  peptide (1)..(198): Ceres Seq. ID no. 13487340
MYVANRASDKITQLTDNVYVCRSGSAADSQVVSDYVRYFLHQHTIQHGQPATVKVSANLIRMLAYNNKNMLQTGLIVGGWDKYEGGKIYGIPLGGTVVEQPFAIGGSGSSYLYGFFDQAWKDNMTKEEAEQLVVKAVSLAIARDGASGGVVRTVIINSEGVTRNFYPGDKLQLWHEELEPQNSLLDILNAAGPEPMAM

SEQ ID NO: 25665 - DNA, 683 bp, Arabidopsis thaliana
  misc_feature (1)..(683): Ceres Seq. ID no. 12395746
  misc_feature (1)..(683): Ortholog of  Ceres SEQ ID NO 12563124 as cited in SEQ ID NO 57104
  misc_feature (1)..(683): Ortholog of  Ceres SEQ ID NO 13598373 as cited in SEQ ID NO 62185
  misc_feature (1)..(683): Ortholog of  Ceres SEQ ID NO 12617639 as cited in SEQ ID NO 65219
acatctcactgctcactactctcactgtaatcccttagatcttcttttcaaatttcaatggcgtccggtgatgttgagtatcggtgcttcgttggaggtctagcatgggccactgatgacagagctcttgagactgccttcgctcaatacggcgacgttattgattccaagatcattaacgatcgtgagactggaagatcaaggggattcggattcgtcaccttcaaggatgagaaagccatgaaggatgcgattgagggaatgaacggacaagatctcgatggccgtagcatcactgttaacgaggctcagtcacgaggaagcggtggcggcggaggccaccgtggaggtggtggcggtggataccgcagcggcggtggtggaagacgtgagggaggaggaggatacggtggtggtgaaggaggaggttacggaggaagcggtggtggtggaggatggtaattcctttaattaggtttgggattaccaatgaatgttctctctctcgcttgttatgcttctacttggttttgtgtgttctctattttgttctggttctgctttagatttgatgtaacagttcgtgattaggtattttggtatctggaaacgtaatgttaagtcacttgtcattctctaaataacaaatttcttcggagatattatctctgttgattgattct

SEQ ID NO: 25666 - protein, 134 aa, Arabidopsis thaliana
  peptide (1)..(134): Ceres Seq. ID no. 12395747
MASGDVEYRCFVGGLAWATDDRALETAFAQYGDVIDSKIINDRETGRSRGFGFVTFKDEKAMKDAIEGMNGQDLDGRSITVNEAQSRGSGGGGGHRGGGGGGYRSGGGGRREGGGGYGGGEGGGYGGSGGGGGW

SEQ ID NO: 25667 - protein, 73 aa, Arabidopsis thaliana
  peptide (1)..(73): Ceres Seq. ID no. 12395748
MKDAIEGMNGQDLDGRSITVNEAQSRGSGGGGGHRGGGGGGYRSGGGGRREGGGGYGGGEGGGYGGSGGGGGW

SEQ ID NO: 25668 - DNA, 766 bp, Arabidopsis thaliana
  misc_feature (1)..(766): Ceres Seq. ID no. 12369971
  misc_feature (1)..(766): Ortholog of  Ceres SEQ ID NO 15177004 as cited in SEQ ID NO 57554
atagagtttggtaggtcgtattttcaacattttaaactcaatttttatgttgacaataacaaaaaaagaaaatcatatcatatatctcaacatatagagtctaactttttttcgccaaaccaaaagaaagaagaaacaaagaaacaagaaaaatgggtgttcttgatcacgtctctgaatatttcgattgttctcatggaagctccaagagacacaaaagtctacagacggtggatgtgagggttttgatagattgtgaaggatgcgagaggaaagtaaggagagctttagaaggaatgagaggaataagagatgtaaccatcgagccaaatgctcagaaagtgacagtggttgggtacgttgaaccaaacaaagtggtggctcgtatcattcaccgaaccggtaaaagagcagagctatatcctttcgttccttacgacgttgtggctcatccttacgcgtctggtgtttacgataacagagccccgactgggtacgttaggaacaccgagtatgatccacatgtgtcacgtctcgcacgtgctagctccactgaggttcgttatactacggcgtttagcgacgagaacgcctccgcttgtgttgttatgtgatgttttttttttttggtttaatttttttttactgggattattttttgtgtttggatgttgatgtttgtttatgtttccatcacgaatgtatttaagataagaacgagtgaaaaaaatgtaaattgcatggtgatgaattggtggttaaaacg

SEQ ID NO: 25669 - protein, 153 aa, Arabidopsis thaliana
  peptide (1)..(153): Ceres Seq. ID no. 12369972
MGVLDHVSEYFDCSHGSSKRHKSLQTVDVRVLIDCEGCERKVRRALEGMRGIRDVTIEPNAQKVTVVGYVEPNKVVARIIHRTGKRAELYPFVPYDVVAHPYASGVYDNRAPTGYVRNTEYDPHVSRLARASSTEVRYTTAFSDENASACVVM

SEQ ID NO: 25670 - protein, 105 aa, Arabidopsis thaliana
  peptide (1)..(105): Ceres Seq. ID no. 12369973
MRGIRDVTIEPNAQKVTVVGYVEPNKVVARIIHRTGKRAELYPFVPYDVVAHPYASGVYDNRAPTGYVRNTEYDPHVSRLARASSTEVRYTTAFSDENASACVVM

SEQ ID NO: 25671 - protein, 79 aa, Arabidopsis thaliana
  peptide (1)..(79): Ceres Seq. ID no. 12369974
IEFGRSYFQHFKLNFYVDNNKKRKSYHISQHIESNFFSPNQKKEETKKQEKWVFLITSLNISIVLMEAPRDTKVYRRWM

SEQ ID NO: 25672 - DNA, 1005 bp, Arabidopsis thaliana
  misc_feature (1)..(1005): Ceres Seq. ID no. 12323588
  misc_feature (1)..(1005): Ortholog of  Ceres SEQ ID NO 14310748 as cited in SEQ ID NO 53379
  misc_feature (1)..(1005): Ortholog of  Ceres SEQ ID NO 15179906 as cited in SEQ ID NO 67006
aaaccctttaaattaaaaaaaaaacaattacttctctttccttcgatcatcgtcttcctctggttctcagatctttgaatcgagcagaagcaattttaaatctcctatcagtgaatttttattactggagaagtaataaggcaaagatggtgaaaatgacattgatagctcgtgttactgatgggttacctctagctgaggggctcgatgatggacgtgacttaccggattcagatatgtataaacaacaggtcaaagctttgtttaagaatctgtccagaggtcaaaatgacgcttcaagaatgtccgttgaaactggcccctatgttttccattacatcatagaaggacgtgtttgctacttgacaatgtgtgaccgctcttacccaaagaaactcgctttccaatacctggaagatctcaagaatgaatttgaacgtgtcaatgggcctaacattgaaacagctgctcggccttatgcctttattaaatttgatacattcatacagaaaaccaagaaactgtaccaagacactcgtacgcaacgaaacatcgccaagttgaatgatgaactctatgaggttcatcaaataatgacccggaatgtgcaagaagtcttaggtgttggtgaaaagctggaccaggtgagcgagatgtcgagccggttaacatctgaatctcgtatatatgctgataaggctaaagatttgaaccgtcaggctttgatccgaaaatgggcaccagtcgcaattgtgttcggtgtagtcttcctccttttctgggtcaagaacaagctatggtaaaaaaaaaaggaggaatctaaggctattttcgtaatttagcggacttctccagacatatgtcgacctcccctaccggactcaagtctcagattccggcacccaaaatatcttctttctttcaaagagaaactttgacacattttgtacttctgtagtatgcaaactttatgagactggtcatagtatcatccattatactctc

SEQ ID NO: 25673 - protein, 218 aa, Arabidopsis thaliana
  peptide (1)..(218): Ceres Seq. ID no. 12323589
MVKMTLIARVTDGLPLAEGLDDGRDLPDSDMYKQQVKALFKNLSRGQNDASRMSVETGPYVFHYIIEGRVCYLTMCDRSYPKKLAFQYLEDLKNEFERVNGPNIETAARPYAFIKFDTFIQKTKKLYQDTRTQRNIAKLNDELYEVHQIMTRNVQEVLGVGEKLDQVSEMSSRLTSESRIYADKAKDLNRQALIRKWAPVAIVFGVVFLLFWVKNKLW

SEQ ID NO: 25674 - protein, 215 aa, Arabidopsis thaliana
  peptide (1)..(215): Ceres Seq. ID no. 12323590
MTLIARVTDGLPLAEGLDDGRDLPDSDMYKQQVKALFKNLSRGQNDASRMSVETGPYVFHYIIEGRVCYLTMCDRSYPKKLAFQYLEDLKNEFERVNGPNIETAARPYAFIKFDTFIQKTKKLYQDTRTQRNIAKLNDELYEVHQIMTRNVQEVLGVGEKLDQVSEMSSRLTSESRIYADKAKDLNRQALIRKWAPVAIVFGVVFLLFWVKNKLW

SEQ ID NO: 25675 - protein, 188 aa, Arabidopsis thaliana
  peptide (1)..(188): Ceres Seq. ID no. 12323591
MYKQQVKALFKNLSRGQNDASRMSVETGPYVFHYIIEGRVCYLTMCDRSYPKKLAFQYLEDLKNEFERVNGPNIETAARPYAFIKFDTFIQKTKKLYQDTRTQRNIAKLNDELYEVHQIMTRNVQEVLGVGEKLDQVSEMSSRLTSESRIYADKAKDLNRQALIRKWAPVAIVFGVVFLLFWVKNKLW

SEQ ID NO: 25676 - DNA, 1692 bp, Arabidopsis thaliana; identical to SEQ ID NO: 24488
  misc_feature (1)..(1692): Ceres Seq. ID no. 13580675
  misc_feature (1)..(1692): Ortholog of  Ceres SEQ ID NO 14307863 as cited in SEQ ID NO 20504

SEQ ID NO: 25677 - protein, 450 aa, Arabidopsis thaliana; identical to SEQ ID NO: 24489
  peptide (1)..(450): Ceres Seq. ID no. 13580676

SEQ ID NO: 25678 - protein, 415 aa, Arabidopsis thaliana; identical to SEQ ID NO: 24490
  peptide (1)..(415): Ceres Seq. ID no. 13580677

SEQ ID NO: 25679 - DNA, 1120 bp, Arabidopsis thaliana
  misc_feature (1)..(1120): Ceres Seq. ID no. 12327098
  misc_feature (1)..(1120): Ortholog of  Ceres SEQ ID NO 13593955 as cited in SEQ ID NO 54278
  misc_feature (1)..(1120): Ortholog of  Ceres SEQ ID NO 13597380 as cited in SEQ ID NO 64054
  misc_feature (1)..(1120): Ortholog of  Ceres SEQ ID NO 12625474 as cited in SEQ ID NO 64169
atgaacttaattagggttctatatgtttagaaaaaaaatgttggtgttagcattattttccatttacttcttatcaatagaaggtgtccggaatgaatcatttcctgcgctattagcttttggagattcaatggtcgatactggtaacaacaattacctcctgactctaatgaaaggaaattactggccatatgggtggaatttcgactcaaaaataccgaccggaagatttggaaacggaagagttttctccgatgtagttgctgaaggtttggggatcaaaagaattgtaccagcttatcgtaagttatacattgctccaagcgaccttaaaacgggtgtttcttttgcatcaggtggtgcaggagtcgaccctgttacatccaaattgctgagagttttatcgccagctgaccaagtaaaagatttcaaaggctacaaaagaaagctaaaaggtgtagtaggcaggtcaaaagcaaaagaaatagttgcaaattcagtgattcttgtttctgaaggaaataatgatattggaatcacatatgcgattcatgatgctggtatgcgattaatgactccgaatatatacaccagtaaattggttggttggaacaaaatttttataaaagatttatatgatcaaggagcacgaaaatttgcggtgatgggagtgataccattgggatgtttgcctatgtcaagacttatttttggtgggttcttcgtgtggtgcaatttcttggcaaacacaatctctgaagattacaacaaaaaattgaaaagcggaattaaaagttggagaggagcatcagattttaggggtgctaagtttgtctatgtcgacatgtacaactctcttatggatgttatcaacaatcataggaaatacggatttacccatgagaagaatggatgttgttgtatgcttacggcaatagtaccatgctccaacccagataaatatgtcttctatgactttgctcatccctccgagaaagcctacaaaacaattgctaaaaagcttgtcgaggatatcaagacaggacttgcctgatttcttacaatgctattttcatcttggaattaccataattaattatatacgtacttcttctgttcc

SEQ ID NO: 25680 - protein, 343 aa, Arabidopsis thaliana
  peptide (1)..(343): Ceres Seq. ID no. 12327099
MFRKKMLVLALFSIYFLSIEGVRNESFPALLAFGDSMVDTGNNNYLLTLMKGNYWPYGWNFDSKIPTGRFGNGRVFSDVVAEGLGIKRIVPAYRKLYIAPSDLKTGVSFASGGAGVDPVTSKLLRVLSPADQVKDFKGYKRKLKGVVGRSKAKEIVANSVILVSEGNNDIGITYAIHDAGMRLMTPNIYTSKLVGWNKIFIKDLYDQGARKFAVMGVIPLGCLPMSRLIFGGFFVWCNFLANTISEDYNKKLKSGIKSWRGASDFRGAKFVYVDMYNSLMDVINNHRKYGFTHEKNGCCCMLTAIVPCSNPDKYVFYDFAHPSEKAYKTIAKKLVEDIKTGLA

SEQ ID NO: 25681 - protein, 338 aa, Arabidopsis thaliana
  peptide (1)..(338): Ceres Seq. ID no. 12327100
MLVLALFSIYFLSIEGVRNESFPALLAFGDSMVDTGNNNYLLTLMKGNYWPYGWNFDSKIPTGRFGNGRVFSDVVAEGLGIKRIVPAYRKLYIAPSDLKTGVSFASGGAGVDPVTSKLLRVLSPADQVKDFKGYKRKLKGVVGRSKAKEIVANSVILVSEGNNDIGITYAIHDAGMRLMTPNIYTSKLVGWNKIFIKDLYDQGARKFAVMGVIPLGCLPMSRLIFGGFFVWCNFLANTISEDYNKKLKSGIKSWRGASDFRGAKFVYVDMYNSLMDVINNHRKYGFTHEKNGCCCMLTAIVPCSNPDKYVFYDFAHPSEKAYKTIAKKLVEDIKTGLA

SEQ ID NO: 25682 - protein, 307 aa, Arabidopsis thaliana
  peptide (1)..(307): Ceres Seq. ID no. 12327101
MVDTGNNNYLLTLMKGNYWPYGWNFDSKIPTGRFGNGRVFSDVVAEGLGIKRIVPAYRKLYIAPSDLKTGVSFASGGAGVDPVTSKLLRVLSPADQVKDFKGYKRKLKGVVGRSKAKEIVANSVILVSEGNNDIGITYAIHDAGMRLMTPNIYTSKLVGWNKIFIKDLYDQGARKFAVMGVIPLGCLPMSRLIFGGFFVWCNFLANTISEDYNKKLKSGIKSWRGASDFRGAKFVYVDMYNSLMDVINNHRKYGFTHEKNGCCCMLTAIVPCSNPDKYVFYDFAHPSEKAYKTIAKKLVEDIKTGLA

SEQ ID NO: 25683 - DNA, 1217 bp, Arabidopsis thaliana
  misc_feature (1)..(1217): Ceres Seq. ID no. 12396274
  misc_feature (1)..(1217): Ortholog of  Ceres SEQ ID NO 13654431 as cited in SEQ ID NO 67761
agaaaacgagaaatgtcagagatagaagaagaagaagaagaaggatcagcaagtgcaattacaggttcgagaagtttcgatcttcccgatgaacttcttcaagttctaccgtccgatccattcgagcagctagatgtagctcgcaaaatcacatccattgctctctcgacacgtgtctcagctctcgaatcagagtcgtcggatctccgggaacttctcgccgagaaagaaaaagaatttgaagaactccagtctcacgttgagtctctcgaggcttctctttccgatgcgtttcataagctttctctcgctgatggtgaaaaggagaatctgataagagaaaatgcttctttgtctaatactgtcaagagacttcagagagatgtctcaaagcttgagggttttaggaagacgcttatgatgtctcttcaagatgatgaccaaaatgcaggaacaacgcaaatcatcgctaagccgacaccaaacgatgatgatactccatttcaaccttcaagacattcatcaatccaatctcaacaagcttctgaagccattgaaccagctgcaactgacaacgaaaacgatgctcctaaaccaagtttatcagctagtcttccgttagtatcacaaactactacgccacggcttactcctcctggttctccaccaatcttatctgcttctggtacaccgaaaacaacttcgagacctatctctcctcgacgccattctgtatcgttcgctaccactagaggcatgtttgatgatactagatcttctatttcaatctcagagcctggttcacaaactgcgagaactcgggttgatggaaaagagttctttcgacaagtcaggagccgattatcttacgagcaatttggtgcatttcttggaaatgtgaaggatcttaacgcccacaagcaaacaagagaagaaacacttaggaaagctgaagagatatttggaggcgataacagagatctctacgtcatattcgagggcttgatcacacgcaacgctcactaagagtttggcttcttcagttacacaaagaacttatatactcggaaactcaggattcatcagtctgcaacattcaatttcttttgtttccttggctgtcaagtaagaccaagtaaaactgacaatttgattgtatcatttgtgctctctcgtgtatctatctatctctctcttcttgaataaattacatttca

SEQ ID NO: 25684 - protein, 341 aa, Arabidopsis thaliana
  peptide (1)..(341): Ceres Seq. ID no. 12396275
RKREMSEIEEEEEEGSASAITGSRSFDLPDELLQVLPSDPFEQLDVARKITSIALSTRVSALESESSDLRELLAEKEKEFEELQSHVESLEASLSDAFHKLSLADGEKENLIRENASLSNTVKRLQRDVSKLEGFRKTLMMSLQDDDQNAGTTQIIAKPTPNDDDTPFQPSRHSSIQSQQASEAIEPAATDNENDAPKPSLSASLPLVSQTTTPRLTPPGSPPILSASGTPKTTSRPISPRRHSVSFATTRGMFDDTRSSISISEPGSQTARTRVDGKEFFRQVRSRLSYEQFGAFLGNVKDLNAHKQTREETLRKAEEIFGGDNRDLYVIFEGLITRNAH

SEQ ID NO: 25685 - protein, 337 aa, Arabidopsis thaliana
  peptide (1)..(337): Ceres Seq. ID no. 12396276
MSEIEEEEEEGSASAITGSRSFDLPDELLQVLPSDPFEQLDVARKITSIALSTRVSALESESSDLRELLAEKEKEFEELQSHVESLEASLSDAFHKLSLADGEKENLIRENASLSNTVKRLQRDVSKLEGFRKTLMMSLQDDDQNAGTTQIIAKPTPNDDDTPFQPSRHSSIQSQQASEAIEPAATDNENDAPKPSLSASLPLVSQTTTPRLTPPGSPPILSASGTPKTTSRPISPRRHSVSFATTRGMFDDTRSSISISEPGSQTARTRVDGKEFFRQVRSRLSYEQFGAFLGNVKDLNAHKQTREETLRKAEEIFGGDNRDLYVIFEGLITRNAH

SEQ ID NO: 25686 - protein, 202 aa, Arabidopsis thaliana
  peptide (1)..(202): Ceres Seq. ID no. 12396277
MMSLQDDDQNAGTTQIIAKPTPNDDDTPFQPSRHSSIQSQQASEAIEPAATDNENDAPKPSLSASLPLVSQTTTPRLTPPGSPPILSASGTPKTTSRPISPRRHSVSFATTRGMFDDTRSSISISEPGSQTARTRVDGKEFFRQVRSRLSYEQFGAFLGNVKDLNAHKQTREETLRKAEEIFGGDNRDLYVIFEGLITRNAH

SEQ ID NO: 25687 - DNA, 1887 bp, Arabidopsis thaliana
  misc_feature (1)..(1887): Ceres Seq. ID no. 12343455
  misc_feature (1)..(1887): Ortholog of  Ceres SEQ ID NO 15177722 as cited in SEQ ID NO 0
aaaaaagagagaaggagaggtcgtgttagataattagagcgcacttgcgagcaacaacgaacgacgacccactgattcaatctcctcctctctgcatattccttggcatcttttctggtaccgaagctgagtctctggagagtttctagatcttcttcaattctgcaattcagagcgaagatttattagtgattgattattcactctggagctcgagttctggatccgtgtggctggagggaatgttctgttaagctgattgtttaggcttgttggatcagtatagaaattgtcagattgagaaagacaacaaatgaagaacggtatagctgagtgccctgcatgtcattcaaaattggtctctcctggtagcaaaactatttctagggcttatgacgaccacaagattagggtatcctcaaaacaacgtgtcctcaatgtccttttggttgtaggtgattgcatgcttgttggtctccagcctgtcttggtgtatatgtcgaaggtggatgggaaattcaacttcagtcctattagcgtcaacttcttgacagaaatcgcaaaagttatttttgcgattgtgatgcttttaatccaggccaggcaccaaaaagttggagagaagcctcttctatccgtttccacatttgtccaggcagcccgaaataatgtgcttcttgctgttccagccctgttgtatgcaattaataactatctgaagttcacaatgcagctatatttcaatcctgctactgtaaagatgcttagcaacctaaaggttctggtcatcgctgttctattaaagatggtaatgaagcggcggttttctatcatacagtgggaggcacttgctctgttgctgatagggattagtgtaaaccaattacgttctcttcctgaaggtgctacagccattggaattcctcttgctacgggtgcatacgtctgcaccgttatctttgtcactgtcccgtcaatggcatctgtcttcaacgagtatgctctaaagagtcagtatgacacaagcatatatcttcagaatttattcctctatggttatggtgcaatattcaactttcttggaatactaggaactgttatatataaaggtcctggcagctttgacatcctacaaggacattctagggctaccatgtttttgatactgaacaacgcagcacaagggattttatcgtcctttttcttcaaatatgcagatacaatcttgaagaaatattcatcgacagttgccacaatatttactggcatagcatctgctgcgctctttggacatgttataaccatgaacttccttctcggaatttctatcgttttcatttcgatgcaccagttcttttcaccacttgccaaagcgagagacgagcaacaacagaatgggaacctagaactaggcaacacaaaggatactcacagggctaatgaatcattcatcaacatggccgcaggagcaaatgaagaggctagtcaccgcggtgaatcagacgacaggactccactgcttcccagatgaaaagtttcttaaatgatttttgttcggaagaattattttggccaagaatattctagaaattgggggttttccattcgtatactagcagaggaaacagtgaagcaaacttcatgacaccaactcttacttctctcaagagtcggttttaaagttcgttgaagaacctctcaagtctgaagctgtattgttttaagatagagtgagaacaaaattggtaagtgatatatgtattttggatatataatatttgtattctttggtttttgcaaaatatcaggtcacacttttttgctcttgtttatacaattactctcacagttggattcttcttatatatataaaagcataatttttcc

SEQ ID NO: 25688 - protein, 405 aa, Arabidopsis thaliana
  peptide (1)..(405): Ceres Seq. ID no. 12343456
MKNGIAECPACHSKLVSPGSKTISRAYDDHKIRVSSKQRVLNVLLVVGDCMLVGLQPVLVYMSKVDGKFNFSPISVNFLTEIAKVIFAIVMLLIQARHQKVGEKPLLSVSTFVQAARNNVLLAVPALLYAINNYLKFTMQLYFNPATVKMLSNLKVLVIAVLLKMVMKRRFSIIQWEALALLLIGISVNQLRSLPEGATAIGIPLATGAYVCTVIFVTVPSMASVFNEYALKSQYDTSIYLQNLFLYGYGAIFNFLGILGTVIYKGPGSFDILQGHSRATMFLILNNAAQGILSSFFFKYADTILKKYSSTVATIFTGIASAALFGHVITMNFLLGISIVFISMHQFFSPLAKARDEQQQNGNLELGNTKDTHRANESFINMAAGANEEASHRGESDDRTPLLPR

SEQ ID NO: 25689 - protein, 355 aa, Arabidopsis thaliana
  peptide (1)..(355): Ceres Seq. ID no. 12343457
MLVGLQPVLVYMSKVDGKFNFSPISVNFLTEIAKVIFAIVMLLIQARHQKVGEKPLLSVSTFVQAARNNVLLAVPALLYAINNYLKFTMQLYFNPATVKMLSNLKVLVIAVLLKMVMKRRFSIIQWEALALLLIGISVNQLRSLPEGATAIGIPLATGAYVCTVIFVTVPSMASVFNEYALKSQYDTSIYLQNLFLYGYGAIFNFLGILGTVIYKGPGSFDILQGHSRATMFLILNNAAQGILSSFFFKYADTILKKYSSTVATIFTGIASAALFGHVITMNFLLGISIVFISMHQFFSPLAKARDEQQQNGNLELGNTKDTHRANESFINMAAGANEEASHRGESDDRTPLLPR

SEQ ID NO: 25690 - protein, 344 aa, Arabidopsis thaliana
  peptide (1)..(344): Ceres Seq. ID no. 12343458
MSKVDGKFNFSPISVNFLTEIAKVIFAIVMLLIQARHQKVGEKPLLSVSTFVQAARNNVLLAVPALLYAINNYLKFTMQLYFNPATVKMLSNLKVLVIAVLLKMVMKRRFSIIQWEALALLLIGISVNQLRSLPEGATAIGIPLATGAYVCTVIFVTVPSMASVFNEYALKSQYDTSIYLQNLFLYGYGAIFNFLGILGTVIYKGPGSFDILQGHSRATMFLILNNAAQGILSSFFFKYADTILKKYSSTVATIFTGIASAALFGHVITMNFLLGISIVFISMHQFFSPLAKARDEQQQNGNLELGNTKDTHRANESFINMAAGANEEASHRGESDDRTPLLPR

SEQ ID NO: 25691 - DNA, 729 bp, Arabidopsis thaliana
  misc_feature (1)..(729): Ceres Seq. ID no. 12370677
  misc_feature (1)..(729): Ortholog of  Ceres SEQ ID NO 15179121 as cited in SEQ ID NO 0
atcatcggagccgtttctctctctcgaactcgatttaagtatttgaatcttgccaatggatttgacgtggttaagtgccctaattgttggagctgcacttggatactgcgttggcactcgccgttccaaacctgttgttgctgctgttgataaggatatcaaaactcaatcctccaaaagtccactcgagattgagaaactcgctgatattctcgatgatttcaagatggttttggtggtgagaaatgatcttaaaatgggtaaaggaaagattgcagctcaatgcagtcatgcaactttaggattatacaagaagcttgttcgtcgagcgccaaaagcattggactgctgggaggaatgtgcacagccaaaagttgttgtgaaaatcgaggacgaggacgagatgctagaattgcaagaaagagctaaatcccttaaactgcctacccatatcaccattgatgctggaagaacacagattgccccaaattcaaggacggttatggctattcttggaccagtcgaagttgttgatgaagtaacaggtggactaaagcttctttagcagattcgaatttcgatatgacatttcttcaacctgatctctcagatggaccaagcagaaaggagagacatgaactccaccttctctgttcgcccgaggttacctgtgagaaatctgtagttgttacgtatactcgttcctgatgatgacgaaatattcatttt

SEQ ID NO: 25692 - protein, 169 aa, Arabidopsis thaliana
  peptide (1)..(169): Ceres Seq. ID no. 12370678
MDLTWLSALIVGAALGYCVGTRRSKPVVAAVDKDIKTQSSKSPLEIEKLADILDDFKMVLVVRNDLKMGKGKIAAQCSHATLGLYKKLVRRAPKALDCWEECAQPKVVVKIEDEDEMLELQERAKSLKLPTHITIDAGRTQIAPNSRTVMAILGPVEVVDEVTGGLKLL

SEQ ID NO: 25693 - protein, 112 aa, Arabidopsis thaliana
  peptide (1)..(112): Ceres Seq. ID no. 12370679
MVLVVRNDLKMGKGKIAAQCSHATLGLYKKLVRRAPKALDCWEECAQPKVVVKIEDEDEMLELQERAKSLKLPTHITIDAGRTQIAPNSRTVMAILGPVEVVDEVTGGLKLL

SEQ ID NO: 25694 - protein, 102 aa, Arabidopsis thaliana
  peptide (1)..(102): Ceres Seq. ID no. 12370680
MGKGKIAAQCSHATLGLYKKLVRRAPKALDCWEECAQPKVVVKIEDEDEMLELQERAKSLKLPTHITIDAGRTQIAPNSRTVMAILGPVEVVDEVTGGLKLL

SEQ ID NO: 25695 - DNA, 1387 bp, Arabidopsis thaliana
  misc_feature (1)..(1387): Ceres Seq. ID no. 12333211
  misc_feature (1)..(1387): Ortholog of  Ceres SEQ ID NO 15180036 as cited in SEQ ID NO 0
attattctcttccccacttgattgcgatttgagagagataaaggtcgagaaagtcttttcatctccttcaccctcatcgtttcgcgtctcttctcttctctctcagaaaatgctcatcagaaattgtctcctttttgtttccttgatgtgttttctcttctaatctccggtgaaacaaagaacaaaggattcataagacacaaagcagagaaggagagagagatacgaggcttttcttcatcttctatggcttctatgaccgagaaggaagctatggtggatccttttttggtcgaggctcttcaaaatcctcgtcatcgtctcaccattttgcgaatggagcttgatatacagaagttctttcaaaaccctgagcagcttcagttcgaattcccgccttttccaacatcgtacctgcgtcttgctgcacatcgagttgctcagcattatggactagtaaccatggctttggacaatggtactggtacaggagatggatccgataacagaatcctcgtgacgaagacagcggaaagtagatttccttatgtctgcttatccgaaatccctgtgaaacaacctgagaatggtagacccgagggtttcaaaatcgctatcaagcctagacccaagagaggatctggttgtgggggtagcggatcaggagtacagcagaatcttttgagaagtgttgaggagagaaaggaagagtatgataaagctcgcgctcggatctttaatagtcctagcagttccgactctgaagattcttcatcactacgacctccctctcttgaagtgaaaaacacatgtataaaccggaatgagactgaagtggcggttaataatagtcctgtcgatgctgttactcgagactctggacggacttctcgagtagccattatcagagatagagagaaagaacgatatgacccggattatgacaggagctatgacaggtatgtcgtggatccagcctacaggtacgttagggttatgccgtctggccaaagcttcagtccaatgccaatccatattccgtttcacgatgggtttttcccgcatatgccaagaggtcatcaagccaacctaaactatgggcatccgcttaaccctgctttgagtccctttactcataacgtggcttcatatacaccgtggccaaactcacccgttatgaactatgcacagccgttgaacggctcagacacaaatctttacaggtatccttctgcaagtaatccctgacagcaagagtagtgtttgagtacttcaatgtctgtaatgaaaagcagattctatagatattagcctttaggagctccctgttctgttccgaacaatggctacttctttcttatataacaaacaagacatctactttttt

SEQ ID NO: 25696 - protein, 333 aa, Arabidopsis thaliana
  peptide (1)..(333): Ceres Seq. ID no. 12333212
MASMTEKEAMVDPFLVEALQNPRHRLTILRMELDIQKFFQNPEQLQFEFPPFPTSYLRLAAHRVAQHYGLVTMALDNGTGTGDGSDNRILVTKTAESRFPYVCLSEIPVKQPENGRPEGFKIAIKPRPKRGSGCGGSGSGVQQNLLRSVEERKEEYDKARARIFNSPSSSDSEDSSSLRPPSLEVKNTCINRNETEVAVNNSPVDAVTRDSGRTSRVAIIRDREKERYDPDYDRSYDRYVVDPAYRYVRVMPSGQSFSPMPIHIPFHDGFFPHMPRGHQANLNYGHPLNPALSPFTHNVASYTPWPNSPVMNYAQPLNGSDTNLYRYPSASNP

SEQ ID NO: 25697 - protein, 330 aa, Arabidopsis thaliana
  peptide (1)..(330): Ceres Seq. ID no. 12333213
MTEKEAMVDPFLVEALQNPRHRLTILRMELDIQKFFQNPEQLQFEFPPFPTSYLRLAAHRVAQHYGLVTMALDNGTGTGDGSDNRILVTKTAESRFPYVCLSEIPVKQPENGRPEGFKIAIKPRPKRGSGCGGSGSGVQQNLLRSVEERKEEYDKARARIFNSPSSSDSEDSSSLRPPSLEVKNTCINRNETEVAVNNSPVDAVTRDSGRTSRVAIIRDREKERYDPDYDRSYDRYVVDPAYRYVRVMPSGQSFSPMPIHIPFHDGFFPHMPRGHQANLNYGHPLNPALSPFTHNVASYTPWPNSPVMNYAQPLNGSDTNLYRYPSASNP

SEQ ID NO: 25698 - protein, 324 aa, Arabidopsis thaliana
  peptide (1)..(324): Ceres Seq. ID no. 12333214
MVDPFLVEALQNPRHRLTILRMELDIQKFFQNPEQLQFEFPPFPTSYLRLAAHRVAQHYGLVTMALDNGTGTGDGSDNRILVTKTAESRFPYVCLSEIPVKQPENGRPEGFKIAIKPRPKRGSGCGGSGSGVQQNLLRSVEERKEEYDKARARIFNSPSSSDSEDSSSLRPPSLEVKNTCINRNETEVAVNNSPVDAVTRDSGRTSRVAIIRDREKERYDPDYDRSYDRYVVDPAYRYVRVMPSGQSFSPMPIHIPFHDGFFPHMPRGHQANLNYGHPLNPALSPFTHNVASYTPWPNSPVMNYAQPLNGSDTNLYRYPSASNP

SEQ ID NO: 25699 - DNA, 1481 bp, Arabidopsis thaliana
  misc_feature (1)..(1481): Ceres Seq. ID no. 12333207
  misc_feature (1)..(1481): Ortholog of  Ceres SEQ ID NO 13596581 as cited in SEQ ID NO 62420
  misc_feature (1)..(1481): Ortholog of  Ceres SEQ ID NO 13591273 as cited in SEQ ID NO 65904
  misc_feature (1)..(1481): Ortholog of  Ceres SEQ ID NO 13623086 as cited in SEQ ID NO 0
aaaaagataagatacgaagaacaagagccccctctctctctctcgtccactcacctattgtgtatctcatcatcaccatggacaagacatttttctctagcaacgaagggaaaccaattacatgcaaagcagcaatatgtagaaaagcaggagaagcattggtgattgaagacatccacgtggatccaccccaagcttatgaagttaggattaagattttatgtacttctctatgtcacactgatcttactttctggaaactaagctttggaccaatttcaaggtttcctaggattcttggacacgaagcagtcggtgtggtcgagagcattggtgaaaacgtggacggatttaaacaaggtgacgtcgttttgccagtttttcatccttattgtgaagaatgcaaagactgcaaatcttcaaaaaccaactggtgtgacagatatgccgaagatttcatatcaaacacaagacgatatggaatggcttcaagattcaaagattcttcaggagaagtgattcatcattttctctttgtctcaagtttttccgaatacaccgtcgtggatattgcacatcttgtcaaaatatctcctgaaatccccgttgataaagcggctttgctcagctgcggtgtctccacaggaattggagcagcttggaaggtggctaacgtggaagaaggctccaccattgcaatttttggccttggtgctgttggacttgcggttgcagaaggagccaggctacgaggagccgcaaagattattggtattgataccaattctgataaattcgagctaggtaagaaatttggttttacggatttcatcaatccgaccttatgcggagaaaagaagattagtgaggtcattaaagaaatgacagaaggaggagttgactatagtttcgaatgcgttggcttagcttctttacttaacgaggctttcatcagtacccgcacgggaacaggtaaaactgtaatgttggggatggagaagcatgcagcgccaattagtttgggtagttttgatcttttaagaggcagagttatttgcggaagcttgttcggtggtctgaaatccaaacttgatattcccattctagtggatcattacctaaaaaaggagctcaatctggatagtttcattacacacgaactgaatttcaaagaaattaataaggctttcgctttattagaggaaggaaagtctctccgctgcattctatggatggataagtaactatccagcttcatatttgcactttataatcttctcgtggatcttgtttagattatcttcctttgtctttcaagatgctttgtcttgttaccttgcaatttttgttctttccacacgagctacaaacttatcatttggtagtccaaaccccttaacattgtgttttctgatggttacaaatattatgacaccttgtatttgttgatcaatgatcattatagtactaattgcttctac

SEQ ID NO: 25700 - protein, 413 aa, Arabidopsis thaliana
  peptide (1)..(413): Ceres Seq. ID no. 12333208
KDKIRRTRAPSLSLVHSPIVYLIITMDKTFFSSNEGKPITCKAAICRKAGEALVIEDIHVDPPQAYEVRIKILCTSLCHTDLTFWKLSFGPISRFPRILGHEAVGVVESIGENVDGFKQGDVVLPVFHPYCEECKDCKSSKTNWCDRYAEDFISNTRRYGMASRFKDSSGEVIHHFLFVSSFSEYTVVDIAHLVKISPEIPVDKAALLSCGVSTGIGAAWKVANVEEGSTIAIFGLGAVGLAVAEGARLRGAAKIIGIDTNSDKFELGKKFGFTDFINPTLCGEKKISEVIKEMTEGGVDYSFECVGLASLLNEAFISTRTGTGKTVMLGMEKHAAPISLGSFDLLRGRVICGSLFGGLKSKLDIPILVDHYLKKELNLDSFITHELNFKEINKAFALLEEGKSLRCILWMDK

SEQ ID NO: 25701 - protein, 388 aa, Arabidopsis thaliana
  peptide (1)..(388): Ceres Seq. ID no. 12333209
MDKTFFSSNEGKPITCKAAICRKAGEALVIEDIHVDPPQAYEVRIKILCTSLCHTDLTFWKLSFGPISRFPRILGHEAVGVVESIGENVDGFKQGDVVLPVFHPYCEECKDCKSSKTNWCDRYAEDFISNTRRYGMASRFKDSSGEVIHHFLFVSSFSEYTVVDIAHLVKISPEIPVDKAALLSCGVSTGIGAAWKVANVEEGSTIAIFGLGAVGLAVAEGARLRGAAKIIGIDTNSDKFELGKKFGFTDFINPTLCGEKKISEVIKEMTEGGVDYSFECVGLASLLNEAFISTRTGTGKTVMLGMEKHAAPISLGSFDLLRGRVICGSLFGGLKSKLDIPILVDHYLKKELNLDSFITHELNFKEINKAFALLEEGKSLRCILWMDK

SEQ ID NO: 25702 - protein, 253 aa, Arabidopsis thaliana
  peptide (1)..(253): Ceres Seq. ID no. 12333210
MASRFKDSSGEVIHHFLFVSSFSEYTVVDIAHLVKISPEIPVDKAALLSCGVSTGIGAAWKVANVEEGSTIAIFGLGAVGLAVAEGARLRGAAKIIGIDTNSDKFELGKKFGFTDFINPTLCGEKKISEVIKEMTEGGVDYSFECVGLASLLNEAFISTRTGTGKTVMLGMEKHAAPISLGSFDLLRGRVICGSLFGGLKSKLDIPILVDHYLKKELNLDSFITHELNFKEINKAFALLEEGKSLRCILWMDK

SEQ ID NO: 25703 - DNA, 1409 bp, Arabidopsis thaliana
  misc_feature (1)..(1409): Ceres Seq. ID no. 13490151
  misc_feature (1)..(1409): Ortholog of  Ceres SEQ ID NO 12364737 as cited in SEQ ID NO 51089
  misc_feature (1)..(1409): Ortholog of  Ceres SEQ ID NO 12581561 as cited in SEQ ID NO 53617
  misc_feature (1)..(1409): Ortholog of  Ceres SEQ ID NO 14316263 as cited in SEQ ID NO 55294
  misc_feature (1)..(1409): Ortholog of  Ceres SEQ ID NO 15176751 as cited in SEQ ID NO 59719
  misc_feature (1)..(1409): Ortholog of  Ceres SEQ ID NO 13597380 as cited in SEQ ID NO 64054
  misc_feature (1)..(1409): Ortholog of  Ceres SEQ ID NO 12625474 as cited in SEQ ID NO 64169
  misc_feature (1)..(1409): Ortholog of  Ceres SEQ ID NO 13597502 as cited in SEQ ID NO 64681
aacatttcatagtattacaaaacaacgccaaaagtcaaaaggtttcgctttctagatcatgtccacatttctcctaacatggattattatgaccgtcgcgttaagcgtaacgctttttcttatgccgcaacaaacaaatgcggctagagcgttcttcgtgtttggcgactcactcgtggacagtggtaataacaattacttagtcaccactgctcgtgccgattctccaccgtatggaatcgattatccgactggtcgaccaaccggtcgtttctccaacggcttgaacctccctgacatcatcagtgaacaaattggatctgagcctacattaccaattcttagccctgaactcactggagagaagctattgatcggagctaactttgcctctgccggcattggaattctcaacgatactggcgttcaatttttgaacatactaaggatcggtaggcaattcgagctgttccaagagtatcaagagagagtgagtgagattataggttcagacaaaacgcaacagcttgtaaatggggctctcgtcctcatgactctcggcggcaatgatttcgtcaacaactacttcttccccatctctactagaagacgccaatcatctctcggtgaatttagccagcttctcatctccgaatacaagaaaatcctgacgagtctttatgagttgggagcaaggagggtgatggtgacgggaacaggacctttgggttgcgtaccagcggagcttgcctcatcgggaagtgtgaatggagaatgtgcacccgaggcgcaacaggctgcagcaatcttcaatcctcttttagttcaaatgcttcaaggacttaaccgtgagattggttctgatgttttcatcggggctaatgcctttaacacgaatgcggatttcatcaacaatccccaaagatttggttttgtgacgtcaaaagtagcatgttgtggacaaggagcatacaacgggcaaggcgtttgcaccccattgtcgactttatgctctgaccgcaatgcctatgctttctgggaccctttccacccgaccgagaaagccacccgactcatcgtccaacaaatcatgactggttcggttgagtacatgaaccccatgaaccttagtactattatggctttagactccagaatataattaaggatgcaatcttttacagaatctatttccagtttttctcgtatgataaaatatcgcgagtctgccaaacaatggtaaggaactaaggattctatttttccaaattatggttttcttagtttctctctaatgctaatggggagtctctgtctcggctctgtcttttctgttatgtttcaattttgtggttagttgccacttctttcttacgaaggctttataaaactttgtcaattttacaccc

SEQ ID NO: 25704 - protein, 367 aa, Arabidopsis thaliana
  peptide (1)..(367): Ceres Seq. ID no. 13490152
MSTFLLTWIIMTVALSVTLFLMPQQTNAARAFFVFGDSLVDSGNNNYLVTTARADSPPYGIDYPTGRPTGRFSNGLNLPDIISEQIGSEPTLPILSPELTGEKLLIGANFASAGIGILNDTGVQFLNILRIGRQFELFQEYQERVSEIIGSDKTQQLVNGALVLMTLGGNDFVNNYFFPISTRRRQSSLGEFSQLLISEYKKILTSLYELGARRVMVTGTGPLGCVPAELASSGSVNGECAPEAQQAAAIFNPLLVQMLQGLNREIGSDVFIGANAFNTNADFINNPQRFGFVTSKVACCGQGAYNGQGVCTPLSTLCSDRNAYAFWDPFHPTEKATRLIVQQIMTGSVEYMNPMNLSTIMALDSRI

SEQ ID NO: 25705 - protein, 357 aa, Arabidopsis thaliana
  peptide (1)..(357): Ceres Seq. ID no. 13490153
MTVALSVTLFLMPQQTNAARAFFVFGDSLVDSGNNNYLVTTARADSPPYGIDYPTGRPTGRFSNGLNLPDIISEQIGSEPTLPILSPELTGEKLLIGANFASAGIGILNDTGVQFLNILRIGRQFELFQEYQERVSEIIGSDKTQQLVNGALVLMTLGGNDFVNNYFFPISTRRRQSSLGEFSQLLISEYKKILTSLYELGARRVMVTGTGPLGCVPAELASSGSVNGECAPEAQQAAAIFNPLLVQMLQGLNREIGSDVFIGANAFNTNADFINNPQRFGFVTSKVACCGQGAYNGQGVCTPLSTLCSDRNAYAFWDPFHPTEKATRLIVQQIMTGSVEYMNPMNLSTIMALDSRI

SEQ ID NO: 25706 - protein, 346 aa, Arabidopsis thaliana
  peptide (1)..(346): Ceres Seq. ID no. 13490154
MPQQTNAARAFFVFGDSLVDSGNNNYLVTTARADSPPYGIDYPTGRPTGRFSNGLNLPDIISEQIGSEPTLPILSPELTGEKLLIGANFASAGIGILNDTGVQFLNILRIGRQFELFQEYQERVSEIIGSDKTQQLVNGALVLMTLGGNDFVNNYFFPISTRRRQSSLGEFSQLLISEYKKILTSLYELGARRVMVTGTGPLGCVPAELASSGSVNGECAPEAQQAAAIFNPLLVQMLQGLNREIGSDVFIGANAFNTNADFINNPQRFGFVTSKVACCGQGAYNGQGVCTPLSTLCSDRNAYAFWDPFHPTEKATRLIVQQIMTGSVEYMNPMNLSTIMALDSRI

SEQ ID NO: 25707 - DNA, 1513 bp, Arabidopsis thaliana
  misc_feature (1)..(1513): Ceres Seq. ID no. 12331556
  misc_feature (1)..(1513): Ortholog of  Ceres SEQ ID NO 14314559 as cited in SEQ ID NO 52317
  misc_feature (1)..(1513): Ortholog of  Ceres SEQ ID NO 15174571 as cited in SEQ ID NO 53570
  misc_feature (1)..(1513): Ortholog of  Ceres SEQ ID NO 14314367 as cited in SEQ ID NO 57446
ttcgtactactactaccaccacatttctttagctcaaccttcattactaatctccttttaaggtttctttcgtgaatcagatcggaaaaatggaatcttttttgttcacatctgaatccgtcaacgagggacatcccgacaagctttgtgatcagatctccgacgctatcctcgatgcttgccttgaacaagaccctgagagcaaagttgcttgtgagacttgtaccaagactaacatggtcatggtttttggagaaatcaccaccaaggctaacgttgattacgagcagattgttcgtaaaacatgccgtgagattggattcgtctctgctgacgttggtctagatgctgacaattgcaaggttctggttaacattgagcaacagagtcctgacattgcacaaggtgttcatggtcatctcaccaagaagccagaggaggttggagctggtgaccaaggtcacatgtttgggtatgctactgatgagactcctgagctcatgcctcttactcacgttctcgctactaagcttggagctaaactcactgaagttcgcaagaatggaacttgcccttggttgaggccagatggtaagactcaagtcactattgagtacatcaacgaaagcggagccatggttcctgtacgtgtccacactgttctcatctcaacacagcatgacgagactgtgactaacgatgagatcgcagctgatcttaaggagcatgtgatcaagccagtgatcccagagaaataccttgatgagaaaaccatcttccatctcaacccatctggtcgttttgttatcggaggtcctcatggagatgcagggcttaccggccgtaagatcatcatcgatacttatggtggttggggtgcacacggaggtggtgctttctctggaaaggacccaaccaaggttgacaggagtggggcttacatcgttaggcaagcagctaagagcattgtagccagtgggctagcgaggcgggtcattgtgcaagtctcgtatgccattggtgtccctgagccattgtctgtgttcgtggacagttatggaacaggaaagataccagacaaggagattcttgagattgtgaaggagagttttgatttcaggccaggtatgatctccattaacttggatctgaagagaggaggtaatggtaggttcttgaagactgctgcctatggtcactttggaagggacgatgctgatttcacctgggaggtagtcaagccactcaagtctaacaaggtccaagcttgaaacctgtcagcctctgtttcacttctgtccagaatcagtcttgttctctgtattttaggctctttctgcctctttagtttcaactctgagatgggtttattcattttgttttcaactttgaagaaaaaagctaagcagctgggaatttatataattatttatatggtattcttgtgctaagaaagttaaattcataatatgtatttcttacttattttgagaagaaaatcatataagagaat

SEQ ID NO: 25708 - protein, 393 aa, Arabidopsis thaliana
  peptide (1)..(393): Ceres Seq. ID no. 12331557
MESFLFTSESVNEGHPDKLCDQISDAILDACLEQDPESKVACETCTKTNMVMVFGEITTKANVDYEQIVRKTCREIGFVSADVGLDADNCKVLVNIEQQSPDIAQGVHGHLTKKPEEVGAGDQGHMFGYATDETPELMPLTHVLATKLGAKLTEVRKNGTCPWLRPDGKTQVTIEYINESGAMVPVRVHTVLISTQHDETVTNDEIAADLKEHVIKPVIPEKYLDEKTIFHLNPSGRFVIGGPHGDAGLTGRKIIIDTYGGWGAHGGGAFSGKDPTKVDRSGAYIVRQAAKSIVASGLARRVIVQVSYAIGVPEPLSVFVDSYGTGKIPDKEILEIVKESFDFRPGMISINLDLKRGGNGRFLKTAAYGHFGRDDADFTWEVVKPLKSNKVQA

SEQ ID NO: 25709 - protein, 344 aa, Arabidopsis thaliana
  peptide (1)..(344): Ceres Seq. ID no. 12331558
MVMVFGEITTKANVDYEQIVRKTCREIGFVSADVGLDADNCKVLVNIEQQSPDIAQGVHGHLTKKPEEVGAGDQGHMFGYATDETPELMPLTHVLATKLGAKLTEVRKNGTCPWLRPDGKTQVTIEYINESGAMVPVRVHTVLISTQHDETVTNDEIAADLKEHVIKPVIPEKYLDEKTIFHLNPSGRFVIGGPHGDAGLTGRKIIIDTYGGWGAHGGGAFSGKDPTKVDRSGAYIVRQAAKSIVASGLARRVIVQVSYAIGVPEPLSVFVDSYGTGKIPDKEILEIVKESFDFRPGMISINLDLKRGGNGRFLKTAAYGHFGRDDADFTWEVVKPLKSNKVQA

SEQ ID NO: 25710 - protein, 342 aa, Arabidopsis thaliana
  peptide (1)..(342): Ceres Seq. ID no. 12331559
MVFGEITTKANVDYEQIVRKTCREIGFVSADVGLDADNCKVLVNIEQQSPDIAQGVHGHLTKKPEEVGAGDQGHMFGYATDETPELMPLTHVLATKLGAKLTEVRKNGTCPWLRPDGKTQVTIEYINESGAMVPVRVHTVLISTQHDETVTNDEIAADLKEHVIKPVIPEKYLDEKTIFHLNPSGRFVIGGPHGDAGLTGRKIIIDTYGGWGAHGGGAFSGKDPTKVDRSGAYIVRQAAKSIVASGLARRVIVQVSYAIGVPEPLSVFVDSYGTGKIPDKEILEIVKESFDFRPGMISINLDLKRGGNGRFLKTAAYGHFGRDDADFTWEVVKPLKSNKVQA

SEQ ID NO: 25711 - DNA, 789 bp, Arabidopsis thaliana
  misc_feature (1)..(789): Ceres Seq. ID no. 12339501
  misc_feature (1)..(789): Ortholog of  Ceres SEQ ID NO 12624653 as cited in SEQ ID NO 61262
  misc_feature (1)..(789): Ortholog of  Ceres SEQ ID NO 12579223 as cited in SEQ ID NO 0
  misc_feature (1)..(789): Ortholog of  Ceres SEQ ID NO 12635708 as cited in SEQ ID NO 0
aaataaacctaaaccaatagaaccgcagttttttctcctcgccgaaacgaagaagattctccttctctccgtcagacaaatctacgaacaagcgagcctgagcttaagaccaaactcctagagatgggtttcttctcttttcttggaagagttctcttcgcttctctctttatcctctccgcttggcaaatgttcaatgatggtggtcctgcagctaaagaattggctccaaagcttgatttggttaaggcacatttatcttctagattaggagtaacattgcccaaaatagaggtgagacaagtcgttgctactattattgccctgaaaggagtcggaggcttactctttgttatcggaaacatcttcggtgcttatcttctggctttctacttggttgttgtcagtcctattctctatgatttctacaactacggacctcaggaacgtcatttctctcttctgttgacagagttcttgcagagcgttgcactctttggagcattactcttctttatcggaatgaagaactcgacacccgccaagaagaatttgaagaagaggacacctaagccgaaagctgcctagtatcaatattagttttcttctggttttgccatgagcaagcaataccttgcattttccttttttcccgacaaaatctttccttagaacttttgttttctttctgttttaggattcttagattagctcatgatcttatactgtgatttgatattggggatcttgaagttttggtttgttgaaactggaaccatgcagctacag

SEQ ID NO: 25712 - protein, 154 aa, Arabidopsis thaliana
  peptide (1)..(154): Ceres Seq. ID no. 12339502
MGFFSFLGRVLFASLFILSAWQMFNDGGPAAKELAPKLDLVKAHLSSRLGVTLPKIEVRQVVATIIALKGVGGLLFVIGNIFGAYLLAFYLVVVSPILYDFYNYGPQERHFSLLLTEFLQSVALFGALLFFIGMKNSTPAKKNLKKRTPKPKAA

SEQ ID NO: 25713 - protein, 132 aa, Arabidopsis thaliana
  peptide (1)..(132): Ceres Seq. ID no. 12339504
MFNDGGPAAKELAPKLDLVKAHLSSRLGVTLPKIEVRQVVATIIALKGVGGLLFVIGNIFGAYLLAFYLVVVSPILYDFYNYGPQERHFSLLLTEFLQSVALFGALLFFIGMKNSTPAKKNLKKRTPKPKAA

SEQ ID NO: 25714 - DNA, 783 bp, Arabidopsis thaliana
  misc_feature (1)..(783): Ceres Seq. ID no. 12562397
  misc_feature (1)..(783): Ortholog of  Ceres SEQ ID NO 13594411 as cited in SEQ ID NO 58223
  misc_feature (1)..(783): Ortholog of  Ceres SEQ ID NO 13661991 as cited in SEQ ID NO 61245
aaaatttcacggaaaatagaagcgtcgagttcctcctctccctcaggttgtcaatggccgctaggttacttgcttggagacgcgctttgtctcttttcagcaaccaacaacatcgttttcctttgtctcaagtctcaacagagcagttgtcgctatcaaactcactcttcagcagaagtcatgtttatggaagattatttcagagacagttatctgtaatccgtgaggcaaatgaagcttctgtaaccaatgtctgcaactcgtcaaactctgctactgaatcggccaaagttccctcccctgcgacgccctctgaggaaatgatggtgaagtacaagtcccagttaaaaataaacccgaggcatgacttcatgatggtcttcacttgcaaggtctgtgatacaagatctatgaagatggcgagccgagaatcatatgaaaacggcgttgtggtggtacgatgtggagggtgtgataatctacatttgattgcagaccgtcgtgttggtttggagaaccaggaagcgtggaggacttccttgcttctcaaggggaagaattcaagaaaggatccatggattctcttaacctaactcctgaaaatttagctggaggaaagatttctactgaataaggagtgatcttctttgcttttgctacttaaccattatggaacagaacttcaccttatgttccagtattataattgtttcttgtagttcactgtttggtaacatttaaatgcagaagatgtttaatacaattatgtgtttggaatgttcc

SEQ ID NO: 25715 - protein, 196 aa, Arabidopsis thaliana
  peptide (1)..(196): Ceres Seq. ID no. 12562398
NFTENRSVEFLLSLRLSMAARLLAWRRALSLFSNQQHRFPLSQVSTEQLSLSNSLFSRSHVYGRLFQRQLSVIREANEASVTNVCNSSNSATESAKVPSPATPSEEMMVKYKSQLKINPRHDFMMVFTCKVCDTRSMKMASRESYENGVVVVRCGGCDNLHLIADRRVGLENQEAWRTSLLLKGKNSRKDPWILLT

SEQ ID NO: 25716 - protein, 179 aa, Arabidopsis thaliana
  peptide (1)..(179): Ceres Seq. ID no. 12562399
MAARLLAWRRALSLFSNQQHRFPLSQVSTEQLSLSNSLFSRSHVYGRLFQRQLSVIREANEASVTNVCNSSNSATESAKVPSPATPSEEMMVKYKSQLKINPRHDFMMVFTCKVCDTRSMKMASRESYENGVVVVRCGGCDNLHLIADRRVGLENQEAWRTSLLLKGKNSRKDPWILLT

SEQ ID NO: 25717 - DNA, 1102 bp, Arabidopsis thaliana
  misc_feature (1)..(1102): Ceres Seq. ID no. 12331065
  misc_feature (1)..(1102): Ortholog of  Ceres SEQ ID NO 14316043 as cited in SEQ ID NO 68538
  misc_feature (1)..(1102): Ortholog of  Ceres SEQ ID NO 14309361 as cited in SEQ ID NO 0
cacttgaggaaacacagtaaaaacctaaaaagagaatgaaactcgcaggtctgaaatcgatcgagaacgctcacgaagattccgtttgggcagcgacgtgggttccggcgacggaagatcgaccggcgttgcttctgactggatctcttgacgagacggtgaagttatggcgaccggacgagctggatcttgtgcggactaatactggacactctttgggagtagcagctttggctgcgcatccttctgggattattgcagcatcttcttcgattgatagctttgtccgtgtgtttgatgttgatactaatgctacgattgctgttttggaagctcctccttctgaggtttgggtaatgcaatttgaacctaagggtacgatccttgctgttgcaggtggaagtagtgcctcagtcaagctttgggacactgcaagctggagattaatctcaactctatcaatcccacgcccagatgcaccaaaaccttccgataaaaccagcagcaagaaattcgttctctcggtggcttggtctcctaatgggaaacgacttgcttgtggttcaatggatggtacgatctgtgtttttgatgttgaccgctcaaagctacttcaccagctagaaggtcacaatatgcctgtaaggtcccttgtgttctcccctgtagacccgagagtcctcttctctggatcagatgatgggcatgtgaacatgcacgatgcagaagggaaaacgctgttggggtccatgtcagggcacacgagttgggtgctgagcgttgatgctagcccagacggtggagccatagcaaccggctgaagcgatagaactgtgaggctatgggatcttaaaatgagagctgcgattcagacaatgagcaaccacaatgaccaggtttggtctttggcctttagaccaccaggtggaaccggtgtccgggctggtcgacttgctagtgtctctgatgacaagagtgtatcgctctatgattactcatgaacaattcggttttttgacttttttcttttatgcattctccaagacgcatctagttgtaacaatataatctgcaacaggttgattttgaccggagtctttag

SEQ ID NO: 25718 - protein, 261 aa, Arabidopsis thaliana
  peptide (1)..(261): Ceres Seq. ID no. 12331066
MKLAGLKSIENAHEDSVWAATWVPATEDRPALLLTGSLDETVKLWRPDELDLVRTNTGHSLGVAALAAHPSGIIAASSSIDSFVRVFDVDTNATIAVLEAPPSEVWVMQFEPKGTILAVAGGSSASVKLWDTASWRLISTLSIPRPDAPKPSDKTSSKKFVLSVAWSPNGKRLACGSMDGTICVFDVDRSKLLHQLEGHNMPVRSLVFSPVDPRVLFSGSDDGHVNMHDAEGKTLLGSMSGHTSWVLSVDASPDGGAIATG

SEQ ID NO: 25719 - protein, 154 aa, Arabidopsis thaliana
  peptide (1)..(154): Ceres Seq. ID no. 12331067
MQFEPKGTILAVAGGSSASVKLWDTASWRLISTLSIPRPDAPKPSDKTSSKKFVLSVAWSPNGKRLACGSMDGTICVFDVDRSKLLHQLEGHNMPVRSLVFSPVDPRVLFSGSDDGHVNMHDAEGKTLLGSMSGHTSWVLSVDASPDGGAIATG

SEQ ID NO: 25720 - DNA, 1132 bp, Arabidopsis thaliana
  misc_feature (1)..(1132): Ceres Seq. ID no. 12580373
  misc_feature (1)..(1132): Ortholog of  Ceres SEQ ID NO 14307312 as cited in SEQ ID NO 54745
  misc_feature (1)..(1132): Ortholog of  Ceres SEQ ID NO 14314194 as cited in SEQ ID NO 57366
  misc_feature (1)..(1132): Ortholog of  Ceres SEQ ID NO 13655305 as cited in SEQ ID NO 63328
atcacttcccgctaacaattgcaatctcctcccagaaatttcaacagctctaaaaaccctaaccgtttcgattcacactctaacctttcgataatttcccagaagatgttggagcttcgtttagttcaaggttctctactgaagaaggttctagaagcggtcaaagatctggtgaacgatgcgaacttcgactgttcgaccacagggttctcgcttcaagctatggattcgagccatgtcgcgttggtgtctcttttgcttagatctgaaggtttcgagcactatagatgcgatagaaacctctctatgggaatgaatcttggtaatatgtctaagatgctgaaatgtgctggaaatgatgatatcatcaccatcaaagctgatgatggtagcgacactgttactttcatgtttgagagtcccacacaagacaagattgcagattttgagatgaagctgatggatatcgacaggagcatttaggaattcctgatgctgagtaccactcgattgtgagaatgccttctggtgaattttccaggatatgcaaagatctcagtagcattggtgacacagttgtgatctcggtaacaaaagaaggggtgaagttttcaacagcaggtgatatcgggacagcaaacattgtgctcaggcagaatactaccgtcgacaaacctgaagatgctattgtgatagagatgaacgagcctgtttcgctttcatttgcattgaggtacatgaactccttcacaaaggctactccattgtcggaaactgtgaccatcagtttgtcctctgagttaccggtcgtggtggagtacaaggtggctgagatgggttacattcgatactatctggcgcctaagattgaagaagaagaagacaccaaaccagaataatgatgaatgtttgatagtcttcgttcgagtcctttgttgaaatgtctgtcttgattcagttgttttctggatttactatcttaaggcaatgctaaactagataatcgtatgatgtttgtctttctgaaatttggaaaagcttgtttataacacttttcatctgtttgttaaacattgaagaaaaagaagacacgaagccctaaaacacgtttgtttgtggcttctgcaacccc

SEQ ID NO: 25721 - protein, 126 aa, Arabidopsis thaliana
  peptide (1)..(126): Ceres Seq. ID no. 12580374
MPSGEFSRICKDLSSIGDTVVISVTKEGVKFSTAGDIGTANIVLRQNTTVDKPEDAIVIEMNEPVSLSFALRYMNSFTKATPLSETVTISLSSELPVVVEYKVAEMGYIRYYLAPKIEEEEDTKPE

SEQ ID NO: 25722 - protein, 125 aa, Arabidopsis thaliana
  peptide (1)..(125): Ceres Seq. ID no. 12580375
MLELRLVQGSLLKKVLEAVKDLVNDANFDCSTTGFSLQAMDSSHVALVSLLLRSEGFEHYRCDRNLSMGMNLGNMSKMLKCAGNDDIITIKADDGSDTVTFMFESPTQDKIADFEMKLMDIDRSI

SEQ ID NO: 25723 - protein, 86 aa, Arabidopsis thaliana
  peptide (1)..(86): Ceres Seq. ID no. 12580376
MDSSHVALVSLLLRSEGFEHYRCDRNLSMGMNLGNMSKMLKCAGNDDIITIKADDGSDTVTFMFESPTQDKIADFEMKLMDIDRSI

SEQ ID NO: 25724 - DNA, 1742 bp, Arabidopsis thaliana
  misc_feature (1)..(1742): Ceres Seq. ID no. 12580060
  misc_feature (1)..(1742): Ortholog of  Ceres SEQ ID NO 15226175 as cited in SEQ ID NO 0
aattttcatccaattcaactcaggaaattgctatgattttactctgagaatcagaagaagaaatctcggtgagcaaaatccctagttttgggatgatgtttccacgactacgattgacgaaggtcttcttctccccgatcatcgccgggaaatggatcgtctttgccgacggtagcagcggcggcggcgttggtagaaatggctactacggtggattgtggtcgtcggccgttattccttccaatgttggtttagctgtcgctgtcaccgtcatggccgtggccgtcgctttcaccgtctactctcgtagaggaagcattggatcaccgtggtcactaaggagaagaaagcgagttcttcaacctaaacaatggaatgcttttttcacagaggaagggcgactcagtgatggaggtgtcaaatttctgaagaaagttcgtagtgggggtgtacatccaagcatcagaccagaagtttggccgttccttcttggagtgtatgacttaaagagcaacaaagaagaaagagactccattcgacagctgaaactgacggaatatgaaaacctgcggagacagtgtcgcgagattcatgaacgctatgaaaatgtctgcgactcaaaggagacagctcagagcagcaacactgaagacagtcaggttcttgaatcccatgatattgaggaagtcgagagttccacaagaaccatcaccgtagatgaatcagagaagttgaattctgaatcgattatgcaggatgagaactgtgaaaagagcgatgtcaccacagaagatgctgctggtaatgattcagactcaaccaatcctgaagaaaccgagacttcaccttttctagctaacgaagaagtagaaagccacaatactgttaaccaagaaaaagaaatttcgtctccatcatcaaagccaaaatctcaggcagcggacgaggatttcatgtcaacttggcagagaattatccgcctagatgctgtgagagcaaatgacgaatgggtgccctactcaccaactcaagctgctgtttctgagacaaaagcccggggaatagccattcaggttggtctcaatgactatgaccacttggaaccctgccggatatttcacgcagcccgcctggtcgggatccttgaagcctacgcagtctatgatccagaaattggttactgtcaaggaatgagcgacttactatctcctttaatcgcagtgatggaagacgacgtcttagcattctggtgctttgttggcttcatgagtaaagcacggcataatttccggttagacgaggttggaatcaggcggcaactctcaatggtatcgaaaatcataaaattcaaagacattcacttgtaccgacacttggagaaccttgaagcagaagactgcttctttgtataccgtatggttgtagttctgttcagacgagaactaacctttgagcagacgttgtgtctctgggaagtaatgtgggcggatcaagctgcaatacgaactgggattgcgaaggcgacatgggggagaatccggttacgagcaccaccgacagaagatttgttgctttacgcgatagctgcaagcgtgctgcagaggaggaagacgataatagagaaatacagtgggatggatgagataatgaaggaatgtaacagcatggctggtcatcttgatgtttggaaacttctagacgatgctcatgacttagtcgtcaatcttcacgacaagatctaa

SEQ ID NO: 25725 - protein, 549 aa, Arabidopsis thaliana
  peptide (1)..(549): Ceres Seq. ID no. 12580061
MMFPRLRLTKVFFSPIIAGKWIVFADGSSGGGVGRNGYYGGLWSSAVIPSNVGLAVAVTVMAVAVAFTVYSRRGSIGSPWSLRRRKRVLQPKQWNAFFTEEGRLSDGGVKFLKKVRSGGVHPSIRPEVWPFLLGVYDLKSNKEERDSIRQLKLTEYENLRRQCREIHERYENVCDSKETAQSSNTEDSQVLESHDIEEVESSTRTITVDESEKLNSESIMQDENCEKSDVTTEDAAGNDSDSTNPEETETSPFLANEEVESHNTVNQEKEISSPSSKPKSQAADEDFMSTWQRIIRLDAVRANDEWVPYSPTQAAVSETKARGIAIQVGLNDYDHLEPCRIFHAARLVGILEAYAVYDPEIGYCQGMSDLLSPLIAVMEDDVLAFWCFVGFMSKARHNFRLDEVGIRRQLSMVSKIIKFKDIHLYRHLENLEAEDCFFVYRMVVVLFRRELTFEQTLCLWEVMWADQAAIRTGIAKATWGRIRLRAPPTEDLLLYAIAASVLQRRKTIIEKYSGMDEIMKECNSMAGHLDVWKLLDDAHDLVVNLHDKI

SEQ ID NO: 25726 - protein, 548 aa, Arabidopsis thaliana
  peptide (1)..(548): Ceres Seq. ID no. 12580062
MFPRLRLTKVFFSPIIAGKWIVFADGSSGGGVGRNGYYGGLWSSAVIPSNVGLAVAVTVMAVAVAFTVYSRRGSIGSPWSLRRRKRVLQPKQWNAFFTEEGRLSDGGVKFLKKVRSGGVHPSIRPEVWPFLLGVYDLKSNKEERDSIRQLKLTEYENLRRQCREIHERYENVCDSKETAQSSNTEDSQVLESHDIEEVESSTRTITVDESEKLNSESIMQDENCEKSDVTTEDAAGNDSDSTNPEETETSPFLANEEVESHNTVNQEKEISSPSSKPKSQAADEDFMSTWQRIIRLDAVRANDEWVPYSPTQAAVSETKARGIAIQVGLNDYDHLEPCRIFHAARLVGILEAYAVYDPEIGYCQGMSDLLSPLIAVMEDDVLAFWCFVGFMSKARHNFRLDEVGIRRQLSMVSKIIKFKDIHLYRHLENLEAEDCFFVYRMVVVLFRRELTFEQTLCLWEVMWADQAAIRTGIAKATWGRIRLRAPPTEDLLLYAIAASVLQRRKTIIEKYSGMDEIMKECNSMAGHLDVWKLLDDAHDLVVNLHDKI

SEQ ID NO: 25727 - protein, 489 aa, Arabidopsis thaliana
  peptide (1)..(489): Ceres Seq. ID no. 12580063
MAVAVAFTVYSRRGSIGSPWSLRRRKRVLQPKQWNAFFTEEGRLSDGGVKFLKKVRSGGVHPSIRPEVWPFLLGVYDLKSNKEERDSIRQLKLTEYENLRRQCREIHERYENVCDSKETAQSSNTEDSQVLESHDIEEVESSTRTITVDESEKLNSESIMQDENCEKSDVTTEDAAGNDSDSTNPEETETSPFLANEEVESHNTVNQEKEISSPSSKPKSQAADEDFMSTWQRIIRLDAVRANDEWVPYSPTQAAVSETKARGIAIQVGLNDYDHLEPCRIFHAARLVGILEAYAVYDPEIGYCQGMSDLLSPLIAVMEDDVLAFWCFVGFMSKARHNFRLDEVGIRRQLSMVSKIIKFKDIHLYRHLENLEAEDCFFVYRMVVVLFRRELTFEQTLCLWEVMWADQAAIRTGIAKATWGRIRLRAPPTEDLLLYAIAASVLQRRKTIIEKYSGMDEIMKECNSMAGHLDVWKLLDDAHDLVVNLHDKI

SEQ ID NO: 25728 - DNA, 1677 bp, Arabidopsis thaliana
  misc_feature (1)..(1677): Ceres Seq. ID no. 13486930
  misc_feature (1)..(1677): Ortholog of  Ceres SEQ ID NO 13596216 as cited in SEQ ID NO 68515
agtccaaacaaaaatctgaaacggaagctcagagagacaaggatgagatttttctcttcctttgataaatcccaatacctaattcccaaattcccttacttttaggcgccgaaagatagagagaaacatagatacgcattggttttttcttttttgaagattctcgcttcttactacatgtgtatcaatcgatctctacccagattctccggaggagctttgagtcttgtcgtatagatgcagtgaaggtcctttgttagatgggaaaacttgttcttgagttgtcaaaaggtattttctatgtttttggagtagaactgtttacaaggaagcagccaatatggagtttgattttggagaaatgtttttagtgttgttgtgaagaaatatcagttttgattgtttttggatttgatgggtaaagagaatcagttggagactaccgattgtggagtcagtgatcacggttctccacctatcaagaatgaagaacatgaggcaccacgttacagttcagacaaagacacgggtttaccaacttgccgtgtatgccagtgtgcagaatctgatagaagaggagatgctgctttagggtttttgggaattactcctccggtttcagaacctcgtagaagcaatgcgggtgaagaaaccgttgatcagagaagctcggttgtcaaatctagcggattcatcgaactgataagtcctgatggagaagtttttgtttgtgcaaacgacgatatagaaatgggagcgtggcagcatcgagataagttgctagaacttggatgttcttgcaagaatgatctcgctttggtacactatgcttgtgcattgaaatggtttgtcaaccacggatcaactgtttgtgagatatgcggaaaaaccacggagaatataagaacagttgatttcaacaaagtggttatcgccttaaaagattacgcagcgctaagagaaagaacagcggatggagatccaaatcctgtagtggttaacaacaacaccagttcgtcagggattgatcctgatgcagttgcagccattcgaaggcaacgacttagtgagatatcgttatggtttggtcctcattgttcaaccaacaacaacaatagtagtaattccgctgctgcagggacggcttcttctcaggttacatctgaacaacctgtgggtatagtaaactttgatatcttgcctatggaaagccgtgcgactaaatgggcggtggaaggtaccggaatactacttgcaaccggattactcacagttactttggcttggctcattgctcctcgtgtcggaaagagaactgcaaagagtggtctacacatacttctaggtggtctctgtgctttaacagtagtcatcttcttcagattcgttgtgctgacaagaatcaggtacggaccagcacgttactgggcaatattgttcgtcttctggtttcttgtgtttggcatttgggcttcacgttcacacgcttctcactcctccacatgataaattctccatcatccttcaagacacaaaatgtactctttttggtctctgtcaatatcatgtacgttattctctttcaagacacaaaatgtacaattaattactcttatcaaaaagaaaaaaaggggtgaaactgaatgttatcatctcacaacaaagtctcttggtcgc

SEQ ID NO: 25729 - protein, 363 aa, Arabidopsis thaliana
  peptide (1)..(363): Ceres Seq. ID no. 13486931
MGKENQLETTDCGVSDHGSPPIKNEEHEAPRYSSDKDTGLPTCRVCQCAESDRRGDAALGFLGITPPVSEPRRSNAGEETVDQRSSVVKSSGFIELISPDGEVFVCANDDIEMGAWQHRDKLLELGCSCKNDLALVHYACALKWFVNHGSTVCEICGKTTENIRTVDFNKVVIALKDYAALRERTADGDPNPVVVNNNTSSSGIDPDAVAAIRRQRLSEISLWFGPHCSTNNNNSSNSAAAGTASSQVTSEQPVGIVNFDILPMESRATKWAVEGTGILLATGLLTVTLAWLIAPRVGKRTAKSGLHILLGGLCALTVVIFFRFVVLTRIRYGPARYWAILFVFWFLVFGIWASRSHASHSST

SEQ ID NO: 25730 - protein, 251 aa, Arabidopsis thaliana
  peptide (1)..(251): Ceres Seq. ID no. 13486932
MGAWQHRDKLLELGCSCKNDLALVHYACALKWFVNHGSTVCEICGKTTENIRTVDFNKVVIALKDYAALRERTADGDPNPVVVNNNTSSSGIDPDAVAAIRRQRLSEISLWFGPHCSTNNNNSSNSAAAGTASSQVTSEQPVGIVNFDILPMESRATKWAVEGTGILLATGLLTVTLAWLIAPRVGKRTAKSGLHILLGGLCALTVVIFFRFVVLTRIRYGPARYWAILFVFWFLVFGIWASRSHASHSST

SEQ ID NO: 25731 - DNA, 495 bp, Arabidopsis thaliana
  misc_feature (1)..(495): Ceres Seq. ID no. 12321141
  misc_feature (1)..(495): Ortholog of  Ceres SEQ ID NO 12476115 as cited in SEQ ID NO 107
acttcctcattagcattctacagtctgcacacttatcacttctttcgaaatctctctctatccctctcaaaaatgaagctctctgtgcgttttatctccgctgctcttctcttgttcatggtattcattgccacagggatgggtccagtcaccgtggaggcacgcacgtgtgagtcaaagagccataggttcaagggtccatgtgtgagcacacacaactgtgcaaacgtgtgccacaacgaaggcttcggcggaggtaaatgccgtggattccgtcgtcgttgctactgcacaagacactgctgatccatccattctcatgactcaaatcttcgatccatcgtcagtgtgttacttctttcttatctaaatcttccgtacggtaccatatcgtaccgtacatgagtgttttctcaaataagtcgttggtttgtgtgtttccggttttaatgtaatgttaaatcaattaatggcttttaatatattgtattatgg

SEQ ID NO: 25732 - protein, 101 aa, Arabidopsis thaliana
  peptide (1)..(101): Ceres Seq. ID no. 12321142
TSSLAFYSLHTYHFFRNLSLSLSKMKLSVRFISAALLLFMVFIATGMGPVTVEARTCESKSHRFKGPCVSTHNCANVCHNEGFGGGKCRGFRRRCYCTRHC

SEQ ID NO: 25733 - protein, 77 aa, Arabidopsis thaliana
  peptide (1)..(77): Ceres Seq. ID no. 12321143
MKLSVRFISAALLLFMVFIATGMGPVTVEARTCESKSHRFKGPCVSTHNCANVCHNEGFGGGKCRGFRRRCYCTRHC

SEQ ID NO: 25734 - protein, 62 aa, Arabidopsis thaliana
  peptide (1)..(62): Ceres Seq. ID no. 12321144
MVFIATGMGPVTVEARTCESKSHRFKGPCVSTHNCANVCHNEGFGGGKCRGFRRRCYCTRHC

SEQ ID NO: 25735 - DNA, 1032 bp, Arabidopsis thaliana
  misc_feature (1)..(1032): Ceres Seq. ID no. 13493740
  misc_feature (1)..(1032): Ortholog of  Ceres SEQ ID NO 12623011 as cited in SEQ ID NO 67651
aagaataaaccgcgtcgcgtctcttttctggaaaaaacgagaaactgtgatcttggcccttttattacccctatcctcttcttcttcaatctctccgatcaaaatccttttaagctctgtagacccaggttacgcagagaagaagaacagaacaaggaattatataatcattggcttgatcaatctgaattgcagttcatggcgctaaaccctcaattactacccaatgggatgcctgttccctttgttaatgaaatgttcgtcctagtccgagatggtgttgagtttgaagtcgacaagatccctggagggcatggaggtcatgttaaggccaagggggtgatttacttgtctaatatacggatggtctttgtttcaagcaagcctgttgacaactttgttgcttttgacatgcccctgctttacatccatgccgagaaatttaatcagccaatatttcactgcaacaatattgctggacaagtggagcctgtggtgccagaaaatgagcatagagctctatattcaacacacagtttcaagatcctatttaaggaaggtggttgtgggacatttgttcctctcttcttgaatctcatatcatcagtgagacaatacaacagacaaatgcaacaagcagcagaagcagcagcggcagctcctcatgttgatcctcttcaagccgctcagacacctgtggacgaaatgatgagacatgcgtacgtggaccctaatgatccaacgaggatatatctgcaacagccatcaggggaatctcagttgaggcgtagagcttaccattcgggtgcggcggaacattgagatacacggaaaaaaaaaatacaaaggctatgaatacagaaacagcaacagattagtgttgctaataagcaaaacgtgttgtttgtttgtttaaagttgaaaactaaaagtctaaaaccatctgtgtaaagaaagatgagacttgtttggtgtgtggatgtatctggtaaaattggagtcgtaataatcataagtttggtttatatattg

SEQ ID NO: 25736 - protein, 273 aa, Arabidopsis thaliana
  peptide (1)..(273): Ceres Seq. ID no. 13493741
KNKPRRVSFLEKTRNCDLGPFITPILFFFNLSDQNPFKLCRPRLRREEEQNKELYNHWLDQSELQFMALNPQLLPNGMPVPFVNEMFVLVRDGVEFEVDKIPGGHGGHVKAKGVIYLSNIRMVFVSSKPVDNFVAFDMPLLYIHAEKFNQPIFHCNNIAGQVEPVVPENEHRALYSTHSFKILFKEGGCGTFVPLFLNLISSVRQYNRQMQQAAEAAAAAPHVDPLQAAQTPVDEMMRHAYVDPNDPTRIYLQQPSGESQLRRRAYHSGAAEH

SEQ ID NO: 25737 - protein, 207 aa, Arabidopsis thaliana
  peptide (1)..(207): Ceres Seq. ID no. 13493742
MALNPQLLPNGMPVPFVNEMFVLVRDGVEFEVDKIPGGHGGHVKAKGVIYLSNIRMVFVSSKPVDNFVAFDMPLLYIHAEKFNQPIFHCNNIAGQVEPVVPENEHRALYSTHSFKILFKEGGCGTFVPLFLNLISSVRQYNRQMQQAAEAAAAAPHVDPLQAAQTPVDEMMRHAYVDPNDPTRIYLQQPSGESQLRRRAYHSGAAEH

SEQ ID NO: 25738 - protein, 196 aa, Arabidopsis thaliana
  peptide (1)..(196): Ceres Seq. ID no. 13493743
MPVPFVNEMFVLVRDGVEFEVDKIPGGHGGHVKAKGVIYLSNIRMVFVSSKPVDNFVAFDMPLLYIHAEKFNQPIFHCNNIAGQVEPVVPENEHRALYSTHSFKILFKEGGCGTFVPLFLNLISSVRQYNRQMQQAAEAAAAAPHVDPLQAAQTPVDEMMRHAYVDPNDPTRIYLQQPSGESQLRRRAYHSGAAEH

SEQ ID NO: 25739 - DNA, 1320 bp, Arabidopsis thaliana
  misc_feature (1)..(1320): Ceres Seq. ID no. 12345026
  misc_feature (1)..(1320): Ortholog of  Ceres SEQ ID NO 13597740 as cited in SEQ ID NO 64482
  misc_feature (1)..(1320): Ortholog of  Ceres SEQ ID NO 13596056 as cited in SEQ ID NO 68307
  misc_feature (1)..(1320): Ortholog of  Ceres SEQ ID NO 12388689 as cited in SEQ ID NO 0
aacaacaacaacaacaatgtcttcttctctccgatctaccaccgccgcttctcttctcctccgctcctcctcctcctcctccagatccactctcactctctccgcttcctcctctctctccttcgtcagatctctcgtctcttctccacgtctctcttcttcttcacccctctctcagaagaaatgtcgaattgcgtcggtgaatcggagtttcaactccaccaccgccgctactaaatcttcatcttcagatcctgatcagttgaagaacgctagagaagatatcaaagagcttctcagcaccaaattctgccatccgattttggttagattaggttggcatgatgctggtacgtataacaagaacattaaggaatggccacaaagaggtggagctaatggaagtttgagattcgatattgagcttaaacatgctgctaatgctggtcttgtgaatgctttaaacttgattaaggatatcaaagagaaatactctgggatcagttatgctgatttgttccagttagctagtgctactgctatagaggaagctggaggaccgaaaataccgatgaaatatggtagagttgatgcctctggtcctgaggattgtccagaagaaggaaggcttccagatgctggtcctccttcacctgctactcatctcagagaagttttttacagaatgggattagatgacaaggacatagttgcattatctggtgctcacacgttaggaagatctaggccagaacgtagtggttgggggaagcctgagacgaagtacacgaaagaaggacctggagcaccaggaggacagtcatggacaccagagtggctaaagtttgataattcgtacttcaaggagatcaaggaaaagagagatgaagatctccttgtcctacccactgatgctgccatcttcgaagattcttctttcaaggtctatgctgaaaagtatgctgcagatcaggatgcatttttcaaggattacgctgtagcgcatgcgaaactcagcaatcttggcgcagaatttaaccctccggagggtatcattatctaatggggcacctaatttactcaaccagacttatgattttagagaaacgtagttcaataatgaaagagaagaaaaagttgacggagaacttttcatgcgagtacttttcgagataccttttggacaaatgtttctggctgttcaaaggattttgtttagccgaaagtatttgatcgttttcatggttttgtgctttcatgtttttttcttgtaataaattgcggaagtgattatccaaaatctatacaaattttgtctgg

SEQ ID NO: 25740 - protein, 353 aa, Arabidopsis thaliana
  peptide (1)..(353): Ceres Seq. ID no. 12345027
TTTTTMSSSLRSTTAASLLLRSSSSSSRSTLTLSASSSLSFVRSLVSSPRLSSSSPLSQKKCRIASVNRSFNSTTAATKSSSSDPDQLKNAREDIKELLSTKFCHPILVRLGWHDAGTYNKNIKEWPQRGGANGSLRFDIELKHAANAGLVNALNLIKDIKEKYSGISYADLFQLASATAIEEAGGPKIPMKYGRVDASGPEDCPEEGRLPDAGPPSPATHLREVFYRMGLDDKDIVALSGAHTLGRSRPERSGWGKPETKYTKEGPGAPGGQSWTPEWLKFDNSYFKEIKEKRDEDLLVLPTDAAIFEDSSFKVYAEKYAADQDAFFKDYAVAHAKLSNLGAEFNPPEGIII

SEQ ID NO: 25741 - protein, 348 aa, Arabidopsis thaliana
  peptide (1)..(348): Ceres Seq. ID no. 12345028
MSSSLRSTTAASLLLRSSSSSSRSTLTLSASSSLSFVRSLVSSPRLSSSSPLSQKKCRIASVNRSFNSTTAATKSSSSDPDQLKNAREDIKELLSTKFCHPILVRLGWHDAGTYNKNIKEWPQRGGANGSLRFDIELKHAANAGLVNALNLIKDIKEKYSGISYADLFQLASATAIEEAGGPKIPMKYGRVDASGPEDCPEEGRLPDAGPPSPATHLREVFYRMGLDDKDIVALSGAHTLGRSRPERSGWGKPETKYTKEGPGAPGGQSWTPEWLKFDNSYFKEIKEKRDEDLLVLPTDAAIFEDSSFKVYAEKYAADQDAFFKDYAVAHAKLSNLGAEFNPPEGIII

SEQ ID NO: 25742 - DNA, 1146 bp, Arabidopsis thaliana
  misc_feature (1)..(1146): Ceres Seq. ID no. 12371428
  misc_feature (1)..(1146): Ortholog of  Ceres SEQ ID NO 14308168 as cited in SEQ ID NO 59069
aaacacttcgctatttttcttcagtcgtcttcttcttccggcttctctcgaaacccttacctaaaaccctaatccgccacatccgtgttttagcctcacgacgaatcacgatgcaacgcagactcgtaaggttaaaaaaagagtatatctacaggaaaagcttggaaggtgatgagcgtaaggtctatgagcagaagcggctgataagagaagcccttcaagaaggaaagccgattcctactgagctccgaaacgtcgaagccaagcttcgacaagaaattgatcttgaagaccaaaacacagctgttccgcggagtcatatcgatgatgaatatgcaaatgctacggaagcagatccaaagattttgttgacaacttctaggaatccaagtgctccgctcatccgattcactaaggaattgaagtttgtgtttcctaactctcagagaataaatcgtggtagtcaggtcatttctgagatcattgaaactgctcgttcccatgattttactgatgttatattggttcatgagcaccgtggtgtgcctgatggtctcattatctctcatctcccatttggaccaactgcatactttggattacttaatgtggtaacaagacatgatatttcagacaagaaatccattggaaaaatgcctgagcaatatcctcatctcatttttaacaactttactactcagatgggtcaaagagttggaaacatcttaaaacatatcttccctgctccaaaactggatgcaaaacgtatagttactttttctaatcaatccgattatatatcattcaggaatcatgtctatgataaaggagagggaggtccaaaatcaatcgagcttaaagaaatcggtcctcgatttgagttgcggctctaccaggtgaaattaggaactgtggaacaaaatgaagcagagatcgaatgggttataagaccgtacatgaacacctctaaaaagcgcaagttcatcggtgaatgatgactaaacggaacagctttgaaccctttatctaaattctgttttacttatcattctgttggaagagctgttcagtttttgtgtccttagagaaaattgcgatgattttgttttaacgtttagcttataaaaacaaaactttcttgtctcc

SEQ ID NO: 25743 - protein, 330 aa, Arabidopsis thaliana
  peptide (1)..(330): Ceres Seq. ID no. 12371429
TLRYFSSVVFFFRLLSKPLPKTLIRHIRVLASRRITMQRRLVRLKKEYIYRKSLEGDERKVYEQKRLIREALQEGKPIPTELRNVEAKLRQEIDLEDQNTAVPRSHIDDEYANATEADPKILLTTSRNPSAPLIRFTKELKFVFPNSQRINRGSQVISEIIETARSHDFTDVILVHEHRGVPDGLIISHLPFGPTAYFGLLNVVTRHDISDKKSIGKMPEQYPHLIFNNFTTQMGQRVGNILKHIFPAPKLDAKRIVTFSNQSDYISFRNHVYDKGEGGPKSIELKEIGPRFELRLYQVKLGTVEQNEAEIEWVIRPYMNTSKKRKFIGE

SEQ ID NO: 25744 - protein, 294 aa, Arabidopsis thaliana
  peptide (1)..(294): Ceres Seq. ID no. 12371430
MQRRLVRLKKEYIYRKSLEGDERKVYEQKRLIREALQEGKPIPTELRNVEAKLRQEIDLEDQNTAVPRSHIDDEYANATEADPKILLTTSRNPSAPLIRFTKELKFVFPNSQRINRGSQVISEIIETARSHDFTDVILVHEHRGVPDGLIISHLPFGPTAYFGLLNVVTRHDISDKKSIGKMPEQYPHLIFNNFTTQMGQRVGNILKHIFPAPKLDAKRIVTFSNQSDYISFRNHVYDKGEGGPKSIELKEIGPRFELRLYQVKLGTVEQNEAEIEWVIRPYMNTSKKRKFIGE

SEQ ID NO: 25745 - DNA, 776 bp, Arabidopsis thaliana
  misc_feature (1)..(776): Ceres Seq. ID no. 13489299
  misc_feature (1)..(776): Ortholog of  Ceres SEQ ID NO 14311545 as cited in SEQ ID NO 51451
aaagctaagccaaactcagtggctctccggtgaagctttgagatggcgatccttattccggcgagtttcgggcgattaacaattacgtcgcgtgcacaagttagagtgagagtttctgcttctgctaaccaacgcactattcgtcgcgattcagtggattgggttaaggaaacttcaagctttttcgaagaagataaaaggccgatcatgttgttcgacggtgtttgtaatctctgtaatggaggtgtgaaatttgttagagaccatgatcgaaacaggagcataaggtttgaagcattacagagtgaagcgggcaagaaactgttattgcggtcaggaagagctcctgacgatatatcgagtgtcgtactagtcgaaaacgataggtcttacataaagtcagaagcagttttgaagatcatgaaatacattgacttaccatttccacagcttgcgttcttcttgcagtttgctcctctgtttgtgagagactttttgtatgaaaatgttgcaaacaatcgatatgcaatgtttggtcgatctgattcatgtgagctctaagaatacatatgtgatcctactttgccacaaaaaaaaaatctagatatgtaatcctacagattaatataagcttttatacagatgtatagtttacaacagccattaaacaatagatacatatgtactacttttcgaatcatgtactcgtcaaatgtataacctttccgatgttgatatttgtgttatatatatggaaaaaaacttgggattgtgtg

SEQ ID NO: 25746 - protein, 172 aa, Arabidopsis thaliana
  peptide (1)..(172): Ceres Seq. ID no. 13489300
MAILIPASFGRLTITSRAQVRVRVSASANQRTIRRDSVDWVKETSSFFEEDKRPIMLFDGVCNLCNGGVKFVRDHDRNRSIRFEALQSEAGKKLLLRSGRAPDDISSVVLVENDRSYIKSEAVLKIMKYIDLPFPQLAFFLQFAPLFVRDFLYENVANNRYAMFGRSDSCEL

SEQ ID NO: 25747 - protein, 117 aa, Arabidopsis thaliana
  peptide (1)..(117): Ceres Seq. ID no. 13489301
MLFDGVCNLCNGGVKFVRDHDRNRSIRFEALQSEAGKKLLLRSGRAPDDISSVVLVENDRSYIKSEAVLKIMKYIDLPFPQLAFFLQFAPLFVRDFLYENVANNRYAMFGRSDSCEL

SEQ ID NO: 25748 - DNA, 1165 bp, Arabidopsis thaliana
  misc_feature (1)..(1165): Ceres Seq. ID no. 12324048
  misc_feature (1)..(1165): Ortholog of  Ceres SEQ ID NO 14307776 as cited in SEQ ID NO 59397
caataattctcagcttgccgcagtgctacagaactcagctaagctttttgtgagtgaagatggaaagaaagtgagacgcttaaatccgattactgagtctgctatagaagagcttcagtctcgcattattgttgctgagaatctacctgaggatcattgctaccaaaacctgatgaagattttttcaactgttggaagtgtgaagaacatccgtacctgccagccacaaaataatggaagcggtgctccacccgcagcaagatcagcagccaaaagcaatggtacgcttttcagtaacaaggtccatgcttttgttgagtatgagatggttgagctagccgagaaagcagttaccgagttaagtgaagggggaaattggaggagcggtcttaaagtccggttgatgctaaagcatcagacgaaggaaccaaaacaaggtcaagggcgaggaagaaaaggacatgatgcagatgtagaacatgaggaagatgatgctacaacatccgagcagcagccgattgagaaacaatctgatgactgttctggggaatgggatacacatatgcaagagcagccaataggagaggatcaagggaatgagaaagcggctgggcagagaaaagggcgtaacagaggtagaggaaagggacgaggacgaggtcaaccacaccagaaccaaaaccagaacaacaaccacagccataaccaaaaccacaaccacaatgggcgaggaaatcatcatcatcatcatcatcatcaagtgggaacacaaccttcgaacaatccaatgaacaacatggagcaaccaggcatggggaaacagcaaccacctggaccacgaatgcctgatgggaccagaggattctcaatgggacgggggaagccggttatggttcaggcagagtgatccagagctgttttgaaaaggaggtgatgtggaattgtgaatggttcaaaaagggagataaatagagagagagaaagagagagatttatccttcccatggggattggctagttttgcagactttatatttgtcttacttacttcgaaatacttttcaattacaaggaaacaacaaaaaaaaaaactacattttcctcatatagtgtacgtgtaatgaaacagcaatttcagttaatattttgtactaaaagcttatct

SEQ ID NO: 25749 - protein, 301 aa, Arabidopsis thaliana
  peptide (1)..(301): Ceres Seq. ID no. 12324049
NNSQLAAVLQNSAKLFVSEDGKKVRRLNPITESAIEELQSRIIVAENLPEDHCYQNLMKIFSTVGSVKNIRTCQPQNNGSGAPPAARSAAKSNGTLFSNKVHAFVEYEMVELAEKAVTELSEGGNWRSGLKVRLMLKHQTKEPKQGQGRGRKGHDADVEHEEDDATTSEQQPIEKQSDDCSGEWDTHMQEQPIGEDQGNEKAAGQRKGRNRGRGKGRGRGQPHQNQNQNNNHSHNQNHNHNGRGNHHHHHHHQVGTQPSNNPMNNMEQPGMGKQQPPGPRMPDGTRGFSMGRGKPVMVQAE

SEQ ID NO: 25750 - protein, 244 aa, Arabidopsis thaliana
  peptide (1)..(244): Ceres Seq. ID no. 12324050
MKIFSTVGSVKNIRTCQPQNNGSGAPPAARSAAKSNGTLFSNKVHAFVEYEMVELAEKAVTELSEGGNWRSGLKVRLMLKHQTKEPKQGQGRGRKGHDADVEHEEDDATTSEQQPIEKQSDDCSGEWDTHMQEQPIGEDQGNEKAAGQRKGRNRGRGKGRGRGQPHQNQNQNNNHSHNQNHNHNGRGNHHHHHHHQVGTQPSNNPMNNMEQPGMGKQQPPGPRMPDGTRGFSMGRGKPVMVQAE

SEQ ID NO: 25751 - protein, 193 aa, Arabidopsis thaliana
  peptide (1)..(193): Ceres Seq. ID no. 12324051
MVELAEKAVTELSEGGNWRSGLKVRLMLKHQTKEPKQGQGRGRKGHDADVEHEEDDATTSEQQPIEKQSDDCSGEWDTHMQEQPIGEDQGNEKAAGQRKGRNRGRGKGRGRGQPHQNQNQNNNHSHNQNHNHNGRGNHHHHHHHQVGTQPSNNPMNNMEQPGMGKQQPPGPRMPDGTRGFSMGRGKPVMVQAE

SEQ ID NO: 25752 - DNA, 1011 bp, Arabidopsis thaliana
  misc_feature (1)..(1011): Ceres Seq. ID no. 12397194
  misc_feature (1)..(1011): Ortholog of  Ceres SEQ ID NO 13596338 as cited in SEQ ID NO 68005
  misc_feature (1)..(1011): Ortholog of  Ceres SEQ ID NO 15179357 as cited in SEQ ID NO 0
gaagggtattagtctttttacgattagtctctatgcataatcttgttgaagagtcatctcccaaaactaatgagcatgtataggctcttgttgaagggtcatttcccaaagctggcaaatcataattacataatcttgttgaatggtcatctcaggatcacagtttgtcaaatagaaacaatgtcatctgggttaagaaagttgaaagtggacatgattgacttggcttagatgattgtgtctctatggttgtactttgtgaagccttctttatcattatttgtactatgtaaccttttgtttgtgtatttctttttcatatcttcttgacccgtttttatctcgttcattcagaaactgaagacgcgtgtgattaataataactgtaatccagtgtggaacgaacaactgaccctttccatcaaagatgtgaatgatcctatccgtctgacggtgtttgataaagatagattctcgggagatgacaaaatgggtgatgcagaaatagactttaggccgttcctagaagcgcatcaaatggagttagatttccagaagctccccaatggttgtgcaatcaagaggatccgtccaggcaggaccaactgtttagctgaagagagcagcatcacttggagcaatgggaagatcatgcaagagatgattcttagactaaagaatgtggagtgtggggaagtagagctcatgcttgagtggactgatggtccaggctgcaagggtctgggacgcgaaggatccaagaagacaccatggatgccgacaaaacgattggactaagatgcagaaatgttaaaacagagaccgtgaagatgtgatggtattttttcgttatgttcatggaaagacgagtttgtctttgtctcatcagagtttaaattgacaaaaaaggctctgctttggtctttagttgtacatgtcgaataactcaacccttatatatattgtatctgtttctactaattgaagaaataaagcaaaccctgaatttct

SEQ ID NO: 25753 - protein, 102 aa, Arabidopsis thaliana
  peptide (1)..(102): Ceres Seq. ID no. 12397195
MGDAEIDFRPFLEAHQMELDFQKLPNGCAIKRIRPGRTNCLAEESSITWSNGKIMQEMILRLKNVECGEVELMLEWTDGPGCKGLGREGSKKTPWMPTKRLD

SEQ ID NO: 25754 - protein, 86 aa, Arabidopsis thaliana
  peptide (1)..(86): Ceres Seq. ID no. 12397196
MELDFQKLPNGCAIKRIRPGRTNCLAEESSITWSNGKIMQEMILRLKNVECGEVELMLEWTDGPGCKGLGREGSKKTPWMPTKRLD

SEQ ID NO: 25755 - protein, 53 aa, Arabidopsis thaliana
  peptide (1)..(53): Ceres Seq. ID no. 12397197
MSMYRLLLKGHFPKLANHNYIILLNGHLRITVCQIETMSSGLRKLKVDMIDLA

SEQ ID NO: 25756 - DNA, 929 bp, Arabidopsis thaliana
  misc_feature (1)..(929): Ceres Seq. ID no. 12370095
  misc_feature (1)..(929): Ortholog of  Ceres SEQ ID NO 12633896 as cited in SEQ ID NO 0
agcactcaacttaaactcttttagtaacaatggtttcttcttctttaaccaagcttgtgttctttggttgtctcctcctgctcacattcacggacaaccttgtggctggaaaatctggcaaagtgaagctcaatctttactacgaatcactttgtcccggttgtcaggaattcatcgtcgatgacctaggtaaaatctttgactacgatctctacacaatcactgatctcaagctgtttccatttggtaatgccgaactctccgataatctgactgtcacttgccagcatggtgaagaggaatgcaaactaaacgcccttgaagcttgcgcattaagaacttggcccgatcagaaatcacaatactcgttcatacggtgcgtcgaaagcgatacgaaaggctgggaatcatgtgttaaaaactctggacgtgagaaagcaatcaatgattgttacaatggtgatctttctagaaagctgatacttgggtacgcaaccaaaaccaagaatttgaagccgccacatgaatacgtaccatgggtcacactcaacggcaagccactcgatgacagcgtacaaagtacggatgatctcgtagctcaaatctgcaatgcatacaaaggaaagactactctcccaaaagtttgcaattcatccgcctcaatgtctaagtcgcctgagaggaaatggaagcttcaagtctcttatgccaataaagctaccaattattaagttaactatcaaacttcgtattgaactaagatggatttaagctttatgttataagtggaatgatgaataaaggcctgttctaaacttttatggttacgaattgatgtattaaaaaagaacatgaaaaacgcctgaactgaactacaagtattttatatgacgtcttatcgacgaaagtgttatgtaactcggtttatc

SEQ ID NO: 25757 - protein, 233 aa, Arabidopsis thaliana
  peptide (1)..(233): Ceres Seq. ID no. 12370096
MVSSSLTKLVFFGCLLLLTFTDNLVAGKSGKVKLNLYYESLCPGCQEFIVDDLGKIFDYDLYTITDLKLFPFGNAELSDNLTVTCQHGEEECKLNALEACALRTWPDQKSQYSFIRCVESDTKGWESCVKNSGREKAINDCYNGDLSRKLILGYATKTKNLKPPHEYVPWVTLNGKPLDDSVQSTDDLVAQICNAYKGKTTLPKVCNSSASMSKSPERKWKLQVSYANKATNY

SEQ ID NO: 25758 - DNA, 1199 bp, Arabidopsis thaliana
  misc_feature (1)..(1199): Ceres Seq. ID no. 12324227
  misc_feature (1)..(1199): Ortholog of  Ceres SEQ ID NO 12615485 as cited in SEQ ID NO 62822
gagaaactgtgaggccaaaaagtttggttcttgagaaatgatggcggctcgtactcattgtatcaaccttatccccaaagtatgtcttccacaatccttcagaactggagaatcagtgactaatctcagatttgattgcgtctctaagtcatcgaagctttctctcaagacatcatgtggaagatcaagaacgcatcaccggaggcaaaatctcagcatccggtccgtgtttactggaatcgtggaggaaatgggtgaagtcaaggacttgggaatggccgatcacggaggattcgacctcaaaatcggagcgagagtggtgttagaggacgtgaagctcggtgacagtatcgccgtgaacggtacttgtttaacggtgacggagtttaacgcagaggagttcacagtagggttagcaccggagacgctgagaaaaacatcgttggaggagttaaagaaaggatctccggtgaatctggagcgtgcgttgcagccagtgagcaggatgggtggacacgtggttcagggacacgtggatgggacgggagtgattgaatcaatggaggtagagggtgattctttgtgggtgaaggtgaaagctgacaagggtttgttgaaatacattgtgcctaaaggatttgtggctgttgatgggactagcttgacggttgttgatgtgtttgatgaagagagctgtttcaatttcatgatgattgcttatacgcaacagaatgtagtgattccgactaagaagattgggcagaaagtgaatcttgaggttgatatcatggggaagtatgttgagaggcttctcaccagtggtggcttctccaaaggaaaagaaaatatttgatttgatgggacttgggagtgggagctttgttgagcggagcttgaccttttggcctggggttatatgtatcttaacctctgtttcttcgtaatggtgctagtgaacagtccacgcatttaggcgcggtgagaaaagtaaatcaaccttattgagtaatgatgatcaaatcattcgtgtaataaacccagaataaattttgtaatatggcagtgccccttttaaaacttagattctgttatgcttttgttagaccttcatatgtatatctttaagtgtttcgagaagtttataagaaagggagttgtatacataagaccaagaggcatatataaatgtgtttttaccc

SEQ ID NO: 25759 - protein, 271 aa, Arabidopsis thaliana
  peptide (1)..(271): Ceres Seq. ID no. 12324228
MMAARTHCINLIPKVCLPQSFRTGESVTNLRFDCVSKSSKLSLKTSCGRSRTHHRRQNLSIRSVFTGIVEEMGEVKDLGMADHGGFDLKIGARVVLEDVKLGDSIAVNGTCLTVTEFNAEEFTVGLAPETLRKTSLEELKKGSPVNLERALQPVSRMGGHVVQGHVDGTGVIESMEVEGDSLWVKVKADKGLLKYIVPKGFVAVDGTSLTVVDVFDEESCFNFMMIAYTQQNVVIPTKKIGQKVNLEVDIMGKYVERLLTSGGFSKGKENI

SEQ ID NO: 25760 - protein, 270 aa, Arabidopsis thaliana
  peptide (1)..(270): Ceres Seq. ID no. 12324229
MAARTHCINLIPKVCLPQSFRTGESVTNLRFDCVSKSSKLSLKTSCGRSRTHHRRQNLSIRSVFTGIVEEMGEVKDLGMADHGGFDLKIGARVVLEDVKLGDSIAVNGTCLTVTEFNAEEFTVGLAPETLRKTSLEELKKGSPVNLERALQPVSRMGGHVVQGHVDGTGVIESMEVEGDSLWVKVKADKGLLKYIVPKGFVAVDGTSLTVVDVFDEESCFNFMMIAYTQQNVVIPTKKIGQKVNLEVDIMGKYVERLLTSGGFSKGKENI

SEQ ID NO: 25761 - protein, 200 aa, Arabidopsis thaliana
  peptide (1)..(200): Ceres Seq. ID no. 12324230
MGEVKDLGMADHGGFDLKIGARVVLEDVKLGDSIAVNGTCLTVTEFNAEEFTVGLAPETLRKTSLEELKKGSPVNLERALQPVSRMGGHVVQGHVDGTGVIESMEVEGDSLWVKVKADKGLLKYIVPKGFVAVDGTSLTVVDVFDEESCFNFMMIAYTQQNVVIPTKKIGQKVNLEVDIMGKYVERLLTSGGFSKGKENI

SEQ ID NO: 25762 - DNA, 1090 bp, Arabidopsis thaliana
  misc_feature (1)..(1090): Ceres Seq. ID no. 12384969
  misc_feature (1)..(1090): Ortholog of  Ceres SEQ ID NO 13598507 as cited in SEQ ID NO 63402
attttattttgtcttaaagcttttggcgagtttgcttgtgtgtgagtgtgtggttatggactctccgttcaaacctgatgtcgtcagaggtcaagtggctctcatcaccggtggtggatccggtatcggttttgagatctcttctcagtttggcaaacatggagcttctatcgctatcatgggacgacgaaaacaagtcctcgatgacgccgtctctgctcttcgatctcttggaatccaggctattggattggaaggtgatgttcgtaagcaagaagatgcgagaagagttgtggaagcaacttttcagcattttggtaaacttgatattcttgttaacgccgctgctggcaattttctggctgctgctgaggatttgtctcctaatggcttcagaacagtcttagacattgatgcggtaggaacattcaacatgtgtcacgcagctctcaagtatcttaagaaaggagcgcctggaagagactcatcaagcggtggaggttcgattattaacattagcgcgactttgcactacacggcttcttggtaccaaatacatgtctctgcagccaaggctgcagttgatgctaccacaagaaacttggcattggagtggggaactgactatgatattagagtgaacgggattgctccaggtcctattggaggtacacctggaatgagtaaacttgtacctgaggagattgaaaacaaaaccagagagtacatgcctctttataaagttggagagaagtgggatatcgctatggctgcactctacctcagctgtgattctgggaaatatgtgagcggactaacaatggtggtagatggaggactgtggcttagcaaacctcgccacttgcctaaagaagcggtgaagcaactctctcgtgcggtggagaagaggtctagggccaagcctgttggtctcccaaccagcaagctgtagatcatttgaatttcagatatcaaataagtgcacattgaaaaaatgttttggtttattgaattacattggagactgagaaaatggtattaagattatgtagatcaaactatcttatgcacaataaagtagctttctttc

SEQ ID NO: 25763 - protein, 316 aa, Arabidopsis thaliana
  peptide (1)..(316): Ceres Seq. ID no. 12384970
FYFVLKLLASLLVCECVVMDSPFKPDVVRGQVALITGGGSGIGFEISSQFGKHGASIAIMGRRKQVLDDAVSALRSLGIQAIGLEGDVRKQEDARRVVEATFQHFGKLDILVNAAAGNFLAAAEDLSPNGFRTVLDIDAVGTFNMCHAALKYLKKGAPGRDSSSGGGSIINISATLHYTASWYQIHVSAAKAAVDATTRNLALEWGTDYDIRVNGIAPGPIGGTPGMSKLVPEEIENKTREYMPLYKVGEKWDIAMAALYLSCDSGKYVSGLTMVVDGGLWLSKPRHLPKEAVKQLSRAVEKRSRAKPVGLPTSKL

SEQ ID NO: 25764 - protein, 298 aa, Arabidopsis thaliana
  peptide (1)..(298): Ceres Seq. ID no. 12384971
MDSPFKPDVVRGQVALITGGGSGIGFEISSQFGKHGASIAIMGRRKQVLDDAVSALRSLGIQAIGLEGDVRKQEDARRVVEATFQHFGKLDILVNAAAGNFLAAAEDLSPNGFRTVLDIDAVGTFNMCHAALKYLKKGAPGRDSSSGGGSIINISATLHYTASWYQIHVSAAKAAVDATTRNLALEWGTDYDIRVNGIAPGPIGGTPGMSKLVPEEIENKTREYMPLYKVGEKWDIAMAALYLSCDSGKYVSGLTMVVDGGLWLSKPRHLPKEAVKQLSRAVEKRSRAKPVGLPTSKL

SEQ ID NO: 25765 - protein, 257 aa, Arabidopsis thaliana
  peptide (1)..(257): Ceres Seq. ID no. 12384972
MGRRKQVLDDAVSALRSLGIQAIGLEGDVRKQEDARRVVEATFQHFGKLDILVNAAAGNFLAAAEDLSPNGFRTVLDIDAVGTFNMCHAALKYLKKGAPGRDSSSGGGSIINISATLHYTASWYQIHVSAAKAAVDATTRNLALEWGTDYDIRVNGIAPGPIGGTPGMSKLVPEEIENKTREYMPLYKVGEKWDIAMAALYLSCDSGKYVSGLTMVVDGGLWLSKPRHLPKEAVKQLSRAVEKRSRAKPVGLPTSKL

SEQ ID NO: 25766 - DNA, 767 bp, Arabidopsis thaliana
  misc_feature (1)..(767): Ceres Seq. ID no. 12323688
  misc_feature (1)..(767): Ortholog of  Ceres SEQ ID NO 13495070 as cited in SEQ ID NO 53216
  misc_feature (1)..(767): Ortholog of  Ceres SEQ ID NO 12598241 as cited in SEQ ID NO 61025
  misc_feature (1)..(767): Ortholog of  Ceres SEQ ID NO 13661333 as cited in SEQ ID NO 61620
  misc_feature (1)..(767): Ortholog of  Ceres SEQ ID NO 15173749 as cited in SEQ ID NO 61775
  misc_feature (1)..(767): Ortholog of  Ceres SEQ ID NO 13596812 as cited in SEQ ID NO 62283
  misc_feature (1)..(767): Ortholog of  Ceres SEQ ID NO 13623021 as cited in SEQ ID NO 0
  misc_feature (1)..(767): Ortholog of  Ceres SEQ ID NO 14302179 as cited in SEQ ID NO 0
aaatatggcaacaacgtgacagcatctaagtcttcttggttttaagacgtgaccagcctaacgacccaaccaaactacttgtctattcttcctcccaccctctaaaacccccctaccttctctactttcagatcatcaagccccaatttcaagcagagaacaatggctaattcagcgtctgggatgcacgttagcgatgagtgcaagctcaagttcttggagttaaaagcaaagaggaactataggttcattgtgttcaaaattgatgagaaggctcagcaagttatgatagacaagcttgggaatccagaagaaacttacgaagatttcaccagatctattcccgaggatgagtgccgatatgctgtctatgactatgatttcaccacccctgagaactgccagaagagcaaaatctttttcatcgcatggtcacctgatacatcaagagtgaggagtaagatgttgtatgcaagctcaaaggacaggttcaagagggaattggatgggattcaagttgaattgcaagcaacagatcctagcgagatgagcctcgacatcatcaagggacgagtcaatctctgaatggaacttaccgcatcttaattcgtttcagtcaaaattcatattttctgctttcgttttcttgggtatttttcatttaacttctttactatttgtatcttctgtgattcaagatctcacctctttcttttttccttttcggtacgcaataatcatcccaatagataattactttgcttccc

SEQ ID NO: 25767 - protein, 140 aa, Arabidopsis thaliana
  peptide (1)..(140): Ceres Seq. ID no. 12323689
MANSASGMHVSDECKLKFLELKAKRNYRFIVFKIDEKAQQVMIDKLGNPEETYEDFTRSIPEDECRYAVYDYDFTTPENCQKSKIFFIAWSPDTSRVRSKMLYASSKDRFKRELDGIQVELQATDPSEMSLDIIKGRVNL

SEQ ID NO: 25768 - protein, 133 aa, Arabidopsis thaliana
  peptide (1)..(133): Ceres Seq. ID no. 12323690
MHVSDECKLKFLELKAKRNYRFIVFKIDEKAQQVMIDKLGNPEETYEDFTRSIPEDECRYAVYDYDFTTPENCQKSKIFFIAWSPDTSRVRSKMLYASSKDRFKRELDGIQVELQATDPSEMSLDIIKGRVNL

SEQ ID NO: 25769 - protein, 99 aa, Arabidopsis thaliana
  peptide (1)..(99): Ceres Seq. ID no. 12323691
MIDKLGNPEETYEDFTRSIPEDECRYAVYDYDFTTPENCQKSKIFFIAWSPDTSRVRSKMLYASSKDRFKRELDGIQVELQATDPSEMSLDIIKGRVNL

SEQ ID NO: 25770 - DNA, 848 bp, Arabidopsis thaliana
  misc_feature (1)..(848): Ceres Seq. ID no. 13487287
  misc_feature (1)..(848): Ortholog of  Ceres SEQ ID NO 15173873 as cited in SEQ ID NO 62620
  misc_feature (1)..(848): Ortholog of  Ceres SEQ ID NO 13655610 as cited in SEQ ID NO 64148
  misc_feature (1)..(848): Ortholog of  Ceres SEQ ID NO 14302675 as cited in SEQ ID NO 0
gatagattttacaccaccgaagccgaaaaaatgccggcggcgaagaggactcccaaggttaaccgtaaccctgacctaatcaggggagttggaaaatattcgaggtctcagatgtaccacaagagaggtttgtgggctatcaaggccaagaacggtggcgttttccctcgtcacgatgctcagccaaaggtcgacgctccggttgagaagcctgccaagttttatccggcggaagacgtcaagaagccgcttgttaacagacgcaagcctaagcctaccaagctaaaagccagcatcactccaggaactgtgttgatcattcttgctggtagattcaagggtaagagagttgtcttcctcaagcaactttcttctggtttgcttcttgtaacaggaccattcaagattaatggtgttccattgagacgtgttaaccaagcctatgtgattggaacctccacaaagattgacatttctggagtcaacactgagaaattcgatgacaagtattttggaaaggttgctgagaagaagaagaagaaaacagaaggcgaattcttcgaagctgagaaagaggagaagaaggagatcccacaggagaagaaggaagaccagaaaaccgttgatgctgctctgatcaaatccattgaagctgtcccagagctcaaggtttaccttggagccaggttctcattgagtcaaggaatgaaaccacatgagcttgttttctagatttcgtattgtttctcaaattttaagaatatctgtttccctgagtattttcatctttaatcgtccttggatcttaaagactattttctctgattttatatatcaaattttcgagt

SEQ ID NO: 25771 - protein, 243 aa, Arabidopsis thaliana
  peptide (1)..(243): Ceres Seq. ID no. 13487288
DRFYTTEAEKMPAAKRTPKVNRNPDLIRGVGKYSRSQMYHKRGLWAIKAKNGGVFPRHDAQPKVDAPVEKPAKFYPAEDVKKPLVNRRKPKPTKLKASITPGTVLIILAGRFKGKRVVFLKQLSSGLLLVTGPFKINGVPLRRVNQAYVIGTSTKIDISGVNTEKFDDKYFGKVAEKKKKKTEGEFFEAEKEEKKEIPQEKKEDQKTVDAALIKSIEAVPELKVYLGARFSLSQGMKPHELVF

SEQ ID NO: 25772 - protein, 233 aa, Arabidopsis thaliana
  peptide (1)..(233): Ceres Seq. ID no. 13487289
MPAAKRTPKVNRNPDLIRGVGKYSRSQMYHKRGLWAIKAKNGGVFPRHDAQPKVDAPVEKPAKFYPAEDVKKPLVNRRKPKPTKLKASITPGTVLIILAGRFKGKRVVFLKQLSSGLLLVTGPFKINGVPLRRVNQAYVIGTSTKIDISGVNTEKFDDKYFGKVAEKKKKKTEGEFFEAEKEEKKEIPQEKKEDQKTVDAALIKSIEAVPELKVYLGARFSLSQGMKPHELVF

SEQ ID NO: 25773 - protein, 206 aa, Arabidopsis thaliana
  peptide (1)..(206): Ceres Seq. ID no. 13487290
MYHKRGLWAIKAKNGGVFPRHDAQPKVDAPVEKPAKFYPAEDVKKPLVNRRKPKPTKLKASITPGTVLIILAGRFKGKRVVFLKQLSSGLLLVTGPFKINGVPLRRVNQAYVIGTSTKIDISGVNTEKFDDKYFGKVAEKKKKKTEGEFFEAEKEEKKEIPQEKKEDQKTVDAALIKSIEAVPELKVYLGARFSLSQGMKPHELVF

SEQ ID NO: 25774 - DNA, 833 bp, Arabidopsis thaliana
  misc_feature (1)..(833): Ceres Seq. ID no. 12739051
  misc_feature (1)..(833): Ortholog of  Ceres SEQ ID NO 15174142 as cited in SEQ ID NO 64367
atatacttcagtctagagccgcgcaagaagacgattctctctcttgagttgaagaaatgaagcacaacaatgttatccccaatggtcacttcaaaaagcactggcagaattatgtcaagacatggttcaaccagcctgccaggaaaaccagaagaagaattgcgaggcaaaagaaggctgtgaagatcttccctcgtccaacttctggacctctccgccctgttgtgcatggtcaaactcttaagtacaacatgaaggtcagaaccggtaaaggattcactcttgaagagctcaaggctgcaggtatcccaaagaagttggcgcctacaattggtattgctgttgaccatcgtcgcaagaaccgatctttggagggtcttcaaacaaatgtccagaggctgaaaacctacaagaccaagttagtcattttcccgcgtcgtgcccgcaaggtcaaggctggtgactctacaccagaagagttggctaatgctacccaagttcaaggagactacttgcctattgtacgtgagaagcctaccatggaactcgtcaagctgacttcagaaatgaagtctttcaaggcttttgacaagatacgccttgagcgcactaacaagaggcatgccggagctagagccaagagagccgcagaggctgagaaagaagagaagaagtgaggtcgttcttcttaggtagaagaaacttttatcttatcaacttttggaactgaattttgtgtatcagactgtcttttctttcatcagtttttatccttaaatctttgattttgctgctaccttgcttctcttgatttatggaaaagaccgtatctc

SEQ ID NO: 25775 - protein, 206 aa, Arabidopsis thaliana [sequence omitted]

SEQ ID NO: 25776 - protein, 141 aa, Arabidopsis thaliana
  peptide (1)..(141): Ceres Seq. ID no. 12739053
MKVRTGKGFTLEELKAAGIPKKLAPTIGIAVDHRRKNRSLEGLQTNVQRLKTYKTKLVIFPRRARKVKAGDSTPEELANATQVQGDYLPIVREKPTMELVKLTSEMKSFKAFDKIRLERTNKRHAGARAKRAAEAEKEEKK

SEQ ID NO: 25777 - DNA, 993 bp, Arabidopsis thaliana
  misc_feature (1)..(993): Ceres Seq. ID no. 12323757
  misc_feature (1)..(993): Ortholog of  Ceres SEQ ID NO 12627215 as cited in SEQ ID NO 60976
  misc_feature (1)..(993): Ortholog of  Ceres SEQ ID NO 12589584 as cited in SEQ ID NO 0
  misc_feature (1)..(993): Ortholog of  Ceres SEQ ID NO 12635657 as cited in SEQ ID NO 0
  misc_feature (1)..(993): Ortholog of  Ceres SEQ ID NO 12635879 as cited in SEQ ID NO 0
  misc_feature (1)..(993): Ortholog of  Ceres SEQ ID NO 13599649 as cited in SEQ ID NO 0
  misc_feature (1)..(993): Ortholog of  Ceres SEQ ID NO 14309404 as cited in SEQ ID NO 0
aatcgtcaccttcaccttcacctaccatttttgccaacaaacgcgagcaagagttttgagctccaatggcgaccttgtcgatgactctgtcaaatccgaagtcgctctcagctcctccacgaagactttctccgatcaatacctccgctttcacatctacctctttccgattgcgcaccaaatcttccttcgattcaatctcgttctcgtcttcaactcccttctccgcctcatcgctcctccttcacacgtcttataccaaaagaaaccaccgctgtttctctgttcaatccaatgctgaggtggttactgaaccgcaatcgaaaataacacacaaggtgtatttcgatataagtgttggcaatccagtggggaagttagctgggaggattgttattggattgtatggtgatgatgttccccaaactgtggagaactttcgtgctctatgcacaggtgaaaagggatttggctacaagggttctacattccatcgtgtcatcagagatttcatgattcagggaggagactttgagaagggcaatggaactggaggtaaaagtgtatatggccgtacattcaaggatgagaatttcaagttatcccatgtcggaccaggagttctaagtatggcaaatgctggccctaatacaaatggaagtcagttctttatctgcactattaagacgtcatggttggacggaagacatgtggtgttcgggcaagtaatagaaggaatggaagtggtgaagctgatagaggaacaagagacagacagaggagaccgtcccagaaagaaagtggtgatagcagactgtggtcaacttccaatgtctgaagcttaaaagtaagatcatttaaccaaaatcttgtagacatgagatggagcttgtttttgcattttacaaccctttcttttgtgtaatggatttgtatccccttcttccaaaaatttaagaaagaaatagtattccgctgccgggtgttgaactc

SEQ ID NO: 25778 - protein, 259 aa, Arabidopsis thaliana
  peptide (1)..(259): Ceres Seq. ID no. 12323758
MATLSMTLSNPKSLSAPPRRLSPINTSAFTSTSFRLRTKSSFDSISFSSSTPFSASSLLLHTSYTKRNHRCFSVQSNAEVVTEPQSKITHKVYFDISVGNPVGKLAGRIVIGLYGDDVPQTVENFRALCTGEKGFGYKGSTFHRVIRDFMIQGGDFEKGNGTGGKSVYGRTFKDENFKLSHVGPGVLSMANAGPNTNGSQFFICTIKTSWLDGRHVVFGQVIEGMEVVKLIEEQETDRGDRPRKKVVIADCGQLPMSEA

SEQ ID NO: 25779 - protein, 254 aa, Arabidopsis thaliana
  peptide (1)..(254): Ceres Seq. ID no. 12323759
MTLSNPKSLSAPPRRLSPINTSAFTSTSFRLRTKSSFDSISFSSSTPFSASSLLLHTSYTKRNHRCFSVQSNAEVVTEPQSKITHKVYFDISVGNPVGKLAGRIVIGLYGDDVPQTVENFRALCTGEKGFGYKGSTFHRVIRDFMIQGGDFEKGNGTGGKSVYGRTFKDENFKLSHVGPGVLSMANAGPNTNGSQFFICTIKTSWLDGRHVVFGQVIEGMEVVKLIEEQETDRGDRPRKKVVIADCGQLPMSEA

SEQ ID NO: 25780 - DNA, 1401 bp, Arabidopsis thaliana
  misc_feature (1)..(1401): Ceres Seq. ID no. 12715731
  misc_feature (1)..(1401): Ortholog of  Ceres SEQ ID NO 14313666 as cited in SEQ ID NO 54618
  misc_feature (1)..(1401): Ortholog of  Ceres SEQ ID NO 13595351 as cited in SEQ ID NO 55934
aacatttcctgaaaatctaactttcacccactcaccatcttttcttctctctttccccatcaaaaaaaacaaaaacaaaacacaactctgtttctctcatcttaaaattcatgtaaaaaaaatctacaaatcaaagagagaaacagagtaaagagaaagagaagaagatggcgcggaaatactttcagagagaagttttgccggtaacggctttggtaataatggaatgtgcaaacgttggtttaaacactctgtttaaagcagcaactttgaaaggcatgagctttcatgtcttcatcgtttactcttatggtctcgctgctctgcttcttcttccttctctgttttgctctttcagatcaagaactcttccaccgatgaatttctctattctctacaaaatcgtgctcttagggattattggatgctgttcaaacataatgggatacacagggataaattatagttctccaacacttgcttctgcaatcagcaacctcactcctgctttcaccttcttgcttgcagtcgttttcaggatggagagtgtgtcttttaagagaacaagtagtgtggctaaaatgttaggaaccgttgtttctattggaggtgcatttatagtgactctttataatggtcctgttgtgattgctaaatcgccaccgtctgtttctttgcgatcgcaatcgactaaccctaattggatacttggtgcgggtttccttgcggtcgagtatttctgtgttccattgtggtacattgttcagactcaaatcatgagagagtatccggccgagtttaccgttgtttgcttttatagcataggcgttagcttttggaccgcgctagtcacattgttcactgaagggaatgacttgggtgcatggaagataaaaccgaatatagctttagtgtcgatcgtttgctcgggattgtttggatcttgcataaacaatactatccacacgtgggcattgcggatcaaggggcctttatttgttgcaatgttcaagccattgtctattgcaattgctgttgcaatgggagttatcttcctgcgagattctctctacatcggcagcttgatcggggcaacggtaataacaatcgggttttacacggtaatgtggggaaaagccaaggaagtggccttggtcgaagatgataacaaggctaaccacgaggaggccaatgaagctgaccttgattctccatcgggttcacagaaggctcctctcttggaaagttacaagaacgatgaacatgtatgagtatcatcaactagtgaagatcacgctatatatatatgtgtgaaaaaattcatatgtgaattgtctttgtaatttatttgatgagacaaatgtgatctttaattttaggatccaagtgttttctaatcac

SEQ ID NO: 25781 - protein, 367 aa, Arabidopsis thaliana
  peptide (1)..(367): Ceres Seq. ID no. 12715732
MARKYFQREVLPVTALVIMECANVGLNTLFKAATLKGMSFHVFIVYSYGLAALLLLPSLFCSFRSRTLPPMNFSILYKIVLLGIIGCCSNIMGYTGINYSSPTLASAISNLTPAFTFLLAVVFRMESVSFKRTSSVAKMLGTVVSIGGAFIVTLYNGPVVIAKSPPSVSLRSQSTNPNWILGAGFLAVEYFCVPLWYIVQTQIMREYPAEFTVVCFYSIGVSFWTALVTLFTEGNDLGAWKIKPNIALVSIVCSGLFGSCINNTIHTWALRIKGPLFVAMFKPLSIAIAVAMGVIFLRDSLYIGSLIGATVITIGFYTVMWGKAKEVALVEDDNKANHEEANEADLDSPSGSQKAPLLESYKNDEHV

SEQ ID NO: 25782 - protein, 349 aa, Arabidopsis thaliana
  peptide (1)..(349): Ceres Seq. ID no. 12715733
MECANVGLNTLFKAATLKGMSFHVFIVYSYGLAALLLLPSLFCSFRSRTLPPMNFSILYKIVLLGIIGCCSNIMGYTGINYSSPTLASAISNLTPAFTFLLAVVFRMESVSFKRTSSVAKMLGTVVSIGGAFIVTLYNGPVVIAKSPPSVSLRSQSTNPNWILGAGFLAVEYFCVPLWYIVQTQIMREYPAEFTVVCFYSIGVSFWTALVTLFTEGNDLGAWKIKPNIALVSIVCSGLFGSCINNTIHTWALRIKGPLFVAMFKPLSIAIAVAMGVIFLRDSLYIGSLIGATVITIGFYTVMWGKAKEVALVEDDNKANHEEANEADLDSPSGSQKAPLLESYKNDEHV

SEQ ID NO: 25783 - protein, 330 aa, Arabidopsis thaliana
  peptide (1)..(330): Ceres Seq. ID no. 12715734
MSFHVFIVYSYGLAALLLLPSLFCSFRSRTLPPMNFSILYKIVLLGIIGCCSNIMGYTGINYSSPTLASAISNLTPAFTFLLAVVFRMESVSFKRTSSVAKMLGTVVSIGGAFIVTLYNGPVVIAKSPPSVSLRSQSTNPNWILGAGFLAVEYFCVPLWYIVQTQIMREYPAEFTVVCFYSIGVSFWTALVTLFTEGNDLGAWKIKPNIALVSIVCSGLFGSCINNTIHTWALRIKGPLFVAMFKPLSIAIAVAMGVIFLRDSLYIGSLIGATVITIGFYTVMWGKAKEVALVEDDNKANHEEANEADLDSPSGSQKAPLLESYKNDEHV

SEQ ID NO: 25784 - DNA, 1345 bp, Arabidopsis thaliana
  misc_feature (1)..(1345): Ceres Seq. ID no. 12677915
  misc_feature (1)..(1345): Ortholog of  Ceres SEQ ID NO 15177870 as cited in SEQ ID NO 52373
  misc_feature (1)..(1345): Ortholog of  Ceres SEQ ID NO 13582380 as cited in SEQ ID NO 56782
aaatgcttctctactttctcatcacttgtctctctttctttttctttaccaaatctctttctcttcctccatgggcatctgaaaccaaaaccttgctctccttctacttcatcaagaatccctttatgaacaccctacatcagaccaaacacgatccagcctctccggtgatcgaccaaatgtcggttcttgacctccctgagctggctcttgactgcattcttgaccttcttccaccctctggactctgcagcatggctagggtttgtagctccttgagggagagatgtgttagtgatcatctatgggagaaacatttgaagaccaaatggggcaaaatccttggccctgctgctcacagagagtggcaatgctatatctcctcttccacatatcatcttgattctcctcatcatcaaactgggaatcttggttttgccaaaatcatctctctgatccgatctctttcatccgttttccgagaggataaacaaaggaggggatatgcatcttctctgccacttgattccagcatgagctgctacctctcccttgaaacaggtcgtttttggttcccagctcaagtttacaaccgtgagaatggacatgtagggttcatgttgtcatgctatgatgcggagctcagctatgatactcacacggatacgttccaagccaggtataaaatatctaatgtccacatttgacgctaacaaattttcttatttctcatcataagtttacgtttattggggagtttaggtatccaccacatggtagacgagcatctgcgattgaaaagggtgtgacatgggatagaataagagcagctcccattgatgcatcacctcatcttctccatgtatcagattctttaaaagagttgaaacctggagatcacatcgaaatccagtggagaaggaacaaagagttcccatatggatggtggtatggtcttgttcgccacttggaatcctgtgatggagatcataaccattgccattgccatcttagtgagacggtagtgttggaattcaaccagtacacagtcggatcaaggtggagaagaacgatgatcatgagagatcataaagaggaaggtaacgaagaagacgggttctatggaggaatccgaaagctaaattgtaaagaagagattgcaatgtggaaacgtcactggccttgctccatcttggaatagcattaaagaagctttgcttaaacacatggggaaagatattacacatcactatactgagagtaggttgttaaatttagacgtctattctcttttatccaatgtatggttgatcgtgaattatttgttgggaataaagtctatacg

SEQ ID NO: 25785 - protein, 234 aa, Arabidopsis thaliana
  peptide (1)..(234): Ceres Seq. ID no. 12677916
MLLYFLITCLSFFFFTKSLSLPPWASETKTLLSFYFIKNPFMNTLHQTKHDPASPVIDQMSVLDLPELALDCILDLLPPSGLCSMARVCSSLRERCVSDHLWEKHLKTKWGKILGPAAHREWQCYISSSTYHLDSPHHQTGNLGFAKIISLIRSLSSVFREDKQRRGYASSLPLDSSMSCYLSLETGRFWFPAQVYNRENGHVGFMLSCYDAELSYDTHTDTFQARYKISNVHI

SEQ ID NO: 25786 - protein, 193 aa, Arabidopsis thaliana
  peptide (1)..(193): Ceres Seq. ID no. 12677917
MNTLHQTKHDPASPVIDQMSVLDLPELALDCILDLLPPSGLCSMARVCSSLRERCVSDHLWEKHLKTKWGKILGPAAHREWQCYISSSTYHLDSPHHQTGNLGFAKIISLIRSLSSVFREDKQRRGYASSLPLDSSMSCYLSLETGRFWFPAQVYNRENGHVGFMLSCYDAELSYDTHTDTFQARYKISNVHI

SEQ ID NO: 25787 - protein, 175 aa, Arabidopsis thaliana
  peptide (1)..(175): Ceres Seq. ID no. 12677918
MSVLDLPELALDCILDLLPPSGLCSMARVCSSLRERCVSDHLWEKHLKTKWGKILGPAAHREWQCYISSSTYHLDSPHHQTGNLGFAKIISLIRSLSSVFREDKQRRGYASSLPLDSSMSCYLSLETGRFWFPAQVYNRENGHVGFMLSCYDAELSYDTHTDTFQARYKISNVHI

SEQ ID NO: 25788 - DNA, 1374 bp, Arabidopsis thaliana
  misc_feature (1)..(1374): Ceres Seq. ID no. 12333223
  misc_feature (1)..(1374): Ortholog of  Ceres SEQ ID NO 15177328 as cited in SEQ ID NO 52523
  misc_feature (1)..(1374): Ortholog of  Ceres SEQ ID NO 13655881 as cited in SEQ ID NO 64426
attagtggtaatttctgatcccattgctgctcctctctccggagatacaaaggcgaatctgaccagtaagaaagatggcagtcgagatggcctctcagtctcaggttttggtggaagagaaatcgagtgttagaatcttgacactaaacagaccaaagcagctgaatgctctgtccttccacatgatctctcgattgctgcaactgttccttgcatttgaggaggaccctagtgtgaaacttgtcatcctaaagggtcatgggagagccttttgtgctggtggcgatgttgcagctgttgttcgtgacatcaatcaaggtaactggagactcggtgccaattacttctcatctgaatacatgctcaactatgttatggccacatatagcaaagctcaggtttcaatcttgaatggtatcgtcatgggaggcggagctggtgtatccgtccatggtcgatttcgtattgcaactgagaacacggtttttgccatgcctgagacagctctggggctctttccagatgtaggcgcctcctacttcttgtcaaggctccctggtttttttggggagtatgttggcctcacaggagctagattagatggtgctgaaatgcttgcttgtggccttgcaactcattttgtgccttcaacgaggttgactgcattagaagcagatctttgcagaattaattcaaatgatccaacttttgcctcaacaattctcgatgcatacacccagcatccgcgcctgaaacagcagagtgcttaccgcaggttagatgttattgataggtgtttctcaaggagaacagtcgaagaaattatatctgcacttgagagagaggccactcaagaagcagatggttggatctcagctaccattcaagcattgaagaagggttcaccagcaagccttaaaatctctcttagatcgataagggaagggcgattgcagggggtggggcagtgtcttatccgcgagtatagaatggtgtgtcatgtgatgaagggagaaatcagcaaagattttgtggaggggtgcagagccatattggtagacaaagataagaacccaaagtgggagccaaggcgactggaggacatgaaggatagcatggtggagcagtacttcgagagagtggaacgggaggatgatctaaagcttccgccaaggaataacttgcctgctttagggatcgcaaagctgtgaagtggagaaggtgatggagcactattgtttacgtctgtgggaaagaaaaaagaaaataaatgtaacaacacttgtgttgaataggacttgcatacattacataaatcattattgtatttgagaattgacaccaaagcagcagagcagaattgtgttaagattc

SEQ ID NO: 25789 - protein, 378 aa, Arabidopsis thaliana
  peptide (1)..(378): Ceres Seq. ID no. 12333224
MAVEMASQSQVLVEEKSSVRILTLNRPKQLNALSFHMISRLLQLFLAFEEDPSVKLVILKGHGRAFCAGGDVAAVVRDINQGNWRLGANYFSSEYMLNYVMATYSKAQVSILNGIVMGGGAGVSVHGRFRIATENTVFAMPETALGLFPDVGASYFLSRLPGFFGEYVGLTGARLDGAEMLACGLATHFVPSTRLTALEADLCRINSNDPTFASTILDAYTQHPRLKQQSAYRRLDVIDRCFSRRTVEEIISALEREATQEADGWISATIQALKKGSPASLKISLRSIREGRLQGVGQCLIREYRMVCHVMKGEISKDFVEGCRAILVDKDKNPKWEPRRLEDMKDSMVEQYFERVEREDDLKLPPRNNLPALGIAKL

SEQ ID NO: 25790 - protein, 374 aa, Arabidopsis thaliana
  peptide (1)..(374): Ceres Seq. ID no. 12333225
MASQSQVLVEEKSSVRILTLNRPKQLNALSFHMISRLLQLFLAFEEDPSVKLVILKGHGRAFCAGGDVAAVVRDINQGNWRLGANYFSSEYMLNYVMATYSKAQVSILNGIVMGGGAGVSVHGRFRIATENTVFAMPETALGLFPDVGASYFLSRLPGFFGEYVGLTGARLDGAEMLACGLATHFVPSTRLTALEADLCRINSNDPTFASTILDAYTQHPRLKQQSAYRRLDVIDRCFSRRTVEEIISALEREATQEADGWISATIQALKKGSPASLKISLRSIREGRLQGVGQCLIREYRMVCHVMKGEISKDFVEGCRAILVDKDKNPKWEPRRLEDMKDSMVEQYFERVEREDDLKLPPRNNLPALGIAKL

SEQ ID NO: 25791 - protein, 342 aa, Arabidopsis thaliana
  peptide (1)..(342): Ceres Seq. ID no. 12333226
MISRLLQLFLAFEEDPSVKLVILKGHGRAFCAGGDVAAVVRDINQGNWRLGANYFSSEYMLNYVMATYSKAQVSILNGIVMGGGAGVSVHGRFRIATENTVFAMPETALGLFPDVGASYFLSRLPGFFGEYVGLTGARLDGAEMLACGLATHFVPSTRLTALEADLCRINSNDPTFASTILDAYTQHPRLKQQSAYRRLDVIDRCFSRRTVEEIISALEREATQEADGWISATIQALKKGSPASLKISLRSIREGRLQGVGQCLIREYRMVCHVMKGEISKDFVEGCRAILVDKDKNPKWEPRRLEDMKDSMVEQYFERVEREDDLKLPPRNNLPALGIAKL

SEQ ID NO: 25792 - DNA, 1481 bp, Arabidopsis thaliana
  misc_feature (1)..(1481): Ceres Seq. ID no. 12421991
  misc_feature (1)..(1481): Ortholog of  Ceres SEQ ID NO 12598859 as cited in SEQ ID NO 62872
  misc_feature (1)..(1481): Ortholog of  Ceres SEQ ID NO 12617350 as cited in SEQ ID NO 63777
  misc_feature (1)..(1481): Ortholog of  Ceres SEQ ID NO 13598749 as cited in SEQ ID NO 64341
acttgccaaaaccctcactcttaaccattaacaatgtcgtctccggcgactactatcaccttctttttcttcttcactctctcatccttcttctacatcacttcttcactccagaacaacaacaacaacaaacacacagcaaccgttaactccttaaatatcccctccgccgcggcggagattacgctagtaaacccaaagcttccgccgcggagtctctccctcacatcctccaaaaaattcgaaggatcttcaaatctagtccacctccgttaccacatgggaccagtcctctcatcttctccgatcaacatctacgttatctggtacggacaatggtcacgcccacacaaatccctaatcagagatttcctcaattctatctccgacgctaaagcaccttctccctccgtctccgaatggtggcgcaccgcttctctctacacagatcaaaccggatccaacgtctctagatccgttttaatcgccggagaatactccgattctaaatactcccacggccaacaccttactcgtctcacgattcaggaagtcatcgcctccgccgccagatccgcttcctttccggtggatcataaaaacggaatgtatctagttctgacgtcacacgacgtcacgatgcaagatttttgccgcgccgtttgtggatttcactatttcactttcccgtcgatggttggttacactatgccttacgcttgggttggtcaatcgggaaaacaatgtcccgaggtttgtgcttatccatttgctttaccgggttacatgggacacggtggtcccggagagctccggccaccgaacggagagactggagtagatgggatggttagtgtgattggtcatgagttagctgaagttgtatcgaatccgttgattaatgcttggtacgccggagaagatccgacggctccgacggagatcggtgatttgtgtgagggattgtacggaagcggcggaggaggagggtatattggtcaagttatgagagatagagaagggaagacttttaatatgaatggtaaaggaggaagaaagtttttagttcaatggatttggaaccctaatttgaaagcttgctctggtcctaactctgtcgactaaaaaaacgaagaagaaggttaatgatggtgatttgtggtaatcactgagataatgatgaaataactcgttaggttttagaagtgtaacattattttactttatgatttcttatatatataaagtttaaagaatgcttttatactgtttttgtggtgaatttgaatgaatctttgattttcacactcacttttttgtttatttcaacagtattggtaatgtttaagagcttttaatgtacacttcgggaagtgaaaaagtttgaattcaaaattctttagatattttttcttcattttctgcattattaaatagtactagtataatcggtgtttcaataaatgtaagtgtacgataac

SEQ ID NO: 25793 - protein, 363 aa, Arabidopsis thaliana
  peptide (1)..(363): Ceres Seq. ID no. 12421992
MSSPATTITFFFFFTLSSFFYITSSLQNNNNNKHTATVNSLNIPSAAAEITLVNPKLPPRSLSLTSSKKFEGSSNLVHLRYHMGPVLSSSPINIYVIWYGQWSRPHKSLIRDFLNSISDAKAPSPSVSEWWRTASLYTDQTGSNVSRSVLIAGEYSDSKYSHGQHLTRLTIQEVIASAARSASFPVDHKNGMYLVLTSHDVTMQDFCRAVCGFHYFTFPSMVGYTMPYAWVGQSGKQCPEVCAYPFALPGYMGHGGPGELRPPNGETGVDGMVSVIGHELAEVVSNPLINAWYAGEDPTAPTEIGDLCEGLYGSGGGGGYIGQVMRDREGKTFNMNGKGGRKFLVQWIWNPNLKACSGPNSVD

SEQ ID NO: 25794 - protein, 281 aa, Arabidopsis thaliana
  peptide (1)..(281): Ceres Seq. ID no. 12421993
MGPVLSSSPINIYVIWYGQWSRPHKSLIRDFLNSISDAKAPSPSVSEWWRTASLYTDQTGSNVSRSVLIAGEYSDSKYSHGQHLTRLTIQEVIASAARSASFPVDHKNGMYLVLTSHDVTMQDFCRAVCGFHYFTFPSMVGYTMPYAWVGQSGKQCPEVCAYPFALPGYMGHGGPGELRPPNGETGVDGMVSVIGHELAEVVSNPLINAWYAGEDPTAPTEIGDLCEGLYGSGGGGGYIGQVMRDREGKTFNMNGKGGRKFLVQWIWNPNLKACSGPNSVD

SEQ ID NO: 25795 - DNA, 1271 bp, Arabidopsis thaliana
  misc_feature (1)..(1271): Ceres Seq. ID no. 12326042
  misc_feature (1)..(1271): Ortholog of  Ceres SEQ ID NO 13594560 as cited in SEQ ID NO 51329
  misc_feature (1)..(1271): Ortholog of  Ceres SEQ ID NO 12613701 as cited in SEQ ID NO 67983
aaattcgatgaggttgttatagacaagagaagacatttttatacaaaagagtttatcattatataagtttcaaactttgaagatatggcatcggcttttagatcatccacgaggttgattcttgtattaggtatactgattttgtgttcggtttcttctgtccgaagctggagcaaagaaggtcatattcttacttgtagaattgctcagaatcttttagaagccggaccagcacatgtagtagagaatctgttaccggattacgtgaaaggagatttatcagcattgtgtgtgtggcctgaccagatccgacattggtacaagtatcgttggaccagccatctccattacatcgacactcccgaccaagcctgctcttacgaatactctagggattgtcatgatcaacatggattgaaggatatgtgtgtggatggagcaatccagaatttcacgtctcagcttcagcattacggtgaaggaacatctgatcgtagatataacatgaccgaagcccttttgttcttgtctcatttcatgggagatattcatcagccgatgcatgtgggattcacaagtgatgaaggaggaaacacgatagatttacgttggtacaaacacaaatccaatctacatcatgtatgggatagagagatcattctcacggctctaaaagaaaactacgacaagaacttggatcttctccaagaggatcttgagaagaacatcaccaatggattatggcacgacgatctatcttcgtggacagaatgcaacgatcttatcgcttgtccacacaagtatgcttcagagagtataaagttagcttgtaaatggggatacaaaggcgtcaagtctggtgaaacgttatcagaagaatatttcaatacaaggttgccaatagtgatgaagagaatagttcagggaggagttagactagccatgatactaaaccgggtttttagtgacgatcatgctattgctggtgttgctgccacttgaaccaaacccgacataccggggcatcaaagcatttgattaagagattatttgatacattcacaaaattaattaaggctgatcagacattcttttcttttagtagctttatctatgtgacagctaatgcctgtggactgctttgtttagaagtgtttagcattagatcatatgctaattcaatgttattaattcatcgtatgatcgttttagagatagtggttctaagaaaataaactagattatttcattcaagtaaacctagttcatct

SEQ ID NO: 25796 - protein, 305 aa, Arabidopsis thaliana
  peptide (1)..(305): Ceres Seq. ID no. 12326043
MASAFRSSTRLILVLGILILCSVSSVRSWSKEGHILTCRIAQNLLEAGPAHVVENLLPDYVKGDLSALCVWPDQIRHWYKYRWTSHLHYIDTPDQACSYEYSRDCHDQHGLKDMCVDGAIQNFTSQLQHYGEGTSDRRYNMTEALLFLSHFMGDIHQPMHVGFTSDEGGNTIDLRWYKHKSNLHHVWDREIILTALKENYDKNLDLLQEDLEKNITNGLWHDDLSSWTECNDLIACPHKYASESIKLACKWGYKGVKSGETLSEEYFNTRLPIVMKRIVQGGVRLAMILNRVFSDDHAIAGVAAT

SEQ ID NO: 25797 - protein, 192 aa, Arabidopsis thaliana
  peptide (1)..(192): Ceres Seq. ID no. 12326044
MCVDGAIQNFTSQLQHYGEGTSDRRYNMTEALLFLSHFMGDIHQPMHVGFTSDEGGNTIDLRWYKHKSNLHHVWDREIILTALKENYDKNLDLLQEDLEKNITNGLWHDDLSSWTECNDLIACPHKYASESIKLACKWGYKGVKSGETLSEEYFNTRLPIVMKRIVQGGVRLAMILNRVFSDDHAIAGVAAT

SEQ ID NO: 25798 - protein, 165 aa, Arabidopsis thaliana
  peptide (1)..(165): Ceres Seq. ID no. 12326045
MTEALLFLSHFMGDIHQPMHVGFTSDEGGNTIDLRWYKHKSNLHHVWDREIILTALKENYDKNLDLLQEDLEKNITNGLWHDDLSSWTECNDLIACPHKYASESIKLACKWGYKGVKSGETLSEEYFNTRLPIVMKRIVQGGVRLAMILNRVFSDDHAIAGVAAT

SEQ ID NO: 25799 - DNA, 1159 bp, Arabidopsis thaliana
  misc_feature (1)..(1159): Ceres Seq. ID no. 12603510
  misc_feature (1)..(1159): Ortholog of  Ceres SEQ ID NO 14303355 as cited in SEQ ID NO 59746
  misc_feature (1)..(1159): Ortholog of  Ceres SEQ ID NO 14302415 as cited in SEQ ID NO 62781
gccgtcatcacccaacaacaaaaccctagttttggtttctctggatctgaagaatctccatgactattctcatagatcgccactctgatcagaacgatgcaggagatgagattgtagagaagaatcaggggaatggtaaagaggaagaaacagagttggtgttagatgcaggtttcgaggctcctcacaccaactcttttggtcgcaccttcagggattatgatgctgagagtgaaaggagaagaggtgttgaggaattttacagagtcaatcacattggccaaaccgttgatttcgtgaggaagatgagagaagaatacgagaagctaaatcgtacggagatgagcatttgggaatgttgcgagcttctgaatgagtttatcgacgagagtgatcctgatttggacgaacctcagatcgagcatctgcttcagacagctgaagccatcagaaaagattaccctgatgaagactggctccatctgaccggtcttatccacgatcttggaaaagttcttcttcactcttcatttggtgagctccctcagtgggctgtcgtcggtgatacatttccagtgggatgtgcttttgatgaatctattgttcaccacaagtacttcaaggagaatccagactatgataacccgagttacaactctaagtatgggatatacactgaaggctgtgggctcgacaatgtgttaatgtcttggggacatgatgattacatgtaccttgttgcgaaggagaatcaaactactttaccatcagccggtcttttcatcatcagataccattcgttctacgctcttcacaaatcagaagcatacaagcatttgatgaacaatgaagacagagagaacatgaagtggcttaaagtgttcaacaagtatgatctctacagcaaaagcaaagtccgcgtaaacgttgaggaagtgaaaccatattatctctcccttaccaacaagtattttccgtccaagctaaaatggtgaaaccctacaagcagaaagctttctaataaaatggattagagaatgcgaccaaaataaaacctttcaacaaaaaagaaaatgtgacaaaaaaatgcatgtgtaaatgtaaaggcgataacggatatgccttgatgaataaaacagagtgttgtttcgtttgtgcc

SEQ ID NO: 25800 - protein, 311 aa, Arabidopsis thaliana
  peptide (1)..(311): Ceres Seq. ID no. 12603511
MTILIDRHSDQNDAGDEIVEKNQGNGKEEETELVLDAGFEAPHTNSFGRTFRDYDAESERRRGVEEFYRVNHIGQTVDFVRKMREEYEKLNRTEMSIWECCELLNEFIDESDPDLDEPQIEHLLQTAEAIRKDYPDEDWLHLTGLIHDLGKVLLHSSFGELPQWAVVGDTFPVGCAFDESIVHHKYFKENPDYDNPSYNSKYGIYTEGCGLDNVLMSWGHDDYMYLVAKENQTTLPSAGLFIIRYHSFYALHKSEAYKHLMNNEDRENMKWLKVFNKYDLYSKSKVRVNVEEVKPYYLSLTNKYFPSKLKW

SEQ ID NO: 25801 - protein, 229 aa, Arabidopsis thaliana
  peptide (1)..(229): Ceres Seq. ID no. 12603512
MREEYEKLNRTEMSIWECCELLNEFIDESDPDLDEPQIEHLLQTAEAIRKDYPDEDWLHLTGLIHDLGKVLLHSSFGELPQWAVVGDTFPVGCAFDESIVHHKYFKENPDYDNPSYNSKYGIYTEGCGLDNVLMSWGHDDYMYLVAKENQTTLPSAGLFIIRYHSFYALHKSEAYKHLMNNEDRENMKWLKVFNKYDLYSKSKVRVNVEEVKPYYLSLTNKYFPSKLKW

SEQ ID NO: 25802 - protein, 217 aa, Arabidopsis thaliana
  peptide (1)..(217): Ceres Seq. ID no. 12603513
MSIWECCELLNEFIDESDPDLDEPQIEHLLQTAEAIRKDYPDEDWLHLTGLIHDLGKVLLHSSFGELPQWAVVGDTFPVGCAFDESIVHHKYFKENPDYDNPSYNSKYGIYTEGCGLDNVLMSWGHDDYMYLVAKENQTTLPSAGLFIIRYHSFYALHKSEAYKHLMNNEDRENMKWLKVFNKYDLYSKSKVRVNVEEVKPYYLSLTNKYFPSKLKW

SEQ ID NO: 25803 - DNA, 640 bp, Arabidopsis thaliana
  misc_feature (1)..(640): Ceres Seq. ID no. 13491233
  misc_feature (1)..(640): Ortholog of  Ceres SEQ ID NO 15175022 as cited in SEQ ID NO 62436
tgcttctcaaagaaacgaaattaagagaaggagaaggttttacgccggagttggagactgatctagatccgccggcgaaaaagcagagccgtcacattcatcgtcggaaatcaagaaagggtaattctctgtaggatagagagacatggaagccaagtttttccggttcttgaagattgttggagttggatacaaagctagagctgaggaagcagggcgtttcttatacctcaaattgggttacagtcacgaagtcgaacttgcggttcctccagcggttcgagtcttttgtttcaagaacaatgtggtttgctgcactggaatcgacaagcaaagagtgcatcagtttgctgcaacggtaaggagttgcaaaccccctgaaccttataagggcaaaggcataatgtacactgatgaagtcgtcaagaagaaacaaggaaagaagtccaaatgatctctctttgtatgcttcttcttccttcttactctgcagagacaactttcatctatctgtggtagattatggttggatttttatcaataagttttatttggttgtatgagacatcattttgttgttaagtctctttcaatgaaacaaaatgagaagagttcgtcttggaaatatttatgttttgtc

SEQ ID NO: 25804 - protein, 102 aa, Arabidopsis thaliana
  peptide (1)..(102): Ceres Seq. ID no. 13491234
MEAKFFRFLKIVGVGYKARAEEAGRFLYLKLGYSHEVELAVPPAVRVFCFKNNVVCCTGIDKQRVHQFAATVRSCKPPEPYKGKGIMYTDEVVKKKQGKKSK

SEQ ID NO: 25805 - DNA, 1670 bp, Arabidopsis thaliana; identical to SEQ ID NO: 23635
  misc_feature (1)..(1670): Ceres Seq. ID no. 13576264
  misc_feature (1)..(1670): Ortholog of  Ceres SEQ ID NO 15176457 as cited in SEQ ID NO 55547
  misc_feature (1)..(1670): Ortholog of  Ceres SEQ ID NO 13594349 as cited in SEQ ID NO 58161
  misc_feature (1)..(1670): Ortholog of  Ceres SEQ ID NO 13663419 as cited in SEQ ID NO 66561

SEQ ID NO: 25806 - protein, 473 aa, Arabidopsis thaliana; identical to SEQ ID NO: 23636
  peptide (1)..(473): Ceres Seq. ID no. 13576265

SEQ ID NO: 25807 - protein, 461 aa, Arabidopsis thaliana; identical to SEQ ID NO: 23637
  peptide (1)..(461): Ceres Seq. ID no. 13576266

SEQ ID NO: 25808 - protein, 454 aa, Arabidopsis thaliana; identical to SEQ ID NO: 23638
  peptide (1)..(454): Ceres Seq. ID no. 13576267

SEQ ID NO: 25809 - DNA, 915 bp, Arabidopsis thaliana
  misc_feature (1)..(915): Ceres Seq. ID no. 12680932
  misc_feature (1)..(915): Ortholog of  Ceres SEQ ID NO 12584967 as cited in SEQ ID NO 63078
aattagggttcctactttcttctcctttctcgtaacttgatcaaatctgcttactgtggagttatacaccttgaagagtctcgcgataatgaagaaattctatcaaaatgctgatcatgagactgataaatccaaatcggcggagacgaagaagaggaagaacatgaggagattaggaggcggtggtctttctctccaaacttttgccaacatgaaatcggaaaataatcgctataacccttctttgatcaaaaagcaaaaagagttctacaagaatgcaaagtatgtgagcaagtttaggaagtcgttgaagcagcagaacattcctgataagaatgagactggagagactagtaaggtaggtgatgatgatgatgatgataagcggaagggtaaatctaataagagaattggtgtagaggatttgtacaagcagacaagagaagagatggagagagtaaggaaggagagagaggcaatgtttcaggcgaagaaggaagcgaaagaagaggctgaatctaggaggaaagaagcaaaggggaaaatgttgaggaagactcgacatggtcagcctgtaatgaaatacagaattgagcatcttcttgaatccatcaagaaatctgccggaatcaacgaaatcgcctaacttgtgcgggttgatacagtgcagatgaagaacccagtgaggagaagttgctggtgttgcggaggctcaaagcagaaaccttgttgtcactcagatactgacctttttcttcccggagatattatgttacactactgcttatactttgagagatgctttgcggcaacatatgtagttttttgctaggccttaccgtttagctcatgattttagatgtttctttacaaacttcttttactataaatcttataaaatgataattttattcc

SEQ ID NO: 25810 - protein, 185 aa, Arabidopsis thaliana
  peptide (1)..(185): Ceres Seq. ID no. 12680933
MKKFYQNADHETDKSKSAETKKRKNMRRLGGGGLSLQTFANMKSENNRYNPSLIKKQKEFYKNAKYVSKFRKSLKQQNIPDKNETGETSKVGDDDDDDKRKGKSNKRIGVEDLYKQTREEMERVRKEREAMFQAKKEAKEEAESRRKEAKGKMLRKTRHGQPVMKYRIEHLLESIKKSAGINEIA

SEQ ID NO: 25811 - protein, 160 aa, Arabidopsis thaliana
  peptide (1)..(160): Ceres Seq. ID no. 12680934
MRRLGGGGLSLQTFANMKSENNRYNPSLIKKQKEFYKNAKYVSKFRKSLKQQNIPDKNETGETSKVGDDDDDDKRKGKSNKRIGVEDLYKQTREEMERVRKEREAMFQAKKEAKEEAESRRKEAKGKMLRKTRHGQPVMKYRIEHLLESIKKSAGINEIA

SEQ ID NO: 25812 - protein, 144 aa, Arabidopsis thaliana
  peptide (1)..(144): Ceres Seq. ID no. 12680935
MKSENNRYNPSLIKKQKEFYKNAKYVSKFRKSLKQQNIPDKNETGETSKVGDDDDDDKRKGKSNKRIGVEDLYKQTREEMERVRKEREAMFQAKKEAKEEAESRRKEAKGKMLRKTRHGQPVMKYRIEHLLESIKKSAGINEIA

SEQ ID NO: 25813 - DNA, 807 bp, Arabidopsis thaliana
  misc_feature (1)..(807): Ceres Seq. ID no. 13493796
  misc_feature (1)..(807): Ortholog of  Ceres SEQ ID NO 14308225 as cited in SEQ ID NO 59062
  misc_feature (1)..(807): Ortholog of  Ceres SEQ ID NO 15176615 as cited in SEQ ID NO 0
aaacatgtggtaattggttcatttgtccttctttctttcttctccaatcggatctcactttctctacctcaccggtaaaaatggcgatgtgggtattcgggtacggatctttaatatggaaaacgggttttcctttcgacgaaagcctccctggtttcatcaaaggctatcgccgtgtcttccatcaaggtagtactgatcatagaggaattccggattttccgggaagaacagtgacattagaagctgctcatggagaagttttgttgtgtagttgcttacaagataactaaagaggaagataaaagagatgctttattgcatttggaagtgagggagaagcaatatgatcagaaagagtatcttgatttcttcactgactataatgcttcggaaccggctgtggcaggagtaatggtgtatatagcttcacctgacaagaagagcaacaacaactacttaggaccagctcctcttgaagatattgccaaacagatagttaaagcgaaaggaccttcagggccaaacagagactatctcttcaacctcgaagaggctcttgctcaactcgggtttaaagataaacatgtcacagatcttgcaaaccaagttaggcacattctttcagaatccgaagagttagacattgatgccaccgccgccaccgccaacaatgtctagattcacagcttcttttcgatttatccgaaaagaacaaaacccaatttttaagagatgcattttgcatcccccaattgaatctgttatcactatcaatcaactctcttctttatcatatttgatcac

SEQ ID NO: 25814 - protein, 142 aa, Arabidopsis thaliana
  peptide (1)..(142): Ceres Seq. ID no. 13493797
MEKFCCVVAYKITKEEDKRDALLHLEVREKQYDQKEYLDFFTDYNASEPAVAGVMVYIASPDKKSNNNYLGPAPLEDIAKQIVKAKGPSGPNRDYLFNLEEALAQLGFKDKHVTDLANQVRHILSESEELDIDATAATANNV

SEQ ID NO: 25815 - protein, 96 aa, Arabidopsis thaliana
  peptide (1)..(96): Ceres Seq. ID no. 13493798
TCGNWFICPSFFLLQSDLTFSTSPVKMAMWVFGYGSLIWKTGFPFDESLPGFIKGYRRVFHQGSTDHRGIPDFPGRTVTLEAAHGEVLLCSCLQDN

SEQ ID NO: 25816 - protein, 88 aa, Arabidopsis thaliana
  peptide (1)..(88): Ceres Seq. ID no. 13493799
MVYIASPDKKSNNNYLGPAPLEDIAKQIVKAKGPSGPNRDYLFNLEEALAQLGFKDKHVTDLANQVRHILSESEELDIDATAATANNV

SEQ ID NO: 25817 - DNA, 1093 bp, Arabidopsis thaliana
  misc_feature (1)..(1093): Ceres Seq. ID no. 13487392
  misc_feature (1)..(1093): Ortholog of  Ceres SEQ ID NO 13658590 as cited in SEQ ID NO 66762
aattaacaaactcggccgtcgtcatgtctctccgtaaaaccctaaccgccgtgaatcaatcttcgttaccgccggattctttaatctccgccggtaatctcactgtttcagaggtctctggttcatcttctagaatcagatttcgtcctcgtaaaatcaggaaagtttcgtcagatccgtcgccgaggatcattatcaccgcgtctcctcctctatcaacaaaatcgactgttgatatcgctctacgtcacttacaaagctccgatgaacttctcggagcattaatcacaacgcacaacgatcctccactgttcgactcaagtaatactccgtttctctccttagcgagatcaatcctataccaacaactcgcgacgaaagcagcgaaatgtatctacgatcgattcatctctctattcaacggtggagaagcaggtgttgttcctgaatctgtgatctcactctccgccgttgatcttcgtaagatcggtgtctccgggagaaaagctagttacctccacgatctagctgataaatacaacaacggtgtgctttctgatgaattgattctgaaaatgagtgatgaagagttgattgataggttaactttggttaaaggaattggagtgtggactgttcatatgtttatgatcttctcgttgcatagacctgatgtgttgcctgtgggagatcttggtgtgaggaaaggtgtgaaagatctttatggtttgaaaaatcttccaggtccattgcaaatggagcagctttgtgagaaatggcgtccttataggtctgttggttcatggtacatgtggagactaatcgagtctcgtaagaccaaatagcacctgcctgtaatcgggcagttaatatgatcctgtgacgaagaagcttttccatgcccatcacttcctttccaagtttcacttgctggtaatctgagttattttgtgtctgtaaattatggagcacgtaagaaaaatccttcttgtattttaactgtattccacggattatatttctgtgactgttgtaaacatgtatcatgtatggggtttcatttgacttggatattgagaagcatggcttattt

SEQ ID NO: 25818 - protein, 280 aa, Arabidopsis thaliana
  peptide (1)..(280): Ceres Seq. ID no. 13487393
LTNSAVVMSLRKTLTAVNQSSLPPDSLISAGNLTVSEVSGSSSRIRFRPRKIRKVSSDPSPRIIITASPPLSTKSTVDIALRHLQSSDELLGALITTHNDPPLFDSSNTPFLSLARSILYQQLATKAAKCIYDRFISLFNGGEAGVVPESVISLSAVDLRKIGVSGRKASYLHDLADKYNNGVLSDELILKMSDEELIDRLTLVKGIGVWTVHMFMIFSLHRPDVLPVGDLGVRKGVKDLYGLKNLPGPLQMEQLCEKWRPYRSVGSWYMWRLIESRKTK

SEQ ID NO: 25819 - protein, 273 aa, Arabidopsis thaliana
  peptide (1)..(273): Ceres Seq. ID no. 13487394
MSLRKTLTAVNQSSLPPDSLISAGNLTVSEVSGSSSRIRFRPRKIRKVSSDPSPRIIITASPPLSTKSTVDIALRHLQSSDELLGALITTHNDPPLFDSSNTPFLSLARSILYQQLATKAAKCIYDRFISLFNGGEAGVVPESVISLSAVDLRKIGVSGRKASYLHDLADKYNNGVLSDELILKMSDEELIDRLTLVKGIGVWTVHMFMIFSLHRPDVLPVGDLGVRKGVKDLYGLKNLPGPLQMEQLCEKWRPYRSVGSWYMWRLIESRKTK

SEQ ID NO: 25820 - DNA, 698 bp, Arabidopsis thaliana
  misc_feature (1)..(698): Ceres Seq. ID no. 12323364
  misc_feature (1)..(698): Ortholog of  Ceres SEQ ID NO 13504026 as cited in SEQ ID NO 58279
  misc_feature (1)..(698): Ortholog of  Ceres SEQ ID NO 15226827 as cited in SEQ ID NO 69141
aaaagctcccaagcctagagattctgttgttgatccgattcccgctctccttctccggtagtacaatctccgtcgccggttacatcagccagggaagagttttaagagatggcatcaaagttgctacaattgaaatccaaggcatgtgaagcatcaaagtttgtttccaagcatggaacaacttactacaaacagttgctggataagaacaagatgtatatccaggagccagctactatagagaaatgcaatgaattgtctaagcagcttctctacactcgtcttgctagcattcctgggcgttctgagtcattttggaaggaagtcaatcacgtgaagggtttatggaagaatcgggcggatttgaaggttgaagatgctggaatagctgcactttttggtctggaatgctttgcgtggtactgtgcaggagagattgtaggaaggggcttcactttcaccggctactacccttgaagaaagaaagcaaccccctcataaacaaacatgcgtttcagatccattgaataccgaaaagcctttttatatcataattagcggcttattatctatctcactgctgacattagaagcaaagttaatttctgtttctctggataatttatacacaaaagttttgaaggtgaggcatcatcactcgtgctagctctaataatatcagtcgactaatgttggcc

SEQ ID NO: 25821 - protein, 122 aa, Arabidopsis thaliana
  peptide (1)..(122): Ceres Seq. ID no. 12323365
MASKLLQLKSKACEASKFVSKHGTTYYKQLLDKNKMYIQEPATIEKCNELSKQLLYTRLASIPGRSESFWKEVNHVKGLWKNRADLKVEDAGIAALFGLECFAWYCAGEIVGRGFTFTGYYP

SEQ ID NO: 25822 - protein, 87 aa, Arabidopsis thaliana
  peptide (1)..(87): Ceres Seq. ID no. 12323366
MYIQEPATIEKCNELSKQLLYTRLASIPGRSESFWKEVNHVKGLWKNRADLKVEDAGIAALFGLECFAWYCAGEIVGRGFTFTGYYP

SEQ ID NO: 25823 - DNA, 912 bp, Arabidopsis thaliana
  misc_feature (1)..(912): Ceres Seq. ID no. 12562055
  misc_feature (1)..(912): Ortholog of  Ceres SEQ ID NO 15173936 as cited in SEQ ID NO 61736
  misc_feature (1)..(912): Ortholog of  Ceres SEQ ID NO 13596373 as cited in SEQ ID NO 67991
aaaaattcagaggaaaaaaaacacgatcgagaaatggagaataatccaagaagctcatcgtctctccctctagccgggcgtgtagctatagtgaccggagccaccagaggcatgggccgtgaaatcgcgattcacctccactctcttggtgcaagagtcaccatcaattatgtctcgagctcatcaaaagctgaactcttggtttcagaactaaacgactcatctcaattaaagtcagcgatcgcagttaaagcagatgtgtcagacccggaccagatcaacaacttgtttgatcaaacagaacaagagttcggatctaaagttcacatcgtcgtgaattgtgcaggtgttttggatccaaagtatccatctttatccgagacgacactagaagatttcgataacacattcacaataaacacaagagggtctttcttgtgttgcaaggaagcagctaaaagggttatgagaggaggtggtggaagaatcattatgatgtctacatcaatggttggtggtctcgccccgggttatggagtttacgcagcatcaaaggccgccgttgagacaatggtgaaagtgttggcgaaggagcttaagggaagccggataaccgcgaattgcgtggcgccagggccggttgcgacggagatgttttatgctggaaagagtgatgaaacggtgaaaatgcttgcaggggcttgtcctatggggaggatcggtgagtcaaaggatataaccgagattgtagggtttttggccggtgatggtggtgaatggattaacggtcaagttattagagccaatggaggctttgttgtctaataaatgaagaactaacaatggaatttgatgtcttcttcttcttttcgtgtgttgaactacttttatgtcaatgatgatgagttgttt

SEQ ID NO: 25824 - protein, 274 aa, Arabidopsis thaliana
  peptide (1)..(274): Ceres Seq. ID no. 12562056
KNSEEKKHDREMENNPRSSSSLPLAGRVAIVTGATRGMGREIAIHLHSLGARVTINYVSSSSKAELLVSELNDSSQLKSAIAVKADVSDPDQINNLFDQTEQEFGSKVHIVVNCAGVLDPKYPSLSETTLEDFDNTFTINTRGSFLCCKEAAKRVMRGGGGRIIMMSTSMVGGLAPGYGVYAASKAAVETMVKVLAKELKGSRITANCVAPGPVATEMFYAGKSDETVKMLAGACPMGRIGESKDITEIVGFLAGDGGEWINGQVIRANGGFVV

SEQ ID NO: 25825 - protein, 263 aa, Arabidopsis thaliana
  peptide (1)..(263): Ceres Seq. ID no. 12562057
MENNPRSSSSLPLAGRVAIVTGATRGMGREIAIHLHSLGARVTINYVSSSSKAELLVSELNDSSQLKSAIAVKADVSDPDQINNLFDQTEQEFGSKVHIVVNCAGVLDPKYPSLSETTLEDFDNTFTINTRGSFLCCKEAAKRVMRGGGGRIIMMSTSMVGGLAPGYGVYAASKAAVETMVKVLAKELKGSRITANCVAPGPVATEMFYAGKSDETVKMLAGACPMGRIGESKDITEIVGFLAGDGGEWINGQVIRANGGFVV

SEQ ID NO: 25826 - protein, 237 aa, Arabidopsis thaliana
  peptide (1)..(237): Ceres Seq. ID no. 12562058
MGREIAIHLHSLGARVTINYVSSSSKAELLVSELNDSSQLKSAIAVKADVSDPDQINNLFDQTEQEFGSKVHIVVNCAGVLDPKYPSLSETTLEDFDNTFTINTRGSFLCCKEAAKRVMRGGGGRIIMMSTSMVGGLAPGYGVYAASKAAVETMVKVLAKELKGSRITANCVAPGPVATEMFYAGKSDETVKMLAGACPMGRIGESKDITEIVGFLAGDGGEWINGQVIRANGGFVV

SEQ ID NO: 25827 - DNA, 1279 bp, Arabidopsis thaliana
  misc_feature (1)..(1279): Ceres Seq. ID no. 12421731
  misc_feature (1)..(1279): Ortholog of  Ceres SEQ ID NO 15226049 as cited in SEQ ID NO 55683
  misc_feature (1)..(1279): Ortholog of  Ceres SEQ ID NO 13597225 as cited in SEQ ID NO 63994
aacgttttatcaaaagtctaagctactctgcaaattcacttgccggcgaaaattctcaggattatttgctcagctaaaaaatgggatcaagagtgtccctttgctgccgaaagcataatccagaaatgccctttcctgagaaacatcaacaagcctaccaatttgtccttctcctccttgagttttccaattccggtgcaaggaggtaaaggtcctattttgtgtgaagatggtcctggatttgattcagcattcaagctcttccatgggaaagatggtattgtgccgctttctggtttcgctgatgattctgaagatgaggcgggtcgtcgtgctcctctgcaattcaatccacttgctggtaaggtagctacaataagcctatcagcttttggtcctggaggcccttttggttttggtcctttctcagagaaatggaagaagcaacagaagaaacctaaaccttcgaaaaaccaacagtctggggactcttcgaaacatgaggcagttggagacgaatggttaaaaaccgggaattgtcctatcgccaagtcttttagagctgcaagcaaagtcatgcctcttatttctaaagcattaacgctaccatctggtatgaaatatagatgtccagctcctatagtagctgcaagagctgcactttcgaagactgctttggtaaaaggccttcgccctcagcctttacctgaaaagatgcttgcaatcgctctcatgggaatggctgcaaatgtgcctctaggtgtatggagagaacacacaaagaagttttcgccttcatggtttttggcagtccatgctgctgtgccttttatagcaatgcttaggaaatctgtgctgatgcccaaaacagccatggctttgaccattggagcttcgatcttgggacaggtgattgggtcaagagctgagcgttaccgtctcaaagcagtagctgagaaaatggttcctgaaaccgctatggtttctggatacaaccagagccctggcgactcaggcatttctgggggacactgtggtataggggaggaagtgaagcaggtttattacaatgtaaatgttggagagtctgttaaatcaactggactctgttattgagagaatgttcttattgatttcaaaaactacaaattactatgtaaggattggatatttgtgtgtgagggaaggtttttgtaattcagtgaattgtgtaaaccataacaatggtgtcgttttatcccttcaaaatgggtctaaataaaaggttaataattccctc

SEQ ID NO: 25828 - protein, 179 aa, Arabidopsis thaliana
  peptide (1)..(179): Ceres Seq. ID no. 12421732
MPLISKALTLPSGMKYRCPAPIVAARAALSKTALVKGLRPQPLPEKMLAIALMGMAANVPLGVWREHTKKFSPSWFLAVHAAVPFIAMLRKSVLMPKTAMALTIGASILGQVIGSRAERYRLKAVAEKMVPETAMVSGYNQSPGDSGISGGHCGIGEEVKQVYYNVNVGESVKSTGLCY

SEQ ID NO: 25829 - protein, 166 aa, Arabidopsis thaliana
  peptide (1)..(166): Ceres Seq. ID no. 12421733
MKYRCPAPIVAARAALSKTALVKGLRPQPLPEKMLAIALMGMAANVPLGVWREHTKKFSPSWFLAVHAAVPFIAMLRKSVLMPKTAMALTIGASILGQVIGSRAERYRLKAVAEKMVPETAMVSGYNQSPGDSGISGGHCGIGEEVKQVYYNVNVGESVKSTGLCY

SEQ ID NO: 25830 - protein, 133 aa, Arabidopsis thaliana
  peptide (1)..(133): Ceres Seq. ID no. 12421734
MLAIALMGMAANVPLGVWREHTKKFSPSWFLAVHAAVPFIAMLRKSVLMPKTAMALTIGASILGQVIGSRAERYRLKAVAEKMVPETAMVSGYNQSPGDSGISGGHCGIGEEVKQVYYNVNVGESVKSTGLCY

SEQ ID NO: 25831 - DNA, 834 bp, Arabidopsis thaliana
  misc_feature (1)..(834): Ceres Seq. ID no. 12394977
  misc_feature (1)..(834): Ortholog of  Ceres SEQ ID NO 12616324 as cited in SEQ ID NO 63414
attaaaaagctaatatggctactagggaagagagagataagtatagatcagtccttgaagatgcaggacaggttcaatggaggtatgataaccctccagacttcaatagtgtgaaccagctctttgaagaaggccagactaaggtgtggccagaaggttcgttagaagagacagtgcaaaacgcgatcaagtcatgggagatggagttctcacataagatccgtttacaggacttcaagactataaaccctgagaagtttaagctctttgtcaatgggagagaaggtttatcagctgaagagacgcttaggcttgggagttacaatgctttgctcaagaactctttgcctgaagagtttcagtactataagcccgaggaagagagctttgagtcatcacatgacgcctttagatctgctttaccacgcgggtttgcgtgggaaatactctctgtgtactcggggccgcctgttatagccttcaaatttagacactggggatactttgaaggaactttcaaaggtcatgctcctactggggaaatggttcaattcctgggtctaggagttctaaaggttgacgaatcacttagagcagaggagattgagatttactatgatccaggagagctgttcgggggactactcaagggacctcctatatcagagaccaaaaccacagacagtggagacaacactgcagagaaacaaagctgcccattcacacactaagataataagaaaagcagaagtgtatttgaccctttaaagaatatattgtaacagtctcttggttattgatgcatggaataaattataagttatgttaggcgcc

SEQ ID NO: 25832 - protein, 238 aa, Arabidopsis thaliana
  peptide (1)..(238): Ceres Seq. ID no. 12394978
MATREERDKYRSVLEDAGQVQWRYDNPPDFNSVNQLFEEGQTKVWPEGSLEETVQNAIKSWEMEFSHKIRLQDFKTINPEKFKLFVNGREGLSAEETLRLGSYNALLKNSLPEEFQYYKPEEESFESSHDAFRSALPRGFAWEILSVYSGPPVIAFKFRHWGYFEGTFKGHAPTGEMVQFLGLGVLKVDESLRAEEIEIYYDPGELFGGLLKGPPISETKTTDSGDNTAEKQSCPFTH

SEQ ID NO: 25833 - protein, 176 aa, Arabidopsis thaliana
  peptide (1)..(176): Ceres Seq. ID no. 12394979
MEFSHKIRLQDFKTINPEKFKLFVNGREGLSAEETLRLGSYNALLKNSLPEEFQYYKPEEESFESSHDAFRSALPRGFAWEILSVYSGPPVIAFKFRHWGYFEGTFKGHAPTGEMVQFLGLGVLKVDESLRAEEIEIYYDPGELFGGLLKGPPISETKTTDSGDNTAEKQSCPFTH

SEQ ID NO: 25834 - DNA, 1742 bp, Arabidopsis thaliana
  misc_feature (1)..(1742): Ceres Seq. ID no. 12371553
  misc_feature (1)..(1742): Ortholog of  Ceres SEQ ID NO 13594209 as cited in SEQ ID NO 59089
  misc_feature (1)..(1742): Ortholog of  Ceres SEQ ID NO 13664173 as cited in SEQ ID NO 61223
  misc_feature (1)..(1742): Ortholog of  Ceres SEQ ID NO 13502874 as cited in SEQ ID NO 66298
  misc_feature (1)..(1742): Ortholog of  Ceres SEQ ID NO 12614124 as cited in SEQ ID NO 68392
aatgtacatcaaacttacatcattaactgttgtttcacatcgtcgaagcaaaaatgattatatatctaatttcattactccctatcatcgtcgccaccctcatgctttatcaacgatggtggagatccaacataccgccgggaccaaaaccaaagtttctgcttggaaaccttcatcaaatgaaaccactttggacgcattctttctcggagtggtcagagacttatggtcctatcatatcggtgtggatagggtcacagctcactgtcgtggtctcgagctctgatctagccagacaagtgttgagagacaaagaccatcagttgtctaaccgacacaggatcgcaaggatgactcagaccggtactgatcttgtttggtccgattacagtccacattatgtgaaactgaggaaactctgtacactcgagctcttctctctgaaaagcatcgaaaatttcaggtccttgagagagatggaagcaagatcgatggttgtgtcgattctgaaggacttaatgagcaattcaggggatgatcaggagcgaaaaccggtgattgtgaggaagtacctagctgcggttgttttgaataccatctcaaggttaatgatagggaaagagttcgggtctgaggaaggaaaagagtttaaagccatcgttgagaaagaacatcttctcagtgactcagggacgattcttgatcacgtctggtggctcaaatgggtttcttcttggttctttagtgataaggaattcttagcgcacaaggatcggagaacaaagtggtttagaggagctattatggtggaagaagatatagaaatagaggatcacaggggatttgttcggaaattgttggtgttaaaagagcagaaagagctgagcgaagagacggttgggggactagtctggaacatgttaaccgcgggtgctgacacaactgcagttgttatcgaatgggctatggcagagatgatcaaatgcccgaccgtgcaagaaaaggcgcaacaggagcttgattctgtggttggatccgaaaggttaatgactgaatcagatatccccatactgccatatctgcaatgtgtggttaaagaagctctccggcttcacccgtcaacaccattaatgcttccacacaaagcaagtgaaactgtttgggtaggtgggtacaaggttcctaagggagccacagtttatgtcaatgtgcaggcgattgggcgggaccctgcaaactggataaacccatatgagttcagaccagagcggttccttcaggaagaaaccgatgttaaaggtcgagactttagggttcttccatttggatcaggaagaaggatgtgtccagcggcacagctcagcatgaacttgatgacattggtgatgggaaatttgttgcattgcttctcatggagttcccctgttcctggagagaggattgacatgagcgagaatcctggattgctttgtaacatgaggactccattgcaggctctagctttgccgagagctgccgcaagagcaatacctttacctttagattaaaatagataaacaatcagacacataagataagataatcaaaatccatataccatgaagactctcataatggacacgaagatgtagctatgtaaaacccaagaggcattgcaagatttgagacatggttgagtatagtttcatacaataacatgtagctattatatatggaaataaaagagtcaatatttacatggc

SEQ ID NO: 25835 - protein, 497 aa, Arabidopsis thaliana
  peptide (1)..(497): Ceres Seq. ID no. 12371554
MIIYLISLLPIIVATLMLYQRWWRSNIPPGPKPKFLLGNLHQMKPLWTHSFSEWSETYGPIISVWIGSQLTVVVSSSDLARQVLRDKDHQLSNRHRIARMTQTGTDLVWSDYSPHYVKLRKLCTLELFSLKSIENFRSLREMEARSMVVSILKDLMSNSGDDQERKPVIVRKYLAAVVLNTISRLMIGKEFGSEEGKEFKAIVEKEHLLSDSGTILDHVWWLKWVSSWFFSDKEFLAHKDRRTKWFRGAIMVEEDIEIEDHRGFVRKLLVLKEQKELSEETVGGLVWNMLTAGADTTAVVIEWAMAEMIKCPTVQEKAQQELDSVVGSERLMTESDIPILPYLQCVVKEALRLHPSTPLMLPHKASETVWVGGYKVPKGATVYVNVQAIGRDPANWINPYEFRPERFLQEETDVKGRDFRVLPFGSGRRMCPAAQLSMNLMTLVMGNLLHCFSWSSPVPGERIDMSENPGLLCNMRTPLQALALPRAAARAIPLPLD

SEQ ID NO: 25836 - protein, 481 aa, Arabidopsis thaliana
  peptide (1)..(481): Ceres Seq. ID no. 12371555
MLYQRWWRSNIPPGPKPKFLLGNLHQMKPLWTHSFSEWSETYGPIISVWIGSQLTVVVSSSDLARQVLRDKDHQLSNRHRIARMTQTGTDLVWSDYSPHYVKLRKLCTLELFSLKSIENFRSLREMEARSMVVSILKDLMSNSGDDQERKPVIVRKYLAAVVLNTISRLMIGKEFGSEEGKEFKAIVEKEHLLSDSGTILDHVWWLKWVSSWFFSDKEFLAHKDRRTKWFRGAIMVEEDIEIEDHRGFVRKLLVLKEQKELSEETVGGLVWNMLTAGADTTAVVIEWAMAEMIKCPTVQEKAQQELDSVVGSERLMTESDIPILPYLQCVVKEALRLHPSTPLMLPHKASETVWVGGYKVPKGATVYVNVQAIGRDPANWINPYEFRPERFLQEETDVKGRDFRVLPFGSGRRMCPAAQLSMNLMTLVMGNLLHCFSWSSPVPGERIDMSENPGLLCNMRTPLQALALPRAAARAIPLPLD

SEQ ID NO: 25837 - protein, 455 aa, Arabidopsis thaliana
  peptide (1)..(455): Ceres Seq. ID no. 12371556
MKPLWTHSFSEWSETYGPIISVWIGSQLTVVVSSSDLARQVLRDKDHQLSNRHRIARMTQTGTDLVWSDYSPHYVKLRKLCTLELFSLKSIENFRSLREMEARSMVVSILKDLMSNSGDDQERKPVIVRKYLAAVVLNTISRLMIGKEFGSEEGKEFKAIVEKEHLLSDSGTILDHVWWLKWVSSWFFSDKEFLAHKDRRTKWFRGAIMVEEDIEIEDHRGFVRKLLVLKEQKELSEETVGGLVWNMLTAGADTTAVVIEWAMAEMIKCPTVQEKAQQELDSVVGSERLMTESDIPILPYLQCVVKEALRLHPSTPLMLPHKASETVWVGGYKVPKGATVYVNVQAIGRDPANWINPYEFRPERFLQEETDVKGRDFRVLPFGSGRRMCPAAQLSMNLMTLVMGNLLHCFSWSSPVPGERIDMSENPGLLCNMRTPLQALALPRAAARAIPLPLD

SEQ ID NO: 25838 - DNA, 1555 bp, Arabidopsis thaliana
  misc_feature (1)..(1555): Ceres Seq. ID no. 12348635
  misc_feature (1)..(1555): Ortholog of  Ceres SEQ ID NO 13582281 as cited in SEQ ID NO 51014
  misc_feature (1)..(1555): Ortholog of  Ceres SEQ ID NO 14315606 as cited in SEQ ID NO 53515
  misc_feature (1)..(1555): Ortholog of  Ceres SEQ ID NO 15176795 as cited in SEQ ID NO 54453
  misc_feature (1)..(1555): Ortholog of  Ceres SEQ ID NO 14310508 as cited in SEQ ID NO 58965
  misc_feature (1)..(1555): Ortholog of  Ceres SEQ ID NO 12617417 as cited in SEQ ID NO 65089
acaaaaaagaacaaagataacaaaaaaagaagtctaataaggatcttccggtagttaaagtgaaatacaagagagtccaagaaaatgggtgtttttggatcgaatgaatcgtcaagcatgagtattgtgatgtatccgtggttagcctttggtcatatgactccttttcttcacctctccaacaagctcgcagagaaaggtcacaagattgttttcttgcttcccaagacagcactaaaccagctcgaacctcttaatctctacccaaatctcatcacttttcacaccatctctatccctcaggtcaaagggcttcctcccggtgcggagaccaactccgacgtccctttcttcttgactcatttgcttgcagttgcaatggaccaaacccggccagaggtcgagaccattttccgtacaatcaaaccggacttggttttttatgactctgcccattggataccggatattgctaaaccggtcggtgctaaaaccgtttgcttcaacatcgttagcgctgcgtcaatcgcactgtctcttgtccctgctgcggagagagaagtcattgatgggaaggaaatgtcaggggaggagttagctaagacgcctctaggttacccatcttcgaaagtagtcttacgtccgcacgaagcaaaatccctgagtttcgtgtggaggaagcacgaggcgattggctctttctttgatgggaaagttaccgcaatgagaaactgcgacgcaatcgctataaggacttgccgtgagacagaaggcaaattctgcgattacatcagtagccagtacagtaaaccggtttatctaactggaccggttctccctggatcccaacctaatcagccctccttagagcctcaatgggtggagtggctagccaaattcaaccacggttcggttgtgttctgcgctttcggtagccaacccgttgtaaacaagatagatcagtttcaagaactctgtttagggctagaatcaactggttttccgtttctggttgccattaagcctccttccggtgtatcaacagtcgaggaagccttaccggaaggattcaaagagagggttgaaggacgtggcgttgtatttggaggttggattcagcaaccgttggtgttgaaccatccttcagtgggttgttttgttagccattgcgggtttgggtcgatgtgggagtctttgatgagtgattgtcagatcgttttggttccgcagcacggtgaacagattttgaacgcaaggctgatgacggaggagatggaggtggcggttgaagtggagagggaaaagaatgggtggttctcgcggcaaagcttggagaatgctgtgaagagtgtgatggaggaaggtagtgaggtcggtgagaaagtgaggaagaatcatgacaagtggagatgtgttttgagtgactctggttttgcagatggttatattgatatgtttgaacagaatttaatcgaatttgtgaagtcatgagttcattgtaataatttctttgtgttataaacattatgaaacgagatgtaacgattacttatgc

SEQ ID NO: 25839 - protein, 468 aa, Arabidopsis thaliana
  peptide (1)..(468): Ceres Seq. ID no. 12348636
MGVFGSNESSSMSIVMYPWLAFGHMTPFLHLSNKLAEKGHKIVFLLPKTALNQLEPLNLYPNLITFHTISIPQVKGLPPGAETNSDVPFFLTHLLAVAMDQTRPEVETIFRTIKPDLVFYDSAHWIPDIAKPVGAKTVCFNIVSAASIALSLVPAAEREVIDGKEMSGEELAKTPLGYPSSKVVLRPHEAKSLSFVWRKHEAIGSFFDGKVTAMRNCDAIAIRTCRETEGKFCDYISSQYSKPVYLTGPVLPGSQPNQPSLEPQWVEWLAKFNHGSVVFCAFGSQPVVNKIDQFQELCLGLESTGFPFLVAIKPPSGVSTVEEALPEGFKERVEGRGVVFGGWIQQPLVLNHPSVGCFVSHCGFGSMWESLMSDCQIVLVPQHGEQILNARLMTEEMEVAVEVEREKNGWFSRQSLENAVKSVMEEGSEVGEKVRKNHDKWRCVLSDSGFADGYIDMFEQNLIEFVKS

SEQ ID NO: 25840 - protein, 457 aa, Arabidopsis thaliana
  peptide (1)..(457): Ceres Seq. ID no. 12348637
MSIVMYPWLAFGHMTPFLHLSNKLAEKGHKIVFLLPKTALNQLEPLNLYPNLITFHTISIPQVKGLPPGAETNSDVPFFLTHLLAVAMDQTRPEVETIFRTIKPDLVFYDSAHWIPDIAKPVGAKTVCFNIVSAASIALSLVPAAEREVIDGKEMSGEELAKTPLGYPSSKVVLRPHEAKSLSFVWRKHEAIGSFFDGKVTAMRNCDAIAIRTCRETEGKFCDYISSQYSKPVYLTGPVLPGSQPNQPSLEPQWVEWLAKFNHGSVVFCAFGSQPVVNKIDQFQELCLGLESTGFPFLVAIKPPSGVSTVEEALPEGFKERVEGRGVVFGGWIQQPLVLNHPSVGCFVSHCGFGSMWESLMSDCQIVLVPQHGEQILNARLMTEEMEVAVEVEREKNGWFSRQSLENAVKSVMEEGSEVGEKVRKNHDKWRCVLSDSGFADGYIDMFEQNLIEFVKS

SEQ ID NO: 25841 - protein, 453 aa, Arabidopsis thaliana
  peptide (1)..(453): Ceres Seq. ID no. 12348638
MYPWLAFGHMTPFLHLSNKLAEKGHKIVFLLPKTALNQLEPLNLYPNLITFHTISIPQVKGLPPGAETNSDVPFFLTHLLAVAMDQTRPEVETIFRTIKPDLVFYDSAHWIPDIAKPVGAKTVCFNIVSAASIALSLVPAAEREVIDGKEMSGEELAKTPLGYPSSKVVLRPHEAKSLSFVWRKHEAIGSFFDGKVTAMRNCDAIAIRTCRETEGKFCDYISSQYSKPVYLTGPVLPGSQPNQPSLEPQWVEWLAKFNHGSVVFCAFGSQPVVNKIDQFQELCLGLESTGFPFLVAIKPPSGVSTVEEALPEGFKERVEGRGVVFGGWIQQPLVLNHPSVGCFVSHCGFGSMWESLMSDCQIVLVPQHGEQILNARLMTEEMEVAVEVEREKNGWFSRQSLENAVKSVMEEGSEVGEKVRKNHDKWRCVLSDSGFADGYIDMFEQNLIEFVKS

SEQ ID NO: 25842 - DNA, 1429 bp, Arabidopsis thaliana
  misc_feature (1)..(1429): Ceres Seq. ID no. 13494248
  misc_feature (1)..(1429): Ortholog of  Ceres SEQ ID NO 14307123 as cited in SEQ ID NO 54182
atggacgctataaggaagcagcttgatgtgctcatgggagctaaccgaaacggcgacgttcaggaggtgaatcgcaaatactacgaccgtgatgtgtgtcgtctttacttgtctggtctctgccctcacgatctcttccaattgacgaaaatggatatgggaccatgcccaaaggtgcactctttgcagcttcggaaagaataccgagaagcaagggcaaaaggtgttgataactacgacagggaattggaagatgccatagacaggcttatcgttgagtgtgataggaagattggtagggcccttaagcgtcttcaagaagaggacgccaaagctgccattgccatttctgtctctgaagtcactcagtcgcctgaaattctcgagttatcggagaaaatcaaagagaagatgaaggaagcagatatccacgatcttgaaggcaaaatggatcttaagattagagctcttgagttagtcgaagagatgaggaccaagagagctgaccaacaggcggtgttgctgttggaagccttcaacaaagatagagcatccttgccacagcccgttccagctcaaccaccatcttccgaattacctccaccggatcctcgcactcaagaaatgataaatgagaaactgaagaaggcagaagatcttggtgaacaaggaatggttgatgaagcccagaaagccctggaagaggctgaagctcttaagaagcttacagttagacgagaacctccagcagattcaacgaagtacaccgctgttgatgtgcgcatcacagaccaaaagttgcgtctatgtgacatatgtggagcattcttgagcgtctatgacagtgatcgccgtttagctgatcattttggggggaagcttcatctaggatacatgctagtccgggacaaattaacagagcttctggatgagaaggccaatatacgcaaggaaagatcaaaggaacggaacagtaaggagagagaatcaagtaaagaccgagagaaagaacaagaaactagtcgtgaacatcgaagagattatgatcgcaggagtagagatcgagataggcaccatgaccgtgatcgtgaacaagacagagactatgatcggtcacactcaagaagcagacgtaggtcacgctcacggtccaggtcaagagatagaccaagggactatgatcgccacaggcgtcacaaccgctactagatcgatcggtcttgctgtctaacagggtttacaagttacaaatggttttaggatctatcaccgaaacttttttctgtctacatgtatgttactcaagtatgttagatgagtttcaaaaaatttcacatctttttcttttaccacaaactaaagacttggaagaaacaagatgtggtttatgtttttaccacatctgagaagcgtgtatgcactatcatcg

SEQ ID NO: 25843 - protein, 402 aa, Arabidopsis thaliana
  peptide (1)..(402): Ceres Seq. ID no. 13494249
MDAIRKQLDVLMGANRNGDVQEVNRKYYDRDVCRLYLSGLCPHDLFQLTKMDMGPCPKVHSLQLRKEYREARAKGVDNYDRELEDAIDRLIVECDRKIGRALKRLQEEDAKAAIAISVSEVTQSPEILELSEKIKEKMKEADIHDLEGKMDLKIRALELVEEMRTKRADQQAVLLLEAFNKDRASLPQPVPAQPPSSELPPPDPRTQEMINEKLKKAEDLGEQGMVDEAQKALEEAEALKKLTVRREPPADSTKYTAVDVRITDQKLRLCDICGAFLSVYDSDRRLADHFGGKLHLGYMLVRDKLTELLDEKANIRKERSKERNSKERESSKDREKEQETSREHRRDYDRRSRDRDRHHDRDREQDRDYDRSHSRSRRRSRSRSRSRDRPRDYDRHRRHNRY

SEQ ID NO: 25844 - protein, 391 aa, Arabidopsis thaliana
  peptide (1)..(391): Ceres Seq. ID no. 13494250
MGANRNGDVQEVNRKYYDRDVCRLYLSGLCPHDLFQLTKMDMGPCPKVHSLQLRKEYREARAKGVDNYDRELEDAIDRLIVECDRKIGRALKRLQEEDAKAAIAISVSEVTQSPEILELSEKIKEKMKEADIHDLEGKMDLKIRALELVEEMRTKRADQQAVLLLEAFNKDRASLPQPVPAQPPSSELPPPDPRTQEMINEKLKKAEDLGEQGMVDEAQKALEEAEALKKLTVRREPPADSTKYTAVDVRITDQKLRLCDICGAFLSVYDSDRRLADHFGGKLHLGYMLVRDKLTELLDEKANIRKERSKERNSKERESSKDREKEQETSREHRRDYDRRSRDRDRHHDRDREQDRDYDRSHSRSRRRSRSRSRSRDRPRDYDRHRRHNRY

SEQ ID NO: 25845 - protein, 352 aa, Arabidopsis thaliana
  peptide (1)..(352): Ceres Seq. ID no. 13494251
MDMGPCPKVHSLQLRKEYREARAKGVDNYDRELEDAIDRLIVECDRKIGRALKRLQEEDAKAAIAISVSEVTQSPEILELSEKIKEKMKEADIHDLEGKMDLKIRALELVEEMRTKRADQQAVLLLEAFNKDRASLPQPVPAQPPSSELPPPDPRTQEMINEKLKKAEDLGEQGMVDEAQKALEEAEALKKLTVRREPPADSTKYTAVDVRITDQKLRLCDICGAFLSVYDSDRRLADHFGGKLHLGYMLVRDKLTELLDEKANIRKERSKERNSKERESSKDREKEQETSREHRRDYDRRSRDRDRHHDRDREQDRDYDRSHSRSRRRSRSRSRSRDRPRDYDRHRRHNRY

SEQ ID NO: 25846 - DNA, 1418 bp, Arabidopsis thaliana
  misc_feature (1)..(1418): Ceres Seq. ID no. 12562549
  misc_feature (1)..(1418): Ortholog of  Ceres SEQ ID NO 13639243 as cited in SEQ ID NO 56820
  misc_feature (1)..(1418): Ortholog of  Ceres SEQ ID NO 13496409 as cited in SEQ ID NO 65697
cctttctacccatttcgtctccttcattttgacgttttctttagatctgttaataatccatccatggcttggtctagtcactagtggtgttatctctctgtgtggaagaaaaagcaaggttttttgatcacttggattgttttaagatatggcaactttgaacccttttgatttgttggatgatgatgctgaggatccaagccagctcgctgtttccatcgagaagattgataagtccaagaaatctggaccggtttcgagcttgcctgctaagtcagctcctaagcttccctctaagccacttcctcctgctcaagccgtgagagaggccaggagtgatgctccacgtggtggtggaggccgtggaggatttaatcgtggtcgtggtggttacaaccgtgatgatggtaacaatggatatttagggggatacactaagccctcagatgaaggagatgtttcaaagtcttcttacgagaggcgtggcggtggtgaaggggagcgtcctcgaagggcctttgagcgtcgtagtggaactggcagagggagtgacttcaagcgtgacggatctggtcgtgggaattggggaactccaggggaagagatagctgctgagactgaagcagtagctggtgttgagactgagaaggatgttggagagaagccagctgttgatgatgtagctgctgatgctaacaaggagaatactgttgttgaggagaaagagcctgaggataaggaaatgactcttgatgagtatgagaaaatacttgaggagaagaaaaaggcacttcaatcattaaccacctctgagaggaaagttgatacgaaagtgtttgaatcaatgcaacaactgtcaaacaagaagtctaatgatgaaatcttcatcaagctgggttctgataaggacaaacgcaaagatgacaaagaagagaaggctaagaaggctgtgagcatcaatgagtttctgaagccagcagagggtgggaactactaccgaggaggccgtggtggccgtggacgtggtggtcgtggccgtggaggtgtttctagtggcgaatctggtggttaccgtaatgaagctgcaccagctattggagatgctgctcagttcccatctcttgggggcaagtaagatacatccatgataacgtccatactcgtgcatcctcctttaggattttgtgcgaggatttactgtttactggtctctcgttgtcagatgtaaataattaggtgtcgtcgtcagtttttagattttatgctaaactttacacttgttggtgttctttacttttgaaacactacactcttcttagttttaccattttactcgttttgtgtttgttgttttcttattgggatatgaaacatgttttgagacggacatatctaatgttatcggggttgagtctttt

SEQ ID NO: 25847 - protein, 328 aa, Arabidopsis thaliana
  peptide (1)..(328): Ceres Seq. ID no. 12562550
MATLNPFDLLDDDAEDPSQLAVSIEKIDKSKKSGPVSSLPAKSAPKLPSKPLPPAQAVREARSDAPRGGGGRGGFNRGRGGYNRDDGNNGYLGGYTKPSDEGDVSKSSYERRGGGEGERPRRAFERRSGTGRGSDFKRDGSGRGNWGTPGEEIAAETEAVAGVETEKDVGEKPAVDDVAADANKENTVVEEKEPEDKEMTLDEYEKILEEKKKALQSLTTSERKVDTKVFESMQQLSNKKSNDEIFIKLGSDKDKRKDDKEEKAKKAVSINEFLKPAEGGNYYRGGRGGRGRGGRGRGGVSSGESGGYRNEAAPAIGDAAQFPSLGGK

SEQ ID NO: 25848 - DNA, 771 bp, Arabidopsis thaliana
  misc_feature (1)..(771): Ceres Seq. ID no. 13503800
  misc_feature (1)..(771): Ortholog of  Ceres SEQ ID NO 15170072 as cited in SEQ ID NO 55533
  misc_feature (1)..(771): Ortholog of  Ceres SEQ ID NO 15173959 as cited in SEQ ID NO 63398
  misc_feature (1)..(771): Ortholog of  Ceres SEQ ID NO 13663564 as cited in SEQ ID NO 66903
agtactttgaacattctctctctctcttttatctctgagattgcttcttcgctattgctcaattctctctctcacctaaccctaattattcattattcctgagattcatcggcgatgagttcggaggaagccaaggtcgttgttccgaggaactttagattgttggaagagcttgaaagaggtgagaaaggtattggagatggtactgttagctatggaatggatgatgctgatgatatttatatgcaatcttggactggcaccattcttggtcctcctaatactgcatatgaagggaaaatctttcagctgaagcttttctgtggtaaggagtaccctgaaagtccaccgactgtgaggttccagacccggataaacatggcttgtgttaacccagaaactggagtggttgaaccgagtctcttccctatgctcactaactggcggcgagaatatacaatggaggacatactggttaagctgaaaaaagaaatgatgacttcgcataaccggaagttagctcaacccccggaaggtaacgaggaagctagggcagatccaaaaggaccagctaaatgttgtgtgatgtgaagagaggttggtgggaatcagctatttgtattaatagaaggaacagtgtatataaaacatcatttgaagctttgaaattccctacaacttcctaatgttatagtcttgtttgagaatatatatatgtccgccaaaaacagttgatgattattttaataaacctcatctctactttctctc

SEQ ID NO: 25849 - protein, 158 aa, Arabidopsis thaliana
  peptide (1)..(158): Ceres Seq. ID no. 13503801
MSSEEAKVVVPRNFRLLEELERGEKGIGDGTVSYGMDDADDIYMQSWTGTILGPPNTAYEGKIFQLKLFCGKEYPESPPTVRFQTRINMACVNPETGVVEPSLFPMLTNWRREYTMEDILVKLKKEMMTSHNRKLAQPPEGNEEARADPKGPAKCCVM

SEQ ID NO: 25850 - protein, 123 aa, Arabidopsis thaliana
  peptide (1)..(123): Ceres Seq. ID no. 13503802
MDDADDIYMQSWTGTILGPPNTAYEGKIFQLKLFCGKEYPESPPTVRFQTRINMACVNPETGVVEPSLFPMLTNWRREYTMEDILVKLKKEMMTSHNRKLAQPPEGNEEARADPKGPAKCCVM

SEQ ID NO: 25851 - protein, 115 aa, Arabidopsis thaliana
  peptide (1)..(115): Ceres Seq. ID no. 13503803
MQSWTGTILGPPNTAYEGKIFQLKLFCGKEYPESPPTVRFQTRINMACVNPETGVVEPSLFPMLTNWRREYTMEDILVKLKKEMMTSHNRKLAQPPEGNEEARADPKGPAKCCVM

SEQ ID NO: 25852 - DNA, 1106 bp, Arabidopsis thaliana
  misc_feature (1)..(1106): Ceres Seq. ID no. 12326637
  misc_feature (1)..(1106): Ortholog of  Ceres SEQ ID NO 13594544 as cited in SEQ ID NO 51236
atcgggagctagggttttagctgattctcttgtgacggaaccacaagaagagaagagaccaaaaggaggagccaaaatcctctctttctttggaattagggtttcctcaaaggaagtgaactgaaaatggtcgcggacaagagcaagaagtcgaaaattgaagagaaaggcgaagaagaaaacttggagcaaatcgacgcagagcttgttctctcaattgagaagcttcaggagattcaagacgacctcgagaagattaacgaaaaggccagtgacgaggtcttggaagtagagcagaaatataacgtgatacggaaacctgtctatgacaagcgcaatgaagttatccaatcgattcctggcttttggatgactgcttttttgagtcatcctgccttaggcgacctcttgactgaagaagaccaaaagatttttaagtacttgaactctctggaagtggaggatgccaaagatgtgaaatctggatactctataacttttcacttcacttcaaacccgttctttgaggatgccaagcttaccaagacatttactttccttgaagaaggaacaacaaaaatcactgcaactcctatcaaatggaaggagggcaagggcttgccaaatggagtgaaccatgatgataagaaaggaaataaacgtgcattgccagaggagagtttctttacttggtttactgatgctcaacataaggaagatgctggggatgagattcatgatgaggttgctgatattatcaaggaagatctctggtccaaccctctcacctacttcaacaatgatgctgatgaagaggattttgatggagatgatgatggtgacgaagagggagaagaagacgatgacgatgaagaggaggaagatggtgaggaatgatgggagcccaaagataacacattgctggcttgcttctataacagatgtgtaaagtttgtgttatgaggttctcaattttagcaatgatgagactaagctttctcttttggaatatttagtttatttactatcaatagctacattctgtttgtacgaaccatgtcatcatccatgtcctaaatcttgccataactacatctgtttttcgc

SEQ ID NO: 25853 - protein, 256 aa, Arabidopsis thaliana
  peptide (1)..(256): Ceres Seq. ID no. 12326638
MVADKSKKSKIEEKGEEENLEQIDAELVLSIEKLQEIQDDLEKINEKASDEVLEVEQKYNVIRKPVYDKRNEVIQSIPGFWMTAFLSHPALGDLLTEEDQKIFKYLNSLEVEDAKDVKSGYSITFHFTSNPFFEDAKLTKTFTFLEEGTTKITATPIKWKEGKGLPNGVNHDDKKGNKRALPEESFFTWFTDAQHKEDAGDEIHDEVADIIKEDLWSNPLTYFNNDADEEDFDGDDDGDEEGEEDDDDEEEEDGEE

SEQ ID NO: 25854 - protein, 175 aa, Arabidopsis thaliana
  peptide (1)..(175): Ceres Seq. ID no. 12326639
MTAFLSHPALGDLLTEEDQKIFKYLNSLEVEDAKDVKSGYSITFHFTSNPFFEDAKLTKTFTFLEEGTTKITATPIKWKEGKGLPNGVNHDDKKGNKRALPEESFFTWFTDAQHKEDAGDEIHDEVADIIKEDLWSNPLTYFNNDADEEDFDGDDDGDEEGEEDDDDEEEEDGEE

SEQ ID NO: 25855 - DNA, 2274 bp, Arabidopsis thaliana
  misc_feature (1)..(2274): Ceres Seq. ID no. 13591529
  misc_feature (1)..(2274): Ortholog of  Ceres SEQ ID NO 14303276 as cited in SEQ ID NO 1264
  misc_feature (1)..(2274): Ortholog of  Ceres SEQ ID NO 12465083 as cited in SEQ ID NO 68239
aaaacaagttcattcgatctatagagacgaaacaaaaagagagatcgtacgcaaaagtttccgatatggctcgctcgtttggagctaacagtaccgttgtgttggcgatcatcttcttcggatgtttatttgcgttgtcctctgcaatagaagaggctacgaagttaggatcagtgatagggatagatcttggtactacttactcttgtgttggtgtttacaagaatggtcatgtcgaaattattgccaatgaccaaggaaaccgtattacaccttcatgggttggttttactgactctgaaagactcattggtgaggctgctaagaatcaagcagctgttaatccagagaggactgtcttcgacgttaagagattgatcgggcgaaaatttgaggataaggaggttcaaaaggataggaaacttgtaccttaccagattgtgaacaaggatggtaagccatacattcaagtcaagatcaaggatggtgagactaaggttttcagtcctgaggagattagtgctatgattctgactaagatgaaggagacagctgaagcctaccttggaaagaaaatcaaggacgctgttgtcactgttccagcttacttcaatgatgctcaaaggcaagctactaaggatgctggtgttattgctgggctcaatgttgctagaatcattaatgaacctactgctgctgctattgcctatggtcttgataagaagggtggcgagaagaatatccttgtgtttgatcttggtggtggtacttttgatgtcagtgtcttgaccattgataacggagtgtttgaggttctctccacaaatggtgacactcacttgggaggtgaggactttgaccacagggtgatggagtacttcatcaagttgattaagaagaagcaccagaaggacatcagcaaggacaacaaggctcttggtaagctccgaagggaatgtgagagggcaaagagagctctaagtagtcagcaccaagtccgtgtagagattgagtcactctttgatggtgttgatttttctgagccactcaccagagctcgtttcgaggagcttaacaatgatttgttcaggaagaccatgggacctgtgaagaaggccatggatgatgccggtctacagaagagccagatcgatgagattgtccttgttggtggaagcaccaggatcccaaaggttcagcaactgttgaaggacttctttgaaggtaaagagccaaacaagggtgtgaaccccgacgaggctgttgcctatggtgctgctgttcagggtggtattttgagcggagaaggcggtgatgagaccaaagatatccttcttcttgatgttgcgccactcactttgggtatcgagactgtaggaggagtgatgacaaagttgatcccgagaaacacggttattccaaccaagaaatctcaggttttcacaacgtaccaagaccagcagactaccgtctccattcaggtctttgaaggtgaacgaagtctcaccaaggactgcaggctactcgggaaattcgacctcaatggaatcccaccggccccaagaggaacccctcaaatcgaggtcacattcgaagtggacgccaacggtattcttaatgtgaaagcagaggacaaggcgagtggtaaatcagagaagattactatcacaaacgagaagggtcgtctgagccaagaagagattgaccggatggtgaaggaggcagaggagtttgcagaggaagacaagaaggtaaaggagaagatcgacgccaggaatgccctggagacatacgtgtacaacatgaagaaccaagtgaacgacaaggacaagcttgccgacaaattggaaggagatgaaaaggagaagatcgaagcagcgacgaaagaggctttggagtggctcgacgaaaaccaaaactcagagaaagaagagtacgacgagaagctcaaggaggtagaggcagtgtgtaacccaatcatcacagcagtttaccagagatctggcggagcaccaggtggtgcaggaggagaatcatcgactgaggaggaagatgagtctcacgatgagctctagatgtcttttgttattgttaatttgttaaaccatagagacgagttttgaggatgaaacgtcgttttttttgtatttggtttcctttttatatggatttttaggaaaaggggagagattaagtaacgtcccttctttagtctccctggacgttctctttatgtctctatgcatcaaattacatcgataaagtttttaaaga

SEQ ID NO: 25856 - protein, 690 aa, Arabidopsis thaliana
  peptide (1)..(690): Ceres Seq. ID no. 13591530
NKFIRSIETKQKERSYAKVSDMARSFGANSTVVLAIIFFGCLFALSSAIEEATKLGSVIGIDLGTTYSCVGVYKNGHVEIIANDQGNRITPSWVGFTDSERLIGEAAKNQAAVNPERTVFDVKRLIGRKFEDKEVQKDRKLVPYQIVNKDGKPYIQVKIKDGETKVFSPEEISAMILTKMKETAEAYLGKKIKDAVVTVPAYFNDAQRQATKDAGVIAGLNVARIINEPTAAAIAYGLDKKGGEKNILVFDLGGGTFDVSVLTIDNGVFEVLSTNGDTHLGGEDFDHRVMEYFIKLIKKKHQKDISKDNKALGKLRRECERAKRALSSQHQVRVEIESLFDGVDFSEPLTRARFEELNNDLFRKTMGPVKKAMDDAGLQKSQIDEIVLVGGSTRIPKVQQLLKDFFEGKEPNKGVNPDEAVAYGAAVQGGILSGEGGDETKDILLLDVAPLTLGIETVGGVMTKLIPRNTVIPTKKSQVFTTYQDQQTTVSIQVFEGERSLTKDCRLLGKFDLNGIPPAPRGTPQIEVTFEVDANGILNVKAEDKASGKSEKITITNEKGRLSQEEIDRMVKEAEEFAEEDKKVKEKIDARNALETYVYNMKNQVNDKDKLADKLEGDEKEKIEAATKEALEWLDENQNSEKEEYDEKLKEVEAVCNPIITAVYQRSGGAPGGAGGESSTEEEDESHDEL

SEQ ID NO: 25857 - protein, 669 aa, Arabidopsis thaliana
  peptide (1)..(669): Ceres Seq. ID no. 13591531
MARSFGANSTVVLAIIFFGCLFALSSAIEEATKLGSVIGIDLGTTYSCVGVYKNGHVEIIANDQGNRITPSWVGFTDSERLIGEAAKNQAAVNPERTVFDVKRLIGRKFEDKEVQKDRKLVPYQIVNKDGKPYIQVKIKDGETKVFSPEEISAMILTKMKETAEAYLGKKIKDAVVTVPAYFNDAQRQATKDAGVIAGLNVARIINEPTAAAIAYGLDKKGGEKNILVFDLGGGTFDVSVLTIDNGVFEVLSTNGDTHLGGEDFDHRVMEYFIKLIKKKHQKDISKDNKALGKLRRECERAKRALSSQHQVRVEIESLFDGVDFSEPLTRARFEELNNDLFRKTMGPVKKAMDDAGLQKSQIDEIVLVGGSTRIPKVQQLLKDFFEGKEPNKGVNPDEAVAYGAAVQGGILSGEGGDETKDILLLDVAPLTLGIETVGGVMTKLIPRNTVIPTKKSQVFTTYQDQQTTVSIQVFEGERSLTKDCRLLGKFDLNGIPPAPRGTPQIEVTFEVDANGILNVKAEDKASGKSEKITITNEKGRLSQEEIDRMVKEAEEFAEEDKKVKEKIDARNALETYVYNMKNQVNDKDKLADKLEGDEKEKIEAATKEALEWLDENQNSEKEEYDEKLKEVEAVCNPIITAVYQRSGGAPGGAGGESSTEEEDESHDEL

SEQ ID NO: 25858 - protein, 516 aa, Arabidopsis thaliana
  peptide (1)..(516): Ceres Seq. ID no. 13591532
MILTKMKETAEAYLGKKIKDAVVTVPAYFNDAQRQATKDAGVIAGLNVARIINEPTAAAIAYGLDKKGGEKNILVFDLGGGTFDVSVLTIDNGVFEVLSTNGDTHLGGEDFDHRVMEYFIKLIKKKHQKDISKDNKALGKLRRECERAKRALSSQHQVRVEIESLFDGVDFSEPLTRARFEELNNDLFRKTMGPVKKAMDDAGLQKSQIDEIVLVGGSTRIPKVQQLLKDFFEGKEPNKGVNPDEAVAYGAAVQGGILSGEGGDETKDILLLDVAPLTLGIETVGGVMTKLIPRNTVIPTKKSQVFTTYQDQQTTVSIQVFEGERSLTKDCRLLGKFDLNGIPPAPRGTPQIEVTFEVDANGILNVKAEDKASGKSEKITITNEKGRLSQEEIDRMVKEAEEFAEEDKKVKEKIDARNALETYVYNMKNQVNDKDKLADKLEGDEKEKIEAATKEALEWLDENQNSEKEEYDEKLKEVEAVCNPIITAVYQRSGGAPGGAGGESSTEEEDESHDEL

SEQ ID NO: 25859 - DNA, 1433 bp, Arabidopsis thaliana
  misc_feature (1)..(1433): Ceres Seq. ID no. 12574518
  misc_feature (1)..(1433): Ortholog of  Ceres SEQ ID NO 15171293 as cited in SEQ ID NO 51744
acacacacttcatctctccccagagctctattcccatcaagaaacacacttcggaagatggagatcactaacgttaccgagtatgatgcaatcgcaaagcagaagctgcctaagatggtgtacgactactatgcatctggtgcagaagaccaatggactcttcaagagaacagaaacgcttttgcaaggatcctctttcggcctcggattctgattgatgtgagcaagattgacatgacaaccaccgtcttggggttcaagatctcgatgcccatcatggttgctccaactgccatgcaaaagatggctcaccctgatggggaatatgctactgctagagctgcatctgcagctggaactatcatgacactatcttcatgggctacttccagcgttgaagaagttgcgtctacagggccagggatccgattcttccagctctatgtatacaagaacaggaatgtggttgagcagctcgtgagaagagctgagagggctgggttcaaagccattgctctcactgtagacaccccaaggctaggccgcagagagtctgatatcaagaacagattcactttgcctccaaacctgacattgaagaactttgaaggacttgacctcggaaagatggacgaggccaatgactctggcttggcttcatatgttgctggtcaaattgaccgtaccttaagctggaaggatgtccagtggctccagacaatcaccaagttgcccattcttgtcaaaggtgttcttacaggagaggatgcaaggatagcgattcaagctggtgcagccggaatcattgtatcaaaccatggagctcgccagcttgactatgtcccagcaaccatctcggcccttgaagaggttgtcaaagcgacacaaggacgaattcctgtcttcttggatggtggtgttcgacgtggcactgatgtcttcaaagcacttgcacttggagcctccgggatatttattggaagaccagtggtattctcattggcagctgaaggagaggctggagttagaaaggtgcttcaaatgctacgtgatgagttcgagctgaccatggcactgagtgggtgtcggtccctaaaggaaatctcccgtaaccacattaccaccgaatgggacactccacgtccttcagccaggttatagagaggaaaataaccaacaagcagagaacagcagcaacacagaaccaaaatattggctaaacttattcatactctgattgtacttggcttctactctgctaaatatctcaagacttgtttctccctctatcagatcacaaaccaagcctagtgattctgtaatactatttggctacttctttcttaaggccattcttatttctaaattccatgtacttacattcccacagatcaatttcttgtgattcccagataatacgatgaacatatgct

SEQ ID NO: 25860 - protein, 386 aa, Arabidopsis thaliana
  peptide (1)..(386): Ceres Seq. ID no. 12574519
THTSSLPRALFPSRNTLRKMEITNVTEYDAIAKQKLPKMVYDYYASGAEDQWTLQENRNAFARILFRPRILIDVSKIDMTTTVLGFKISMPIMVAPTAMQKMAHPDGEYATARAASAAGTIMTLSSWATSSVEEVASTGPGIRFFQLYVYKNRNVVEQLVRRAERAGFKAIALTVDTPRLGRRESDIKNRFTLPPNLTLKNFEGLDLGKMDEANDSGLASYVAGQIDRTLSWKDVQWLQTITKLPILVKGVLTGEDARIAIQAGAAGIIVSNHGARQLDYVPATISALEEVVKATQGRIPVFLDGGVRRGTDVFKALALGASGIFIGRPVVFSLAAEGEAGVRKVLQMLRDEFELTMALSGCRSLKEISRNHITTEWDTPRPSARL

SEQ ID NO: 25861 - protein, 367 aa, Arabidopsis thaliana
  peptide (1)..(367): Ceres Seq. ID no. 12574520
MEITNVTEYDAIAKQKLPKMVYDYYASGAEDQWTLQENRNAFARILFRPRILIDVSKIDMTTTVLGFKISMPIMVAPTAMQKMAHPDGEYATARAASAAGTIMTLSSWATSSVEEVASTGPGIRFFQLYVYKNRNVVEQLVRRAERAGFKAIALTVDTPRLGRRESDIKNRFTLPPNLTLKNFEGLDLGKMDEANDSGLASYVAGQIDRTLSWKDVQWLQTITKLPILVKGVLTGEDARIAIQAGAAGIIVSNHGARQLDYVPATISALEEVVKATQGRIPVFLDGGVRRGTDVFKALALGASGIFIGRPVVFSLAAEGEAGVRKVLQMLRDEFELTMALSGCRSLKEISRNHITTEWDTPRPSARL

SEQ ID NO: 25862 - protein, 348 aa, Arabidopsis thaliana
  peptide (1)..(348): Ceres Seq. ID no. 12574521
MVYDYYASGAEDQWTLQENRNAFARILFRPRILIDVSKIDMTTTVLGFKISMPIMVAPTAMQKMAHPDGEYATARAASAAGTIMTLSSWATSSVEEVASTGPGIRFFQLYVYKNRNVVEQLVRRAERAGFKAIALTVDTPRLGRRESDIKNRFTLPPNLTLKNFEGLDLGKMDEANDSGLASYVAGQIDRTLSWKDVQWLQTITKLPILVKGVLTGEDARIAIQAGAAGIIVSNHGARQLDYVPATISALEEVVKATQGRIPVFLDGGVRRGTDVFKALALGASGIFIGRPVVFSLAAEGEAGVRKVLQMLRDEFELTMALSGCRSLKEISRNHITTEWDTPRPSARL

SEQ ID NO: 25863 - DNA, 1569 bp, Arabidopsis thaliana
  misc_feature (1)..(1569): Ceres Seq. ID no. 12422651
  misc_feature (1)..(1569): Ortholog of  Ceres SEQ ID NO 13662416 as cited in SEQ ID NO 68746
acttttgactctgtatctctctgtgtctctcttccccgttagtcttcgtcgtgacctttttgtagtattaagcaatgaagattaagacgttatcaagatcggttgatgaatacactcgagaaagaagtcaggatcttcagagggtctttcacaacttcgacccaagtcttcgacctatggagaaggccgtggaataccagagagctcttacagctgccaaattagaaaagatatttgcaaggccgtttgttggagcaatggatggtcatcgtgatggagtctcatgtatggcgaagaacccaaattacctcaaaggaatcttctctgcttctatggatggagatattcgcctttgggatatctcttcaaggcgtacagtttgccaattccctggtcatcaaggtgctgtgcgtggtcttactgcatcaaccgatggaaatatattggtttcatgcggaactgattgcactgttcgtttgtggaatgttcctcgtccttcacttgaagattctagcatttcatctgagaatttcattgagccatctgcaacctatgtctggaagaatgctttctgggctgttgatcatcagtttgaaggtgacctttttgctacggccggagctcaacttgatatatggaatcataataggtctcagccagttcagagtttccagtggggaactgactctgtaatatctgttcggtttaatcctggagagcctaatttattggctacatcagctagtgaccggagcataaccatatatgatctccgcttgtcttctgcggcaaggaaaattatcatgatgacaaaaacaaattcaattgcatggaaccccatggagcctatgaacctgacagctgctaatgaagatggaagttgctatagctttgatggtagaaagttggacgaagccaagtgcgtgcataaagatcatgtttctgcagtgatggatattgacttttcaccgactggtcgtgagtttgttacgggttcttatgatcgatctgtgagaatcttcccatacaatggaggacacagcagggaaatctaccatacaaagaggatgcagagagtattctgcgtcaaatatagctgtgatgctacatatgtaatatcgggcagtgatgacaccaatctcaggctatggaaggcaaaggcatcagagcaattgggagttattcttccaagggaacaaaagaagcatgagtacaacgaggctgtgaagaaccggtacaagcatctttctgaggttaagcgcattgtgagacacaggcacttgccaaaaccaatatacaaagcgatgggtatcattcgaactgtgaacgattcgaagagaagaaaagaagcacgaaagaaagctcacagtggtcacagcacctctgcgcaaaagaaagatcatcaaagaagtggagtgactctactctttctccgtttgttcctttcaaggatgatgatacgtggagaggattgtattggtatagtgagggtaagattaggaacatgaacatttttgctgtgttgtaagcctttctttatgccattaagttattacccatttcgttttc

SEQ ID NO: 25864 - protein, 477 aa, Arabidopsis thaliana
  peptide (1)..(477): Ceres Seq. ID no. 12422652
MKIKTLSRSVDEYTRERSQDLQRVFHNFDPSLRPMEKAVEYQRALTAAKLEKIFARPFVGAMDGHRDGVSCMAKNPNYLKGIFSASMDGDIRLWDISSRRTVCQFPGHQGAVRGLTASTDGNILVSCGTDCTVRLWNVPRPSLEDSSISSENFIEPSATYVWKNAFWAVDHQFEGDLFATAGAQLDIWNHNRSQPVQSFQWGTDSVISVRFNPGEPNLLATSASDRSITIYDLRLSSAARKIIMMTKTNSIAWNPMEPMNLTAANEDGSCYSFDGRKLDEAKCVHKDHVSAVMDIDFSPTGREFVTGSYDRSVRIFPYNGGHSREIYHTKRMQRVFCVKYSCDATYVISGSDDTNLRLWKAKASEQLGVILPREQKKHEYNEAVKNRYKHLSEVKRIVRHRHLPKPIYKAMGIIRTVNDSKRRKEARKKAHSGHSTSAQKKDHQRSGVTLLFLRLFLSRMMIRGEDCIGIVRVRLGT

SEQ ID NO: 25865 - protein, 443 aa, Arabidopsis thaliana
  peptide (1)..(443): Ceres Seq. ID no. 12422653
MEKAVEYQRALTAAKLEKIFARPFVGAMDGHRDGVSCMAKNPNYLKGIFSASMDGDIRLWDISSRRTVCQFPGHQGAVRGLTASTDGNILVSCGTDCTVRLWNVPRPSLEDSSISSENFIEPSATYVWKNAFWAVDHQFEGDLFATAGAQLDIWNHNRSQPVQSFQWGTDSVISVRFNPGEPNLLATSASDRSITIYDLRLSSAARKIIMMTKTNSIAWNPMEPMNLTAANEDGSCYSFDGRKLDEAKCVHKDHVSAVMDIDFSPTGREFVTGSYDRSVRIFPYNGGHSREIYHTKRMQRVFCVKYSCDATYVISGSDDTNLRLWKAKASEQLGVILPREQKKHEYNEAVKNRYKHLSEVKRIVRHRHLPKPIYKAMGIIRTVNDSKRRKEARKKAHSGHSTSAQKKDHQRSGVTLLFLRLFLSRMMIRGEDCIGIVRVRLGT

SEQ ID NO: 25866 - protein, 416 aa, Arabidopsis thaliana
  peptide (1)..(416): Ceres Seq. ID no. 12422654
MDGHRDGVSCMAKNPNYLKGIFSASMDGDIRLWDISSRRTVCQFPGHQGAVRGLTASTDGNILVSCGTDCTVRLWNVPRPSLEDSSISSENFIEPSATYVWKNAFWAVDHQFEGDLFATAGAQLDIWNHNRSQPVQSFQWGTDSVISVRFNPGEPNLLATSASDRSITIYDLRLSSAARKIIMMTKTNSIAWNPMEPMNLTAANEDGSCYSFDGRKLDEAKCVHKDHVSAVMDIDFSPTGREFVTGSYDRSVRIFPYNGGHSREIYHTKRMQRVFCVKYSCDATYVISGSDDTNLRLWKAKASEQLGVILPREQKKHEYNEAVKNRYKHLSEVKRIVRHRHLPKPIYKAMGIIRTVNDSKRRKEARKKAHSGHSTSAQKKDHQRSGVTLLFLRLFLSRMMIRGEDCIGIVRVRLGT

SEQ ID NO: 25867 - DNA, 1357 bp, Arabidopsis thaliana
  misc_feature (1)..(1357): Ceres Seq. ID no. 12421244
  misc_feature (1)..(1357): Ortholog of  Ceres SEQ ID NO 14304245 as cited in SEQ ID NO 53346
tttttttcaattttacggatatcgttatctgcttctcacactaacacggcgaagcagaaaaagagctcgaaacaaaaatggagggaaccttctcgccgctttgcttacgttcttcttcgaacctctgttacttctccagtaatgtttcaccagattctcaccgttctataggatttacattggttgattcgctccggccaacgaacttggtttccctgcgaacgggaaataaacgttcgtcatcgtcttcactacggctatttctctctccgactagaagcgctctccgtacgccgactatttccgcggaggaggtgaaagatgtcccgatgccgaagattgataagagcggccgattaagcagtcctcgagccgcacgcgagctcgctcttgtaatactttatgccgcatgcttagaaggctctgacccaattcgtctctttgagaagagaataaacgcaagaagagagcctggatacgagtttgacaagagttctttgttggaatacaaccacatgagctttggaggacccccagttaaaacagaaacaaaagaagaagaagatgagcttgtgcgccatgatgaaaaagaatcgaaaatcgaagccgaagtgctttcagctcccccaaagctggtgtacagcaaacttgttttacggtttgcaaagaaactcttggctgcggtagttgataaatgggatagtcatgtcgttatcatcgagaaaatttccccgccagattggaagagtgcaccagctggaagaatattggagttttcgattcttcacttggcaatgtctgaagtggcagtccttgaaacccgacacccgattgtcattaacgaggctgttgatcttgcaaaacggttctgcgatggatcagcaccacgcataatcaacggatgcctaaggacatttgtcaaggatagagcaacaacatcaacacctcaagctttagaattgaagcaagaagtgtcggtttaaattagaacaaaacccgcatcttcgttaggaggcaggcaacctcaagatgttggtcgtcggaagtcgctagtaggcaaagtgttgatccgatgatcttatatattcgacaaagtcgctctctgtcttgacagaccgcttctggtccgaagcttttgatacctgagactgaatctatccattgcaggtcaacatgattattgctaagaacacagcatactcatgtctgtattaatatattgcccataagatagtattaatttatgtagtagttttcatgtttctgtctttgtatcctcctacttcacttgtgtcccatatttgagaacaaacaaagctgtataatcaggtttttcgtatagatgtttttttccgcc

SEQ ID NO: 25868 - protein, 301 aa, Arabidopsis thaliana
  peptide (1)..(301): Ceres Seq. ID no. 12421245
MEGTFSPLCLRSSSNLCYFSSNVSPDSHRSIGFTLVDSLRPTNLVSLRTGNKRSSSSSLRLFLSPTRSALRTPTISAEEVKDVPMPKIDKSGRLSSPRAARELALVILYAACLEGSDPIRLFEKRINARREPGYEFDKSSLLEYNHMSFGGPPVKTETKEEEDELVRHDEKESKIEAEVLSAPPKLVYSKLVLRFAKKLLAAVVDKWDSHVVIIEKISPPDWKSAPAGRILEFSILHLAMSEVAVLETRHPIVINEAVDLAKRFCDGSAPRIINGCLRTFVKDRATTSTPQALELKQEVSV

SEQ ID NO: 25869 - protein, 217 aa, Arabidopsis thaliana
  peptide (1)..(217): Ceres Seq. ID no. 12421246
MPKIDKSGRLSSPRAARELALVILYAACLEGSDPIRLFEKRINARREPGYEFDKSSLLEYNHMSFGGPPVKTETKEEEDELVRHDEKESKIEAEVLSAPPKLVYSKLVLRFAKKLLAAVVDKWDSHVVIIEKISPPDWKSAPAGRILEFSILHLAMSEVAVLETRHPIVINEAVDLAKRFCDGSAPRIINGCLRTFVKDRATTSTPQALELKQEVSV

SEQ ID NO: 25870 - protein, 155 aa, Arabidopsis thaliana
  peptide (1)..(155): Ceres Seq. ID no. 12421247
MSFGGPPVKTETKEEEDELVRHDEKESKIEAEVLSAPPKLVYSKLVLRFAKKLLAAVVDKWDSHVVIIEKISPPDWKSAPAGRILEFSILHLAMSEVAVLETRHPIVINEAVDLAKRFCDGSAPRIINGCLRTFVKDRATTSTPQALELKQEVSV

SEQ ID NO: 25871 - DNA, 1309 bp, Arabidopsis thaliana
  misc_feature (1)..(1309): Ceres Seq. ID no. 12324135
  misc_feature (1)..(1309): Ortholog of  Ceres SEQ ID NO 13598488 as cited in SEQ ID NO 63862
  misc_feature (1)..(1309): Ortholog of  Ceres SEQ ID NO 13659640 as cited in SEQ ID NO 67101
aaattacaatctctccttttgccaacaatcattgcttaaaaaacacataccttcttctttagttataaaaatgttgaaagaagagagtaatgagagtggtacttgggcacgagcatgtgacacttgtcgttcagccgcctgcactgtctactgtgaagccgactctgcctacttgtgcaccacctgtgatgctcgagttcacgcagccaaccgtgttgcttctcgccatgaacgtgttcgtgtctgtcagtcatgtgagtctgccccagctgcgtttttgtgtaaagcagacgctgcgtctctttgtacagcttgtgatgcagagattcattccgcaaacccactagctagacgtcatcagcgagttccgattcttccattatctgcaaactcttgcagctccatggccccaagtgagactgatgctgataacgatgaggatgatcgagaggttgcttcgtggttactccctaatccagggaaaaacatcggtaatcagaataatgggttcttgtttggtgttgagtaccttgatcttgtggattacagctccagcatggacaaccaattcgaagataatcagtacactcactaccagaggagctttggaggagatggagttgtgccgcttcaagttgaagaatcaacaagtcacctgcaacaaagccaacaaaactttcagttgggtatcaactatggattctcctcaggagctcactacaacaacaactccttaaaggacctaaaccatagcgcatccgtttcatcaatggacatcagtgttgtgccagagtcaactgcaagtgacataacagtccaacacccaagaactactaaagagacgatagaccaactatctggtcctcctactcaggtggtgcaacagcttactccaatggagagggaggctagggtcctgagatacagagagaagaagaagacaaggaaatttgacaagacaataagatatgcttcaagaaaggcatatgcagagataagaccacggatcaagggcagattcgcaaagaggatagaaactgaagctgaggctgaagaaatcttctcaacatcgctaatgtctgagactggatatggaattgtcccttccttctaaactcctatggcgaagatagactagattgcatgctgtaaattacttctagtttggatttctacaagttattactgcatatgggtccttagttttgtgacttttgtctaactagtacgagtttaatcagatatgttcctatagctgcagttgtttaagcaacatctcgctacataattgaattggtgaaatcttatc

SEQ ID NO: 25872 - protein, 370 aa, Arabidopsis thaliana
  peptide (1)..(370): Ceres Seq. ID no. 12324136
NYNLSFCQQSLLKKHIPSSLVIKMLKEESNESGTWARACDTCRSAACTVYCEADSAYLCTTCDARVHAANRVASRHERVRVCQSCESAPAAFLCKADAASLCTACDAEIHSANPLARRHQRVPILPLSANSCSSMAPSETDADNDEDDREVASWLLPNPGKNIGNQNNGFLFGVEYLDLVDYSSSMDNQFEDNQYTHYQRSFGGDGVVPLQVEESTSHLQQSQQNFQLGINYGFSSGAHYNNNSLKDLNHSASVSSMDISVVPESTASDITVQHPRTTKETIDQLSGPPTQVVQQLTPMEREARVLRYREKKKTRKFDKTIRYASRKAYAEIRPRIKGRFAKRIETEAEAEEIFSTSLMSETGYGIVPSF

SEQ ID NO: 25873 - protein, 347 aa, Arabidopsis thaliana
  peptide (1)..(347): Ceres Seq. ID no. 12324137
MLKEESNESGTWARACDTCRSAACTVYCEADSAYLCTTCDARVHAANRVASRHERVRVCQSCESAPAAFLCKADAASLCTACDAEIHSANPLARRHQRVPILPLSANSCSSMAPSETDADNDEDDREVASWLLPNPGKNIGNQNNGFLFGVEYLDLVDYSSSMDNQFEDNQYTHYQRSFGGDGVVPLQVEESTSHLQQSQQNFQLGINYGFSSGAHYNNNSLKDLNHSASVSSMDISVVPESTASDITVQHPRTTKETIDQLSGPPTQVVQQLTPMEREARVLRYREKKKTRKFDKTIRYASRKAYAEIRPRIKGRFAKRIETEAEAEEIFSTSLMSETGYGIVPSF

SEQ ID NO: 25874 - protein, 236 aa, Arabidopsis thaliana
  peptide (1)..(236): Ceres Seq. ID no. 12324138
MAPSETDADNDEDDREVASWLLPNPGKNIGNQNNGFLFGVEYLDLVDYSSSMDNQFEDNQYTHYQRSFGGDGVVPLQVEESTSHLQQSQQNFQLGINYGFSSGAHYNNNSLKDLNHSASVSSMDISVVPESTASDITVQHPRTTKETIDQLSGPPTQVVQQLTPMEREARVLRYREKKKTRKFDKTIRYASRKAYAEIRPRIKGRFAKRIETEAEAEEIFSTSLMSETGYGIVPSF

SEQ ID NO: 25875 - DNA, 1611 bp, Arabidopsis thaliana
  misc_feature (1)..(1611): Ceres Seq. ID no. 12422239
  misc_feature (1)..(1611): Ortholog of  Ceres SEQ ID NO 13638029 as cited in SEQ ID NO 58406
aacaaaatcaattctccaaattaaaatctcgtcttccccaattggtttagcgcgacaagagcatcaacgcaatggtgggaacatcaagctcctccgccggcgaccacacccacaccgtcgtgataaatgccctaactagtcggggctggtgcttcagagacgtcgaatacttgaaatccctggtcactgaaatctcttccttgatcggcggcggcaataaaacaggcgccatcgtggagtcagtggaggcggagctgcttaacatggatattaagttaatcggaggtaaatccctcccggacccgaccgagttacgcaggtgttctcatcttcaaggccccaaagttctccagataagttatgttagggatgttacaagaagtagcgcagaggaatttgtgggaagttccactggtaaacgagtgctaaaattcgctctgactgacgggaagaccgaaatatccgcgcttgagtactctcatataccaacgattaacaatgatgtcactcctggtactaaggtacgtctagaaaataaggctgtgatacgtgatggtctagtatgtttgactccaaaagaggtgactgtcttgggcggttatgtgcaatcactcactgaagaatggcagatgaagaaaaaatacgctagtttggctcgatctcaggaaagcaaagctggtgatggccctcctccatttgaggagttgaagattcgaacaggttcccatcaccgcgattacaacaagacgacttctagaaacaatgtacctattgctgcagaaagctctgtaaaacatgccggtggagaaaaaggtgaaagtagtgaagttgatgggaacaaaagaggcacaaataagaatatacagaggaatcctgcagattctgatccgaaaatatctgtcgaagttgaaaatcaggaaaagcgaagcagttccgatacacgacctaaacaagtggtggaagctgttcctttacagaaccaagcggctgcgcagatacttcttgagaagatgaaacattctagttcaaatgataggcaataccaaggaagaagaggtaggggtagaggtagaggtagagggagggggagagaagaagaagactctgcagtatttacactagatgagtgggaaaagaggaatactggtgggggggctcttccaacagctaaccatccaagcgacactacccgcgatgaagatcttgcatggcagcttcagaatcagtttgatctggaagactcttatgggcaggagatgcctggagccggggcagcggatatcagaatgaatatgtttgattacggaagaacagaagataacttcggccatggaaggggaagaggaggaggaagaggaaggggtagagggcgaggacatagacggggaagaggacgtgtgtagattgtaatgaaatcatccaggcttgtggtaattaaacaaaacttcatcatttacatctgtatatctttatgtatgttttagagtaaacatgtatcttattacatattttagagcattattactcatgtatgctttggttctcacaggtgtggcagctctgaatctgtacatgtttgttttagggtgattcagaatttcagattttcgc

SEQ ID NO: 25876 - protein, 443 aa, Arabidopsis thaliana
  peptide (1)..(443): Ceres Seq. ID no. 12422240
MVGTSSSSAGDHTHTVVINALTSRGWCFRDVEYLKSLVTEISSLIGGGNKTGAIVESVEAELLNMDIKLIGGKSLPDPTELRRCSHLQGPKVLQISYVRDVTRSSAEEFVGSSTGKRVLKFALTDGKTEISALEYSHIPTINNDVTPGTKVRLENKAVIRDGLVCLTPKEVTVLGGYVQSLTEEWQMKKKYASLARSQESKAGDGPPPFEELKIRTGSHHRDYNKTTSRNNVPIAAESSVKHAGGEKGESSEVDGNKRGTNKNIQRNPADSDPKISVEVENQEKRSSSDTRPKQVVEAVPLQNQAAAQILLEKMKHSSSNDRQYQGRRGRGRGRGRGRGREEEDSAVFTLDEWEKRNTGGGALPTANHPSDTTRDEDLAWQLQNQFDLEDSYGQEMPGAGAADIRMNMFDYGRTEDNFGHGRGRGGGRGRGRGRGHRRGRGRV

SEQ ID NO: 25877 - protein, 379 aa, Arabidopsis thaliana
  peptide (1)..(379): Ceres Seq. ID no. 12422241
MDIKLIGGKSLPDPTELRRCSHLQGPKVLQISYVRDVTRSSAEEFVGSSTGKRVLKFALTDGKTEISALEYSHIPTINNDVTPGTKVRLENKAVIRDGLVCLTPKEVTVLGGYVQSLTEEWQMKKKYASLARSQESKAGDGPPPFEELKIRTGSHHRDYNKTTSRNNVPIAAESSVKHAGGEKGESSEVDGNKRGTNKNIQRNPADSDPKISVEVENQEKRSSSDTRPKQVVEAVPLQNQAAAQILLEKMKHSSSNDRQYQGRRGRGRGRGRGRGREEEDSAVFTLDEWEKRNTGGGALPTANHPSDTTRDEDLAWQLQNQFDLEDSYGQEMPGAGAADIRMNMFDYGRTEDNFGHGRGRGGGRGRGRGRGHRRGRGRV

SEQ ID NO: 25878 - protein, 257 aa, Arabidopsis thaliana
  peptide (1)..(257): Ceres Seq. ID no. 12422242
MKKKYASLARSQESKAGDGPPPFEELKIRTGSHHRDYNKTTSRNNVPIAAESSVKHAGGEKGESSEVDGNKRGTNKNIQRNPADSDPKISVEVENQEKRSSSDTRPKQVVEAVPLQNQAAAQILLEKMKHSSSNDRQYQGRRGRGRGRGRGRGREEEDSAVFTLDEWEKRNTGGGALPTANHPSDTTRDEDLAWQLQNQFDLEDSYGQEMPGAGAADIRMNMFDYGRTEDNFGHGRGRGGGRGRGRGRGHRRGRGRV

SEQ ID NO: 25879 - DNA, 652 bp, Arabidopsis thaliana
  misc_feature (1)..(652): Ceres Seq. ID no. 12739011
  misc_feature (1)..(652): Ortholog of  Ceres SEQ ID NO 13596404 as cited in SEQ ID NO 61966
atttttcttttcatttcatttctgattgtctttctcagaatccctagaacacactctgattaacgaatcaaagatcgatttgggattgtgatcgatcgaggaagaagatgacggaggcgatgataaggaagaagccaggaatggcgagtgtgaaggatatgccgttgcttcaggatggtccaccaccgggtggattcgcaccggtccgatatgctcgccggatctctaacacgggtccaagcgccatggctattttccttaccgtttcaggtgcttttgcttgggggatgtaccaagtcggtcagggcaacaaaatccgcagggcgttgaaggaagagaaatacgctgctcgtagagcgattctaccaattcttcaagctgaagaagatgaaaggtttgtgtctgagtggaagaagtatctagaatacgaggcggatgtgatgaaggatgttcctggatggaaagtcggtgaaaacgtgtacaattctggtcgttggatgcctccagctactggagagcttcgtcctgatgtctggtaaattatcaatggctccttttgatgatgatgaatgaatgtttgtttaagcattttagaaccttgatgtttcttgtctctctttttccatcgtataataagagaattgatacatac

SEQ ID NO: 25880 - protein, 143 aa, Arabidopsis thaliana
  peptide (1)..(143): Ceres Seq. ID no. 12739012
MTEAMIRKKPGMASVKDMPLLQDGPPPGGFAPVRYARRISNTGPSAMAIFLTVSGAFAWGMYQVGQGNKIRRALKEEKYAARRAILPILQAEEDERFVSEWKKYLEYEADVMKDVPGWKVGENVYNSGRWMPPATGELRPDVW

SEQ ID NO: 25881 - protein, 139 aa, Arabidopsis thaliana
  peptide (1)..(139): Ceres Seq. ID no. 12739013
MIRKKPGMASVKDMPLLQDGPPPGGFAPVRYARRISNTGPSAMAIFLTVSGAFAWGMYQVGQGNKIRRALKEEKYAARRAILPILQAEEDERFVSEWKKYLEYEADVMKDVPGWKVGENVYNSGRWMPPATGELRPDVW

SEQ ID NO: 25882 - protein, 132 aa, Arabidopsis thaliana
  peptide (1)..(132): Ceres Seq. ID no. 12739014
MASVKDMPLLQDGPPPGGFAPVRYARRISNTGPSAMAIFLTVSGAFAWGMYQVGQGNKIRRALKEEKYAARRAILPILQAEEDERFVSEWKKYLEYEADVMKDVPGWKVGENVYNSGRWMPPATGELRPDVW

SEQ ID NO: 25883 - DNA, 513 bp, Arabidopsis thaliana
  misc_feature (1)..(513): Ceres Seq. ID no. 12338142
  misc_feature (1)..(513): Ortholog of  Ceres SEQ ID NO 14315110 as cited in SEQ ID NO 55462
ttctataccgatgaaaatggaagaatacgtaccagaacaaaccgatctggtggaattcagggagggatctcaaatggtgaaataataaacatgagagtagccttcaagccaacatcaacaattggaaggaagcagaatacggtaaccagagacaaggtagaaaccgaaatgattgcgcgtggtcgtcatgatccttgtgttgttcctcgagctgtgccaatggtggaagcaatggtggctttagttcttgtggatcaattgatggcgcaatacgcacaatgccatttgtttccaataaatccagagttgcaggaacctctccagatagagcagccccaaaatgctactgctttgtaagcaaaactcgagaagataagagtcagagacagtaaggcttcgcttttgttgtgtgattattattatgaataaaaaaaatgttaattttgtacccaccagagaaacaaaaaacatgatttttttgtaagaggatttgcttctatatcattattcagc

SEQ ID NO: 25884 - protein, 118 aa, Arabidopsis thaliana
  peptide (1)..(118): Ceres Seq. ID no. 12338143
FYTDENGRIRTRTNRSGGIQGGISNGEIINMRVAFKPTSTIGRKQNTVTRDKVETEMIARGRHDPCVVPRAVPMVEAMVALVLVDQLMAQYAQCHLFPINPELQEPLQIEQPQNATAL

SEQ ID NO: 25885 - protein, 88 aa, Arabidopsis thaliana
  peptide (1)..(88): Ceres Seq. ID no. 12338144
MRVAFKPTSTIGRKQNTVTRDKVETEMIARGRHDPCVVPRAVPMVEAMVALVLVDQLMAQYAQCHLFPINPELQEPLQIEQPQNATAL

SEQ ID NO: 25886 - protein, 62 aa, Arabidopsis thaliana
  peptide (1)..(62): Ceres Seq. ID no. 12338145
MIARGRHDPCVVPRAVPMVEAMVALVLVDQLMAQYAQCHLFPINPELQEPLQIEQPQNATAL

SEQ ID NO: 25887 - DNA, 880 bp, Arabidopsis thaliana
  misc_feature (1)..(880): Ceres Seq. ID no. 12323735
  misc_feature (1)..(880): Ortholog of  Ceres SEQ ID NO 12635883 as cited in SEQ ID NO 0
agttacatctacttgtctacttgtcgtttcttgtatagttggagtttatagtttgtcttaacgtacaagataatttgaaaggtagacgtagacgttggatacttctttggtaggctcttaagaatcttaggtgtatctctttagtttgaaggttagattcagaatctctgtagattcattagtagctttttctgtgtgatctttgtgttgtatatatatagatcgaattgattttagctggtgaaaggtgaagttgtggtatgaatatgaagaaacagattatggatgagtctgtaaagtcattgatgctgcctcctcctccaccgcttcttcctccatctcagggatatggatcaagaaagatcgatggagacagcataaccaataaacagatcaagaagttctggagacagaagcagatcattgaagaggatcatctctattctgctattaaggctgcagctcgtgtcagagctcgtaatctctctgatgaggactacaaacgctttgaagaaagcttggacatggaggacctggaaaccgaagatcatcagggattgaaagactggtggacaaagagcaaatacgcgtacttgaaccagccggctcttggatctgcagattcactgaagagaaagaggttttcgacttatacaccaaactgtttctcgttcaagccttgcaatcctctctacgcaacttcgctcaatgtcttttgaaccatgagcagcaaactctgcaagatcaatcgtcttgcatatatgtatatatttgttcgtgtgtgtctctgtacatgtcatgtgttattgcttctatattaatggatctggactttggtgtggttgttgatttgtaactgttgaataaaatctttctatgg

SEQ ID NO: 25888 - protein, 152 aa, Arabidopsis thaliana
  peptide (1)..(152): Ceres Seq. ID no. 12323736
MNMKKQIMDESVKSLMLPPPPPLLPPSQGYGSRKIDGDSITNKQIKKFWRQKQIIEEDHLYSAIKAAARVRARNLSDEDYKRFEESLDMEDLETEDHQGLKDWWTKSKYAYLNQPALGSADSLKRKRFSTYTPNCFSFKPCNPLYATSLNVF

SEQ ID NO: 25889 - protein, 150 aa, Arabidopsis thaliana
  peptide (1)..(150): Ceres Seq. ID no. 12323737
MKKQIMDESVKSLMLPPPPPLLPPSQGYGSRKIDGDSITNKQIKKFWRQKQIIEEDHLYSAIKAAARVRARNLSDEDYKRFEESLDMEDLETEDHQGLKDWWTKSKYAYLNQPALGSADSLKRKRFSTYTPNCFSFKPCNPLYATSLNVF

SEQ ID NO: 25890 - protein, 145 aa, Arabidopsis thaliana
  peptide (1)..(145): Ceres Seq. ID no. 12323738
MDESVKSLMLPPPPPLLPPSQGYGSRKIDGDSITNKQIKKFWRQKQIIEEDHLYSAIKAAARVRARNLSDEDYKRFEESLDMEDLETEDHQGLKDWWTKSKYAYLNQPALGSADSLKRKRFSTYTPNCFSFKPCNPLYATSLNVF

SEQ ID NO: 25891 - DNA, 949 bp, Arabidopsis thaliana
  misc_feature (1)..(949): Ceres Seq. ID no. 13487367
  misc_feature (1)..(949): Ortholog of  Ceres SEQ ID NO 13594809 as cited in SEQ ID NO 51847
  misc_feature (1)..(949): Ortholog of  Ceres SEQ ID NO 14309033 as cited in SEQ ID NO 0
aggggtgactctcgaacacgatgctctgaagactgaaaaaggcgtaaacttttttcacctggctagggttcttggtcgtcgttaactggcatctagtatggctttctgcactaaacttggcggtcactggaaacaaggggtaaatgttccagtgtcatcaatgctcggttctcttcgctacatgtccacaaaactttatattggtggcctgtcccctggaactgacgagcactccttgaaggacgctttctctagcttcaatggagtgacagaggcaagagtcatgacaaacaaagtgaccgggaggtctagaggttatggatttgttaacttcataagcgaggattctgccaactctgctatttcagcaatgaatggacaggagctgaatgggtttaacataagtgtgaacgttgcaaaagattggccaagtttgccattgtctttggatgagagtatagaagaagctgagaagaaagaaaataagatgatgagccgatctgtatggaaagatccattcgttgatgcgttcctgatgaagaagaagaatgcagctctgaacaggaaaatatggtcaaggagatcgacgattcttcccgagtatgttgattcggcggtgagaatctacaacggcaaaactcatgtgcgttgtaagatcacagaggggaaagttgggcataaattcggagagtttgcgtttacaagaaaagtgaagaagcatgctaaagcaaagtagcatctttgagaatgaattggtcagctgcttgaaaggattgtgttgaaaagccaaaaacgaatcaaatcaataaattctcaataggtaaaactcattagctcacatgatcatgtagacgaatattgagctttagaaagtctttagttttcttgtcgatttcgtatttttggaccacaaaagtgccaatgttattttggaattcgattaacaaat

SEQ ID NO: 25892 - protein, 212 aa, Arabidopsis thaliana
  peptide (1)..(212): Ceres Seq. ID no. 13487368
MAFCTKLGGHWKQGVNVPVSSMLGSLRYMSTKLYIGGLSPGTDEHSLKDAFSSFNGVTEARVMTNKVTGRSRGYGFVNFISEDSANSAISAMNGQELNGFNISVNVAKDWPSLPLSLDESIEEAEKKENKMMSRSVWKDPFVDAFLMKKKNAALNRKIWSRRSTILPEYVDSAVRIYNGKTHVRCKITEGKVGHKFGEFAFTRKVKKHAKAK

SEQ ID NO: 25893 - protein, 191 aa, Arabidopsis thaliana
  peptide (1)..(191): Ceres Seq. ID no. 13487369
MLGSLRYMSTKLYIGGLSPGTDEHSLKDAFSSFNGVTEARVMTNKVTGRSRGYGFVNFISEDSANSAISAMNGQELNGFNISVNVAKDWPSLPLSLDESIEEAEKKENKMMSRSVWKDPFVDAFLMKKKNAALNRKIWSRRSTILPEYVDSAVRIYNGKTHVRCKITEGKVGHKFGEFAFTRKVKKHAKAK

SEQ ID NO: 25894 - protein, 184 aa, Arabidopsis thaliana
  peptide (1)..(184): Ceres Seq. ID no. 13487370
MSTKLYIGGLSPGTDEHSLKDAFSSFNGVTEARVMTNKVTGRSRGYGFVNFISEDSANSAISAMNGQELNGFNISVNVAKDWPSLPLSLDESIEEAEKKENKMMSRSVWKDPFVDAFLMKKKNAALNRKIWSRRSTILPEYVDSAVRIYNGKTHVRCKITEGKVGHKFGEFAFTRKVKKHAKAK

SEQ ID NO: 25895 - DNA, 1584 bp, Arabidopsis thaliana
  misc_feature (1)..(1584): Ceres Seq. ID no. 13492397
  misc_feature (1)..(1584): Ortholog of  Ceres SEQ ID NO 13594345 as cited in SEQ ID NO 58043
  misc_feature (1)..(1584): Ortholog of  Ceres SEQ ID NO 13597574 as cited in SEQ ID NO 64677
  misc_feature (1)..(1584): Ortholog of  Ceres SEQ ID NO 13597678 as cited in SEQ ID NO 65375
  misc_feature (1)..(1584): Ortholog of  Ceres SEQ ID NO 13596180 as cited in SEQ ID NO 67941
  misc_feature (1)..(1584): Ortholog of  Ceres SEQ ID NO 13591190 as cited in SEQ ID NO 68044
cattgtcggcagtaaaactaaaaataaaaggagttccacttttcaatttttctccactccaaaaccagaaagaaagaaaaaaacatcaatcatgacaacaacaacaacgaagaagccgcacgttctggtgataccgtttccacaatccggtcacatggttccacatcttgacctcacgcatcagattcttctccgtggagccaccgtcactgtcctcgtcacacccaaaaactcttcctatctcgatgctctccgttctcttcactccccggaacacttcaaaaccctaatccttccttttccttctcacccttgtataccttccggtgtcgaatctctccagcaacttcctctcgaagctatagttcacatgtttgatgctctctctcgtctccacgaccctctcgttgactttctcagccgtcaaccaccgtcggatctccccgacgccatcctaggaagctcatttctcagcccttggattaacaaagtagctgatgctttctctattaagtccattagtttcttacccatcaatgctcattcgatctccgtcatgtgggctcaagaagatagaagcttcttcaacgatctcgagactgccacaacggaaagctacgggctcgtcatcaacagtttctacgacctcgagcctgagtttgtagaaactgttaaaacacgtttcctgaatcaccaccgtatatggaccgtcggaccgttgctcccctttaaagctggcgttgaccgtggcggacaaagctcaatcccgccggcgaaagtctcggcttggttagattcgtgccccgaggataactccgtcgtatacgtcggttttggaagccagatccggctcacggcggagcaaacagctgctttagcggcggcgttggagaaaagcagtgtgcgtttcatatgggcggtgagagacgcagctaagaaggtgaactccagcgataactccgttgaggaagatgtgatcccggcgggatttgaagagagagtgaaggagaaaggactcgtgataagaggatgggccccacaaactatgattcttgagcatcgagccgttggatcttacctaactcatttgggttggggttcggttctggaaggaatggtcggaggagttatgttgctagcgtggccgatgcaagcagaccatttctttaacacgacgctcatcgttgataaactaagagccgcagtgcgagttggagagaacagagactcggttcctgactcggacaagctcgctaggattttggctgagtcggcgagagaggacttgccggagagagttacgttgatgaagctgagggagaaagctatggaggccattaaagaaggtgggagctcttacaagaacttggatgagctcgttgcagagatgtgtttgtaataaatatcctcttctcttgctttttaagatttgtttgtttaagagagtcaataagcaaatggggtaagaaaattgttgtttattttccatttatttttctttcttaatttgatatgacaacgattaactcgatttagagttcgttagtcaatgttttctagtatgatgatggcaataatactaag

SEQ ID NO: 25896 - protein, 465 aa, Arabidopsis thaliana
  peptide (1)..(465): Ceres Seq. ID no. 13492398
IVGSKTKNKRSSTFQFFSTPKPERKKKTSIMTTTTTKKPHVLVIPFPQSGHMVPHLDLTHQILLRGATVTVLVTPKNSSYLDALRSLHSPEHFKTLILPFPSHPCIPSGVESLQQLPLEAIVHMFDALSRLHDPLVDFLSRQPPSDLPDAILGSSFLSPWINKVADAFSIKSISFLPINAHSISVMWAQEDRSFFNDLETATTESYGLVINSFYDLEPEFVETVKTRFLNHHRIWTVGPLLPFKAGVDRGGQSSIPPAKVSAWLDSCPEDNSVVYVGFGSQIRLTAEQTAALAAALEKSSVRFIWAVRDAAKKVNSSDNSVEEDVIPAGFEERVKEKGLVIRGWAPQTMILEHRAVGSYLTHLGWGSVLEGMVGGVMLLAWPMQADHFFNTTLIVDKLRAAVRVGENRDSVPDSDKLARILAESAREDLPERVTLMKLREKAMEAIKEGGSSYKNLDELVAEMCL

SEQ ID NO: 25897 - protein, 435 aa, Arabidopsis thaliana
  peptide (1)..(435): Ceres Seq. ID no. 13492399
MTTTTTKKPHVLVIPFPQSGHMVPHLDLTHQILLRGATVTVLVTPKNSSYLDALRSLHSPEHFKTLILPFPSHPCIPSGVESLQQLPLEAIVHMFDALSRLHDPLVDFLSRQPPSDLPDAILGSSFLSPWINKVADAFSIKSISFLPINAHSISVMWAQEDRSFFNDLETATTESYGLVINSFYDLEPEFVETVKTRFLNHHRIWTVGPLLPFKAGVDRGGQSSIPPAKVSAWLDSCPEDNSVVYVGFGSQIRLTAEQTAALAAALEKSSVRFIWAVRDAAKKVNSSDNSVEEDVIPAGFEERVKEKGLVIRGWAPQTMILEHRAVGSYLTHLGWGSVLEGMVGGVMLLAWPMQADHFFNTTLIVDKLRAAVRVGENRDSVPDSDKLARILAESAREDLPERVTLMKLREKAMEAIKEGGSSYKNLDELVAEMCL

SEQ ID NO: 25898 - protein, 414 aa, Arabidopsis thaliana
  peptide (1)..(414): Ceres Seq. ID no. 13492400
MVPHLDLTHQILLRGATVTVLVTPKNSSYLDALRSLHSPEHFKTLILPFPSHPCIPSGVESLQQLPLEAIVHMFDALSRLHDPLVDFLSRQPPSDLPDAILGSSFLSPWINKVADAFSIKSISFLPINAHSISVMWAQEDRSFFNDLETATTESYGLVINSFYDLEPEFVETVKTRFLNHHRIWTVGPLLPFKAGVDRGGQSSIPPAKVSAWLDSCPEDNSVVYVGFGSQIRLTAEQTAALAAALEKSSVRFIWAVRDAAKKVNSSDNSVEEDVIPAGFEERVKEKGLVIRGWAPQTMILEHRAVGSYLTHLGWGSVLEGMVGGVMLLAWPMQADHFFNTTLIVDKLRAAVRVGENRDSVPDSDKLARILAESAREDLPERVTLMKLREKAMEAIKEGGSSYKNLDELVAEMCL

SEQ ID NO: 25899 - DNA, 1758 bp, Arabidopsis thaliana
  misc_feature (1)..(1758): Ceres Seq. ID no. 13490176
  misc_feature (1)..(1758): Ortholog of  Ceres SEQ ID NO 15176262 as cited in SEQ ID NO 54751
  misc_feature (1)..(1758): Ortholog of  Ceres SEQ ID NO 13656177 as cited in SEQ ID NO 64997
tggtctccgacttcaaacataacacaaatcgttcatcgtcttccttctctctctctgattctctcattcgcgaatttcaaagctatggcggatacggtagagaaagttcccaccgttgttgagtcatcttcatcatccaccgttgaagcatctaatagcgccgagaagactgagcccacgacggagaagaaaaagtggggcgatgttgaagatgatgatgatgaagaagaagctgtatcggagcttaattcattgagcattaaggaagaagagaaacctgattctattcttgaggaacctgaagattctaacatcaaagctgttacttctggtgacacaccatatacatcagcaagtagatttgaagacttgaacttgtcacctgaattgatgaaaggcttgtacgttgagatgaaattcgaaaagcctagcaagatccaagctattagtttgcctatgataatgacgccgccacacaagcatctgattgcccaggctcataacggatctggaaagacgacttgtttcgttcttggaatgttgagtcgtgttgatcccacattgagagagcctcaagctctctgtatttgtcccactagagaattagctaatcagaatatggaagttcttcagaagatggggaagtttactgggatcactgctgagttggctgtgcctgactcaacgagaggtgcaccggcggcaacaagaggagctcctgtttctgctcatgttgtgattggcacccctggaacgcttaagaaatggatggcatttaagagactaggtctaaatcatttgaagattctggtttttgatgaggctgaccatatgcttgctacggatgggtttagggatgattccttgaagataatgaaagacattgggagagttaatcccaatttccaggttcttcttttctcggcaacttttaacgaaactgtcaaagattttgttgcgcggacagtcaaagatcccaaccaattgtttgtcaaaagagaggatctggctttggactcggtgaagcagtataaagttgtttgcccgaaggagcaaaacaagatcgaagtcatcaaggatcagattatggagcttggggatattgggcaaaccattatctttgtgaaaacaaaagcgtctgctcaaaaggtgcacaaagcccttgcggaaatgggatatgacgttaccagtgtccatggtaatctgactgaatcggacagggataagatagttaaagagtttaaagaatgccttactcaagtgctcattgctaccgatgtcattgcaagaggttttgaccaacagcgggtgaatttggttgtcaattataatcttcccactaaatatgaaactggagagccagattatgaggtgtaccttcacagggttgggagagctggccggtttggtcgcaaaggagcggttttcaacttgctgcttgatgatggctgggataaagaggtgatggagaagatcgagaagtattttgaagcaaatgttaaggagatcaagtcgtggaactcagaggaagagtataagagtgcattaaaggaagctggcctgctggacgagtgaggaagagagacagcatgtgttcaaaccatcttaaaagactatgtcgtctgttttcttgagattgttttaagaaagaaacttgtatacctctttgaggttttcttgtaatctttttatctgattgctgagagtttcagactttgtagattttttgttaagggaaaaggaaaacattttttatgt

SEQ ID NO: 25900 - protein, 524 aa, Arabidopsis thaliana
  peptide (1)..(524): Ceres Seq. ID no. 13490177
WSPTSNITQIVHRLPSLSLILSFANFKAMADTVEKVPTVVESSSSSTVEASNSAEKTEPTTEKKKWGDVEDDDDEEEAVSELNSLSIKEEEKPDSILEEPEDSNIKAVTSGDTPYTSASRFEDLNLSPELMKGLYVEMKFEKPSKIQAISLPMIMTPPHKHLIAQAHNGSGKTTCFVLGMLSRVDPTLREPQALCICPTRELANQNMEVLQKMGKFTGITAELAVPDSTRGAPAATRGAPVSAHVVIGTPGTLKKWMAFKRLGLNHLKILVFDEADHMLATDGFRDDSLKIMKDIGRVNPNFQVLLFSATFNETVKDFVARTVKDPNQLFVKREDLALDSVKQYKVVCPKEQNKIEVIKDQIMELGDIGQTIIFVKTKASAQKVHKALAEMGYDVTSVHGNLTESDRDKIVKEFKECLTQVLIATDVIARGFDQQRVNLVVNYNLPTKYETGEPDYEVYLHRVGRAGRFGRKGAVFNLLLDDGWDKEVMEKIEKYFEANVKEIKSWNSEEEYKSALKEAGLLDE

SEQ ID NO: 25901 - protein, 496 aa, Arabidopsis thaliana
  peptide (1)..(496): Ceres Seq. ID no. 13490178
MADTVEKVPTVVESSSSSTVEASNSAEKTEPTTEKKKWGDVEDDDDEEEAVSELNSLSIKEEEKPDSILEEPEDSNIKAVTSGDTPYTSASRFEDLNLSPELMKGLYVEMKFEKPSKIQAISLPMIMTPPHKHLIAQAHNGSGKTTCFVLGMLSRVDPTLREPQALCICPTRELANQNMEVLQKMGKFTGITAELAVPDSTRGAPAATRGAPVSAHVVIGTPGTLKKWMAFKRLGLNHLKILVFDEADHMLATDGFRDDSLKIMKDIGRVNPNFQVLLFSATFNETVKDFVARTVKDPNQLFVKREDLALDSVKQYKVVCPKEQNKIEVIKDQIMELGDIGQTIIFVKTKASAQKVHKALAEMGYDVTSVHGNLTESDRDKIVKEFKECLTQVLIATDVIARGFDQQRVNLVVNYNLPTKYETGEPDYEVYLHRVGRAGRFGRKGAVFNLLLDDGWDKEVMEKIEKYFEANVKEIKSWNSEEEYKSALKEAGLLDE

SEQ ID NO: 25902 - protein, 394 aa, Arabidopsis thaliana
  peptide (1)..(394): Ceres Seq. ID no. 13490179
MKGLYVEMKFEKPSKIQAISLPMIMTPPHKHLIAQAHNGSGKTTCFVLGMLSRVDPTLREPQALCICPTRELANQNMEVLQKMGKFTGITAELAVPDSTRGAPAATRGAPVSAHVVIGTPGTLKKWMAFKRLGLNHLKILVFDEADHMLATDGFRDDSLKIMKDIGRVNPNFQVLLFSATFNETVKDFVARTVKDPNQLFVKREDLALDSVKQYKVVCPKEQNKIEVIKDQIMELGDIGQTIIFVKTKASAQKVHKALAEMGYDVTSVHGNLTESDRDKIVKEFKECLTQVLIATDVIARGFDQQRVNLVVNYNLPTKYETGEPDYEVYLHRVGRAGRFGRKGAVFNLLLDDGWDKEVMEKIEKYFEANVKEIKSWNSEEEYKSALKEAGLLDE

SEQ ID NO: 25903 - DNA, 1455 bp, Arabidopsis thaliana
  misc_feature (1)..(1455): Ceres Seq. ID no. 12323827
  misc_feature (1)..(1455): Ortholog of  Ceres SEQ ID NO 13664362 as cited in SEQ ID NO 66523
aagattctcgttggcttcagacattttccatcttctaggtttctttctttctcagcaatttccaggaaaatggaagtgaaagctagagctcctgggaagatcatacttgcaggggaacacgctgttgttcatggatccaccgctgtagctgccgccattgatctctacacttacgttactctccgctttcctcttccatcagctgagaacaatgataggcttacacttcagctcaaggacatttccttggagttttcatggtccttagccagaatcaaagaagcgattccttatgattcaagcactctctgccgttctacgccggcttcatgttcagaggagacccttaaatcaattgcagttttggttgaagagcaaaatcttccaaaggaaaagatgtggctctcctctgggatctccacgtttctctggttatacaccagaattatagggttcaatccggctacagtagtcattaactctgagcttccatacgggtctggcctcggttcatcagcagctttatgtgtagctctcacagctgctctccttgcttcttctatttcagagaaaacccgtggtaacggttggtcatctctcgatgaaaccaatcttgagttgctaaataaatgggctttcgaaggcgaaaagatcatccatgggaaaccttctgggatagacaacaccgtcagtgcatacggcaacatgatcaagttctgctcaggcgagataactcggttacaatccaacatgcctctgagaatgctaattaccaacactagagttgggcgaaacacaaaagctctggtctctggtgtgtcacagagagcggtaagacatcctgatgcgatgaagtcagtgttcaacgccgtggattctataagcaaagagctcgctgcgatcattcagtctaaagacgagacctcagttacagaaaaagaagagagaataaaagaactcatggagatgaaccaaggtctgctcctgtcaatgggggttagccacagctcaatcgaggctgtgattctaaccacggtcaagcacaagcttgtctccaaacttacaggagctggtggcggcggctgcgtcctcactctattaccaaccgggacggtggtggacaaagtggtggaggagctcgagtccagcggttttcagtgtttcacggcattgattggtggtaacggagctcagatttgctattgatcaggtcggaaaaatcatatttggcctctcaccattcttaaacttgctgacgtgtacgtcaagaaggctgcaattagaaattcaaagagtcgattttttcttataaatgatgtgttgaatgtaaaattgctttattattataccatgtgacaaataattgaaaaaagcaaagattgtttagtttttttttttgtattttgaaattgttatgtttcatgatgggaaatataaaatgacaaagtttttact

SEQ ID NO: 25904 - protein, 401 aa, Arabidopsis thaliana
  peptide (1)..(401): Ceres Seq. ID no. 12323828
KILVGFRHFPSSRFLSFSAISRKMEVKARAPGKIILAGEHAVVHGSTAVAAAIDLYTYVTLRFPLPSAENNDRLTLQLKDISLEFSWSLARIKEAIPYDSSTLCRSTPASCSEETLKSIAVLVEEQNLPKEKMWLSSGISTFLWLYTRIIGFNPATVVINSELPYGSGLGSSAALCVALTAALLASSISEKTRGNGWSSLDETNLELLNKWAFEGEKIIHGKPSGIDNTVSAYGNMIKFCSGEITRLQSNMPLRMLITNTRVGRNTKALVSGVSQRAVRHPDAMKSVFNAVDSISKELAAIIQSKDETSVTEKEERIKELMEMNQGLLLSMGVSHSSIEAVILTTVKHKLVSKLTGAGGGGCVLTLLPTGTVVDKVVEELESSGFQCFTALIGGNGAQICY

SEQ ID NO: 25905 - protein, 378 aa, Arabidopsis thaliana
  peptide (1)..(378): Ceres Seq. ID no. 12323829
MEVKARAPGKIILAGEHAVVHGSTAVAAAIDLYTYVTLRFPLPSAENNDRLTLQLKDISLEFSWSLARIKEAIPYDSSTLCRSTPASCSEETLKSIAVLVEEQNLPKEKMWLSSGISTFLWLYTRIIGFNPATVVINSELPYGSGLGSSAALCVALTAALLASSISEKTRGNGWSSLDETNLELLNKWAFEGEKIIHGKPSGIDNTVSAYGNMIKFCSGEITRLQSNMPLRMLITNTRVGRNTKALVSGVSQRAVRHPDAMKSVFNAVDSISKELAAIIQSKDETSVTEKEERIKELMEMNQGLLLSMGVSHSSIEAVILTTVKHKLVSKLTGAGGGGCVLTLLPTGTVVDKVVEELESSGFQCFTALIGGNGAQICY

SEQ ID NO: 25906 - protein, 269 aa, Arabidopsis thaliana
  peptide (1)..(269): Ceres Seq. ID no. 12323830
MWLSSGISTFLWLYTRIIGFNPATVVINSELPYGSGLGSSAALCVALTAALLASSISEKTRGNGWSSLDETNLELLNKWAFEGEKIIHGKPSGIDNTVSAYGNMIKFCSGEITRLQSNMPLRMLITNTRVGRNTKALVSGVSQRAVRHPDAMKSVFNAVDSISKELAAIIQSKDETSVTEKEERIKELMEMNQGLLLSMGVSHSSIEAVILTTVKHKLVSKLTGAGGGGCVLTLLPTGTVVDKVVEELESSGFQCFTALIGGNGAQICY

SEQ ID NO: 25907 - DNA, 1336 bp, Arabidopsis thaliana
  misc_feature (1)..(1336): Ceres Seq. ID no. 13493941
  misc_feature (1)..(1336): Ortholog of  Ceres SEQ ID NO 14303116 as cited in SEQ ID NO 57665
gctcagaaacatttctgtctctgtggagacagctgaagaagcagcagcactatcaatggcgtctctgagattgttctcaacgaatcatcaatctcttctccttccatcatctctctcacaaaagcctctaatatcttcaccaagattcgtcaataaccctagcagacggagtccaatacgatccgttcttcaatttaatcgcaaaccggaactcgccggagaaacgccgcgtatcgtcgttatcacctccggaaaaggcggtgttggaaagacgacaaccaccgcaaatgtcggtctctctctcgctcgttacggtttctcagttgtcgccattgacgccgaccttggtctccgtaacctcgatctcctcctagggttagagaatcgagtcaattacacttgcgtcgaggttataaacggagattgtcgtctcgatcaagctctggtacgtgataagcgttggtcgaatttcgaattgctatgtatatctaaacctagatcgaaacttccgatgggatttggtggtaaagcattggaatggcttgtggatgcgttgaaaactagaccggaaggttcaccggatttcatcatcatcgattgtcctgcaggaatcgatgccggattcataaccgccattactccggcgaatgaagcagttctggtaacaactccggatataacagcgttaagggatgctgatagggttacgggtttgttagaatgcgatggaatcagagatataaagatgattgtgaacagagtgagaactgatatgattaaaggagaggatatgatgtcagtgttagatgtgcaggagatgttgggattgtcattgcttggtgtaattcctgaagattctgaggttattcgaagcacgaatcgagggtttccgcttgttctgaataagcctcctacgcttgcgggattggcgtttgagcaggcggcttggagactcgttgagcaagatagtatgaaggctgttatggtggaggaagaacctaagaaacgtggcttcttctctttctttggcggctaaatggcaaacggatcgaacggtactgaactgaactgaaacttcttcctcgggtatgtatgcattgaaatcttttgtacaggagctagagatttttgaagattttgtctcttttgctttgagaatttagatttgttcctaggacaatgtggaattctactgctagtttgttgctgagttcaagctctgattcttatgccttttgttcttgaggttcttgatttctgtttctgtaatctgtttatgttaaaattgagagtttccaatatatctcaagttcttatgtcaaatcgttatgatgag

SEQ ID NO: 25908 - protein, 344 aa, Arabidopsis thaliana
  peptide (1)..(344): Ceres Seq. ID no. 13493942
LRNISVSVETAEEAAALSMASLRLFSTNHQSLLLPSSLSQKPLISSPRFVNNPSRRSPIRSVLQFNRKPELAGETPRIVVITSGKGGVGKTTTTANVGLSLARYGFSVVAIDADLGLRNLDLLLGLENRVNYTCVEVINGDCRLDQALVRDKRWSNFELLCISKPRSKLPMGFGGKALEWLVDALKTRPEGSPDFIIIDCPAGIDAGFITAITPANEAVLVTTPDITALRDADRVTGLLECDGIRDIKMIVNRVRTDMIKGEDMMSVLDVQEMLGLSLLGVIPEDSEVIRSTNRGFPLVLNKPPTLAGLAFEQAAWRLVEQDSMKAVMVEEEPKKRGFFSFFGG

SEQ ID NO: 25909 - protein, 326 aa, Arabidopsis thaliana
  peptide (1)..(326): Ceres Seq. ID no. 13493943
MASLRLFSTNHQSLLLPSSLSQKPLISSPRFVNNPSRRSPIRSVLQFNRKPELAGETPRIVVITSGKGGVGKTTTTANVGLSLARYGFSVVAIDADLGLRNLDLLLGLENRVNYTCVEVINGDCRLDQALVRDKRWSNFELLCISKPRSKLPMGFGGKALEWLVDALKTRPEGSPDFIIIDCPAGIDAGFITAITPANEAVLVTTPDITALRDADRVTGLLECDGIRDIKMIVNRVRTDMIKGEDMMSVLDVQEMLGLSLLGVIPEDSEVIRSTNRGFPLVLNKPPTLAGLAFEQAAWRLVEQDSMKAVMVEEEPKKRGFFSFFGG

SEQ ID NO: 25910 - protein, 174 aa, Arabidopsis thaliana
  peptide (1)..(174): Ceres Seq. ID no. 13493944
MGFGGKALEWLVDALKTRPEGSPDFIIIDCPAGIDAGFITAITPANEAVLVTTPDITALRDADRVTGLLECDGIRDIKMIVNRVRTDMIKGEDMMSVLDVQEMLGLSLLGVIPEDSEVIRSTNRGFPLVLNKPPTLAGLAFEQAAWRLVEQDSMKAVMVEEEPKKRGFFSFFGG

SEQ ID NO: 25911 - DNA, 778 bp, Arabidopsis thaliana
  misc_feature (1)..(778): Ceres Seq. ID no. 12602659
  misc_feature (1)..(778): Ortholog of  Ceres SEQ ID NO 15227150 as cited in SEQ ID NO 59837
acgttcctcatcttccaaaaaaccctaaaagctcatttcgcagctgcctccttttcgtttgccactttttgatcaagcgaaactccaaaacacagagccatgccgccgaagttggacccgagccagatcgtcgatgtgtacgtccgtgtaaccggaggagaagtgggagccgccagttctctagctccaaagatcggtcctctcggtctcgcaccaaagaagatcggagaagacatcgcgaaagagacggccaaagaatggaaaggacttcgtgtcaccgtgaagctgacggttcagaatcgtcaagctaaggtaaccgtggttccatctgctgcagctctcgtcatcaaggcgttgaaggagccagagagagaccgtaagaaggtgaagaacattaagcataacggtaacatctctttcgatgatgtgactgagattgctaggattatgaggcctagatctattgctaaggagctgagtgggactgtgagggagattcttggaacgtgtgtctctgtgggatgcactgttgatgggaaagaccctaaggatcttcagcaggagattcaagaaggtgagattgagattcctgagaattaaggaacaatggagtttttttttcttcttatgggaatttgaaatgcttctgttgttatctttctcgttttaccatattttgtttttgtttgggaacttagctgctatgatgtttcacttagaatgactctcaagttttggattcttattattctctgtttcaaaaccccaatggttctcc

SEQ ID NO: 25912 - protein, 166 aa, Arabidopsis thaliana
  peptide (1)..(166): Ceres Seq. ID no. 12602660
MPPKLDPSQIVDVYVRVTGGEVGAASSLAPKIGPLGLAPKKIGEDIAKETAKEWKGLRVTVKLTVQNRQAKVTVVPSAAALVIKALKEPERDRKKVKNIKHNGNISFDDVTEIARIMRPRSIAKELSGTVREILGTCVSVGCTVDGKDPKDLQQEIQEGEIEIPEN

SEQ ID NO: 25913 - protein, 102 aa, Arabidopsis thaliana
  peptide (1)..(102): Ceres Seq. ID no. 12602661
VPHLPKNPKSSFRSCLLFVCHFLIKRNSKTQSHAAEVGPEPDRRCVRPCNRRRSGSRQFSSSKDRSSRSRTKEDRRRHRERDGQRMERTSCHREADGSESSS

SEQ ID NO: 25914 - DNA, 1022 bp, Arabidopsis thaliana
  misc_feature (1)..(1022): Ceres Seq. ID no. 12327118
  misc_feature (1)..(1022): Ortholog of  Ceres SEQ ID NO 15170807 as cited in SEQ ID NO 52723
  misc_feature (1)..(1022): Ortholog of  Ceres SEQ ID NO 12611846 as cited in SEQ ID NO 59904
  misc_feature (1)..(1022): Ortholog of  Ceres SEQ ID NO 14303535 as cited in SEQ ID NO 68728
  misc_feature (1)..(1022): Ortholog of  Ceres SEQ ID NO 12635196 as cited in SEQ ID NO 0
  misc_feature (1)..(1022): Ortholog of  Ceres SEQ ID NO 15179463 as cited in SEQ ID NO 0
atcatcatcaccatctcttacaacaaatctcaggcggctcaacactatcctcttctacattttccaacgatggcctcaaacgcactctcgtctttcaccgccgctaatcccgctctgtctcctaagccactactccctcacggctctgcttctccgtcggtttctctcggcttctccaggaaagttggcggcggcagagcagtggtcgttgcagcggctacggtggacacaaacaacatgccgatgaccggagtcgtgttccagcctttcgaagaggtgaagaaagccgatctggccattccaatcacatctcatgcctctctcgctcgccagaggtttgccgacgctagcgaggcagtcattaatgagcaaatcaatgtggaatacaacgtctcctatgtgtaccattcaatgtacgcatactttgacagagacaacgttgctatgaagggactagccaaatttttcaaggaatcaagtgaggaagagagagggcatgctgagaagtttatggagtaccagaaccaaagaggaggaagagtgaaactccaccctatcgtctcacctatctcagaattcgaacatgctgaaaaaggagatgctttatatgcaatggagttggctctgtctctagagaaactcactaatgagaagcttctaaacgttcacaaagtggcctcagagaacaatgatccccagttagctgatttcgttgagagtgaatttctgggagagcagattgaagcaatcaagaagatctcagactacatcacccagctaaggatgatcggcaaaggccacggagtttggcatttcgaccagatgcttctgaactagacttggacctctataagttcactttcagatgaccaatgttggggttaaaacagaagaacccgaagattctgtaaaagctttagattgaacattatggactaataagattgtagtagtaagctttgtgttcaagatggtttttgtaataacttcgtaagcttaatcaatgaagtttttgttttagt

SEQ ID NO: 25915 - protein, 278 aa, Arabidopsis thaliana
  peptide (1)..(278): Ceres Seq. ID no. 12327119
IIITISYNKSQAAQHYPLLHFPTMASNALSSFTAANPALSPKPLLPHGSASPSVSLGFSRKVGGGRAVVVAAATVDTNNMPMTGVVFQPFEEVKKADLAIPITSHASLARQRFADASEAVINEQINVEYNVSYVYHSMYAYFDRDNVAMKGLAKFFKESSEEERGHAEKFMEYQNQRGGRVKLHPIVSPISEFEHAEKGDALYAMELALSLEKLTNEKLLNVHKVASENNDPQLADFVESEFLGEQIEAIKKISDYITQLRMIGKGHGVWHFDQMLLN

SEQ ID NO: 25916 - protein, 255 aa, Arabidopsis thaliana
  peptide (1)..(255): Ceres Seq. ID no. 12327120
MASNALSSFTAANPALSPKPLLPHGSASPSVSLGFSRKVGGGRAVVVAAATVDTNNMPMTGVVFQPFEEVKKADLAIPITSHASLARQRFADASEAVINEQINVEYNVSYVYHSMYAYFDRDNVAMKGLAKFFKESSEEERGHAEKFMEYQNQRGGRVKLHPIVSPISEFEHAEKGDALYAMELALSLEKLTNEKLLNVHKVASENNDPQLADFVESEFLGEQIEAIKKISDYITQLRMIGKGHGVWHFDQMLLN

SEQ ID NO: 25917 - protein, 199 aa, Arabidopsis thaliana
  peptide (1)..(199): Ceres Seq. ID no. 12327121
MPMTGVVFQPFEEVKKADLAIPITSHASLARQRFADASEAVINEQINVEYNVSYVYHSMYAYFDRDNVAMKGLAKFFKESSEEERGHAEKFMEYQNQRGGRVKLHPIVSPISEFEHAEKGDALYAMELALSLEKLTNEKLLNVHKVASENNDPQLADFVESEFLGEQIEAIKKISDYITQLRMIGKGHGVWHFDQMLLN

SEQ ID NO: 25918 - DNA, 664 bp, Arabidopsis thaliana
  misc_feature (1)..(664): Ceres Seq. ID no. 13489721
  misc_feature (1)..(664): Ortholog of  Ceres SEQ ID NO 15180374 as cited in SEQ ID NO 0
gcgactctcctctctgtttcgtttttttttcctttcattcttcttatctcctcacactcttcgaacaaggaggaaccctaatctcaagatgaatagggaaaagttgatgaagatggctaacaccgtccgcactggcggaaagggtacagtcagaagaaagaagaaggctgtgcacaagaccaatacaactgatgacaagaggctccagagcacacttaagagaattggagttaactccattcccgctattgaagaagttaacatctttaaggatgatgttgttattcagttcatcaaccctaaggttcaagcttcaattgctgcaaacacatgggttgttagcggttctcctcagaccaaaaaattgcaagatatccttcctcagatcatcagccaacttggaccagacaacatggacaacctgaagaagctagcagagcagttccagaaacaggcttctggtgaaggtaatgccgcctcagcaaccattcaagaagaggatgatgacgatgtcccagagcttgttggagagacattcgaaactgctgctgaagagaaagcaccagctgctgctgcttcttcttagagagaaaagagcgagaccacatcgaaaaaaaaaaaaccgcactttgatttttacatatctttataatatgtttgttcg

SEQ ID NO: 25919 - protein, 194 aa, Arabidopsis thaliana
  peptide (1)..(194): Ceres Seq. ID no. 13489722
RLSSLFRFFFLSFFLSPHTLRTRRNPNLKMNREKLMKMANTVRTGGKGTVRRKKKAVHKTNTTDDKRLQSTLKRIGVNSIPAIEEVNIFKDDVVIQFINPKVQASIAANTWVVSGSPQTKKLQDILPQIISQLGPDNMDNLKKLAEQFQKQASGEGNAASATIQEEDDDDVPELVGETFETAAEEKAPAAAASS

SEQ ID NO: 25920 - protein, 165 aa, Arabidopsis thaliana
  peptide (1)..(165): Ceres Seq. ID no. 13489723
MNREKLMKMANTVRTGGKGTVRRKKKAVHKTNTTDDKRLQSTLKRIGVNSIPAIEEVNIFKDDVVIQFINPKVQASIAANTWVVSGSPQTKKLQDILPQIISQLGPDNMDNLKKLAEQFQKQASGEGNAASATIQEEDDDDVPELVGETFETAAEEKAPAAAASS

SEQ ID NO: 25921 - protein, 159 aa, Arabidopsis thaliana
  peptide (1)..(159): Ceres Seq. ID no. 13489724
MKMANTVRTGGKGTVRRKKKAVHKTNTTDDKRLQSTLKRIGVNSIPAIEEVNIFKDDVVIQFINPKVQASIAANTWVVSGSPQTKKLQDILPQIISQLGPDNMDNLKKLAEQFQKQASGEGNAASATIQEEDDDDVPELVGETFETAAEEKAPAAAASS

SEQ ID NO: 25922 - DNA, 1373 bp, Arabidopsis thaliana
  misc_feature (1)..(1373): Ceres Seq. ID no. 12384973
  misc_feature (1)..(1373): Ortholog of  Ceres SEQ ID NO 13596816 as cited in SEQ ID NO 62287
aaaaggaaaaaagaaaaagaagaagaggagctaaaaaaacgacgtcgtagaaggagattcttgccatggccacacatagtctctccttcttcttcagagttcttctcctcctctttcttactctctcagagagaattaaagggcaaggtgtgggaatcaactacggccaaatagcaaacaacctcccatctccggcaagagtcgccgtgctccttcgatcactaaacatcacaagagtaaaactctacgacgcagatccaaacgtcctcttctccttctcaaactcacaagtagatttcatgatcggtttaggcaacgagtatcttcaaaacatgtcaacagatccaaccaaagctcaagattggttacaacaaagacttgaaccacatatctcaaaaacacgaataacctcaatagttgtcggcaacgaaatcttcaaaaccaatgatcatgtcctcatccaaagcctattaccggctatgaaatcggtttacgctgctttaaccaatcttggtttagagaaacaagtaaccgtaacttcagctcattctttagacattctttcaacatcttatcctccttcttcaggatcattcaaagaagagtttattcaatatcttcaaccacttcttgattttcattctcaaatcgaatcacctttcttgataaatgcttatcccttttttgcttataaagatagtcctaaagaagttccattagagtatgttttgtttcaacctaatcaaggtatggttgatccaaacactaatcttcattatgacaacatgttgtttgctcaagttgatgcgctttactctgccattaagactttgggacataccgatatcgaggttcggatatcggaaaccggttggccttctaaaggagatgagaatgagattggagcttcgccggagaacgcggctttgtataatgggaatttgttgaagttgattcagcagaggaaaggaactccggcgaagcaatctgttcctattgatgtttatgtgtttgctctgtttaatgagaatcttaaaccgggtccggtttctgagaggaattatggacttttttatccggatggtaaaccggtttacaatgtcggtatgcaaggttatttacctgatattatctatacttcaagggcaactacaattaagattttgaatttgtggagagtcgtgatgggtttggctgtggcttggttcatactcgatatgggcgacaagatgaggatgagataagcttcgcttgtgtctttgtctgtccttgtaggatttttgttttaatatgttagttgattataggtgaggtatacaattctttgtcatgtattggattcacaaaaattaaaaaaattaatttattccttg

SEQ ID NO: 25923 - protein, 392 aa, Arabidopsis thaliana
  peptide (1)..(392): Ceres Seq. ID no. 12384974
MATHSLSFFFRVLLLLFLTLSERIKGQGVGINYGQIANNLPSPARVAVLLRSLNITRVKLYDADPNVLFSFSNSQVDFMIGLGNEYLQNMSTDPTKAQDWLQQRLEPHISKTRITSIVVGNEIFKTNDHVLIQSLLPAMKSVYAALTNLGLEKQVTVTSAHSLDILSTSYPPSSGSFKEEFIQYLQPLLDFHSQIESPFLINAYPFFAYKDSPKEVPLEYVLFQPNQGMVDPNTNLHYDNMLFAQVDALYSAIKTLGHTDIEVRISETGWPSKGDENEIGASPENAALYNGNLLKLIQQRKGTPAKQSVPIDVYVFALFNENLKPGPVSERNYGLFYPDGKPVYNVGMQGYLPDIIYTSRATTIKILNLWRVVMGLAVAWFILDMGDKMRMR

SEQ ID NO: 25924 - protein, 314 aa, Arabidopsis thaliana
  peptide (1)..(314): Ceres Seq. ID no. 12384975
MIGLGNEYLQNMSTDPTKAQDWLQQRLEPHISKTRITSIVVGNEIFKTNDHVLIQSLLPAMKSVYAALTNLGLEKQVTVTSAHSLDILSTSYPPSSGSFKEEFIQYLQPLLDFHSQIESPFLINAYPFFAYKDSPKEVPLEYVLFQPNQGMVDPNTNLHYDNMLFAQVDALYSAIKTLGHTDIEVRISETGWPSKGDENEIGASPENAALYNGNLLKLIQQRKGTPAKQSVPIDVYVFALFNENLKPGPVSERNYGLFYPDGKPVYNVGMQGYLPDIIYTSRATTIKILNLWRVVMGLAVAWFILDMGDKMRMR

SEQ ID NO: 25925 - protein, 303 aa, Arabidopsis thaliana
  peptide (1)..(303): Ceres Seq. ID no. 12384976
MSTDPTKAQDWLQQRLEPHISKTRITSIVVGNEIFKTNDHVLIQSLLPAMKSVYAALTNLGLEKQVTVTSAHSLDILSTSYPPSSGSFKEEFIQYLQPLLDFHSQIESPFLINAYPFFAYKDSPKEVPLEYVLFQPNQGMVDPNTNLHYDNMLFAQVDALYSAIKTLGHTDIEVRISETGWPSKGDENEIGASPENAALYNGNLLKLIQQRKGTPAKQSVPIDVYVFALFNENLKPGPVSERNYGLFYPDGKPVYNVGMQGYLPDIIYTSRATTIKILNLWRVVMGLAVAWFILDMGDKMRMR

SEQ ID NO: 25926 - DNA, 1682 bp, Arabidopsis thaliana
  misc_feature (1)..(1682): Ceres Seq. ID no. 12337939
  misc_feature (1)..(1682): Ortholog of  Ceres SEQ ID NO 14302935 as cited in SEQ ID NO 20442
atcaatttcgaggaataaaagtaagaaacattgcgacaaaaaaaaaaaaaagagatattgaggaatggctgcgaagaaggtttttggatcggcggaagcgagtaatttggtgacggagcttcgtcggagttttgatgatggtgtgacacgtggttatgaatggagagtgactcagcttaagaaactgatgattatttgtgataatcatgagcctgagatcgtcgcggctcttcgcgatgatcttggtaagcctgagcttgaatcttctgtttatgaggtatctctactgagaaactctatcaagttggctcttaagcagctaaagaactggatggctccggagaaggcaaagacttctctaacaacgtttcctgcatccgcggagattgtgtctgagcctcttggtgttgtgctagtgatctcggcttggaactatccttttctgttgtctattgatcctgttattggtgcaatttctgctgggaatgctgttgttttaaagccatcagaattggctccagcttcgtcagctctgctcactaagttactggaacagtatcttgatccttctgcggtgcgagttgtcgaaggagctgttaccgaaacaagtgctctgctagagcagaagtgggacaagatattctacacaggtagttcaaaaatcggacgtgtcataatggcggcagctgcgaagcatctcacaccggttgttctagagcttggaggaaaatctcctgtcgttgtagactcggataccgatttgaaagttaccgtcaggcggataatcgtaggcaaatggggttgcaacaacggacaggcgtgcgtttcgccggactatatcttgacgacaaaagaatatgctcctaaattgattgatgccatgaagcttgaattggagaaattttatgggaagaaccctatagagtcgaaagatatgtcacgtatcgtaaactcgaatcactttgatcgcttgtctaagttgttagacgagaaggaagtttctgacaaaattgtctatggtggtgaaaaggacagagaaaacttgaaaattgctccgacaatcttgctcgatgtaccattagattctctgatcatgagtgaagaaatatttggccctctccttccaatcctcacgcttaacaacttggaagagagctttgacgtgattcgttctcgacctaagccacttgcggcatacttgtttacacataacaagaagttgaaagagagattcacagcgacagtctccgctggaggcatagtagtcaatgacatagctgttcatcttgcacttcacacattgccattcggaggagttggtgaaagtggaatgggtgcttaccatggtaaattctcatttgatgcttttagtcacaagaaggcggttctctacagaagccttttcggtgattcagccgtcaggtatccgccatactcgagaggaaagcttagattgttaaaagcccttgtcgacagcaatatattcgatttattcaaagtccttctcggtttagcttaaacggtaaaaagaccgaggacacttccctttgtaccttatttacttgttttatttttcaaacatggacttagttggttaatatgttttggtttggtgttgattctatgaatattgaagttgataaataaaagattttcggttgattatggaaaccggtttcttc

SEQ ID NO: 25927 - protein, 484 aa, Arabidopsis thaliana
  peptide (1)..(484): Ceres Seq. ID no. 12337940
MAAKKVFGSAEASNLVTELRRSFDDGVTRGYEWRVTQLKKLMIICDNHEPEIVAALRDDLGKPELESSVYEVSLLRNSIKLALKQLKNWMAPEKAKTSLTTFPASAEIVSEPLGVVLVISAWNYPFLLSIDPVIGAISAGNAVVLKPSELAPASSALLTKLLEQYLDPSAVRVVEGAVTETSALLEQKWDKIFYTGSSKIGRVIMAAAAKHLTPVVLELGGKSPVVVDSDTDLKVTVRRIIVGKWGCNNGQACVSPDYILTTKEYAPKLIDAMKLELEKFYGKNPIESKDMSRIVNSNHFDRLSKLLDEKEVSDKIVYGGEKDRENLKIAPTILLDVPLDSLIMSEEIFGPLLPILTLNNLEESFDVIRSRPKPLAAYLFTHNKKLKERFTATVSAGGIVVNDIAVHLALHTLPFGGVGESGMGAYHGKFSFDAFSHKKAVLYRSLFGDSAVRYPPYSRGKLRLLKALVDSNIFDLFKVLLGLA

SEQ ID NO: 25928 - protein, 443 aa, Arabidopsis thaliana
  peptide (1)..(443): Ceres Seq. ID no. 12337941
MIICDNHEPEIVAALRDDLGKPELESSVYEVSLLRNSIKLALKQLKNWMAPEKAKTSLTTFPASAEIVSEPLGVVLVISAWNYPFLLSIDPVIGAISAGNAVVLKPSELAPASSALLTKLLEQYLDPSAVRVVEGAVTETSALLEQKWDKIFYTGSSKIGRVIMAAAAKHLTPVVLELGGKSPVVVDSDTDLKVTVRRIIVGKWGCNNGQACVSPDYILTTKEYAPKLIDAMKLELEKFYGKNPIESKDMSRIVNSNHFDRLSKLLDEKEVSDKIVYGGEKDRENLKIAPTILLDVPLDSLIMSEEIFGPLLPILTLNNLEESFDVIRSRPKPLAAYLFTHNKKLKERFTATVSAGGIVVNDIAVHLALHTLPFGGVGESGMGAYHGKFSFDAFSHKKAVLYRSLFGDSAVRYPPYSRGKLRLLKALVDSNIFDLFKVLLGLA

SEQ ID NO: 25929 - protein, 395 aa, Arabidopsis thaliana
  peptide (1)..(395): Ceres Seq. ID no. 12337942
MAPEKAKTSLTTFPASAEIVSEPLGVVLVISAWNYPFLLSIDPVIGAISAGNAVVLKPSELAPASSALLTKLLEQYLDPSAVRVVEGAVTETSALLEQKWDKIFYTGSSKIGRVIMAAAAKHLTPVVLELGGKSPVVVDSDTDLKVTVRRIIVGKWGCNNGQACVSPDYILTTKEYAPKLIDAMKLELEKFYGKNPIESKDMSRIVNSNHFDRLSKLLDEKEVSDKIVYGGEKDRENLKIAPTILLDVPLDSLIMSEEIFGPLLPILTLNNLEESFDVIRSRPKPLAAYLFTHNKKLKERFTATVSAGGIVVNDIAVHLALHTLPFGGVGESGMGAYHGKFSFDAFSHKKAVLYRSLFGDSAVRYPPYSRGKLRLLKALVDSNIFDLFKVLLGLA

SEQ ID NO: 25930 - DNA, 999 bp, Arabidopsis thaliana
  misc_feature (1)..(999): Ceres Seq. ID no. 12372115
  misc_feature (1)..(999): Ortholog of  Ceres SEQ ID NO 14309384 as cited in SEQ ID NO 52806
  misc_feature (1)..(999): Ortholog of  Ceres SEQ ID NO 14304136 as cited in SEQ ID NO 59024
ataattcaattcgctctccttctctctctatctctgccctttctttctctctcacacacaaacacgatccaatgacgacgagcaacaacgtgaacggatgtttcggagacacgaagctgaccaaagtgttcgtaggaggattggcttgggatactcacaaagaagcaatgtatgatcatttcatcaagtatggggacatcttggaggcagtcattatctccgacaaactcactcgccgttccaaaggatatggctttgtgactttcaaagatgcggaagctgccacgagagcttgcgaagactctactccgatcatcaatggccgccgtgccaactgcaatctcgcctccctcggtggccgtcttcgtaaatcccctaccatgacctctcctcaacaaggaccaaaaaatgggaacagggccacgccaccacatgttggaaatcattctcagtggtactacccgtccggattcacaaaccagcaacatcaacaacaaaatcatcaagccgttcctttctatgggtacccttccgcctacgttgccccgaacatgaccttcaatcaaaaagttggatatgtcggaggaacctatatgaacggatactatgcacaaatgcaaccacaaccgcaatcgcagccacaaccgcaatattaccaccatcacatgtatggtggaggacgagttatggttggggcagcaagtccaatggtgcctttctacactgtctatccttatcatcaatctcaagccatcgggtttccacaaccttcattttcgaaacctctttctttttccactcctcctatatcaggcacagttggaggagagagcatacagaagaaggccatacattgataggctagaagctgttaatcaaacgattgactcagcccaaaattattcattttatccatctcactaagctttatttttttctagagacttgtatttgtaataatttaatttcgttacatttaataatttattcattgaagcc

SEQ ID NO: 25931 - protein, 284 aa, Arabidopsis thaliana
  peptide (1)..(284): Ceres Seq. ID no. 12372116
NSIRSPSLSISALSFSLTHKHDPMTTSNNVNGCFGDTKLTKVFVGGLAWDTHKEAMYDHFIKYGDILEAVIISDKLTRRSKGYGFVTFKDAEAATRACEDSTPIINGRRANCNLASLGGRLRKSPTMTSPQQGPKNGNRATPPHVGNHSQWYYPSGFTNQQHQQQNHQAVPFYGYPSAYVAPNMTFNQKVGYVGGTYMNGYYAQMQPQPQSQPQPQYYHHHMYGGGRVMVGAASPMVPFYTVYPYHQSQAIGFPQPSFSKPLSFSTPPISGTVGGESIQKKAIH

SEQ ID NO: 25932 - protein, 261 aa, Arabidopsis thaliana
  peptide (1)..(261): Ceres Seq. ID no. 12372117
MTTSNNVNGCFGDTKLTKVFVGGLAWDTHKEAMYDHFIKYGDILEAVIISDKLTRRSKGYGFVTFKDAEAATRACEDSTPIINGRRANCNLASLGGRLRKSPTMTSPQQGPKNGNRATPPHVGNHSQWYYPSGFTNQQHQQQNHQAVPFYGYPSAYVAPNMTFNQKVGYVGGTYMNGYYAQMQPQPQSQPQPQYYHHHMYGGGRVMVGAASPMVPFYTVYPYHQSQAIGFPQPSFSKPLSFSTPPISGTVGGESIQKKAIH

SEQ ID NO: 25933 - protein, 229 aa, Arabidopsis thaliana
  peptide (1)..(229): Ceres Seq. ID no. 12372118
MYDHFIKYGDILEAVIISDKLTRRSKGYGFVTFKDAEAATRACEDSTPIINGRRANCNLASLGGRLRKSPTMTSPQQGPKNGNRATPPHVGNHSQWYYPSGFTNQQHQQQNHQAVPFYGYPSAYVAPNMTFNQKVGYVGGTYMNGYYAQMQPQPQSQPQPQYYHHHMYGGGRVMVGAASPMVPFYTVYPYHQSQAIGFPQPSFSKPLSFSTPPISGTVGGESIQKKAIH

SEQ ID NO: 25934 - DNA, 1750 bp, Arabidopsis thaliana
  misc_feature (1)..(1750): Ceres Seq. ID no. 12324223
  misc_feature (1)..(1750): Ortholog of  Ceres SEQ ID NO 13646595 as cited in SEQ ID NO 20561
  misc_feature (1)..(1750): Ortholog of  Ceres SEQ ID NO 14314636 as cited in SEQ ID NO 56924
  misc_feature (1)..(1750): Ortholog of  Ceres SEQ ID NO 15171614 as cited in SEQ ID NO 60106
  misc_feature (1)..(1750): Ortholog of  Ceres SEQ ID NO 15168421 as cited in SEQ ID NO 60131
  misc_feature (1)..(1750): Ortholog of  Ceres SEQ ID NO 13597574 as cited in SEQ ID NO 64677
  misc_feature (1)..(1750): Ortholog of  Ceres SEQ ID NO 13597843 as cited in SEQ ID NO 64850
  misc_feature (1)..(1750): Ortholog of  Ceres SEQ ID NO 13597678 as cited in SEQ ID NO 65375
  misc_feature (1)..(1750): Ortholog of  Ceres SEQ ID NO 15176787 as cited in SEQ ID NO 66468
  misc_feature (1)..(1750): Ortholog of  Ceres SEQ ID NO 13596180 as cited in SEQ ID NO 67941
  misc_feature (1)..(1750): Ortholog of  Ceres SEQ ID NO 13591190 as cited in SEQ ID NO 68044
  misc_feature (1)..(1750): Ortholog of  Ceres SEQ ID NO 13595961 as cited in SEQ ID NO 68223
  misc_feature (1)..(1750): Ortholog of  Ceres SEQ ID NO 14313563 as cited in SEQ ID NO 68700
aatgattcacacaaactctctatataaagccattacttaataccacacaaattacaaaaaaaaaaaagaaaaaaggagataataatcacaaactacaaaagtagaaagaagaaaaaagaacaaagtatcagttcttgaatatttgcatcaatggaggaatccaaaacacctcacgttgcgatcataccaagtccgggaatgggtcatctcataccactcgtcgagtttgctaaacgactcgtccatcttcacggcctcaccgttaccttcgtcatcgccggcgaaggtccaccatcaaaagctcagagaaccgtcctcgactctctcccttcttcaatctcctccgtctttctccctcctgttgatctcaccgatctctcttcgtccactcgcatcgaatctcggatctccctcaccgtgactcgttcaaacccggagctccggaaagtcttcgactcgttcgtggagggaggtcgtttgccaacggcgctcgtcgtcgatctcttcggtacggacgctttcgacgtggccgtagaatttcacgtgccaccgtatattttctacccaacaacggccaacgtcttgtcgttttttctccatttgcctaaactagacgaaacggtgtcgtgtgagttcagggaattaaccgaaccgcttatgcttcctggatgtgtaccggttgccgggaaagatttccttgacccggcccaagaccggaaagacgatgcatacaaatggcttctccataacaccaagaggtacaaagaagccgaaggtattcttgtgaataccttctttgagctagagccaaatgctataaaggccttgcaagaaccgggtcttgataaaccaccggtttatccggttggaccgttggttaacattggtaagcaagaggctaagcaaaccgaagagtctgaatgtttaaagtggttggataaccagccgctcggttcggttttatatgtgtcctttggtagtggcggtaccctcacatgtgagcagctcaatgagcttgctcttggtcttgcagatagtgagcaacggtttctttgggtcatacgaagtcctagtgggatcgctaattcgtcgtattttgattcacatagccaaacagatccattgacatttttaccaccgggatttttagagcggactaaaaaaagaggttttgtgatccctttttgggctccacaagcccaagtcttggcgcatccatccacgggaggatttttaactcattgtggatggaattcgactctagagagtgtagtaagcggtattccacttatagcatggccattatacgcagaacagaagatgaatgcggttttgttgagtgaagatattcgtgcggcacttaggccgcgtgccggggacgatgggttagttagaagagaagaggtggctagagtggtaaaaggattgatggaaggtgaagaaggcaaaggagtgaggaacaagatgaaggagttgaaggaagcagcttgtagggtgttgaaggatgatgggacttcgacaaaagcacttagtcttgtggccttaaagtggaaagcccacaaaaaagagttagagcaaaatggcaaccactaaatatttgatgttctaatatgatttgtataatcaacggtgggatttgtgcaaatgtgtttctgtatgtatatgtatgttctacttttctttgcttcgtttgtctcaacttttatttgtatatgtttttggcttttgattaattcgtagaagatgttgc

SEQ ID NO: 25935 - protein, 480 aa, Arabidopsis thaliana
  peptide (1)..(480): Ceres Seq. ID no. 12324224
MEESKTPHVAIIPSPGMGHLIPLVEFAKRLVHLHGLTVTFVIAGEGPPSKAQRTVLDSLPSSISSVFLPPVDLTDLSSSTRIESRISLTVTRSNPELRKVFDSFVEGGRLPTALVVDLFGTDAFDVAVEFHVPPYIFYPTTANVLSFFLHLPKLDETVSCEFRELTEPLMLPGCVPVAGKDFLDPAQDRKDDAYKWLLHNTKRYKEAEGILVNTFFELEPNAIKALQEPGLDKPPVYPVGPLVNIGKQEAKQTEESECLKWLDNQPLGSVLYVSFGSGGTLTCEQLNELALGLADSEQRFLWVIRSPSGIANSSYFDSHSQTDPLTFLPPGFLERTKKRGFVIPFWAPQAQVLAHPSTGGFLTHCGWNSTLESVVSGIPLIAWPLYAEQKMNAVLLSEDIRAALRPRAGDDGLVRREEVARVVKGLMEGEEGKGVRNKMKELKEAACRVLKDDGTSTKALSLVALKWKAHKKELEQNGNH

SEQ ID NO: 25936 - protein, 464 aa, Arabidopsis thaliana
  peptide (1)..(464): Ceres Seq. ID no. 12324225
MGHLIPLVEFAKRLVHLHGLTVTFVIAGEGPPSKAQRTVLDSLPSSISSVFLPPVDLTDLSSSTRIESRISLTVTRSNPELRKVFDSFVEGGRLPTALVVDLFGTDAFDVAVEFHVPPYIFYPTTANVLSFFLHLPKLDETVSCEFRELTEPLMLPGCVPVAGKDFLDPAQDRKDDAYKWLLHNTKRYKEAEGILVNTFFELEPNAIKALQEPGLDKPPVYPVGPLVNIGKQEAKQTEESECLKWLDNQPLGSVLYVSFGSGGTLTCEQLNELALGLADSEQRFLWVIRSPSGIANSSYFDSHSQTDPLTFLPPGFLERTKKRGFVIPFWAPQAQVLAHPSTGGFLTHCGWNSTLESVVSGIPLIAWPLYAEQKMNAVLLSEDIRAALRPRAGDDGLVRREEVARVVKGLMEGEEGKGVRNKMKELKEAACRVLKDDGTSTKALSLVALKWKAHKKELEQNGNH

SEQ ID NO: 25937 - protein, 311 aa, Arabidopsis thaliana
  peptide (1)..(311): Ceres Seq. ID no. 12324226
MLPGCVPVAGKDFLDPAQDRKDDAYKWLLHNTKRYKEAEGILVNTFFELEPNAIKALQEPGLDKPPVYPVGPLVNIGKQEAKQTEESECLKWLDNQPLGSVLYVSFGSGGTLTCEQLNELALGLADSEQRFLWVIRSPSGIANSSYFDSHSQTDPLTFLPPGFLERTKKRGFVIPFWAPQAQVLAHPSTGGFLTHCGWNSTLESVVSGIPLIAWPLYAEQKMNAVLLSEDIRAALRPRAGDDGLVRREEVARVVKGLMEGEEGKGVRNKMKELKEAACRVLKDDGTSTKALSLVALKWKAHKKELEQNGNH

SEQ ID NO: 25938 - DNA, 1688 bp, Arabidopsis thaliana
  misc_feature (1)..(1688): Ceres Seq. ID no. 13576727
  misc_feature (1)..(1688): Ortholog of  Ceres SEQ ID NO 13648081 as cited in SEQ ID NO 165
  misc_feature (1)..(1688): Ortholog of  Ceres SEQ ID NO 14308598 as cited in SEQ ID NO 60416
  misc_feature (1)..(1688): Ortholog of  Ceres SEQ ID NO 13502952 as cited in SEQ ID NO 62271
  misc_feature (1)..(1688): Ortholog of  Ceres SEQ ID NO 13502973 as cited in SEQ ID NO 68052
  misc_feature (1)..(1688): Ortholog of  Ceres SEQ ID NO 13596000 as cited in SEQ ID NO 68188
catcctaatcaaaaaatacaatcgtcttcttcatcattttctcttcttcttctccaagaaaacactgaagaagaaatggggttccttaagccaaccatggcgattctttttctagcgatggtcgccgtttcatcagccgtggacatgtcaatcatctcctacgacgagaaacatggcgtctccaccaccggtggccgtagcgaagccgaggttatgagtatctacgaggcatggttggtgaaacacggcaaggctcagagccagaactctcttgttgagaaagatcgacggttcgagatctttaaagacaatcttcgtttcgtcgatgaacataacgagaagaatcttagttatagattgggtttgactcgttttgcggatcttactaacgatgagtatagatccaagtatcttggagctaagatggagaagaaaggtgagagaaggactagcctacggtacgaggctcgtgtcggtgatgagctaccggagtctattgactggaggaagaaaggagccgtggctgaggtcaaagatcagggtggttgcgggagttgttgggcgttttcaaccattggagcagtggagggaataaaccagatcgtaaccggagacctaataaccttgtctgaacaagagttggtcgattgtgacacttcatacaacgaaggttgtaacggaggtcttatggactatgcttttgagttcattatcaagaatggtggaatcgatacagacaaagattatccttacaagggtgttgatggaacttgtgaccagatcaggaaaaacgctaaagttgtcactatcgattcatatgaggatgttccaacttacagcgaggaatcgttgaagaaagcagttgctcatcaacccattagcattgccattgaggctggtggtcgtgcgttccagctctatgattcgggtatatttgatggaagttgtggaacacaactagaccacggagttgtggcggttggatacggaactgagaacggcaaagattactggattgtgagaaactcatggggtaaaagctggggagagagtggatacctaaggatggcgcgtaacattgcgtcttcatcaggaaaatgtggaatcgcgattgaaccttcatacccgataaagaatggcgaaaacccgccaaacccgggaccttcacctccatctcccatcaagcctccaacccaatgtgacagttactacacttgtcctgagagcaacacttgttgttgtctgtttgagtatggcaagtattgctttgcttggggatgttgcccactagaagcagccacttgctgtgatgacaactatagttgctgccctcacgagtacccggtttgtgaccttgatcaaggaacctgtttattgagcaagaacagtccatttagtgttaaggccttaaagcgtaaacccgcaacgccattctggtcacaaggcagaaagaacattgcctaaacattgcttcttcaagaggactctggctcatgagagaagagatctctctgaagggatttatcagatgctttttaatgttgttgtttatgccataactagatacataaaaaatgcagctgttgggtttcgtgtatataaaaaaaggaccctatgtttcattcagtttcatagttgggtttcattgatacagtacatttattgttaattcaagaaaattgaatatt

SEQ ID NO: 25939 - protein, 487 aa, Arabidopsis thaliana
  peptide (1)..(487): Ceres Seq. ID no. 13576728
HPNQKIQSSSSSFSLLLLQENTEEEMGFLKPTMAILFLAMVAVSSAVDMSIISYDEKHGVSTTGGRSEAEVMSIYEAWLVKHGKAQSQNSLVEKDRRFEIFKDNLRFVDEHNEKNLSYRLGLTRFADLTNDEYRSKYLGAKMEKKGERRTSLRYEARVGDELPESIDWRKKGAVAEVKDQGGCGSCWAFSTIGAVEGINQIVTGDLITLSEQELVDCDTSYNEGCNGGLMDYAFEFIIKNGGIDTDKDYPYKGVDGTCDQIRKNAKVVTIDSYEDVPTYSEESLKKAVAHQPISIAIEAGGRAFQLYDSGIFDGSCGTQLDHGVVAVGYGTENGKDYWIVRNSWGKSWGESGYLRMARNIASSSGKCGIAIEPSYPIKNGENPPNPGPSPPSPIKPPTQCDSYYTCPESNTCCCLFEYGKYCFAWGCCPLEAATCCDDNYSCCPHEYPVCDLDQGTCLLSKNSPFSVKALKRKPATPFWSQGRKNIA

SEQ ID NO: 25940 - protein, 462 aa, Arabidopsis thaliana
  peptide (1)..(462): Ceres Seq. ID no. 13576729
MGFLKPTMAILFLAMVAVSSAVDMSIISYDEKHGVSTTGGRSEAEVMSIYEAWLVKHGKAQSQNSLVEKDRRFEIFKDNLRFVDEHNEKNLSYRLGLTRFADLTNDEYRSKYLGAKMEKKGERRTSLRYEARVGDELPESIDWRKKGAVAEVKDQGGCGSCWAFSTIGAVEGINQIVTGDLITLSEQELVDCDTSYNEGCNGGLMDYAFEFIIKNGGIDTDKDYPYKGVDGTCDQIRKNAKVVTIDSYEDVPTYSEESLKKAVAHQPISIAIEAGGRAFQLYDSGIFDGSCGTQLDHGVVAVGYGTENGKDYWIVRNSWGKSWGESGYLRMARNIASSSGKCGIAIEPSYPIKNGENPPNPGPSPPSPIKPPTQCDSYYTCPESNTCCCLFEYGKYCFAWGCCPLEAATCCDDNYSCCPHEYPVCDLDQGTCLLSKNSPFSVKALKRKPATPFWSQGRKNIA

SEQ ID NO: 25941 - protein, 455 aa, Arabidopsis thaliana
  peptide (1)..(455): Ceres Seq. ID no. 13576730
MAILFLAMVAVSSAVDMSIISYDEKHGVSTTGGRSEAEVMSIYEAWLVKHGKAQSQNSLVEKDRRFEIFKDNLRFVDEHNEKNLSYRLGLTRFADLTNDEYRSKYLGAKMEKKGERRTSLRYEARVGDELPESIDWRKKGAVAEVKDQGGCGSCWAFSTIGAVEGINQIVTGDLITLSEQELVDCDTSYNEGCNGGLMDYAFEFIIKNGGIDTDKDYPYKGVDGTCDQIRKNAKVVTIDSYEDVPTYSEESLKKAVAHQPISIAIEAGGRAFQLYDSGIFDGSCGTQLDHGVVAVGYGTENGKDYWIVRNSWGKSWGESGYLRMARNIASSSGKCGIAIEPSYPIKNGENPPNPGPSPPSPIKPPTQCDSYYTCPESNTCCCLFEYGKYCFAWGCCPLEAATCCDDNYSCCPHEYPVCDLDQGTCLLSKNSPFSVKALKRKPATPFWSQGRKNIA

SEQ ID NO: 25942 - DNA, 698 bp, Arabidopsis thaliana
  misc_feature (1)..(698): Ceres Seq. ID no. 12384735
  misc_feature (1)..(698): Ortholog of  Ceres SEQ ID NO 13594932 as cited in SEQ ID NO 55807
  misc_feature (1)..(698): Ortholog of  Ceres SEQ ID NO 13596954 as cited in SEQ ID NO 68926
aaggaaccttgtgtggtcatcgtcttcgtacctttctgctttctacgccgtcaaaatctaactgctcgacagtgaccatgcaaagctcaatgacaatggaactacgaccatcaggtgattccggttcatctgacgtcgatgctgagatcagcgatggcttttcaccgctcgatacttctcacagagacgtcgctgatgaaggttcgttgctgagaagagcagagatgtatcaagactacatgaagcaagtaccaatcccgacgaatcgtggctcgttgattccgttcacaagctgggttggattaagcatttcaatgaaacagctttatggtcagcctctacattacctcacgaatgttctcttacaacgatgggatcaatcacgattcggtactgattctgaagaacagaggttggattctatcattcatcctactaaagctgaagctactatctggcttgttgaagagattcatcgactcactccttctcatcttcacatggctcttctttggagatctgatcctatgtatcactctttcattgacccaatctttcctgagaaatgaacaagttcttgaattgtgatgaaccatccttttttgtatctacttttgcttttagaaaccttgttcaagcattgaagcttatatgtataattgcagggtcttattcaataaaatgtgaatcttccttcc

SEQ ID NO: 25943 - protein, 188 aa, Arabidopsis thaliana
  peptide (1)..(188): Ceres Seq. ID no. 12384736
GTLCGHRLRTFLLSTPSKSNCSTVTMQSSMTMELRPSGDSGSSDVDAEISDGFSPLDTSHRDVADEGSLLRRAEMYQDYMKQVPIPTNRGSLIPFTSWVGLSISMKQLYGQPLHYLTNVLLQRWDQSRFGTDSEEQRLDSIIHPTKAEATIWLVEEIHRLTPSHLHMALLWRSDPMYHSFIDPIFPEK

SEQ ID NO: 25944 - protein, 163 aa, Arabidopsis thaliana
  peptide (1)..(163): Ceres Seq. ID no. 12384737
MQSSMTMELRPSGDSGSSDVDAEISDGFSPLDTSHRDVADEGSLLRRAEMYQDYMKQVPIPTNRGSLIPFTSWVGLSISMKQLYGQPLHYLTNVLLQRWDQSRFGTDSEEQRLDSIIHPTKAEATIWLVEEIHRLTPSHLHMALLWRSDPMYHSFIDPIFPEK

SEQ ID NO: 25945 - protein, 159 aa, Arabidopsis thaliana
  peptide (1)..(159): Ceres Seq. ID no. 12384738
MTMELRPSGDSGSSDVDAEISDGFSPLDTSHRDVADEGSLLRRAEMYQDYMKQVPIPTNRGSLIPFTSWVGLSISMKQLYGQPLHYLTNVLLQRWDQSRFGTDSEEQRLDSIIHPTKAEATIWLVEEIHRLTPSHLHMALLWRSDPMYHSFIDPIFPEK

SEQ ID NO: 25946 - DNA, 901 bp, Arabidopsis thaliana
  misc_feature (1)..(901): Ceres Seq. ID no. 12323387
  misc_feature (1)..(901): Ortholog of  Ceres SEQ ID NO 15178843 as cited in SEQ ID NO 0
acatagccgctctgtttcttcttctctttccctcacccttatcgccgctgtttcgtcttgaacaatcagattaggtgttcttctgtggataaaagatgaatcattgtagccttcagcagaatgcattcttgtctcgtgaagaatcgagaggatttgttcctatctattctcatccagtggactctgttgtttgccctaagccccgtcgtgcaaacaacgttattcgtccctttagattacattttagtctttcaggagctgatgatgtatgtgattctaaagccggggaagatcttttggacatatttcgtagaaaggaatcagtatcatctagatcacccccatttttccttgggtctccccctagccgagcagcaaacccgttagctcaagatgcacgctttggagatgagaaactcaacactgtctcaccctcactctcccctcttctcccatctgcatctcgtgttaaaagtggttgtggtagaatgaagtttggggtgaaaccagcaactgttagagtagaagggtttgattgcttgaacagggaccgcccaaactcaagtatccctgccatggcctagaaagaagaagaaggaataaagaggattcacaaagtgtacataaaatccagactcaaagactccattttttgaagaagtatatatagttttgcagaagaagaggaaaaggaagattaacgatcgctcaagcttttaccgcagttttctgtgattatgatgaggttcaatgttgtgtatatatatgtatctaccgtaattaagaggtaaggtcgagactttatgtgttaacttcttatttctgaagtctcgttgtaacatattaaaccaatttgggagtgttgttctcttttctgtgtataataaccattcttcttttt

SEQ ID NO: 25947 - protein, 162 aa, Arabidopsis thaliana
  peptide (1)..(162): Ceres Seq. ID no. 12323388
MNHCSLQQNAFLSREESRGFVPIYSHPVDSVVCPKPRRANNVIRPFRLHFSLSGADDVCDSKAGEDLLDIFRRKESVSSRSPPFFLGSPPSRAANPLAQDARFGDEKLNTVSPSLSPLLPSASRVKSGCGRMKFGVKPATVRVEGFDCLNRDRPNSSIPAMA

SEQ ID NO: 25948 - protein, 88 aa, Arabidopsis thaliana
  peptide (1)..(88): Ceres Seq. ID no. 12323389
MHSCLVKNREDLFLSILIQWTLLFALSPVVQTTLFVPLDYILVFQELMMYVILKPGKIFWTYFVERNQYHLDHPHFSLGLPLAEQQTR

SEQ ID NO: 25949 - DNA, 704 bp, Arabidopsis thaliana
  misc_feature (1)..(704): Ceres Seq. ID no. 12323384
  misc_feature (1)..(704): Ortholog of  Ceres SEQ ID NO 15174240 as cited in SEQ ID NO 61866
  misc_feature (1)..(704): Ortholog of  Ceres SEQ ID NO 13596039 as cited in SEQ ID NO 62117
aaaatccccattttgataatcttcagcagccgttgcctcaaaagatgcagatcttcgtgaaaaccctaacggggaagaccataacccttgaggttgaatcatccgacaccatcgacaatgtgaaggcgaagatccaagacaaggaaggaatcccaccggaccagcagcgattgattttcgccgggaaacagcttgaagacggccgtaccctcgccgactacaacatccagaaggaatcgacgcttcatctcgtcctccgtctccgtggtggtgctaagaagaggaagaagaagacttacaccaagccgaagaagatcaagcacaagcataagaaggttaagctcgctgttcttcagttttacaaaatcgatggatctggaaaggttcagcgtttgaggaaggagtgccctaacgcaacctgtggagctgggactttcatggcgagtcattttgatcgccattactgtggtaagtgtggactcacctacgtttaccagaaagaaggagttgaagcttgatctgttgtagcggtagatcgatccttctctttctctcttatcttttaaaaactgcatttctatttgggaattttgtaagctctttaatttgagttatcatggattctatgttgaacatctttcgttctggattataaattatggaaggttttaggattttatggatattcattatgttgttcgttc

SEQ ID NO: 25950 - protein, 171 aa, Arabidopsis thaliana
  peptide (1)..(171): Ceres Seq. ID no. 12323385
NPHFDNLQQPLPQKMQIFVKTLTGKTITLEVESSDTIDNVKAKIQDKEGIPPDQQRLIFAGKQLEDGRTLADYNIQKESTLHLVLRLRGGAKKRKKKTYTKPKKIKHKHKKVKLAVLQFYKIDGSGKVQRLRKECPNATCGAGTFMASHFDRHYCGKCGLTYVYQKEGVEA

SEQ ID NO: 25951 - protein, 157 aa, Arabidopsis thaliana
  peptide (1)..(157): Ceres Seq. ID no. 12323386
MQIFVKTLTGKTITLEVESSDTIDNVKAKIQDKEGIPPDQQRLIFAGKQLEDGRTLADYNIQKESTLHLVLRLRGGAKKRKKKTYTKPKKIKHKHKKVKLAVLQFYKIDGSGKVQRLRKECPNATCGAGTFMASHFDRHYCGKCGLTYVYQKEGVEA

SEQ ID NO: 25952 - DNA, 1328 bp, Arabidopsis thaliana
  misc_feature (1)..(1328): Ceres Seq. ID no. 12331502
  misc_feature (1)..(1328): Ortholog of  Ceres SEQ ID NO 12564952 as cited in SEQ ID NO 63211
atgtccaccatccgttcacttggccgcgttcatataaaccaaaaaccgaacaacaacaaaaattcgaaaattctccggcgacaccaacaatgggaaggtctctaatattctctggaaacatgtcattgagaatctctcacttacccggatcatctcttccgctgcaaaacccaatttcaggccggacagtgaacagaactttccgatatcggtgtacgaggattttgtctaatagcttcaagtccacaacgagacttcaaaccaaagctgttctgtctgaggtttctgatcagacgcgatatcccagaatcggcgctaaaaccaccggaactatatctccggcacacctccttgaagtcgttgaactcgccgctaaaaccggcgctgaggtggttatggaagctgtaaataagccaaggaatattacttataaaggtctcagtgacttagtaactgatactgataaagcaagcgaggctgctattttggaagtagtgaagaagaattttagtgatcatcttattcttggtgaagaaggaggtatcatcggcgattcgtcttctgattacctctggtgcattgatcctctagatggaactacaaattttgctcatggatatcccagttttgctgtttccgtcggtgttctgtatcgtggaaatcccgccgctgcttctgtggtagagtttgtcggtggtccgatgtgctggaacactcgaaccttttctgcaactgcaggtggtggagcattgtgtaacgggcaaaaaattcatgtcagtaagaccgatgctgtggagagagcacttcttatcacagggtttggttatgaacatgatgatgcatggagcactaacatggaactgttcaaagagtttactgatgtgagtcggggagtgcgaagactcggtgctgctgcagttgacatgtgtcatgttgcacttgggattgcggaatcatattgggagtaccgtttaaagccatgggacatggctgctggtgttcttatagttgaggaagctggaggagctgtgactcggatggacggagggaagttttctgtgtttgataggtctgttttggtctccaacggcgttcttcaccccaagcttctggaaagaattgcacccgcaactgagaatttgaagtcgaaaggaatcgatttctcgttatggttcaaaccggaagattatcatacagagctttaagacttgttcaagaaaggtatataagattacattgttatgatctaaagctcttatatttgaactgaaacgaggtataagatttgcgttcggattatgaaaatcaataatgatcatattccccct

SEQ ID NO: 25953 - protein, 400 aa, Arabidopsis thaliana
  peptide (1)..(400): Ceres Seq. ID no. 12331503
VHHPFTWPRSYKPKTEQQQKFENSPATPTMGRSLIFSGNMSLRISHLPGSSLPLQNPISGRTVNRTFRYRCTRILSNSFKSTTRLQTKAVLSEVSDQTRYPRIGAKTTGTISPAHLLEVVELAAKTGAEVVMEAVNKPRNITYKGLSDLVTDTDKASEAAILEVVKKNFSDHLILGEEGGIIGDSSSDYLWCIDPLDGTTNFAHGYPSFAVSVGVLYRGNPAAASVVEFVGGPMCWNTRTFSATAGGGALCNGQKIHVSKTDAVERALLITGFGYEHDDAWSTNMELFKEFTDVSRGVRRLGAAAVDMCHVALGIAESYWEYRLKPWDMAAGVLIVEEAGGAVTRMDGGKFSVFDRSVLVSNGVLHPKLLERIAPATENLKSKGIDFSLWFKPEDYHTEL

SEQ ID NO: 25954 - protein, 371 aa, Arabidopsis thaliana
  peptide (1)..(371): Ceres Seq. ID no. 12331504
MGRSLIFSGNMSLRISHLPGSSLPLQNPISGRTVNRTFRYRCTRILSNSFKSTTRLQTKAVLSEVSDQTRYPRIGAKTTGTISPAHLLEVVELAAKTGAEVVMEAVNKPRNITYKGLSDLVTDTDKASEAAILEVVKKNFSDHLILGEEGGIIGDSSSDYLWCIDPLDGTTNFAHGYPSFAVSVGVLYRGNPAAASVVEFVGGPMCWNTRTFSATAGGGALCNGQKIHVSKTDAVERALLITGFGYEHDDAWSTNMELFKEFTDVSRGVRRLGAAAVDMCHVALGIAESYWEYRLKPWDMAAGVLIVEEAGGAVTRMDGGKFSVFDRSVLVSNGVLHPKLLERIAPATENLKSKGIDFSLWFKPEDYHTEL

SEQ ID NO: 25955 - protein, 361 aa, Arabidopsis thaliana
  peptide (1)..(361): Ceres Seq. ID no. 12331505
MSLRISHLPGSSLPLQNPISGRTVNRTFRYRCTRILSNSFKSTTRLQTKAVLSEVSDQTRYPRIGAKTTGTISPAHLLEVVELAAKTGAEVVMEAVNKPRNITYKGLSDLVTDTDKASEAAILEVVKKNFSDHLILGEEGGIIGDSSSDYLWCIDPLDGTTNFAHGYPSFAVSVGVLYRGNPAAASVVEFVGGPMCWNTRTFSATAGGGALCNGQKIHVSKTDAVERALLITGFGYEHDDAWSTNMELFKEFTDVSRGVRRLGAAAVDMCHVALGIAESYWEYRLKPWDMAAGVLIVEEAGGAVTRMDGGKFSVFDRSVLVSNGVLHPKLLERIAPATENLKSKGIDFSLWFKPEDYHTEL

SEQ ID NO: 25956 - DNA, 1296 bp, Arabidopsis thaliana
  misc_feature (1)..(1296): Ceres Seq. ID no. 12331498
  misc_feature (1)..(1296): Ortholog of  Ceres SEQ ID NO 15176375 as cited in SEQ ID NO 53238
  misc_feature (1)..(1296): Ortholog of  Ceres SEQ ID NO 15170532 as cited in SEQ ID NO 55671
  misc_feature (1)..(1296): Ortholog of  Ceres SEQ ID NO 14316507 as cited in SEQ ID NO 57397
  misc_feature (1)..(1296): Ortholog of  Ceres SEQ ID NO 13598532 as cited in SEQ ID NO 65204
  misc_feature (1)..(1296): Ortholog of  Ceres SEQ ID NO 13656849 as cited in SEQ ID NO 65764
  misc_feature (1)..(1296): Ortholog of  Ceres SEQ ID NO 13655298 as cited in SEQ ID NO 68914
  misc_feature (1)..(1296): Ortholog of  Ceres SEQ ID NO 13656501 as cited in SEQ ID NO 69206
tgaatttcgaaaaatcagtccgttgtgaaagcccaagaataaggattctataatttcaggtctcatttaattatataaccgatctacactttgatctccgacaattcactttcccaataagaaccaactgagagagagagagcgccggagaagaagaattttagagagcgatggacgagggagttatagcagtttccgccatggatgctttcgagaagcttgagaaagttggtgaagggacatacgggaaagtttacagagccagagagaaagctaccgggaaaatcgtcgctctaaagaagacgcgtctccatgaggacgaagaaggcgttccttccaccactctccgcgagatctccattttgcgaatgctcgctcgtgatcctcacgtcgtcaggttaatggatgttaagcaaggactaagcaaagaaggcaaaactgtactgtacctggtttttgaatacatggacactgatgtcaagaaattcatcagaagtttccgtagcactggcaagaacattccaacccaaactatcaagagcttgatgtatcaactatgcaaaggtatggcattctgccatggtcacgggatattgcacagagatctcaagcctcacaatctcttgatggatcccaagacaatgaggctcaaaatagcagatcttggtttagccagagccttcactctgccaatgaagaagtatacccatgagatattaactctttggtatagagctccagaggttcttcttggtgccacccattactctacagctgtggatatgtggtctgttggctgcatatttgctgaacttgtgaccaaccaagcaatctttcagggagactctgagctccaacagctcctccatattttcaagttgtttgggacacccaatgaagaaatgtggccaggagtgagcacactcaagaactggcatgaatacccacagtggaaaccatcgactctatcctctgctgttccaaacctcgacgaggctggagttgatcttctatctaaaatgctgcagtacgagccagcgaaacgaatctcagcaaagatggctatggagcatccttactttgatgatctgccagaaaagtcctctctctaaggatttaaaatcttcagttagtatctttccaagttttatggtttttctagttttgcttctttcaagcatatctctagtgtgctgcttccccctctatgaatcatcctttctttagcataatatatcacttctgattgttgtttctttctattcgaatatttggattaacggctttaatgttctt

SEQ ID NO: 25957 - protein, 313 aa, Arabidopsis thaliana
  peptide (1)..(313): Ceres Seq. ID no. 12331499
MDEGVIAVSAMDAFEKLEKVGEGTYGKVYRAREKATGKIVALKKTRLHEDEEGVPSTTLREISILRMLARDPHVVRLMDVKQGLSKEGKTVLYLVFEYMDTDVKKFIRSFRSTGKNIPTQTIKSLMYQLCKGMAFCHGHGILHRDLKPHNLLMDPKTMRLKIADLGLARAFTLPMKKYTHEILTLWYRAPEVLLGATHYSTAVDMWSVGCIFAELVTNQAIFQGDSELQQLLHIFKLFGTPNEEMWPGVSTLKNWHEYPQWKPSTLSSAVPNLDEAGVDLLSKMLQYEPAKRISAKMAMEHPYFDDLPEKSSL

SEQ ID NO: 25958 - protein, 303 aa, Arabidopsis thaliana
  peptide (1)..(303): Ceres Seq. ID no. 12331500
MDAFEKLEKVGEGTYGKVYRAREKATGKIVALKKTRLHEDEEGVPSTTLREISILRMLARDPHVVRLMDVKQGLSKEGKTVLYLVFEYMDTDVKKFIRSFRSTGKNIPTQTIKSLMYQLCKGMAFCHGHGILHRDLKPHNLLMDPKTMRLKIADLGLARAFTLPMKKYTHEILTLWYRAPEVLLGATHYSTAVDMWSVGCIFAELVTNQAIFQGDSELQQLLHIFKLFGTPNEEMWPGVSTLKNWHEYPQWKPSTLSSAVPNLDEAGVDLLSKMLQYEPAKRISAKMAMEHPYFDDLPEKSSL

SEQ ID NO: 25959 - protein, 247 aa, Arabidopsis thaliana
  peptide (1)..(247): Ceres Seq. ID no. 12331501
MLARDPHVVRLMDVKQGLSKEGKTVLYLVFEYMDTDVKKFIRSFRSTGKNIPTQTIKSLMYQLCKGMAFCHGHGILHRDLKPHNLLMDPKTMRLKIADLGLARAFTLPMKKYTHEILTLWYRAPEVLLGATHYSTAVDMWSVGCIFAELVTNQAIFQGDSELQQLLHIFKLFGTPNEEMWPGVSTLKNWHEYPQWKPSTLSSAVPNLDEAGVDLLSKMLQYEPAKRISAKMAMEHPYFDDLPEKSSL

SEQ ID NO: 25960 - DNA, 1265 bp, Arabidopsis thaliana
  misc_feature (1)..(1265): Ceres Seq. ID no. 12421994
  misc_feature (1)..(1265): Ortholog of  Ceres SEQ ID NO 13528157 as cited in SEQ ID NO 60102
  misc_feature (1)..(1265): Ortholog of  Ceres SEQ ID NO 15226041 as cited in SEQ ID NO 62920
  misc_feature (1)..(1265): Ortholog of  Ceres SEQ ID NO 15179340 as cited in SEQ ID NO 0
accttatctttacttctatcatctattcttcttcttcctccatctctagaaaattataatacttcttgtttcttaaatcttatttgtattacaataaccaaaacccaagtttacaaaacatttcttcttcttgtttttcgaaaccctaaatgttttgagttgtcatggatgtaatagctactacaactactatagtatccgacttggattcacgacaacccgaaatcgaagctccgatccggatccagcccgcgaagcctatttctttctcaaacggcaaacgctgccaccaccatcatcttgcatctgaagcggttgcggttgcgacttataaagaatgtctaaagaatcacgcagcaggtatcggcggtcacgctttagacggatgcggcgagtttatgccgtcaccgtcgtttaactccaatgaccccgcttcactaacgtgcgctgcttgtggttgccaccgtaacttccaccgccgtgaggaggatccatcttctctctctgccatcgtccctgcgatcgaatttcgacctcacaaccgtcaccagcttcctccaccgcctcctcctcatctggcggggattcgtagtccagacgacgatgattcagcttctccaccgccgatctcgtcttcttacatgcttctcgcactctctggaggaagaggaggagctaacacggcggttccaatgtctaggaaacgttttaggacgaagtttagtcagtatcagaaggagaagatgttcgagttctcggagagagttgggtggaggatgccgaaagctgatgacgtggtggttaaggagttttgtcgggagattggagttgataaaagcgttttcaaagtgtggatgcataacaacaagatttcaggacgcagcggcgctagaagagctaacggcggagtagtagtaggaggagtaggagatagtcgtcagagtgttgttccgacaaatgggtcgttttcttcgacgtgaggaaaagaatggaaagcgttgaaaaagcgtcgtcgttttagaggctaattcttttttggtttttcttctctgtgttttgaagattttttatttttagtcaacgggtcaaaatcttttttctattccactttgttttgttatgtcttgtagtttgtactcttgttagtagtttatctttgttagagaggtgatttgagttgtatctttcgaccaaatgtgagaagaaagataaatgagtaacctcctaaaaccgaataacaaagtcaattaatccaattgttttct

SEQ ID NO: 25961 - protein, 271 aa, Arabidopsis thaliana
  peptide (1)..(271): Ceres Seq. ID no. 12421995
MDVIATTTTIVSDLDSRQPEIEAPIRIQPAKPISFSNGKRCHHHHLASEAVAVATYKECLKNHAAGIGGHALDGCGEFMPSPSFNSNDPASLTCAACGCHRNFHRREEDPSSLSAIVPAIEFRPHNRHQLPPPPPPHLAGIRSPDDDDSASPPPISSSYMLLALSGGRGGANTAVPMSRKRFRTKFSQYQKEKMFEFSERVGWRMPKADDVVVKEFCREIGVDKSVFKVWMHNNKISGRSGARRANGGVVVGGVGDSRQSVVPTNGSFSST

SEQ ID NO: 25962 - protein, 193 aa, Arabidopsis thaliana
  peptide (1)..(193): Ceres Seq. ID no. 12421996
MPSPSFNSNDPASLTCAACGCHRNFHRREEDPSSLSAIVPAIEFRPHNRHQLPPPPPPHLAGIRSPDDDDSASPPPISSSYMLLALSGGRGGANTAVPMSRKRFRTKFSQYQKEKMFEFSERVGWRMPKADDVVVKEFCREIGVDKSVFKVWMHNNKISGRSGARRANGGVVVGGVGDSRQSVVPTNGSFSST

SEQ ID NO: 25963 - DNA, 970 bp, Arabidopsis thaliana
  misc_feature (1)..(970): Ceres Seq. ID no. 12332453
  misc_feature (1)..(970): Ortholog of  Ceres SEQ ID NO 15169184 as cited in SEQ ID NO 58733
  misc_feature (1)..(970): Ortholog of  Ceres SEQ ID NO 12635917 as cited in SEQ ID NO 0
  misc_feature (1)..(970): Ortholog of  Ceres SEQ ID NO 14309003 as cited in SEQ ID NO 0
aaaacattttgatattctcttcgaccagatcaatttttcggttagggttcttcgccgaaccattggctactttgctagatctctgaaggtgtaaaagagctatggagaatgggaaaagagacagacaagacatggaagtgaataccacaccgaggaagcctcgtgtactactcgctgcaagtggaagcgtcgctgctatcaaattcggcaatctctgccattgcttcaccgaatgggcagaagtcagagccgtcgttacgaaatcatctctacatttcctcgataaactctctctcccacaagaagtgactctgtatactgatgaagatgaatggtctagctggaacaagatcggtgatcctgtccttcacatcgagcttagacgttgggctgatgttttagtcattgctcctttgtctgctaacaccttaggcaagattgctggtgggctttgtgataatcttctgacttgcattatacgagcttgggactataccaaaccactgtttgttgctccagctatgaatactttgatgtggaacaatcctttcactgaaaggcatcttttgtctcttgatgaactgggaatcacacttattcctcctatcaagaagagacttgcctgtggagactacggtaatggagctatggctgagccctctcttatctattccactgtcagactcttctgggagtctcaggctcatcagcaaaccggtggaactagttaaaaccatgatttccacaacatgcattttgtggaaaatcatctgttttcactatcttagataatagtagattttatcagtctgtttgcttttcttgtacatctcaaaatagctgtctggattgatgtatctggaggaccatttgcactactagctccactctgtttctgtagaaatgtctatgtttcttttcctcgctcttaaatgttgtcttcaattctgctaatagctcactgaacttt

SEQ ID NO: 25964 - protein, 209 aa, Arabidopsis thaliana
  peptide (1)..(209): Ceres Seq. ID no. 12332454
MENGKRDRQDMEVNTTPRKPRVLLAASGSVAAIKFGNLCHCFTEWAEVRAVVTKSSLHFLDKLSLPQEVTLYTDEDEWSSWNKIGDPVLHIELRRWADVLVIAPLSANTLGKIAGGLCDNLLTCIIRAWDYTKPLFVAPAMNTLMWNNPFTERHLLSLDELGITLIPPIKKRLACGDYGNGAMAEPSLIYSTVRLFWESQAHQQTGGTS

SEQ ID NO: 25965 - protein, 199 aa, Arabidopsis thaliana
  peptide (1)..(199): Ceres Seq. ID no. 12332455
MEVNTTPRKPRVLLAASGSVAAIKFGNLCHCFTEWAEVRAVVTKSSLHFLDKLSLPQEVTLYTDEDEWSSWNKIGDPVLHIELRRWADVLVIAPLSANTLGKIAGGLCDNLLTCIIRAWDYTKPLFVAPAMNTLMWNNPFTERHLLSLDELGITLIPPIKKRLACGDYGNGAMAEPSLIYSTVRLFWESQAHQQTGGTS

SEQ ID NO: 25966 - DNA, 1684 bp, Arabidopsis thaliana
  misc_feature (1)..(1684): Ceres Seq. ID no. 12325998
  misc_feature (1)..(1684): Ortholog of  Ceres SEQ ID NO 14302875 as cited in SEQ ID NO 66242
  misc_feature (1)..(1684): Ortholog of  Ceres SEQ ID NO 13660287 as cited in SEQ ID NO 67316
atctcaataaacaaacactaacaatggtggtcgaagaagattcacgtctcataaatctccaacacaagtacaacccgacaatgcccgaggtggtggaggagctgaagagaatttgggacataagttttccggtggccgccatgagcatattaaactacctaaagaacatgacatccgtcgtgtgtatgggacgactcggtagccttgagctcgcaggaggagccttagccatcggtttcaccaacatcacaggttactccgtcctctctggtttagccaccggtatggaaccattatgtggtcaagccatcggttctaaaaacccttctctcgcttccttaaccctcaagcgaaccatcttcctccttctcttagcttctcttcccatatcactcctctggctaaacctcgcgcctctaatgctgatgctccgccaacaacatgatatcactcgtgtcgcatctctctattgttccttctctttgcctgatcttctcgctaatagtttccttcatcctttacgtatttacttacgttgtaaaggcaccacttggcctttgatgtggtgcacgttagtctccgtccttcttcatcttcccattactgctttcttcacgttttacatctctctcggagttcccggagtcgccgtctcttcttttcttaccaacttcatctctttgtcgcttctcctttgctacatctacttggaaaacaacaacaacgacaaaaccacttccaagtctctttgtcttgatacgccgttgatgctgtatggttcgagagactccggtgaaaatgatgtgtggtcaacgctggttaaattcgctgttccaagctgtatagcggtttgcttggagtggtggtggtacgagttcatgacggtcctcgctggatatctccccgagccgaaggtggcgctagcagcagccgccatcgtgatacaaacaacctcattgatgtatacaatcccaacggccctctcggccgcggtatccacgagggtaagcaacgagttaggagcaggacggccagagaaagcaaaaacagcggcgactgtggctgtcggagccgccgtggcagtgtcagtgtttggacttgtggggaccaccgtggggagagaagcttggggaaaagttttcaccgccgacaaagttgtcctcgagctgacggcggcggttcttccggtgattggagcttgtgagcttgccaactgtcctcagaccattagctgttgaatcttacgtggcagtgcgaggccaggtataggggccaagattaatttctacgccttctatgtagttggagcaccagtggcggttgttttagcgtttgtgtggggtttaggcttcatgggcctatgctatggcttgcttgggcacagctagcttgtgcaatctccattttgaccgttgtttataacacagattggaacaaagagtccttgaaggctcatgacttggtgggcaagaacgtcatttcacctaatgtcgatcaaattattgtcaaatgcgaagaaggcctacactaacagtttttccttctcttttctttttgttcttcatatatactatctccatttatgtctcaatgatttgcttttgttttaaaacttatacatttatgtaagtgtcttcattggacaaggacagaatgtaaaactttatgaaacacaaaactgttg

SEQ ID NO: 25967 - protein, 411 aa, Arabidopsis thaliana
  peptide (1)..(411): Ceres Seq. ID no. 12325999
LNKQTLTMVVEEDSRLINLQHKYNPTMPEVVEELKRIWDISFPVAAMSILNYLKNMTSVVCMGRLGSLELAGGALAIGFTNITGYSVLSGLATGMEPLCGQAIGSKNPSLASLTLKRTIFLLLLASLPISLLWLNLAPLMLMLRQQHDITRVASLYCSFSLPDLLANSFLHPLRIYLRCKGTTWPLMWCTLVSVLLHLPITAFFTFYISLGVPGVAVSSFLTNFISLSLLLCYIYLENNNNDKTTSKSLCLDTPLMLYGSRDSGENDVWSTLVKFAVPSCIAVCLEWWWYEFMTVLAGYLPEPKVALAAAAIVIQTTSLMYTIPTALSAAVSTRVSNELGAGRPEKAKTAATVAVGAAVAVSVFGLVGTTVGREAWGKVFTADKVVLELTAAVLPVIGACELANCPQTISC

SEQ ID NO: 25968 - protein, 404 aa, Arabidopsis thaliana
  peptide (1)..(404): Ceres Seq. ID no. 12326000
MVVEEDSRLINLQHKYNPTMPEVVEELKRIWDISFPVAAMSILNYLKNMTSVVCMGRLGSLELAGGALAIGFTNITGYSVLSGLATGMEPLCGQAIGSKNPSLASLTLKRTIFLLLLASLPISLLWLNLAPLMLMLRQQHDITRVASLYCSFSLPDLLANSFLHPLRIYLRCKGTTWPLMWCTLVSVLLHLPITAFFTFYISLGVPGVAVSSFLTNFISLSLLLCYIYLENNNNDKTTSKSLCLDTPLMLYGSRDSGENDVWSTLVKFAVPSCIAVCLEWWWYEFMTVLAGYLPEPKVALAAAAIVIQTTSLMYTIPTALSAAVSTRVSNELGAGRPEKAKTAATVAVGAAVAVSVFGLVGTTVGREAWGKVFTADKVVLELTAAVLPVIGACELANCPQTISC

SEQ ID NO: 25969 - protein, 385 aa, Arabidopsis thaliana
  peptide (1)..(385): Ceres Seq. ID no. 12326001
MPEVVEELKRIWDISFPVAAMSILNYLKNMTSVVCMGRLGSLELAGGALAIGFTNITGYSVLSGLATGMEPLCGQAIGSKNPSLASLTLKRTIFLLLLASLPISLLWLNLAPLMLMLRQQHDITRVASLYCSFSLPDLLANSFLHPLRIYLRCKGTTWPLMWCTLVSVLLHLPITAFFTFYISLGVPGVAVSSFLTNFISLSLLLCYIYLENNNNDKTTSKSLCLDTPLMLYGSRDSGENDVWSTLVKFAVPSCIAVCLEWWWYEFMTVLAGYLPEPKVALAAAAIVIQTTSLMYTIPTALSAAVSTRVSNELGAGRPEKAKTAATVAVGAAVAVSVFGLVGTTVGREAWGKVFTADKVVLELTAAVLPVIGACELANCPQTISC

SEQ ID NO: 25970 - DNA, 1683 bp, Arabidopsis thaliana
  misc_feature (1)..(1683): Ceres Seq. ID no. 13576655
  misc_feature (1)..(1683): Ortholog of  Ceres SEQ ID NO 14310740 as cited in SEQ ID NO 53755
  misc_feature (1)..(1683): Ortholog of  Ceres SEQ ID NO 13596202 as cited in SEQ ID NO 68492
acacactacgtgtcgtttctacgtaatgccattttcgtaatttctagagtttattcagggtgttttcgtcagtctagtcagatcaaatgtttccatcaaacgttagtactgtttcctttagatttacagattttgaagaagaaagatttcaaattaaaaaatctttcaaatttcttcaaggaggtgatcaaattgaacaatttgatctacaatggcttcttcttctgctgacaatcttaccgacaaaaacattgttttcagaaaactcaaatcaaaatctgagaacaaggtctgcttcgattgtagtgcgaagaatccaacttgggcatcggttacatatgggattttcctctgcatcgattgttcagctactcaccggaatcttggtgttcatatcagcttcgtcagatcaacgaatttagactcttggagcccggagcagctcaggacaatgatgtttggtggtaacaaccgtgctcaggttttcttcaagcaacatggatggactgatggtggcaaaattgaagctaagtatacttcaagagctgctgatttgtatcggcagattcttgctaaagaagttgcgaaagcgattgcggaagaaactaattctggtcttctgtcatctcccgttgctacttctcagttaccggaagtatctaatggggtttcttcttattctgtcaaggaagagttacctctttcgaaacatgaagctaccagtgctacttcttcgcctaaagcttctaatacagttgtgcctagtacgtttaagaaacctattggtgctaaaaggacaggaaaaactggtggtcttggtgcaaggaagcttactactaagccaaaagacaatctctatgagcagaaaccggaagaagttgcaccggttattcccgctgtatcatcaacaaataacggggaaagcaaatcatcagctggttcatcatttgcctctcggtttgagtacaatgacgacctgcaatctggaggacaaagcgttggtggtacacaagtgcttaaccatgttgctccaccaaagtcgtcaagcttcttttcggattttggaatggacagttcttttcccaagaaatcaagctccaactcttcaaaatctcaagttgaagaatcagatgaagcaagaaagaagttcacaaacgcaaagtccatatcttcagctcagtactttggggatcagaacaaaaacgctgatctggaatcaaaagctactcttcagaagtttgcaggctcagcatctatctcaagcgctgatttttacggtcacgaccaagatgattccaatattgatataacagctagtgatctcattaaccgactttctttccaggcgcaacaagatctatcgtcgctggtgaacatagcaggagaaacaaagaagaagcttggaactttggcttctggtatcttcagtgatattcaagacagaatgctgtaagaagaccacgagtctctcacatgtttttgatattgacagagaaaaaaaagtaagaaagaagctttgtcggaaaacttccaatgaggttcacgtttctctgtttttattttatagaacttttttttgaaaactattgagacgtggctattgttgttatcatcaaaatctatattgatactattatactcgatatgttatagactttattaaaaaaaactttgtttgtttgc

SEQ ID NO: 25971 - protein, 413 aa, Arabidopsis thaliana
  peptide (1)..(413): Ceres Seq. ID no. 13576656
MASSSADNLTDKNIVFRKLKSKSENKVCFDCSAKNPTWASVTYGIFLCIDCSATHRNLGVHISFVRSTNLDSWSPEQLRTMMFGGNNRAQVFFKQHGWTDGGKIEAKYTSRAADLYRQILAKEVAKAIAEETNSGLLSSPVATSQLPEVSNGVSSYSVKEELPLSKHEATSATSSPKASNTVVPSTFKKPIGAKRTGKTGGLGARKLTTKPKDNLYEQKPEEVAPVIPAVSSTNNGESKSSAGSSFASRFEYNDDLQSGGQSVGGTQVLNHVAPPKSSSFFSDFGMDSSFPKKSSSNSSKSQVEESDEARKKFTNAKSISSAQYFGDQNKNADLESKATLQKFAGSASISSADFYGHDQDDSNIDITASDLINRLSFQAQQDLSSLVNIAGETKKKLGTLASGIFSDIQDRML

SEQ ID NO: 25972 - protein, 333 aa, Arabidopsis thaliana
  peptide (1)..(333): Ceres Seq. ID no. 13576657
MMFGGNNRAQVFFKQHGWTDGGKIEAKYTSRAADLYRQILAKEVAKAIAEETNSGLLSSPVATSQLPEVSNGVSSYSVKEELPLSKHEATSATSSPKASNTVVPSTFKKPIGAKRTGKTGGLGARKLTTKPKDNLYEQKPEEVAPVIPAVSSTNNGESKSSAGSSFASRFEYNDDLQSGGQSVGGTQVLNHVAPPKSSSFFSDFGMDSSFPKKSSSNSSKSQVEESDEARKKFTNAKSISSAQYFGDQNKNADLESKATLQKFAGSASISSADFYGHDQDDSNIDITASDLINRLSFQAQQDLSSLVNIAGETKKKLGTLASGIFSDIQDRML

SEQ ID NO: 25973 - protein, 332 aa, Arabidopsis thaliana
  peptide (1)..(332): Ceres Seq. ID no. 13576658
MFGGNNRAQVFFKQHGWTDGGKIEAKYTSRAADLYRQILAKEVAKAIAEETNSGLLSSPVATSQLPEVSNGVSSYSVKEELPLSKHEATSATSSPKASNTVVPSTFKKPIGAKRTGKTGGLGARKLTTKPKDNLYEQKPEEVAPVIPAVSSTNNGESKSSAGSSFASRFEYNDDLQSGGQSVGGTQVLNHVAPPKSSSFFSDFGMDSSFPKKSSSNSSKSQVEESDEARKKFTNAKSISSAQYFGDQNKNADLESKATLQKFAGSASISSADFYGHDQDDSNIDITASDLINRLSFQAQQDLSSLVNIAGETKKKLGTLASGIFSDIQDRML

SEQ ID NO: 25974 - DNA, 586 bp, Arabidopsis thaliana
  misc_feature (1)..(586): Ceres Seq. ID no. 12393532
  misc_feature (1)..(586): Ortholog of  Ceres SEQ ID NO 12421854 as cited in SEQ ID NO 20723
  misc_feature (1)..(586): Ortholog of  Ceres SEQ ID NO 13597847 as cited in SEQ ID NO 64858
aagttagagactcagtgatcatcgaagcaaatacgcggaaagagaggatgagaaaacgcaatgatcagaggatatattcgcagctatacgaagcaatggaagcacttgttcatatatgcagagatggatgtaaaacaatagggccacacgataaagatttcaaaccgaaccatgcaacgtgtaactatgaagcttgcaagggattagaatcactgatccggcatttcgcaggctgtaagctaagagttccaggaggttgcgtgcattgcaagagaatgtggcaactccttgaactgcattcacgtgtttgcgcaggttctgatcaatgtcgagtccctctatgcagaaaccttaaggagaagatggagaaacagagcaagaaagatgagtcgagatggaaacttctggtgaagaatgtattggggagtaagaaaatcggaggctctcctttctttttaccggtgacaaactgttaaaaaacattttgtcaatctcaagaagggcgagttttaagcgtttcttgtgatcctatctttaaaacaagtgtaacataatgagtttgaataaatgacacatattttggtcg

SEQ ID NO: 25975 - protein, 157 aa, Arabidopsis thaliana
  peptide (1)..(157): Ceres Seq. ID no. 12393533
VRDSVIIEANTRKERMRKRNDQRIYSQLYEAMEALVHICRDGCKTIGPHDKDFKPNHATCNYEACKGLESLIRHFAGCKLRVPGGCVHCKRMWQLLELHSRVCAGSDQCRVPLCRNLKEKMEKQSKKDESRWKLLVKNVLGSKKIGGSPFFLPVTNC

SEQ ID NO: 25976 - protein, 142 aa, Arabidopsis thaliana
  peptide (1)..(142): Ceres Seq. ID no. 12393534
MRKRNDQRIYSQLYEAMEALVHICRDGCKTIGPHDKDFKPNHATCNYEACKGLESLIRHFAGCKLRVPGGCVHCKRMWQLLELHSRVCAGSDQCRVPLCRNLKEKMEKQSKKDESRWKLLVKNVLGSKKIGGSPFFLPVTNC

SEQ ID NO: 25977 - protein, 126 aa, Arabidopsis thaliana
  peptide (1)..(126): Ceres Seq. ID no. 12393535
MEALVHICRDGCKTIGPHDKDFKPNHATCNYEACKGLESLIRHFAGCKLRVPGGCVHCKRMWQLLELHSRVCAGSDQCRVPLCRNLKEKMEKQSKKDESRWKLLVKNVLGSKKIGGSPFFLPVTNC

SEQ ID NO: 25978 - DNA, 1460 bp, Arabidopsis thaliana
  misc_feature (1)..(1460): Ceres Seq. ID no. 13490070
  misc_feature (1)..(1460): Ortholog of  Ceres SEQ ID NO 12364737 as cited in SEQ ID NO 51089
  misc_feature (1)..(1460): Ortholog of  Ceres SEQ ID NO 14306553 as cited in SEQ ID NO 53121
  misc_feature (1)..(1460): Ortholog of  Ceres SEQ ID NO 12581561 as cited in SEQ ID NO 53617
  misc_feature (1)..(1460): Ortholog of  Ceres SEQ ID NO 14316263 as cited in SEQ ID NO 55294
  misc_feature (1)..(1460): Ortholog of  Ceres SEQ ID NO 15176751 as cited in SEQ ID NO 59719
  misc_feature (1)..(1460): Ortholog of  Ceres SEQ ID NO 13597380 as cited in SEQ ID NO 64054
  misc_feature (1)..(1460): Ortholog of  Ceres SEQ ID NO 12625474 as cited in SEQ ID NO 64169
  misc_feature (1)..(1460): Ortholog of  Ceres SEQ ID NO 13597502 as cited in SEQ ID NO 64681
atatcatacgtcaatttataaacgtttcttctcattcgtcatctagtcccattctctgtccataacaatgaatatcaattgttctccattagggtttctaatttcactcttcttcattgttacttttcttgcaccacaagtcaaatctagggctttctttgtctttggtgactctctcgtcgacaatggaaacaacgactacctcgtcaccactgcccgtgccgacaattacccgtatggtatcgactacccgacccgtagacccaccggacgtttctctaacggccttaacattcccgacattatcagtgaggctataggcatgccgtcgactttgccgtaccttagcccgcatctcaccggagaaaatcttctagtcggtgctaattttgcctccgcaggaattggaatcctcaacgacactggaattcaattcgtaaacataattagaatttctaaacagatggaatacttcgaacagtaccagctacgagtgagtgcattgatcggaccagaagctacacaacagctagttaaccaagctcttgtcctaattacactcggtggtaatgatttcgtcaacaattattatctaattccgttttcagctcgttctcgccaatacgcgttaccagactacgttgtgtatctcatttccgaatacggaaagattctcagaaaactctacgaactgggtgcaagacgagttttggtaactggaactggtgcaatgggatgtgctcccgcggagctggctcagcatagccgcaatggcgagtgctatggcgccctccaaacagcagccgctttgttcaatccgcaattagttgatttgatcgcatcagtcaatgctgaaattggtcaagacgtgtttgtagcagccaatgcctatcaaatgaacatggattatctatctaatcctgaacaatttgggtttgtgacatcgaaggtggcatgttgtggacaaggaccgtacaatggcataggactatgcacaccagtctcgaatttgtgtccgaatagagacttatatgcgttttgggatgcgtttcatccgacagagaaagccaataggatcatcgttaatcagatcctgactggttcctccaagtatatgcaccctatgaatcttagcacggccatgctattggattcttctaaaatctagtttaagtgatttctgtcaactaaatgtcaggtcattccttctgtactttgcattgttgttaatgtgttgattaataagttcaatggctacaattagtttaagcatgcaagagagtttttattgtcggtcgtctagtttgatgtctttgcttgttgtatcttgttattttttttattttataaaagaaccgttgtatcttggttagcttagtttagtcttttttggtttgtatgccaattatatcatgtaatatttgaaaacttgtagtgattgatatatgattttcttttct

SEQ ID NO: 25979 - protein, 366 aa, Arabidopsis thaliana
  peptide (1)..(366): Ceres Seq. ID no. 13490071
MNINCSPLGFLISLFFIVTFLAPQVKSRAFFVFGDSLVDNGNNDYLVTTARADNYPYGIDYPTRRPTGRFSNGLNIPDIISEAIGMPSTLPYLSPHLTGENLLVGANFASAGIGILNDTGIQFVNIIRISKQMEYFEQYQLRVSALIGPEATQQLVNQALVLITLGGNDFVNNYYLIPFSARSRQYALPDYVVYLISEYGKILRKLYELGARRVLVTGTGAMGCAPAELAQHSRNGECYGALQTAAALFNPQLVDLIASVNAEIGQDVFVAANAYQMNMDYLSNPEQFGFVTSKVACCGQGPYNGIGLCTPVSNLCPNRDLYAFWDAFHPTEKANRIIVNQILTGSSKYMHPMNLSTAMLLDSSKI

SEQ ID NO: 25980 - protein, 281 aa, Arabidopsis thaliana
  peptide (1)..(281): Ceres Seq. ID no. 13490072
MPSTLPYLSPHLTGENLLVGANFASAGIGILNDTGIQFVNIIRISKQMEYFEQYQLRVSALIGPEATQQLVNQALVLITLGGNDFVNNYYLIPFSARSRQYALPDYVVYLISEYGKILRKLYELGARRVLVTGTGAMGCAPAELAQHSRNGECYGALQTAAALFNPQLVDLIASVNAEIGQDVFVAANAYQMNMDYLSNPEQFGFVTSKVACCGQGPYNGIGLCTPVSNLCPNRDLYAFWDAFHPTEKANRIIVNQILTGSSKYMHPMNLSTAMLLDSSKI

SEQ ID NO: 25981 - protein, 234 aa, Arabidopsis thaliana
  peptide (1)..(234): Ceres Seq. ID no. 13490073
MEYFEQYQLRVSALIGPEATQQLVNQALVLITLGGNDFVNNYYLIPFSARSRQYALPDYVVYLISEYGKILRKLYELGARRVLVTGTGAMGCAPAELAQHSRNGECYGALQTAAALFNPQLVDLIASVNAEIGQDVFVAANAYQMNMDYLSNPEQFGFVTSKVACCGQGPYNGIGLCTPVSNLCPNRDLYAFWDAFHPTEKANRIIVNQILTGSSKYMHPMNLSTAMLLDSSKI

SEQ ID NO: 25982 - DNA, 1638 bp, Arabidopsis thaliana
  misc_feature (1)..(1638): Ceres Seq. ID no. 12332929
  misc_feature (1)..(1638): Ortholog of  Ceres SEQ ID NO 13597511 as cited in SEQ ID NO 64735
aagatctaagcgaaaacaaaaaaaaatgccttaaaacatttgaagaagcaaaacgaagaaacagtgagagagatagaaatggcgagcttaactagtaataagcctagaaattttggtgcgtatagtcactacgctactccctgcactcgcacgcaccagattggacctctttttctcgtcgtctctaccttcttcgtcactaggcttttcgatcagtggttctcggaatccaattccgttactccggtgattgatctccgtcgtacttcttcttcttacggaatcaaaactgataacggtattatacggtggccggagcgaggttatgggtctcacctctcgctgaagatctacgtttatgatgagaatgagatcgacggtcttaaagagctgttgtacggtagggatggtagtgttaagaccaccgcatgcttgaaaggtcaatggggatctcaggttaaaattcacaagttgcttttggagtccaaatttaggacgattaagaaagatgaagcggatttgttctttgtgccagcttatgttaaatgtgtgagaatgttgggaggtcttaatgacaaggagatcaatcagacctatgtcaaggttttgagtcaaatgccgtatttccgaagatctggtggtcgtgatcatatatttgtttttccgagtggtgctggagctcacttgtttagatcctggtcaacatttatcaaccgctctattatcctcactcccgaggctgaccggactgacaagaaagacacaactgcctttaattcatggaaagatataatcataccaggaaacgtcgatgatgctatgactaaaaatggacaacctgatgttcagcctttgcctctgtcaaagaggaagtatttagcaaattatttaggtcgtgcacaagggaaggctggtcgacttaaattgattgacctatcaaagcaatttccagataagctagaatgtccagatttgaagtttagcggaactgaaaagtttggaaggacaacatattttgaacatctgaggaatgccaagttctgcctcgctcctcgtggggaatcatcatggacacttcgcttttatgaatcattctttgtggaatgtgtcccggttcttttatctgaccacgccgagctgcctttccagaatgttatcgactatgcccaagtatcgatcaaatggccatcaactcgaataggctcagagtttcttgattacttagcttcaatatcagatagagacatagaaggaatgatagcccgaggtcggaagattagatgtttgtttgtgtacggtccagattccgcaccctgcagtgcggttaaagggattctatgggagcttcaacgcaaagttagacatttccagcaatcgactgagacgttttggctgcacaatggcagttttgtgaatagagaactggtccagttcagtagctggagacctcctatgcctctaccttgaccggtttcaacattccactagaatatcttgtgtttacgaaacaaaatgaatgatacatttgagtacagtttttttgtgaacttgatttttttgtacatatcactcttcagtggaatttgtttgactaaaatttgatagaaaaatgacgaaccaacaaaattgatggcttcc

SEQ ID NO: 25983 - protein, 462 aa, Arabidopsis thaliana
  peptide (1)..(462): Ceres Seq. ID no. 12332930
MASLTSNKPRNFGAYSHYATPCTRTHQIGPLFLVVSTFFVTRLFDQWFSESNSVTPVIDLRRTSSSYGIKTDNGIIRWPERGYGSHLSLKIYVYDENEIDGLKELLYGRDGSVKTTACLKGQWGSQVKIHKLLLESKFRTIKKDEADLFFVPAYVKCVRMLGGLNDKEINQTYVKVLSQMPYFRRSGGRDHIFVFPSGAGAHLFRSWSTFINRSIILTPEADRTDKKDTTAFNSWKDIIIPGNVDDAMTKNGQPDVQPLPLSKRKYLANYLGRAQGKAGRLKLIDLSKQFPDKLECPDLKFSGTEKFGRTTYFEHLRNAKFCLAPRGESSWTLRFYESFFVECVPVLLSDHAELPFQNVIDYAQVSIKWPSTRIGSEFLDYLASISDRDIEGMIARGRKIRCLFVYGPDSAPCSAVKGILWELQRKVRHFQQSTETFWLHNGSFVNRELVQFSSWRPPMPLP

SEQ ID NO: 25984 - protein, 303 aa, Arabidopsis thaliana
  peptide (1)..(303): Ceres Seq. ID no. 12332931
MLGGLNDKEINQTYVKVLSQMPYFRRSGGRDHIFVFPSGAGAHLFRSWSTFINRSIILTPEADRTDKKDTTAFNSWKDIIIPGNVDDAMTKNGQPDVQPLPLSKRKYLANYLGRAQGKAGRLKLIDLSKQFPDKLECPDLKFSGTEKFGRTTYFEHLRNAKFCLAPRGESSWTLRFYESFFVECVPVLLSDHAELPFQNVIDYAQVSIKWPSTRIGSEFLDYLASISDRDIEGMIARGRKIRCLFVYGPDSAPCSAVKGILWELQRKVRHFQQSTETFWLHNGSFVNRELVQFSSWRPPMPLP

SEQ ID NO: 25985 - protein, 283 aa, Arabidopsis thaliana
  peptide (1)..(283): Ceres Seq. ID no. 12332932
MPYFRRSGGRDHIFVFPSGAGAHLFRSWSTFINRSIILTPEADRTDKKDTTAFNSWKDIIIPGNVDDAMTKNGQPDVQPLPLSKRKYLANYLGRAQGKAGRLKLIDLSKQFPDKLECPDLKFSGTEKFGRTTYFEHLRNAKFCLAPRGESSWTLRFYESFFVECVPVLLSDHAELPFQNVIDYAQVSIKWPSTRIGSEFLDYLASISDRDIEGMIARGRKIRCLFVYGPDSAPCSAVKGILWELQRKVRHFQQSTETFWLHNGSFVNRELVQFSSWRPPMPLP

SEQ ID NO: 25986 - DNA, 1116 bp, Arabidopsis thaliana
  misc_feature (1)..(1116): Ceres Seq. ID no. 12339397
  misc_feature (1)..(1116): Ortholog of  Ceres SEQ ID NO 13599448 as cited in SEQ ID NO 521
  misc_feature (1)..(1116): Ortholog of  Ceres SEQ ID NO 14311918 as cited in SEQ ID NO 51684
  misc_feature (1)..(1116): Ortholog of  Ceres SEQ ID NO 14307472 as cited in SEQ ID NO 54559
  misc_feature (1)..(1116): Ortholog of  Ceres SEQ ID NO 13596408 as cited in SEQ ID NO 62028
aaagtttgttggaggattcgtctctctctctctctctttctctttctctcatcttcttcttatctccctccaaagacggcgactgtataatctatcatttcttcacagtaacgctttcatcggaagatctcgccggcaaaaaaccttctctctgagatcagatctcttacgattctcagctcaatcttatctttttctttgttgtgctgcttttcactctcttctacgcgacgaatttggccttgttttttgtttgtttgtcgtatccgacgcggaggtattgagaaaccgtggcttaagacggaggaagaagatggaagctaacgggattgagaacttgacgaatccgaatcaggaaagagagtttataaggagacatcataagcatgagcttgtggataatcagtgtagctctacgcttgttaaacatatcaacgctcctgttcatattgtgtggtcacttgtgagaagatttgatcagccacagaagtataagccgtttatcagtagatgtgtggtgaaaggaaacatggagattggtacagtaagagaagttgatgtgaaatctggactaccagcaactagaagcactgagagattggagttacttgatgacaatgagcatattctcagtatcagaatcgttggtggtgatcatagacttaagaactattcttcaatcatctctcttcaccccgagactatagaaggaagaataggaacacttgtgattgagtcatttgtggttgatgtaccagaaggaaacacaaaggatgagacttgttactttgttgaagctttaatcaaatgcaatcttaaatctttagctgatatctctgaacgtcttgcggttcaagacacgacagaatcgagagtctaaagatcaaaggagtaaaaaactattgaatcagagagattttggttgccatggatgaagctctcaaagggaaaaagagagagtgggtgagtttctttgaggatggacaaggcaaaaaaagtatcatcatttatccagttacataataattttctcatttgctatttttggggtcatttcactttcaaaccctctttttaatttcatgtgtctaatttaatgaatgtgtttttggtttc

SEQ ID NO: 25987 - protein, 292 aa, Arabidopsis thaliana
  peptide (1)..(292): Ceres Seq. ID no. 12339399
KFVGGFVSLSLSFSFSHLLLISLQRRRLYNLSFLHSNAFIGRSRRQKTFSLRSDLLRFSAQSYLFLCCAAFHSLLRDEFGLVFCLFVVSDAEVLRNRGLRRRKKMEANGIENLTNPNQEREFIRRHHKHELVDNQCSSTLVKHINAPVHIVWSLVRRFDQPQKYKPFISRCVVKGNMEIGTVREVDVKSGLPATRSTERLELLDDNEHILSIRIVGGDHRLKNYSSIISLHPETIEGRIGTLVIESFVVDVPEGNTKDETCYFVEALIKCNLKSLADISERLAVQDTTESRV

SEQ ID NO: 25988 - protein, 188 aa, Arabidopsis thaliana
  peptide (1)..(188): Ceres Seq. ID no. 12339400
MEANGIENLTNPNQEREFIRRHHKHELVDNQCSSTLVKHINAPVHIVWSLVRRFDQPQKYKPFISRCVVKGNMEIGTVREVDVKSGLPATRSTERLELLDDNEHILSIRIVGGDHRLKNYSSIISLHPETIEGRIGTLVIESFVVDVPEGNTKDETCYFVEALIKCNLKSLADISERLAVQDTTESRV

SEQ ID NO: 25989 - DNA, 1188 bp, Arabidopsis thaliana
  misc_feature (1)..(1188): Ceres Seq. ID no. 12396278
  misc_feature (1)..(1188): Ortholog of  Ceres SEQ ID NO 12636774 as cited in SEQ ID NO 372
  misc_feature (1)..(1188): Ortholog of  Ceres SEQ ID NO 12562215 as cited in SEQ ID NO 20489
  misc_feature (1)..(1188): Ortholog of  Ceres SEQ ID NO 13595548 as cited in SEQ ID NO 51024
  misc_feature (1)..(1188): Ortholog of  Ceres SEQ ID NO 13582350 as cited in SEQ ID NO 56734
  misc_feature (1)..(1188): Ortholog of  Ceres SEQ ID NO 12476493 as cited in SEQ ID NO 58163
  misc_feature (1)..(1188): Ortholog of  Ceres SEQ ID NO 14313459 as cited in SEQ ID NO 62395
  misc_feature (1)..(1188): Ortholog of  Ceres SEQ ID NO 13597295 as cited in SEQ ID NO 63743
  misc_feature (1)..(1188): Ortholog of  Ceres SEQ ID NO 12617090 as cited in SEQ ID NO 64005
  misc_feature (1)..(1188): Ortholog of  Ceres SEQ ID NO 13597439 as cited in SEQ ID NO 64081
  misc_feature (1)..(1188): Ortholog of  Ceres SEQ ID NO 13597233 as cited in SEQ ID NO 64370
  misc_feature (1)..(1188): Ortholog of  Ceres SEQ ID NO 13623850 as cited in SEQ ID NO 0
  misc_feature (1)..(1188): Ortholog of  Ceres SEQ ID NO 14309162 as cited in SEQ ID NO 0
aaaaaaacttcaaaagcgtcaaacataaagttaggccaagaaacccatttaaaaaaaaagagagagagatggagagtttcccgatcatcaatctcgagaagcttaatggagaagagagagcaatcactatggagaagatcaaagacgcttgtgaaaactggggcttctttgagtgtgtgaaccatgggatttcactcgagcttttggacaaagtggagaagatgaccaaggaacattacaagaagtgcatggaagagagattcaaggaatcgattaagaacagaggtcttgactctcttcgctctgaagtcaacgacgttgactgggaatccactttctacctcaagcaccttcccgtctctaatatctccgatgtccctgatctcgacgacgattacagaacgttaatgaaagacttcgccggaaagatagagaagttgtcggaggagctactggatctgctgtgcgagaatctcggtttagagaagggttatttaaaaaaggtgttttacgggtcgaaaagaccgacttttggaaccaaagtcagcaattatccaccttgtcctaatccggacctagtcaagggtctccgagcccacaccgacgccggcggcatcatcctcctcttccaagacgacaaagtcagtggacttcagcttcttaaagacggcgagtgggtcgatgttcctccggttaagcattcaatcgtcgttaatctcggcgatcaacttgaggtgataaccaatgggaagtacaagagtgtggaacatagagtgctatctcagacagacggagaaggaagaatgtcgatcgcatcattctataatccgggaagcgactctgttatttttccggcgccggagctgatcggaaaagaagcagagaaggagaagaaagagaactatccgagatttgtgtttgaagattacatgaaactctactctgctgtcaagtttcaggccaaggaaccaaggtttgaagccatgaaagctatggagacaactgtggccaacaatgttggaccattggccactgcgtgaatgatatgtaactggttaataaatatatatatatagtctttatataatgtcttagaaacttgattattcactatacgaataattttgttcatgttgttgtatgtttaagtggtgaatgtgttttatatatgggaattaatgttttctg

SEQ ID NO: 25990 - protein, 345 aa, Arabidopsis thaliana
  peptide (1)..(345): Ceres Seq. ID no. 12396279
KNFKSVKHKVRPRNPFKKKEREMESFPIINLEKLNGEERAITMEKIKDACENWGFFECVNHGISLELLDKVEKMTKEHYKKCMEERFKESIKNRGLDSLRSEVNDVDWESTFYLKHLPVSNISDVPDLDDDYRTLMKDFAGKIEKLSEELLDLLCENLGLEKGYLKKVFYGSKRPTFGTKVSNYPPCPNPDLVKGLRAHTDAGGIILLFQDDKVSGLQLLKDGEWVDVPPVKHSIVVNLGDQLEVITNGKYKSVEHRVLSQTDGEGRMSIASFYNPGSDSVIFPAPELIGKEAEKEKKENYPRFVFEDYMKLYSAVKFQAKEPRFEAMKAMETTVANNVGPLATA

SEQ ID NO: 25991 - protein, 323 aa, Arabidopsis thaliana
  peptide (1)..(323): Ceres Seq. ID no. 12396280
MESFPIINLEKLNGEERAITMEKIKDACENWGFFECVNHGISLELLDKVEKMTKEHYKKCMEERFKESIKNRGLDSLRSEVNDVDWESTFYLKHLPVSNISDVPDLDDDYRTLMKDFAGKIEKLSEELLDLLCENLGLEKGYLKKVFYGSKRPTFGTKVSNYPPCPNPDLVKGLRAHTDAGGIILLFQDDKVSGLQLLKDGEWVDVPPVKHSIVVNLGDQLEVITNGKYKSVEHRVLSQTDGEGRMSIASFYNPGSDSVIFPAPELIGKEAEKEKKENYPRFVFEDYMKLYSAVKFQAKEPRFEAMKAMETTVANNVGPLATA

SEQ ID NO: 25992 - protein, 303 aa, Arabidopsis thaliana
  peptide (1)..(303): Ceres Seq. ID no. 12396281
MEKIKDACENWGFFECVNHGISLELLDKVEKMTKEHYKKCMEERFKESIKNRGLDSLRSEVNDVDWESTFYLKHLPVSNISDVPDLDDDYRTLMKDFAGKIEKLSEELLDLLCENLGLEKGYLKKVFYGSKRPTFGTKVSNYPPCPNPDLVKGLRAHTDAGGIILLFQDDKVSGLQLLKDGEWVDVPPVKHSIVVNLGDQLEVITNGKYKSVEHRVLSQTDGEGRMSIASFYNPGSDSVIFPAPELIGKEAEKEKKENYPRFVFEDYMKLYSAVKFQAKEPRFEAMKAMETTVANNVGPLATA

SEQ ID NO: 25993 - DNA, 1435 bp, Arabidopsis thaliana
  misc_feature (1)..(1435): Ceres Seq. ID no. 12338480
  misc_feature (1)..(1435): Ortholog of  Ceres SEQ ID NO 13598741 as cited in SEQ ID NO 62749
  misc_feature (1)..(1435): Ortholog of  Ceres SEQ ID NO 12587535 as cited in SEQ ID NO 64020
  misc_feature (1)..(1435): Ortholog of  Ceres SEQ ID NO 15176854 as cited in SEQ ID NO 64525
  misc_feature (1)..(1435): Ortholog of  Ceres SEQ ID NO 12586366 as cited in SEQ ID NO 68983
  misc_feature (1)..(1435): Ortholog of  Ceres SEQ ID NO 15178891 as cited in SEQ ID NO 0
aaattacattttacactcatctcgttctctcttccgtcaatatggaaggcgtcaccgtcgtgtctttcttccttcttttcatcgccaccgccatggccgccaagtccaccgtctccttccgtgacggcatgttaccaaacggagacttcgagctaggaccaaaaccatcagacatgaaaggaacagaaatactaaacaaactagcaataccaaactgggaagtcacaggattcgtcgaatacattaaatcaggacataaacaaggagacatgcttctcgttgttcccgccggtaaattcgctgtaagacttgggaacgaagcatcgatcaaacaaagacttaaagtggttaaaggaatgtattactcactcacttttagtgctgctagaacttgtgcacaagacgagagacttaacatatctgtagcacctgactccggtgtgattccgattcagacggtttatagtagtagtggttgggatttatatgcttgggcgtttcaagctgagagtgatgttgctgaagttgtgattcataatcctggtgttgaggaagatccagcttgtggtccacttattgatggtgttgctatgagatctctttaccctcctagaccaactaataagaacattttgaaaaacggaggatttgaagaaggtccattagtattacccggctcgacaactggagttttgatcccaccgtttatagaagacgaccactctcctttacctggatggatggtggagtctctcaaagctgtcaagtacgtagacgttgaacatttctcagtcccacagggtcgcagagctattgagcttgtagcgggtaaagagagtgccatcgctcaagtggttcggactgtcattgggaagacttacgtgctgtcttttgcggttggagacgccaacaatgcttgcaaaggatcaatggtggttgaggcttttgcaggaaaagatacacttaaggtcccttacgagtcgaaaggcacaggagggtttaaacgagcttctattcgatttgtggcggtttcgacccgatcaagaattatgttctacagcactttctatgccatgaggagcgatgatttctcgtcattgtgtgggcctgtgatcgatgatgtcaagcttataagcgttcgtaaaccatagatgaatcaccaatcctattacaagaaaatgcatcgtgtggtcttcttttattttccttaaactgtctttggtgtgtgttggattttattgaaacgagaaggtgaaaaaaacagagttttatttacgagagttagggttttatataggcagatgggcctttgcttatattgtattttcttgtatgagaaggcaaaagaaacgttgcctatatcttatgtatctaggccttttaatttttatggaagagttacaaaacttacaataaagttgtatgcatattttat

SEQ ID NO: 25994 - protein, 382 aa, Arabidopsis thaliana
  peptide (1)..(382): Ceres Seq. ID no. 12338481
ITFYTHLVLSSVNMEGVTVVSFFLLFIATAMAAKSTVSFRDGMLPNGDFELGPKPSDMKGTEILNKLAIPNWEVTGFVEYIKSGHKQGDMLLVVPAGKFAVRLGNEASIKQRLKVVKGMYYSLTFSAARTCAQDERLNISVAPDSGVIPIQTVYSSSGWDLYAWAFQAESDVAEVVIHNPGVEEDPACGPLIDGVAMRSLYPPRPTNKNILKNGGFEEGPLVLPGSTTGVLIPPFIEDDHSPLPGWMVESLKAVKYVDVEHFSVPQGRRAIELVAGKESAIAQVVRTVIGKTYVLSFAVGDANNACKGSMVVEAFAGKDTLKVPYESKGTGGFKRASIRFVAVSTRSRIMFYSTFYAMRSDDFSSLCGPVIDDVKLISVRKP

SEQ ID NO: 25995 - protein, 369 aa, Arabidopsis thaliana
  peptide (1)..(369): Ceres Seq. ID no. 12338483
MEGVTVVSFFLLFIATAMAAKSTVSFRDGMLPNGDFELGPKPSDMKGTEILNKLAIPNWEVTGFVEYIKSGHKQGDMLLVVPAGKFAVRLGNEASIKQRLKVVKGMYYSLTFSAARTCAQDERLNISVAPDSGVIPIQTVYSSSGWDLYAWAFQAESDVAEVVIHNPGVEEDPACGPLIDGVAMRSLYPPRPTNKNILKNGGFEEGPLVLPGSTTGVLIPPFIEDDHSPLPGWMVESLKAVKYVDVEHFSVPQGRRAIELVAGKESAIAQVVRTVIGKTYVLSFAVGDANNACKGSMVVEAFAGKDTLKVPYESKGTGGFKRASIRFVAVSTRSRIMFYSTFYAMRSDDFSSLCGPVIDDVKLISVRKP

SEQ ID NO: 25996 - protein, 352 aa, Arabidopsis thaliana
  peptide (1)..(352): Ceres Seq. ID no. 12338484
MAAKSTVSFRDGMLPNGDFELGPKPSDMKGTEILNKLAIPNWEVTGFVEYIKSGHKQGDMLLVVPAGKFAVRLGNEASIKQRLKVVKGMYYSLTFSAARTCAQDERLNISVAPDSGVIPIQTVYSSSGWDLYAWAFQAESDVAEVVIHNPGVEEDPACGPLIDGVAMRSLYPPRPTNKNILKNGGFEEGPLVLPGSTTGVLIPPFIEDDHSPLPGWMVESLKAVKYVDVEHFSVPQGRRAIELVAGKESAIAQVVRTVIGKTYVLSFAVGDANNACKGSMVVEAFAGKDTLKVPYESKGTGGFKRASIRFVAVSTRSRIMFYSTFYAMRSDDFSSLCGPVIDDVKLISVRKP

SEQ ID NO: 25997 - DNA, 1088 bp, Arabidopsis thaliana
  misc_feature (1)..(1088): Ceres Seq. ID no. 12335935
  misc_feature (1)..(1088): Ortholog of  Ceres SEQ ID NO 12617080 as cited in SEQ ID NO 63943
  misc_feature (1)..(1088): Ortholog of  Ceres SEQ ID NO 13657621 as cited in SEQ ID NO 65802
atcgaacgacccagaaaagagatttgattcctttcctcatctttgttcctcagctctgtttgacccatttatcatatcaaaggaagaaactttaaaatgacaaccgattctgatgatggtttcgtttcttcaagacaactccttttgcttgcttcgatttgttctggtgctctcatgtgcaaaatcgtttatgacttgactcgtttcataagtccattgctcttcagtgtttatggaaaacttgacagcaaagttagaatggaatggaacaataggggattctcaacttttcatgctgtgtttacttctgtggcttcaatttacttcttggtgatatctgatcaatttgatgagaatgttcatggtgattcagtcattaatagtacaacgaggttatcggaatctgtaatggggatctccttaggctattttctagcagacttagcaatgatcttttggtattttcctactcttggtggtattgaatatgtttttcatcacttcttatcgatgtttgccatcattctttctgtcacaagtgggcaaagtcagttctacatcttcttagttctcttatcagaggctacaaccccgtttgttaatctacggtggtacttggataatagtggtcaaaaaggctcaaaggcttacacgctcaacggaattgctttgttcttggggtggctggttgcgagggtccttttgtttatcttcttctttgttcacatgtacctccatttccatcaggtgaagcaagtgtttccactgggattttacagccttcttacgataccaccggctctagcagtgatgaatctcctttggttctggaaaatcaccaaaggattgatcaaaacactctccaaggcgaaaacatcggggatgaagaaacagtgatggttaccctgaaaaagatttttcaactgcattcactttgatgtgtccatgaaaaattgattgatattcatgttgtggttgtcttggatgcccttttgggttttatgaacaaagagtgtgcaagctaatggggattgtatattcaaacttttcagctgtttcttaggtattcagtttgtatagttagaacc

SEQ ID NO: 25998 - protein, 266 aa, Arabidopsis thaliana
  peptide (1)..(266): Ceres Seq. ID no. 12335936
MTTDSDDGFVSSRQLLLLASICSGALMCKIVYDLTRFISPLLFSVYGKLDSKVRMEWNNRGFSTFHAVFTSVASIYFLVISDQFDENVHGDSVINSTTRLSESVMGISLGYFLADLAMIFWYFPTLGGIEYVFHHFLSMFAIILSVTSGQSQFYIFLVLLSEATTPFVNLRWYLDNSGQKGSKAYTLNGIALFLGWLVARVLLFIFFFVHMYLHFHQVKQVFPLGFYSLLTIPPALAVMNLLWFWKITKGLIKTLSKAKTSGMKKQ

SEQ ID NO: 25999 - protein, 240 aa, Arabidopsis thaliana
  peptide (1)..(240): Ceres Seq. ID no. 12335937
MCKIVYDLTRFISPLLFSVYGKLDSKVRMEWNNRGFSTFHAVFTSVASIYFLVISDQFDENVHGDSVINSTTRLSESVMGISLGYFLADLAMIFWYFPTLGGIEYVFHHFLSMFAIILSVTSGQSQFYIFLVLLSEATTPFVNLRWYLDNSGQKGSKAYTLNGIALFLGWLVARVLLFIFFFVHMYLHFHQVKQVFPLGFYSLLTIPPALAVMNLLWFWKITKGLIKTLSKAKTSGMKKQ

SEQ ID NO: 26000 - protein, 212 aa, Arabidopsis thaliana
  peptide (1)..(212): Ceres Seq. ID no. 12335938
MEWNNRGFSTFHAVFTSVASIYFLVISDQFDENVHGDSVINSTTRLSESVMGISLGYFLADLAMIFWYFPTLGGIEYVFHHFLSMFAIILSVTSGQSQFYIFLVLLSEATTPFVNLRWYLDNSGQKGSKAYTLNGIALFLGWLVARVLLFIFFFVHMYLHFHQVKQVFPLGFYSLLTIPPALAVMNLLWFWKITKGLIKTLSKAKTSGMKKQ

SEQ ID NO: 26001 - DNA, 1149 bp, Arabidopsis thaliana
  misc_feature (1)..(1149): Ceres Seq. ID no. 12579770
  misc_feature (1)..(1149): Ortholog of  Ceres SEQ ID NO 13586635 as cited in SEQ ID NO 14217
  misc_feature (1)..(1149): Ortholog of  Ceres SEQ ID NO 12616285 as cited in SEQ ID NO 63483
acacatcttaaaaagtaaaaacacattcatctatccaacaaaaaaaaaaaaaaaaaggagaaatggaaggaatcgatcatagaatggtgagtgtcaatggcataactatgcacattgccgagaaaggtcccaaagaaggacctgtggtgcttctcctccatggattccctgatctctggtacacgtggcgtcaccagattagtgggttatcatctctaggttaccgcgctgtagctccagacctccgaggctacggagactctgattcgccagagtctttctccgagtacacgtgtcttaacgtcgttggggacctcgtagctcttctggacagtgttgctggaaatcaagagaaggtgtttctggtcggtcatgattggggagccattatcggatgatttctctgtttgtttcgacctgaaaagattaacggctttgtgtgtttgagtgtgccgtatagatcaagaaaccctaaagtcaagcccgttcaagggttcaaggctgtatttggagatgattactacatttgtagatttcaggaaccggggaagattgaaggagagattgcaagtgcagatccaagaatatttctgaggaacctcttcacagggaggacactcggtccgccgattttacctaaggataatccctttggggaaaaacctaaccctaatagcgaaaacattgaattgcctgaatggttttctaagaaagatctcgatttctatgtctccaaattcgagaaggcaggatttaccggtggattgaactactacagagccatggatctgaattgggagctcactgcaccatggaccggagctaagattcaagttccagtgaagttcatgacaggtgacttcgacatggtttacaccacaccagggatgaaagagtacattcacggtggtggatttgctgcagatgttccaactcttcaagagatagtggtgattgaagatgctggtcacttcgttaaccaagagaaacctcaagaggtcactgctcacatcaatgacttcttcaccaagcttcgggacaacaacaaaagcttttagagttctcgtttggttctattatgttggctctcaaaacaagttggttcttgcatgtgttgtttcgacaagattttgaataagacttggcatt

SEQ ID NO: 26002 - protein, 111 aa, Arabidopsis thaliana
  peptide (1)..(111): Ceres Seq. ID no. 12579771
MEGIDHRMVSVNGITMHIAEKGPKEGPVVLLLHGFPDLWYTWRHQISGLSSLGYRAVAPDLRGYGDSDSPESFSEYTCLNVVGDLVALLDSVAGNQEKVFLVGHDWGAIIG

SEQ ID NO: 26003 - protein, 104 aa, Arabidopsis thaliana
  peptide (1)..(104): Ceres Seq. ID no. 12579772
MVSVNGITMHIAEKGPKEGPVVLLLHGFPDLWYTWRHQISGLSSLGYRAVAPDLRGYGDSDSPESFSEYTCLNVVGDLVALLDSVAGNQEKVFLVGHDWGAIIG

SEQ ID NO: 26004 - protein, 96 aa, Arabidopsis thaliana
  peptide (1)..(96): Ceres Seq. ID no. 12579773
MHIAEKGPKEGPVVLLLHGFPDLWYTWRHQISGLSSLGYRAVAPDLRGYGDSDSPESFSEYTCLNVVGDLVALLDSVAGNQEKVFLVGHDWGAIIG

SEQ ID NO: 26005 - DNA, 1369 bp, Arabidopsis thaliana; identical to SEQ ID NO: 21457
  misc_feature (1)..(1369): Ceres Seq. ID no. 13491211
  misc_feature (1)..(1369): Ortholog of  Ceres SEQ ID NO 13648488 as cited in SEQ ID NO 20419

SEQ ID NO: 26006 - protein, 289 aa, Arabidopsis thaliana; identical to SEQ ID NO: 21458
  peptide (1)..(289): Ceres Seq. ID no. 13491212

SEQ ID NO: 26007 - protein, 179 aa, Arabidopsis thaliana; identical to SEQ ID NO: 21459
  peptide (1)..(179): Ceres Seq. ID no. 13491213

SEQ ID NO: 26008 - DNA, 1153 bp, Arabidopsis thaliana
  misc_feature (1)..(1153): Ceres Seq. ID no. 12333192
  misc_feature (1)..(1153): Ortholog of  Ceres SEQ ID NO 14304689 as cited in SEQ ID NO 53265
  misc_feature (1)..(1153): Ortholog of  Ceres SEQ ID NO 14307820 as cited in SEQ ID NO 53938
  misc_feature (1)..(1153): Ortholog of  Ceres SEQ ID NO 15177137 as cited in SEQ ID NO 55030
  misc_feature (1)..(1153): Ortholog of  Ceres SEQ ID NO 14302407 as cited in SEQ ID NO 66891
  misc_feature (1)..(1153): Ortholog of  Ceres SEQ ID NO 13599557 as cited in SEQ ID NO 0
aatcaccaaccagtgacctaacaatggccgttcctccattattcttcctcctcacactcctctctctcccttctcttcttatctccgccggtgcttccaatgcctatccttctattcccggaaccgctcctatcgacggaggtttcaccgatgaacttaaacccattcgccgtgaagtctacgggaatggcaaaatctatgacatcagtcaccgttacactccggagatgccgtcgtgggactcatcggaaggaatcggacggttcctatggttagctgcgagtatgaagaacggatctcttgctaataactctgaaatgaagattcccacgcacactggtactcatgttgattcacctggtcacgtctatgacaagtattacgatgctggctttgatgttgactcgcttgatcttcaagtcctcaatggtcttgcgttgttggttgatgttccaaaggataagaacattactgctgaagtgatgaaatctcttcacattccaaaaggagttagtcgtgtgcttttcagaacattgaacactgacaggcgtcttatgttcaagaaagaatttgatacaagctatgtcggattcatgaaggatggtgcgcaatggttggtagacaacacagacatcaaacttgttgggattgattatctatcagtagctgcatatgatgatcttattccatcccacctagtattcctaaaagaccgggagactatactcgtggaggggttgaagctggatggtgtgaaggcaggactctactctgtccattgcttacctctaagactggttggagcagaagggtctccaattcgttgcatcctcatcgattgattctctcccatcacaaacctgccaaatccgaaattgtccgtaatcaaaagcttgcttagcttatgaactgaatatcagtttgtgctagatttatgcaaccaatatggagattgaagtaggaagaaataagagagatgcagagaagaccaagttgatgataatgaagcaccgaagaaaaaagatttttcatttctatgtatatgtcaataaataaattaaaaattctcttaatctgtcaaggttgtactaattatcaaatagggaaaagttcataacatataaatccttgttgaaataggtttttgttttcc

SEQ ID NO: 26009 - protein, 279 aa, Arabidopsis thaliana
  peptide (1)..(279): Ceres Seq. ID no. 12333193
SPTSDLTMAVPPLFFLLTLLSLPSLLISAGASNAYPSIPGTAPIDGGFTDELKPIRREVYGNGKIYDISHRYTPEMPSWDSSEGIGRFLWLAASMKNGSLANNSEMKIPTHTGTHVDSPGHVYDKYYDAGFDVDSLDLQVLNGLALLVDVPKDKNITAEVMKSLHIPKGVSRVLFRTLNTDRRLMFKKEFDTSYVGFMKDGAQWLVDNTDIKLVGIDYLSVAAYDDLIPSHLVFLKDRETILVEGLKLDGVKAGLYSVHCLPLRLVGAEGSPIRCILID

SEQ ID NO: 26010 - protein, 272 aa, Arabidopsis thaliana
  peptide (1)..(272): Ceres Seq. ID no. 12333194
MAVPPLFFLLTLLSLPSLLISAGASNAYPSIPGTAPIDGGFTDELKPIRREVYGNGKIYDISHRYTPEMPSWDSSEGIGRFLWLAASMKNGSLANNSEMKIPTHTGTHVDSPGHVYDKYYDAGFDVDSLDLQVLNGLALLVDVPKDKNITAEVMKSLHIPKGVSRVLFRTLNTDRRLMFKKEFDTSYVGFMKDGAQWLVDNTDIKLVGIDYLSVAAYDDLIPSHLVFLKDRETILVEGLKLDGVKAGLYSVHCLPLRLVGAEGSPIRCILID

SEQ ID NO: 26011 - protein, 204 aa, Arabidopsis thaliana
  peptide (1)..(204): Ceres Seq. ID no. 12333195
MPSWDSSEGIGRFLWLAASMKNGSLANNSEMKIPTHTGTHVDSPGHVYDKYYDAGFDVDSLDLQVLNGLALLVDVPKDKNITAEVMKSLHIPKGVSRVLFRTLNTDRRLMFKKEFDTSYVGFMKDGAQWLVDNTDIKLVGIDYLSVAAYDDLIPSHLVFLKDRETILVEGLKLDGVKAGLYSVHCLPLRLVGAEGSPIRCILID

SEQ ID NO: 26012 - DNA, 999 bp, Arabidopsis thaliana
  misc_feature (1)..(999): Ceres Seq. ID no. 12335964
  misc_feature (1)..(999): Ortholog of  Ceres SEQ ID NO 15178847 as cited in SEQ ID NO 1145
  misc_feature (1)..(999): Ortholog of  Ceres SEQ ID NO 14311253 as cited in SEQ ID NO 56483
  misc_feature (1)..(999): Ortholog of  Ceres SEQ ID NO 13597435 as cited in SEQ ID NO 64073
  misc_feature (1)..(999): Ortholog of  Ceres SEQ ID NO 13656209 as cited in SEQ ID NO 64393
aatattctgaaaatatctttctctcgatgaaacttgtctcctccggccaaccttaacccttaagcgaacggtgttcctttgcggattgcgatcgttccgtcgatcccttcatcgcccgatctaaatctctaatcgtgtcggagattaaaagcagaggttttgtggtgaatcatgtctgatgtcccttcttgttctagcggtaatgatacaaacaacaatgattcgagtaacttcgaatgtaacatctgcttagacttggctcaagatcctattgtcactctctgtggtcacttgttctgttggccttgtttatacaaatggctccatctccattctcaatctaaggactgtcctgtttgcaaagccgtgatcgaagaagacagattggttcctttgtacggtagaggtaaatcgtctgctgaccctcggtccaagtccattccgggtctcgaagtgcctaaccgtccatcgggacagagacccgaaactgcacaacctcctgatcctaaccatggttttgctcatcatcatgggtttggagggttcatgggaggttttgctgctccgatggcgagtgcgcggttcgggaatgttacattgtctgcagcgtttggcggtttgattccttctttgttcaacctccatttccatggtttccctgatgcagccatgtatggagctgctgcttctggcggcttccctcacggtttctcgaatccgtttcatggaggacactcgcatatgcatagttaccagcggcacacgggtcgacaaggacaacaagaccatcacttgaggatattgttactcattgttttcgtcgttgttgtgttttctctcttcttgagctagtgaggaaatcgatttagctaactgtatttcgctttttattctagattttattgcataaaaacatgggaaaatatgtgctgtgagttggcttgtaaactgctactttagcaaattgttcatatattaataaaacctgtcggattctcc

SEQ ID NO: 26013 - protein, 226 aa, Arabidopsis thaliana
  peptide (1)..(226): Ceres Seq. ID no. 12335965
MSDVPSCSSGNDTNNNDSSNFECNICLDLAQDPIVTLCGHLFCWPCLYKWLHLHSQSKDCPVCKAVIEEDRLVPLYGRGKSSADPRSKSIPGLEVPNRPSGQRPETAQPPDPNHGFAHHHGFGGFMGGFAAPMASARFGNVTLSAAFGGLIPSLFNLHFHGFPDAAMYGAAASGGFPHGFSNPFHGGHSHMHSYQRHTGRQGQQDHHLRILLLIVFVVVVFSLFLS

SEQ ID NO: 26014 - DNA, 1234 bp, Arabidopsis thaliana
  misc_feature (1)..(1234): Ceres Seq. ID no. 12393756
  misc_feature (1)..(1234): Ortholog of  Ceres SEQ ID NO 12609869 as cited in SEQ ID NO 52065
  misc_feature (1)..(1234): Ortholog of  Ceres SEQ ID NO 14301506 as cited in SEQ ID NO 61159
  misc_feature (1)..(1234): Ortholog of  Ceres SEQ ID NO 13597124 as cited in SEQ ID NO 64173
  misc_feature (1)..(1234): Ortholog of  Ceres SEQ ID NO 12780602 as cited in SEQ ID NO 65695
agaatcctccattactcttcttctcgacttcggaatctttcaaagcttcttcgatttttccagaggcaatcatggttaaaggtccaggactctacactgaaatcggcaaaaaggccagagatcttctgtacagggattaccaaggagaccagaaattcagtgtcaccacttactcttcaactggtgttgcgatcactacaacgggaacaaacaaaggaagcttgtttttgggtgatgttgctacccaagtgaagaacaacaacttcactgctgatgtcaaagtttccactgattcttctcttttgaccactcttacctttgatgagcctgcccctggactgaaagttattgttcaggctaagttgcccgatcacaaatctggaaaggctgaggttcagtatttccatgactatgctggtatctctaccagcgttggattcacagctaccccgattgtcaacttctccggtgtggttggaaccaatggtttgtctcttggtactgatgtggcctataacaccgaatctggcaacttcaaacatttcaatgctggtttcaacttcaccaaggatgatttgactgcttccctcattctgaatgacaaaggtgagaaattgaatgcatcctactaccagattgtgagcccgtcgactgtggttggagctgagattagccacaacttcacgaccaaagagaacgccatcactgtcggaactcaacacgcgcttgacccattgaccacagtgaaggcaagagtgaacaatgctggtgtggctaacgctctgatccaacatgagtggcgtccaaagtcgttcttcaccgtttctggagaggttgattctaaggcgatcgataagagtgccaaggttgggattgctctcgctctcaagccctgagaagataccaccaaatgggccctgaagtgggtagaataggtgttatttctttttcgtcttcaaatctttggacaaatcgctgtctggtttgctaaacaatctttcatttgttttttttgttcggtgttgggatttgtagaaaataaaagagaaaaatactattgaaaggatcgtctttgacgataaagaaccattaagatcgttttacttggctctctctcttttattttccgcctctgctacaatactctgttccatatcttttacttggttctctcttttattttctgcctctgctatactttgttccatttggagttcccttagtggatttttct

SEQ ID NO: 26015 - protein, 297 aa, Arabidopsis thaliana
  peptide (1)..(297): Ceres Seq. ID no. 12393757
NPPLLFFSTSESFKASSIFPEAIMVKGPGLYTEIGKKARDLLYRDYQGDQKFSVTTYSSTGVAITTTGTNKGSLFLGDVATQVKNNNFTADVKVSTDSSLLTTLTFDEPAPGLKVIVQAKLPDHKSGKAEVQYFHDYAGISTSVGFTATPIVNFSGVVGTNGLSLGTDVAYNTESGNFKHFNAGFNFTKDDLTASLILNDKGEKLNASYYQIVSPSTVVGAEISHNFTTKENAITVGTQHALDPLTTVKARVNNAGVANALIQHEWRPKSFFTVSGEVDSKAIDKSAKVGIALALKP

SEQ ID NO: 26016 - protein, 274 aa, Arabidopsis thaliana
  peptide (1)..(274): Ceres Seq. ID no. 12393758
MVKGPGLYTEIGKKARDLLYRDYQGDQKFSVTTYSSTGVAITTTGTNKGSLFLGDVATQVKNNNFTADVKVSTDSSLLTTLTFDEPAPGLKVIVQAKLPDHKSGKAEVQYFHDYAGISTSVGFTATPIVNFSGVVGTNGLSLGTDVAYNTESGNFKHFNAGFNFTKDDLTASLILNDKGEKLNASYYQIVSPSTVVGAEISHNFTTKENAITVGTQHALDPLTTVKARVNNAGVANALIQHEWRPKSFFTVSGEVDSKAIDKSAKVGIALALKP

SEQ ID NO: 26017 - DNA, 816 bp, Arabidopsis thaliana
  misc_feature (1)..(816): Ceres Seq. ID no. 12481979
  misc_feature (1)..(816): Ortholog of  Ceres SEQ ID NO 13599568 as cited in SEQ ID NO 509
  misc_feature (1)..(816): Ortholog of  Ceres SEQ ID NO 13638595 as cited in SEQ ID NO 52050
  misc_feature (1)..(816): Ortholog of  Ceres SEQ ID NO 13594748 as cited in SEQ ID NO 52114
  misc_feature (1)..(816): Ortholog of  Ceres SEQ ID NO 14301870 as cited in SEQ ID NO 61501
  misc_feature (1)..(816): Ortholog of  Ceres SEQ ID NO 12583993 as cited in SEQ ID NO 68098
  misc_feature (1)..(816): Ortholog of  Ceres SEQ ID NO 13654535 as cited in SEQ ID NO 68227
acacagtttcaaattagagcttcaaatctagttacttgttcttctacagtacatcatcaaaagtcaaaaccatggactcgagatgttttggcttcttctttactttgttatctctaaatgtgattgttcttgcttacgatcctgacacacttcaagatctctgcgttgcggatcgcacttcagggataaaagtgaatggtttcacatgtaaacccgaatcaaacatcaccgcttcagattttttcttcgccggaatcggaaaacccgccgtcgttaacaacacagtcgggtcagccgtcacgggagcaaacgtagagaagatcgcagggcttaacacgctcggagtctcactcgcgcgtatcgactacgctcccggaggtttaaacccgccgcacacgcatccacgcgccaccgaagtgatcttcgttttggaaggcgagcttgacgttggattcataacgacggcgaacaagctcttcgctaagacggtgaagaaaggagaagtgttcgtcttccctagaggattgattcattaccagaaaaacaacgacaaagcgaaaccggcgtcggtgatctctgcgttcaacagtcaattaccgggaacacaatcgatcgccgccacgctattcacagccactccggcgattccggatcacgttttaacgacgacgtttcaaatcggaacgaaagaaatcgaaaaaatcaaatctaagtttgctcccaagaaagtctaaaaatcgcgtcgttatatatatatattttaaattttattaattggtttttaaattttaataaaggaaaaaataaaccttgttc

SEQ ID NO: 26018 - protein, 220 aa, Arabidopsis thaliana
  peptide (1)..(220): Ceres Seq. ID no. 12481980
MDSRCFGFFFTLLSLNVIVLAYDPDTLQDLCVADRTSGIKVNGFTCKPESNITASDFFFAGIGKPAVVNNTVGSAVTGANVEKIAGLNTLGVSLARIDYAPGGLNPPHTHPRATEVIFVLEGELDVGFITTANKLFAKTVKKGEVFVFPRGLIHYQKNNDKAKPASVISAFNSQLPGTQSIAATLFTATPAIPDHVLTTTFQIGTKEIEKIKSKFAPKKV

SEQ ID NO: 26019 - DNA, 662 bp, Arabidopsis thaliana
  misc_feature (1)..(662): Ceres Seq. ID no. 12333508
  misc_feature (1)..(662): Ortholog of  Ceres SEQ ID NO 14301998 as cited in SEQ ID NO 52093
  misc_feature (1)..(662): Ortholog of  Ceres SEQ ID NO 12619783 as cited in SEQ ID NO 69210
acaaattacatcaatccactcacttactttggcaacaaacaaacaacaacaaagagagaaattaacatggcgtcttttgcaaccatcgccgccgtacaaccttctgccgccgtgaaaggacttggaggtagctctcttgccggagctaagctcttcatcaaaccttctcgccaaagcttcaaaaccaaatccaccagagctggtgctgtggtggctaagtatggagacaaaagtgtatactttgatttagaagatttgggtaacacaacaggacaatgggatgtgtatggatctgatgctccttctccttataacccacttcagagcaagttctttgagacatttgctgctcctttcacaaagagaggtttgcttctcaaatttttgattcttggaggaggctctttgcttacatatgttagtgcgaactctaccggcgatgttcttccgattaagagaggtcctcaagagccacctaagctcggtcctcgcggcaagctttaaattagctttctaaaatctttcaaaaagtcagaaactttctccccaattctatgaaccctatttatgtatattgtactgtgttgtgttaattgctttgtaagctagtgattctgaaaatcagttatgatgaatcaatgaaattgcatttcaagtctgct

SEQ ID NO: 26020 - protein, 167 aa, Arabidopsis thaliana
  peptide (1)..(167): Ceres Seq. ID no. 12333509
TNYINPLTYFGNKQTTTKREINMASFATIAAVQPSAAVKGLGGSSLAGAKLFIKPSRQSFKTKSTRAGAVVAKYGDKSVYFDLEDLGNTTGQWDVYGSDAPSPYNPLQSKFFETFAAPFTKRGLLLKFLILGGGSLLTYVSANSTGDVLPIKRGPQEPPKLGPRGKL

SEQ ID NO: 26021 - protein, 145 aa, Arabidopsis thaliana
  peptide (1)..(145): Ceres Seq. ID no. 12333510
MASFATIAAVQPSAAVKGLGGSSLAGAKLFIKPSRQSFKTKSTRAGAVVAKYGDKSVYFDLEDLGNTTGQWDVYGSDAPSPYNPLQSKFFETFAAPFTKRGLLLKFLILGGGSLLTYVSANSTGDVLPIKRGPQEPPKLGPRGKL

SEQ ID NO: 26022 - DNA, 1566 bp, Arabidopsis thaliana
  misc_feature (1)..(1566): Ceres Seq. ID no. 12489600
  misc_feature (1)..(1566): Ortholog of  Ceres SEQ ID NO 15169110 as cited in SEQ ID NO 58675
aactttacttttcctctgctcgtagacagctttgtgcttgagacgattcccagtttctgcgattccaagtcgaagatataacctctcctatttgcgtctcagcttctacagagcttttagcattaaaagttgttaaaatggctggggggtcaaagaggtctaaaagagcaagacttgacagtgaatcggaagacataagcgaccaagaaaaccttaaggccgaaagcganaatgaagatgatcaattacctgatgggatagaggatgatgaagtagatagcatggaagatgatgagggagagagtgangaagacgatgaaggagataccgaggaagatgatgaaggagatatcgaggaagatgatgcaggagataacaaggaagacgaggatggagaaagcgaggactttgaagatggaaatgataaagagagtgagagtggcgatgaaggtaatgatgacaataaagatgctcagatggaagagcttgagaaagaggtcaaggagcttcgttcacaagagcaggatatattgaagaacttgaagcgtgataagggtgaagatgctgtttaaaggtcaagcggtgaagaatcagaaggctctttgggataagattctggagttcagattcttacttcagaaagcatttgatcgttcaaacagattaccacaggagcctgtgaaatcgttattttgttcggaagatgaggatgtctcaacagcatatacagatctagttacttcatctaagaagacattagattccctcttggagttgcaagaggctttgtttgagaagaacccctcagttgatcaacaagtgaatgcaacagctagtgaagaatccaataaatcagatgcggaagatagcgatgaatggcagcgaatatctgacttgcagaaaagaatgtctgtgttccgaaacaaggctgtggacaaatggcagagaaaaacacaagtcacaactggtgcagctgctattaaaggaaagctccacgcctttaaccagaacgttagtgaacaggttgcttcctacatgagggatccaagtagaatgattaaacagatgcaacaatcaagatctactgttgctgtttttggaactgtccctcaggaagccatggaaccaaatccagaggaaaaacaacaagaaggagaccctgaacttgtggaagatgctgagttctataggcagttactaaaagagtttcttgagaacatcgatccagcttcctcagaggcggctttctacgaantgaagaagtttcagacgaagaagaggaaagttgtggatcgacgtgcctcaaagagcagaaagatcaggtataatgttcatgagaagattgtcaacttcatggctccacgaccagcaaagattcctccaaacactgcggatttgcttaagaatctcttcggtctcaagaccagaaacgttcagtctgaagcttaatatcaaagaaaccacaattttgaaacgctgtaatagatcgtccctttttctgtggtgtgttgtaatactactattgacaccgtttctatcgaaagacatatgtgaaagcatcgagtt

SEQ ID NO: 26023 - protein, 295 aa, Arabidopsis thaliana
  peptide (1)..(295): Ceres Seq. ID no. 12489601
  misc_feature (232)..(232): Xaa is any aa, unknown or other
MLFKGQAVKNQKALWDKILEFRFLLQKAFDRSNRLPQEPVKSLFCSEDEDVSTAYTDLVTSSKKTLDSLLELQEALFEKNPSVDQQVNATASEESNKSDAEDSDEWQRISDLQKRMSVFRNKAVDKWQRKTQVTTGAAAIKGKLHAFNQNVSEQVASYMRDPSRMIKQMQQSRSTVAVFGTVPQEAMEPNPEEKQQEGDPELVEDAEFYRQLLKEFLENIDPASSEAAFYEXKKFQTKKRKVVDRRASKSRKIRYNVHEKIVNFMAPRPAKIPPNTADLLKNLFGLKTRNVQSEA

SEQ ID NO: 26024 - protein, 180 aa, Arabidopsis thaliana
  peptide (1)..(180): Ceres Seq. ID no. 12489602
  misc_feature (117)..(117): Xaa is any aa, unknown or other
MSVFRNKAVDKWQRKTQVTTGAAAIKGKLHAFNQNVSEQVASYMRDPSRMIKQMQQSRSTVAVFGTVPQEAMEPNPEEKQQEGDPELVEDAEFYRQLLKEFLENIDPASSEAAFYEXKKFQTKKRKVVDRRASKSRKIRYNVHEKIVNFMAPRPAKIPPNTADLLKNLFGLKTRNVQSEA

SEQ ID NO: 26025 - DNA, 1601 bp, Arabidopsis thaliana
  misc_feature (1)..(1601): Ceres Seq. ID no. 12331374
  misc_feature (1)..(1601): Ortholog of  Ceres SEQ ID NO 15170209 as cited in SEQ ID NO 58562
  misc_feature (1)..(1601): Ortholog of  Ceres SEQ ID NO 12616332 as cited in SEQ ID NO 63449
  misc_feature (1)..(1601): Ortholog of  Ceres SEQ ID NO 13597498 as cited in SEQ ID NO 64648
atcagagagactaggtttggtaattgatcagaaagtaattaagaagatcacacaaaattcacatccccaaaaactaatccgataaaaatcataaatctcaacggcactctcttctcttgtctctccttatttctcaatccagattccaatttctctcagcgaagtgagtgatctcgtcgtttgtgttccgctggtgaatcatcaccggagaattgcagatccaatgatacatccctaatcggttttattttgagtgacgacgaatcattggatccagaaaatccgatttctggaggtttgaattagtgaaatttgatcgaatttcgacagtgatgaggcatttgcgtctgattgctttgactaagagatctgattttggatctatttcaatggcgaggaaagggtcgagtataagattatcgagctcgagaatatcaacccttttgctctttatgtttgcaacttttgcttccttctatgtagcaggccgtttatggcaagaatctcaaactagggttcatctaatcaatgagctcgatagagtaaccggacaggggaaatctgctatatcagtggatgatactttgaagatcatagcttgcagggaacagaagaagacactagcagctcttgagatggaattaagttcagctaggcaagaaggctttgtttcaaaaagtcccaaacttgctgatggaactgaaaccaagaaaagaccgttagtggttatcgggataatgacaagtttgggtaacaagaagaagagggatgcagttcgtcaagcatggatggggactggtgcatcacttaaaaaacttgaaagtgaaaagggtgtgattgcaagatttgttattggaagaagtgcaaataaaggggacagcatggacaagagcattgatactgaaaatagtcaaaccgatgacttcattattctcgatgatgtagttgaggcacccgaggaagcttctaagaaggtaaaactgttctttgcctacgctgcagataggtgggatgcacagttttatgcaaaagccatcgacaatatctacgtaaatatagatgctctgggaactacgcttgcagcacatctggaaaacccacgggcttacatcggttgcatgaaatcaggcgaagtcttctcagaaccgaaccacaaatggtatgaaccagagtggtggaaattcggtgacaagaaagcatacttccggcatgcttatggggagatgtatgttataacgcacgcattggctagatttgtatcgatcaatagagacattcttcattcgtatgctcatgatgacgtcagcacgggttcatggtttgtgggtcttgatgttaagcatgtagatgaaggaaagttttgctgttctgcgtggtcctcagaagccatatgcgcaggagtgtagtagaaccaaagacgaatccaaagtgtgaggctcttggctctttggtgcttatagagaaagaagaacaaatgacatttgtctgaacttgccattttattggcattgcattatacgaagtctaggatttggatgtgggaatagatattcttaccgacaaacgttaaactccaaaaaaaataatcattcatttacagc

SEQ ID NO: 26026 - protein, 357 aa, Arabidopsis thaliana
  peptide (1)..(357): Ceres Seq. ID no. 12331375
MRHLRLIALTKRSDFGSISMARKGSSIRLSSSRISTLLLFMFATFASFYVAGRLWQESQTRVHLINELDRVTGQGKSAISVDDTLKIIACREQKKTLAALEMELSSARQEGFVSKSPKLADGTETKKRPLVVIGIMTSLGNKKKRDAVRQAWMGTGASLKKLESEKGVIARFVIGRSANKGDSMDKSIDTENSQTDDFIILDDVVEAPEEASKKVKLFFAYAADRWDAQFYAKAIDNIYVNIDALGTTLAAHLENPRAYIGCMKSGEVFSEPNHKWYEPEWWKFGDKKAYFRHAYGEMYVITHALARFVSINRDILHSYAHDDVSTGSWFVGLDVKHVDEGKFCCSAWSSEAICAGV

SEQ ID NO: 26027 - protein, 338 aa, Arabidopsis thaliana
  peptide (1)..(338): Ceres Seq. ID no. 12331376
MARKGSSIRLSSSRISTLLLFMFATFASFYVAGRLWQESQTRVHLINELDRVTGQGKSAISVDDTLKIIACREQKKTLAALEMELSSARQEGFVSKSPKLADGTETKKRPLVVIGIMTSLGNKKKRDAVRQAWMGTGASLKKLESEKGVIARFVIGRSANKGDSMDKSIDTENSQTDDFIILDDVVEAPEEASKKVKLFFAYAADRWDAQFYAKAIDNIYVNIDALGTTLAAHLENPRAYIGCMKSGEVFSEPNHKWYEPEWWKFGDKKAYFRHAYGEMYVITHALARFVSINRDILHSYAHDDVSTGSWFVGLDVKHVDEGKFCCSAWSSEAICAGV

SEQ ID NO: 26028 - protein, 317 aa, Arabidopsis thaliana
  peptide (1)..(317): Ceres Seq. ID no. 12331377
MFATFASFYVAGRLWQESQTRVHLINELDRVTGQGKSAISVDDTLKIIACREQKKTLAALEMELSSARQEGFVSKSPKLADGTETKKRPLVVIGIMTSLGNKKKRDAVRQAWMGTGASLKKLESEKGVIARFVIGRSANKGDSMDKSIDTENSQTDDFIILDDVVEAPEEASKKVKLFFAYAADRWDAQFYAKAIDNIYVNIDALGTTLAAHLENPRAYIGCMKSGEVFSEPNHKWYEPEWWKFGDKKAYFRHAYGEMYVITHALARFVSINRDILHSYAHDDVSTGSWFVGLDVKHVDEGKFCCSAWSSEAICAGV

SEQ ID NO: 26029 - DNA, 1140 bp, Arabidopsis thaliana
  misc_feature (1)..(1140): Ceres Seq. ID no. 13491954
  misc_feature (1)..(1140): Ortholog of  Ceres SEQ ID NO 12612330 as cited in SEQ ID NO 56418
  misc_feature (1)..(1140): Ortholog of  Ceres SEQ ID NO 13664295 as cited in SEQ ID NO 61486
  misc_feature (1)..(1140): Ortholog of  Ceres SEQ ID NO 15179147 as cited in SEQ ID NO 0
gaaacacaaaaatggcgacggtaccattgttcacccagtttccctgcaaaaccctaaatccaagctcatcaaacactaaacaccaatcgaaatctccgatcctactaccgattaactcaataaatcggcgatcggagattggagtctctgttcatcggccagatttcaaaatccgagcgacggacatcgacgacgaatggggtcaagatggagtggagagagtatttgcctcatcttcaaccgtatcggtagcagataaagcaatcgaatccgtggaggagacggagaggctaaagagatcactagcggattcgttgtacggaacagatcgaggtttaagcgtatcgagtgatacgagagctgagatcagcgagctcatcacacagctcgagtctaagaaccctactccagctcctaacgaagctctgtttctcctcaacggcaaatggatcctcgcctacacgtcgttcgtggggttgttcccattgctctcacgaagaattgaaccgttggttaaagtggatgagatctcacaaaccattgattccgatagcttcaccgttcaaaactctgtccggttcgctggtccgttttccacaacgtcgtttagcaccaacgctaagtttgaaatccgaagtcctaaacgtgtccagattaagttcgagcaaggtgttatagggactcctcagctaacggattcgattgaaataccggaatccgtggaggttcttggtcagaaaatcgatctcaatcccattaaaggtttacttacatcagtccaagacactgcttcttcagtggctagaaccatttcaaaccaaccaccattgaagttttctctgcctagtgacaacacgcagtcgtggctgctcacaacttatctcgacaaggaccttcggatctcgagaggcgatggtggaagcgtctatgtgctcatcaaagaaggaagctctctcttaaacccttaaatcatcataactctcatcacatccatagtaacatatatacaagtatagacccatctgtctatgtttactagtgttgtaactgttatatagcttctttacctgttggagagttataaacttataatggatgttactcttggtatactgtactacaatacatatacataactac

SEQ ID NO: 26030 - protein, 321 aa, Arabidopsis thaliana
  peptide (1)..(321): Ceres Seq. ID no. 13491955
NTKMATVPLFTQFPCKTLNPSSSNTKHQSKSPILLPINSINRRSEIGVSVHRPDFKIRATDIDDEWGQDGVERVFASSSTVSVADKAIESVEETERLKRSLADSLYGTDRGLSVSSDTRAEISELITQLESKNPTPAPNEALFLLNGKWILAYTSFVGLFPLLSRRIEPLVKVDEISQTIDSDSFTVQNSVRFAGPFSTTSFSTNAKFEIRSPKRVQIKFEQGVIGTPQLTDSIEIPESVEVLGQKIDLNPIKGLLTSVQDTASSVARTISNQPPLKFSLPSDNTQSWLLTTYLDKDLRISRGDGGSVYVLIKEGSSLLNP

SEQ ID NO: 26031 - protein, 318 aa, Arabidopsis thaliana
  peptide (1)..(318): Ceres Seq. ID no. 13491956
MATVPLFTQFPCKTLNPSSSNTKHQSKSPILLPINSINRRSEIGVSVHRPDFKIRATDIDDEWGQDGVERVFASSSTVSVADKAIESVEETERLKRSLADSLYGTDRGLSVSSDTRAEISELITQLESKNPTPAPNEALFLLNGKWILAYTSFVGLFPLLSRRIEPLVKVDEISQTIDSDSFTVQNSVRFAGPFSTTSFSTNAKFEIRSPKRVQIKFEQGVIGTPQLTDSIEIPESVEVLGQKIDLNPIKGLLTSVQDTASSVARTISNQPPLKFSLPSDNTQSWLLTTYLDKDLRISRGDGGSVYVLIKEGSSLLNP

SEQ ID NO: 26032 - DNA, 1133 bp, Arabidopsis thaliana
  misc_feature (1)..(1133): Ceres Seq. ID no. 12421743
  misc_feature (1)..(1133): Ortholog of  Ceres SEQ ID NO 14310443 as cited in SEQ ID NO 54695
  misc_feature (1)..(1133): Ortholog of  Ceres SEQ ID NO 13596354 as cited in SEQ ID NO 68027
tttagatttgattcttcttctctgatctctgaaaaaacacaatgtcttcgaaagacaagaaaccgtcgaagccatcgagtagtcgtggtggaatccgaactctttccgatcttaaccgtaggtctggtcctgactccgacagtgattccgatggtccacaagaatactacacaggtggtgagaaaagtggtatgttagttcaagatccatcgaaaaaagatgatgttgatgagatatttaatcaagctagacaactaggagctgtagaaggacctcttgagccacctccgagttccaggagtttcactggaactggtagattgctttctggtgaaaatgtgcctactggtaatcaacagcctgagcctgttgttcacaacattgttttctggtctaatggtttcactattgatgatggtcctttgaggaaattggatgatcctgagaatgcatcgtttctcgagagcattcgaaagtctgagtgcccgaaagagcttgagcctgccgatagaagagctccggttcatgtcaacttgatgcgaaaggaagagaaatgccctgaaagacagaaacgtagggtttcatttcagggtgttggaagaactctaggtggtagcaatgaaggtagcggaagtagctcacctgtggctccagactccgctcccattcccatccaaaccgaaccagcaccatctcaaagtcttgtaatagatgaaaccgttccaaccacatcgatacagcttagactagcggatgggacacgtctggtggctaagttcaatcaccatcacacggtcaacgacattcgcggtttcattgactcatctcgacctggagcctcgttgaactaccagcttcagacaatggggttcccacctaagcctttgactgatctcactcagaccattgaagaagctggtctcgccaactctgttgttcttcagaaattctagaaaattctacaaggtgtggttctttttgtctatctatatgcattataatgagattttcataactgttgtagtaaccaggtctttaaaatgtaagttacttcttcactctgtatactcagcataagccggcggggacttgtggtatagtttttcttaatttattgaaattttatagtttca

SEQ ID NO: 26033 - protein, 303 aa, Arabidopsis thaliana
  peptide (1)..(303): Ceres Seq. ID no. 12421744
MSSKDKKPSKPSSSRGGIRTLSDLNRRSGPDSDSDSDGPQEYYTGGEKSGMLVQDPSKKDDVDEIFNQARQLGAVEGPLEPPPSSRSFTGTGRLLSGENVPTGNQQPEPVVHNIVFWSNGFTIDDGPLRKLDDPENASFLESIRKSECPKELEPADRRAPVHVNLMRKEEKCPERQKRRVSFQGVGRTLGGSNEGSGSSSPVAPDSAPIPIQTEPAPSQSLVIDETVPTTSIQLRLADGTRLVAKFNHHHTVNDIRGFIDSSRPGASLNYQLQTMGFPPKPLTDLTQTIEEAGLANSVVLQKF

SEQ ID NO: 26034 - protein, 253 aa, Arabidopsis thaliana
  peptide (1)..(253): Ceres Seq. ID no. 12421745
MLVQDPSKKDDVDEIFNQARQLGAVEGPLEPPPSSRSFTGTGRLLSGENVPTGNQQPEPVVHNIVFWSNGFTIDDGPLRKLDDPENASFLESIRKSECPKELEPADRRAPVHVNLMRKEEKCPERQKRRVSFQGVGRTLGGSNEGSGSSSPVAPDSAPIPIQTEPAPSQSLVIDETVPTTSIQLRLADGTRLVAKFNHHHTVNDIRGFIDSSRPGASLNYQLQTMGFPPKPLTDLTQTIEEAGLANSVVLQKF

SEQ ID NO: 26035 - DNA, 1092 bp, Arabidopsis thaliana
  misc_feature (1)..(1092): Ceres Seq. ID no. 12327523
  misc_feature (1)..(1092): Ortholog of  Ceres SEQ ID NO 12609965 as cited in SEQ ID NO 55883
  misc_feature (1)..(1092): Ortholog of  Ceres SEQ ID NO 13596393 as cited in SEQ ID NO 62144
  misc_feature (1)..(1092): Ortholog of  Ceres SEQ ID NO 13591076 as cited in SEQ ID NO 63757
  misc_feature (1)..(1092): Ortholog of  Ceres SEQ ID NO 13599575 as cited in SEQ ID NO 0
actagtaagtagtctcttgtgttttgttttgcatcggccgtcccaaacctgaggatttctctgttcagctagagcgaaaccctagattcacatttgagctgagagatgctgcgtgtagcagggaggaggcttttctctgtctcgcagagatcttcgactgcgacctccttcgtcgtctcccgtgaccataccctttccgatggtggcggcgactcctcttcagctcccagatccctcccctctgcagatctctcatcttaccaccgtagccttatcagaggcttctcttctcaagtccttgctcaaggaaatgagataggttttggttcagaagtcccagccacagtcgaagctgtcaaaacgcctaactcaaagattgtctatgatgaccataaccatgagcgttacccacctggtgaccctagcaagcgtgcattcgcctattttgtcttgtcgggtgggaggtttgtttatgcctctgtcctccgcctgcttgttttgaagcttattgtgagcatgtctgcaagtaaagatgtccttgcccttgcatcccttgaggttgacctagggagcatagaaccaggaactaccgtgacagtcaagtggcgtggaaagcccgtcttcatcaggcgaagaacagaagatgacatcaagctggccaatagtgtggatgttggatccctgagggacccacaagaagactcggttagggtcaagaatccagaatggttagtggttgttggagtgtgcactcatttggggtgcatccccttgcctaatgctggtgattatggtggttggttttgtccgtgtcacggatcacattacgatatatctggaagaattaggaaaggtcctgcaccatacaacctggaagtaccaacctacagcttcctggaagagaataagttactcatcggttgattaataaaagcacaacagtcaagagtctggatctgaatgatgatcttcacttgttctttttttcttttaattaatattttccggcatgttagagcaagattgacttgtttttgctgaataatacaaacttgtgatttttgtttgaagtatactcaatcttcgtttatc

SEQ ID NO: 26036 - protein, 272 aa, Arabidopsis thaliana
  peptide (1)..(272): Ceres Seq. ID no. 12327524
MLRVAGRRLFSVSQRSSTATSFVVSRDHTLSDGGGDSSSAPRSLPSADLSSYHRSLIRGFSSQVLAQGNEIGFGSEVPATVEAVKTPNSKIVYDDHNHERYPPGDPSKRAFAYFVLSGGRFVYASVLRLLVLKLIVSMSASKDVLALASLEVDLGSIEPGTTVTVKWRGKPVFIRRRTEDDIKLANSVDVGSLRDPQEDSVRVKNPEWLVVVGVCTHLGCIPLPNAGDYGGWFCPCHGSHYDISGRIRKGPAPYNLEVPTYSFLEENKLLIG

SEQ ID NO: 26037 - DNA, 1251 bp, Arabidopsis thaliana
  misc_feature (1)..(1251): Ceres Seq. ID no. 12327166
  misc_feature (1)..(1251): Ortholog of  Ceres SEQ ID NO 15176317 as cited in SEQ ID NO 52865
  misc_feature (1)..(1251): Ortholog of  Ceres SEQ ID NO 13518893 as cited in SEQ ID NO 58108
  misc_feature (1)..(1251): Ortholog of  Ceres SEQ ID NO 12617152 as cited in SEQ ID NO 63555
accctctgttttgtttctccccaataaaaaaaatctcaatcccaatcacttcgcttctaatcttaaagcctttaatttagtcttcgagccctctaatggcggatcagagcaaaaacactccagagatcttcgagctcaacaatggcaccatgcaggtcaagatctcaaactacggcaccaccatcacctctttgtctgttcccgacaagaacgggaaactgggggatgtagttctcggattcgactcggtggatccatatgtgaaagggcttgcaccatactttgggtgcattgttggtcgtgtggcaaatcggatcaaggagggaaaattcagtctcaatggagttaactacactttgcctatcaacaagcctcctaatagtctccacggtggtaacaagggtttcgataagaagatatgggaagttgcagggcacaagagagacggcgaaaaacctttcatcactttcaaatatcacagtgccgatggagaagaaggttaccctggtgcggtttctgtcacggcgacatacactctcacgtcagccacgacaatgagacttgacatggaagctgttccagagaacaaagatactcccatcaacttagctcaacatacatactggaacttagcaggtcatgactcaggaaacattctagaccataagattcagatatgggggtctcatatcacgccggttgacgaatacacagttcctacaggagagatcttgcctgtaaagggaactcctttcgatttcactgaggagaagcggataggcgagtctattggagaggttggtatcggatacgatcataactacgtgttggactgtcctgatcaagagaaggaggggctgaaacacgcagcgaagctcagtgatgctgctagctcaagggtactgaacttgtggaccaatgtgccgggaatgcagttttataccgggaactatgtgaatggagtggttgggaaagggaatgcggtttacgggaaacatgcgggtgtgtgccttgagacgcagggattcccgaacgcgattaaccagtcgaatttcccgtctgttgtggttaaggctggtgagaagtacaatcacacgatgctgtttgagttttcagcttgagtttatagatggacgttttaggtgttagatgatgggaataaagggccggttcatttgattcactgggctggaaaaagagtgattttaattttatctctttgggggagaataataaaaccaaactgtttac

SEQ ID NO: 26038 - protein, 341 aa, Arabidopsis thaliana
  peptide (1)..(341): Ceres Seq. ID no. 12327167
MADQSKNTPEIFELNNGTMQVKISNYGTTITSLSVPDKNGKLGDVVLGFDSVDPYVKGLAPYFGCIVGRVANRIKEGKFSLNGVNYTLPINKPPNSLHGGNKGFDKKIWEVAGHKRDGEKPFITFKYHSADGEEGYPGAVSVTATYTLTSATTMRLDMEAVPENKDTPINLAQHTYWNLAGHDSGNILDHKIQIWGSHITPVDEYTVPTGEILPVKGTPFDFTEEKRIGESIGEVGIGYDHNYVLDCPDQEKEGLKHAAKLSDAASSRVLNLWTNVPGMQFYTGNYVNGVVGKGNAVYGKHAGVCLETQGFPNAINQSNFPSVVVKAGEKYNHTMLFEFSA

SEQ ID NO: 26039 - protein, 323 aa, Arabidopsis thaliana
  peptide (1)..(323): Ceres Seq. ID no. 12327168
MQVKISNYGTTITSLSVPDKNGKLGDVVLGFDSVDPYVKGLAPYFGCIVGRVANRIKEGKFSLNGVNYTLPINKPPNSLHGGNKGFDKKIWEVAGHKRDGEKPFITFKYHSADGEEGYPGAVSVTATYTLTSATTMRLDMEAVPENKDTPINLAQHTYWNLAGHDSGNILDHKIQIWGSHITPVDEYTVPTGEILPVKGTPFDFTEEKRIGESIGEVGIGYDHNYVLDCPDQEKEGLKHAAKLSDAASSRVLNLWTNVPGMQFYTGNYVNGVVGKGNAVYGKHAGVCLETQGFPNAINQSNFPSVVVKAGEKYNHTMLFEFSA

SEQ ID NO: 26040 - protein, 188 aa, Arabidopsis thaliana
  peptide (1)..(188): Ceres Seq. ID no. 12327169
MRLDMEAVPENKDTPINLAQHTYWNLAGHDSGNILDHKIQIWGSHITPVDEYTVPTGEILPVKGTPFDFTEEKRIGESIGEVGIGYDHNYVLDCPDQEKEGLKHAAKLSDAASSRVLNLWTNVPGMQFYTGNYVNGVVGKGNAVYGKHAGVCLETQGFPNAINQSNFPSVVVKAGEKYNHTMLFEFSA

SEQ ID NO: 26041 - DNA, 946 bp, Arabidopsis thaliana
  misc_feature (1)..(946): Ceres Seq. ID no. 12561965
  misc_feature (1)..(946): Ortholog of  Ceres SEQ ID NO 13656436 as cited in SEQ ID NO 69154
aagccaaagccacatagaagaaaaaaaaaagaacattcacgtctctctcgtttttttggccgacgacgatcgctgaattgactgccggagattcctttaatcgtcagattctcgttgagggataatgaatcctgaatatgactatctgttcaagcttctgcttattggtgattctggtgttggaaaatcatgcttgcttctaagatttgctgatgattcttacctggatagctacataagcaccattggtgttgactttaaaattcgcacagttgagcaggacggaaagaccatcaaactccagatctgggacacagcaggccaagaacgtttcaggacaatcactagcagctactacagaggagctcatgggatcattgtcacttatgatgtcacagacctagagagcttcaacaacgtcaaacaatggctgaatgaaattgaccgttacgctagcgaaaatgtgaacaagctactggttgggaacaagaacgatctcacttcacagaaagttgtatccactgagacagctaaggcttttgcagatgaacttgggatcccattcttggaaacaagtgctaaaaatgcaaccaatgtggaagaagctttcatggctatgactgctgcaattaagacaagaatggctagccaaccagctggaggtgccaagccaccaacggtccagatccgtggacagccagtgaaccagcaatcaggctgttgttcttcttgattcaattagtcaccactcctctttcgatcatcacaccattatgatcatttgtttgcattgcatgttagacttctccaaattaacaactctttggatccttttgcttgtttttcatttgctttcttttgatccgattcttttctgatgtacgttgaagtttgaaacccataacttctatatagtaaaaggtcttttatgcaaataatgtagagc

SEQ ID NO: 26042 - protein, 202 aa, Arabidopsis thaliana
  peptide (1)..(202): Ceres Seq. ID no. 12561966
MNPEYDYLFKLLLIGDSGVGKSCLLLRFADDSYLDSYISTIGVDFKIRTVEQDGKTIKLQIWDTAGQERFRTITSSYYRGAHGIIVTYDVTDLESFNNVKQWLNEIDRYASENVNKLLVGNKNDLTSQKVVSTETAKAFADELGIPFLETSAKNATNVEEAFMAMTAAIKTRMASQPAGGAKPPTVQIRGQPVNQQSGCCSS

SEQ ID NO: 26043 - DNA, 605 bp, Arabidopsis thaliana
  misc_feature (1)..(605): Ceres Seq. ID no. 12323302
  misc_feature (1)..(605): Ortholog of  Ceres SEQ ID NO 15174240 as cited in SEQ ID NO 61866
  misc_feature (1)..(605): Ortholog of  Ceres SEQ ID NO 13596039 as cited in SEQ ID NO 62117
tttctcaaacaagaaaatgcagatcttcgtgaaaaccctaacggggaagacaataaccttagaggtagaatcatcagacacaatcgacaatgtgaaagcgaagatccaagacaaggaaggaatcccaccggatcagcaacggttgatcttcgccggaaaacaattggaagatggaagaacactagctgattacaacatccagaaagagtcgacgcttcatttggttctacgtctgagaggaggtgcgaagaagaggaagaagaagacgtacacgaaacctaagaagattaagcatacgcacaagaaagtgaagctagcagttctgcagttttacaaggttgatggaagtgggaaagttcagaggttgaagaaagagtgtccttctgttagttgtggtcctggaactttcatggcgagtcatttcgataggcattattgtgggaaatgtggaactacttacgtgttcaagaaggctgatgaagagtaggttatgtctttttgcttttggaatttagattgttttttttttaattcagatattttgagatggttttatactattgagggatggtttaattgttgcataatacattatattatctttg

SEQ ID NO: 26044 - protein, 161 aa, Arabidopsis thaliana
  peptide (1)..(161): Ceres Seq. ID no. 12323303
FSNKKMQIFVKTLTGKTITLEVESSDTIDNVKAKIQDKEGIPPDQQRLIFAGKQLEDGRTLADYNIQKESTLHLVLRLRGGAKKRKKKTYTKPKKIKHTHKKVKLAVLQFYKVDGSGKVQRLKKECPSVSCGPGTFMASHFDRHYCGKCGTTYVFKKADEE

SEQ ID NO: 26045 - protein, 156 aa, Arabidopsis thaliana
  peptide (1)..(156): Ceres Seq. ID no. 12323304
MQIFVKTLTGKTITLEVESSDTIDNVKAKIQDKEGIPPDQQRLIFAGKQLEDGRTLADYNIQKESTLHLVLRLRGGAKKRKKKTYTKPKKIKHTHKKVKLAVLQFYKVDGSGKVQRLKKECPSVSCGPGTFMASHFDRHYCGKCGTTYVFKKADEE

SEQ ID NO: 26046 - DNA, 1821 bp, Arabidopsis thaliana
  misc_feature (1)..(1821): Ceres Seq. ID no. 13495696
  misc_feature (1)..(1821): Ortholog of  Ceres SEQ ID NO 14307916 as cited in SEQ ID NO 66395
tggtcccaaacgattcacttttctcaccatctcaatctccagaccaaaagaaacaaaaaatggattctttttcatattcttcgatgaaatccatgttgattcaagctcgtggctcgttgaactcgcgtttgtcggagtttgagccactggttctgctattggttccgcttgtctctctgtttctcgctcagattatcggatctgtgtttggcgttgttcacgagaaaggcctcaaagcttgtcttattgggtttatcatgggactcctcaaaatgattcctggagttcagaattacattgatgctgagaaacaaaaggttgttgaccaattacaatctggtagcagctctaagaaaaagaataagactgaagtattgccagtaaaaggtctaggagttgaagttttagagaaaatggagaatgagaagaggaatgatgctatttggcaaggaaaatgctctggcactgtatacataggtggagccgagtctgaaggacatttttcattgataaatcaagcatgttcaatgtttgcgcataccaatccgttgcatatagacgtattccagagtgtggtgcggtttgagtcagaagtagtcgcaatgactgctgcgttacttgggagtaaagaaacggcgtcaggaggtcaaatatgcggaaacatgacgtctggaggaacagaaagtatagtgttggctgtgaagtcatctcgtgactatatgaagtacaagaagggaatcacacggccagaaatgattatacctgagtcgggtcattcggcttatgataaggcggcccagtattttaaaatcaagttgtggcgagttccagttgacaaagacttccgagctgatgtgaaggcaacaaggcggcatattaacagaaacaccatcatgattgttggatcagcaccaggattccctcatggcatcattgatcctatcgaggagcttggtcaactggctcttagctatggaatatgctttcatgttgacctttgccttggtggttttgtgttacctttcgctcgtaaacttgggtaccagatcccaccttttgatttttctgtacaaggagttacttcaatttctgtggacgtgcataaatatggtttggctcctaaaggaactagtacagttctatatagaaatcatgagatcagaaagcaccaatttgttgctgtaactgaatggtcaggaggtctatacgtgtctccaactatcgctgggagtaggcctgggtctttggtagccggtgcttgggctgcaatgatgtcgctcggcgaagaaggttacctacaaaacacaagtaagataatggaagcatcaaagagactagaagaaggagtaagagaaatccatgaactattcgtcattggaaagccagatatgacaatcgtggcttttggttctaaagcattggatatatttgaagttaatgacatcatgtcttctaaaggttggcatttgaatgcactacagagacccaacagcattcatatatgtattactcttcaacacgtccctgtagtcgatgacttccttcgggatctgcgtgaagctgtggaaactgtaaaagcaaacccaggaccgatcacgggaggcttggctccaatatatggagcagcagggaagatgccagaccgaggcatggtgaatgagcttctggttagtttcatggacagtcaatattaagtttcttgaaggttaaagcatctagtgggtaaattgatatcacatttcagttggagaagcaaaactttgtatattcacaaccacattgtttcgtttgccctactaataaaatttcattacaatcttc

SEQ ID NO: 26047 - protein, 563 aa, Arabidopsis thaliana
  peptide (1)..(563): Ceres Seq. ID no. 13495697
VPNDSLFSPSQSPDQKKQKMDSFSYSSMKSMLIQARGSLNSRLSEFEPLVLLLVPLVSLFLAQIIGSVFGVVHEKGLKACLIGFIMGLLKMIPGVQNYIDAEKQKVVDQLQSGSSSKKKNKTEVLPVKGLGVEVLEKMENEKRNDAIWQGKCSGTVYIGGAESEGHFSLINQACSMFAHTNPLHIDVFQSVVRFESEVVAMTAALLGSKETASGGQICGNMTSGGTESIVLAVKSSRDYMKYKKGITRPEMIIPESGHSAYDKAAQYFKIKLWRVPVDKDFRADVKATRRHINRNTIMIVGSAPGFPHGIIDPIEELGQLALSYGICFHVDLCLGGFVLPFARKLGYQIPPFDFSVQGVTSISVDVHKYGLAPKGTSTVLYRNHEIRKHQFVAVTEWSGGLYVSPTIAGSRPGSLVAGAWAAMMSLGEEGYLQNTSKIMEASKRLEEGVREIHELFVIGKPDMTIVAFGSKALDIFEVNDIMSSKGWHLNALQRPNSIHICITLQHVPVVDDFLRDLREAVETVKANPGPITGGLAPIYGAAGKMPDRGMVNELLVSFMDSQY

SEQ ID NO: 26048 - protein, 544 aa, Arabidopsis thaliana
  peptide (1)..(544): Ceres Seq. ID no. 13495698
MDSFSYSSMKSMLIQARGSLNSRLSEFEPLVLLLVPLVSLFLAQIIGSVFGVVHEKGLKACLIGFIMGLLKMIPGVQNYIDAEKQKVVDQLQSGSSSKKKNKTEVLPVKGLGVEVLEKMENEKRNDAIWQGKCSGTVYIGGAESEGHFSLINQACSMFAHTNPLHIDVFQSVVRFESEVVAMTAALLGSKETASGGQICGNMTSGGTESIVLAVKSSRDYMKYKKGITRPEMIIPESGHSAYDKAAQYFKIKLWRVPVDKDFRADVKATRRHINRNTIMIVGSAPGFPHGIIDPIEELGQLALSYGICFHVDLCLGGFVLPFARKLGYQIPPFDFSVQGVTSISVDVHKYGLAPKGTSTVLYRNHEIRKHQFVAVTEWSGGLYVSPTIAGSRPGSLVAGAWAAMMSLGEEGYLQNTSKIMEASKRLEEGVREIHELFVIGKPDMTIVAFGSKALDIFEVNDIMSSKGWHLNALQRPNSIHICITLQHVPVVDDFLRDLREAVETVKANPGPITGGLAPIYGAAGKMPDRGMVNELLVSFMDSQY

SEQ ID NO: 26049 - protein, 536 aa, Arabidopsis thaliana
  peptide (1)..(536): Ceres Seq. ID no. 13495699
MKSMLIQARGSLNSRLSEFEPLVLLLVPLVSLFLAQIIGSVFGVVHEKGLKACLIGFIMGLLKMIPGVQNYIDAEKQKVVDQLQSGSSSKKKNKTEVLPVKGLGVEVLEKMENEKRNDAIWQGKCSGTVYIGGAESEGHFSLINQACSMFAHTNPLHIDVFQSVVRFESEVVAMTAALLGSKETASGGQICGNMTSGGTESIVLAVKSSRDYMKYKKGITRPEMIIPESGHSAYDKAAQYFKIKLWRVPVDKDFRADVKATRRHINRNTIMIVGSAPGFPHGIIDPIEELGQLALSYGICFHVDLCLGGFVLPFARKLGYQIPPFDFSVQGVTSISVDVHKYGLAPKGTSTVLYRNHEIRKHQFVAVTEWSGGLYVSPTIAGSRPGSLVAGAWAAMMSLGEEGYLQNTSKIMEASKRLEEGVREIHELFVIGKPDMTIVAFGSKALDIFEVNDIMSSKGWHLNALQRPNSIHICITLQHVPVVDDFLRDLREAVETVKANPGPITGGLAPIYGAAGKMPDRGMVNELLVSFMDSQY

SEQ ID NO: 26050 - DNA, 1055 bp, Arabidopsis thaliana
  misc_feature (1)..(1055): Ceres Seq. ID no. 12482030
  misc_feature (1)..(1055): Ortholog of  Ceres SEQ ID NO 13581800 as cited in SEQ ID NO 51508
aaattaagagacatctgatcgaattttgttccgacgaccgtgaatcaccagcaaaggattcgtgtcaatgttcttgtgagatcgaactttctctgggttcgtgcagaagctttgcttttttgagtatcgcgtttaaggcacatcgaagaagagagaccctaatttgatattttgagttctatcgatggcttcgctactagctcgcaggtcgttcagtgctctccgagctcgacatctcgctttttcagggcaaggtttacagggatctcatctctgtgggctacagtcccgtgctatatcttatggaagcaacaaagatgatgaagaagctgagcagcttgctaaagagatctccaaggactggagtactgtctttgaacggagcatgaacaccctatttctcactgaaatggtcaggggtttgtcactgaccctcaagtacttctttgatccaaaagttacaatcaattatccttttgagaagggtccattgagccctcgtttccgtggtgaacacgctcttcgaaggtatccaactggggaagaacgctgcattgcctgcaaactctgcgaagctgtatgtccagctcaagcaatcacaatagaggcagaggagcgggaagatggaagccgcagaaccactaggtatgatatcgacatgacgaaatgcatctattgtggtttctgccaagaagcttgccctgttgatgcaatcgtggaaggaccaaactttgagtttgcaaccgagacacatgaggaacttctgtatgacaaagagaagcttcttgagaatggagataggtgggagacagagattgcagagaatctgaggtcggagagcctctaccgctgaatattgatccgaaaatgccttttgcctaattcttaaggaaacgttttcgtttgcttctgttacaaataaagatgcttcagcctttgcactgttattgctatctgtatttcttgagttcataccgatggcaaaatcaaatttggctttgtttccggtttgagctggaccgtgcggtaaatggattatgatatgattcaatggt

SEQ ID NO: 26051 - protein, 222 aa, Arabidopsis thaliana
  peptide (1)..(222): Ceres Seq. ID no. 12482031
MASLLARRSFSALRARHLAFSGQGLQGSHLCGLQSRAISYGSNKDDEEAEQLAKEISKDWSTVFERSMNTLFLTEMVRGLSLTLKYFFDPKVTINYPFEKGPLSPRFRGEHALRRYPTGEERCIACKLCEAVCPAQAITIEAEEREDGSRRTTRYDIDMTKCIYCGFCQEACPVDAIVEGPNFEFATETHEELLYDKEKLLENGDRWETEIAENLRSESLYR

SEQ ID NO: 26052 - protein, 155 aa, Arabidopsis thaliana
  peptide (1)..(155): Ceres Seq. ID no. 12482032
MNTLFLTEMVRGLSLTLKYFFDPKVTINYPFEKGPLSPRFRGEHALRRYPTGEERCIACKLCEAVCPAQAITIEAEEREDGSRRTTRYDIDMTKCIYCGFCQEACPVDAIVEGPNFEFATETHEELLYDKEKLLENGDRWETEIAENLRSESLYR

SEQ ID NO: 26053 - protein, 147 aa, Arabidopsis thaliana
  peptide (1)..(147): Ceres Seq. ID no. 12482033
MVRGLSLTLKYFFDPKVTINYPFEKGPLSPRFRGEHALRRYPTGEERCIACKLCEAVCPAQAITIEAEEREDGSRRTTRYDIDMTKCIYCGFCQEACPVDAIVEGPNFEFATETHEELLYDKEKLLENGDRWETEIAENLRSESLYR

SEQ ID NO: 26054 - DNA, 716 bp, Arabidopsis thaliana
  misc_feature (1)..(716): Ceres Seq. ID no. 12421069
  misc_feature (1)..(716): Ortholog of  Ceres SEQ ID NO 15179051 as cited in SEQ ID NO 0
atcaagataagcttatagttatcactaagagttttgtctacgtacattttgtgatcaaacaagtaatcaatcaaaagatggaaggcaaaactgtgatctcaagtctgctcataatgagtcttgtcttagcacagattcaagtagaagcaaaaatctgctgtcctaccaaggatgatagatctgtgtattttgtatgcatgctttccgtgtcatcccaattttattgtctattaaagagtaaatgcaaaaatacatctcagacgatatgtcctccgggatatactaatgacattctcgaaaattctggtgatgctgtcaatgaatattgcaagctagggtgtgcatcctctgtgtgtggtgccttgaccactctccaaaactttgacgcaagtaaagtattgagtgaagcggttgaacaatgcaccaaggcatgttcttctgtctgcaccggaggatctaccgccgcagttaaaagtgcctaaacaagtatatttaaaagtgaagggtggtcatcattcagagtggcgtgactgttttcatggaataattgtcgtctatcgatgtatgttgtaaaaaaaaatgctagactatggtgctagtactgtttaataagttgtttccggtttgccaatgtgtcatgagagtttttgatcctagattgtatatcccttctacttgtctttctctaaataaataataatgtgtccttctcgact

SEQ ID NO: 26055 - protein, 159 aa, Arabidopsis thaliana
  peptide (1)..(159): Ceres Seq. ID no. 12421070
QDKLIVITKSFVYVHFVIKQVINQKMEGKTVISSLLIMSLVLAQIQVEAKICCPTKDDRSVYFVCMLSVSSQFYCLLKSKCKNTSQTICPPGYTNDILENSGDAVNEYCKLGCASSVCGALTTLQNFDASKVLSEAVEQCTKACSSVCTGGSTAAVKSA

SEQ ID NO: 26056 - protein, 134 aa, Arabidopsis thaliana
  peptide (1)..(134): Ceres Seq. ID no. 12421071
MEGKTVISSLLIMSLVLAQIQVEAKICCPTKDDRSVYFVCMLSVSSQFYCLLKSKCKNTSQTICPPGYTNDILENSGDAVNEYCKLGCASSVCGALTTLQNFDASKVLSEAVEQCTKACSSVCTGGSTAAVKSA

SEQ ID NO: 26057 - protein, 122 aa, Arabidopsis thaliana
  peptide (1)..(122): Ceres Seq. ID no. 12421072
MSLVLAQIQVEAKICCPTKDDRSVYFVCMLSVSSQFYCLLKSKCKNTSQTICPPGYTNDILENSGDAVNEYCKLGCASSVCGALTTLQNFDASKVLSEAVEQCTKACSSVCTGGSTAAVKSA

SEQ ID NO: 26058 - DNA, 540 bp, Arabidopsis thaliana
  misc_feature (1)..(540): Ceres Seq. ID no. 12599931
  misc_feature (1)..(540): Ortholog of  Ceres SEQ ID NO 12608605 as cited in SEQ ID NO 58240
aaactttacgttggtattatctggtttcacattttcttaaccctctttggtgaatgcgtcattgaaacgccattatccgccgtgctaatctgatctcctcccccgtcggaaaaaatggccactggtggaaaagtctccttcaaagtcactctgacttcggatcctaagcttcctttcaaagttttcagcgtaccagaaggagctccgttcacggcggttctgaaattcgcagcagaagagttcaaggttcctccacaaaccagcgccatcatcactaatgatgggatcgggatcaatcctcaacagagtgcaggaaacgtttttctgaagcacggatctgaactaagattgatcccgcgtgatagagttggagctgtgtttgtgatggatccatagatgatgtgtaagcaatgattaaaaactcagttccaaaaaaaaaacataataatatactgaaatgcttatgtatcaacttcgttgaataaatatgtaatcgtcacatccttttacggattgaagtgagttgaatttggtcaagtc

SEQ ID NO: 26059 - protein, 93 aa, Arabidopsis thaliana
  peptide (1)..(93): Ceres Seq. ID no. 12599932
MATGGKVSFKVTLTSDPKLPFKVFSVPEGAPFTAVLKFAAEEFKVPPQTSAIITNDGIGINPQQSAGNVFLKHGSELRLIPRDRVGAVFVMDP

SEQ ID NO: 26060 - DNA, 835 bp, Arabidopsis thaliana
  misc_feature (1)..(835): Ceres Seq. ID no. 13504832
  misc_feature (1)..(835): Ortholog of  Ceres SEQ ID NO 13654738 as cited in SEQ ID NO 62613
aagatactataaacaaatagagtacaggaccaacaaaattacattctctttgcctttgcctatcgcttaattctgcttttattaccagagaaagcaagaatatataagaatcagaaattgggtgaagaagaatggtcttgattactaagatgtctctctctttctacatcattcatcttctcattttctccttgatttccacttgtgttgtctccaaccaggccgaggataatcttcttcaaggcctaaacagctaccgaactgctcaaagagttcctccatttgccaagaatgagaaggctgattgtgtggctgatgagatcgccgacaagctcgaagatcagccatgcacaaaccacaccacagcgagcacggttactcctggctcggtacctccacggctgacgaactaccaggacattctctctgaatgcaaaatcgacccaaacactacccgtgacggattgatcttacctgtctgtatccctaaccggatcccgactttggctttaactaattacacccaaactggttatgctcggtatcttaatgattcgaggtatgtcggggctggtgttgggtcggagaaagagtggatggtggttgtattgacgacaagtactccaggtggaagctttacagctggtgttgctgctggcaaggcgacgtctgtgagagtaatggctggtttagggctaatggggttgttgtttagttgccttgtgctcttctgagctagtgattgttgtgtttttgtgtgaagactcttttgtatcttttaccctttgtttttaacgaatagtaaaaaaaacacatcataactaaattaagaagt

SEQ ID NO: 26061 - protein, 200 aa, Arabidopsis thaliana
  peptide (1)..(200): Ceres Seq. ID no. 13504833
MVLITKMSLSFYIIHLLIFSLISTCVVSNQAEDNLLQGLNSYRTAQRVPPFAKNEKADCVADEIADKLEDQPCTNHTTASTVTPGSVPPRLTNYQDILSECKIDPNTTRDGLILPVCIPNRIPTLALTNYTQTGYARYLNDSRYVGAGVGSEKEWMVVVLTTSTPGGSFTAGVAAGKATSVRVMAGLGLMGLLFSCLVLF

SEQ ID NO: 26062 - protein, 194 aa, Arabidopsis thaliana
  peptide (1)..(194): Ceres Seq. ID no. 13504834
MSLSFYIIHLLIFSLISTCVVSNQAEDNLLQGLNSYRTAQRVPPFAKNEKADCVADEIADKLEDQPCTNHTTASTVTPGSVPPRLTNYQDILSECKIDPNTTRDGLILPVCIPNRIPTLALTNYTQTGYARYLNDSRYVGAGVGSEKEWMVVVLTTSTPGGSFTAGVAAGKATSVRVMAGLGLMGLLFSCLVLF

SEQ ID NO: 26063 - DNA, 630 bp, Arabidopsis thaliana
  misc_feature (1)..(630): Ceres Seq. ID no. 12389130
  misc_feature (1)..(630): Ortholog of  Ceres SEQ ID NO 12609890 as cited in SEQ ID NO 51792
  misc_feature (1)..(630): Ortholog of  Ceres SEQ ID NO 12597253 as cited in SEQ ID NO 62959
  misc_feature (1)..(630): Ortholog of  Ceres SEQ ID NO 15173341 as cited in SEQ ID NO 63800
  misc_feature (1)..(630): Ortholog of  Ceres SEQ ID NO 12635416 as cited in SEQ ID NO 0
  misc_feature (1)..(630): Ortholog of  Ceres SEQ ID NO 12635564 as cited in SEQ ID NO 0
  misc_feature (1)..(630): Ortholog of  Ceres SEQ ID NO 12636917 as cited in SEQ ID NO 0
  misc_feature (1)..(630): Ortholog of  Ceres SEQ ID NO 14309430 as cited in SEQ ID NO 0
agatcaaaatcagaatcagaatcaaatttctcgtcgtgtcggagtaaatcaagccatggattccggaaccaaagtgaagaaaggagccgctggaagaagaagtggtggaggtcctaagaagaaaccggtttcccgttcggttaaatccggtctacagtttcctgtcggtaggatcggtcggtatcttaagaaaggtcgttattcgaagcgtgtcggaaccggagctccggtctatctcgccgccgtcctcgagtatcttgctgctgaggttctcgagcttgctggtaacgctgcaagagataacaaaaagaaccgtattataccacgccatgttctattagcggtgaggaacgacgaggagctagggacactactcaaaggcgtaaccattgcacacggcggtgttttaccaaacataaacccaatactcctcccaaagaagtctgagaaagcagcttcaactacaaaaacacccaaatcaccatcaaaggcaaccaaatcccctaagaaatcttagttcttctttcttcattcctctgtataacctactgtttctatctctctgtacgtttctctgtaaagacagaacagaatatctctttgttgttgtgagaaagcttagtttctctg

SEQ ID NO: 26064 - protein, 171 aa, Arabidopsis thaliana
  peptide (1)..(171): Ceres Seq. ID no. 12389131
DQNQNQNQISRRVGVNQAMDSGTKVKKGAAGRRSGGGPKKKPVSRSVKSGLQFPVGRIGRYLKKGRYSKRVGTGAPVYLAAVLEYLAAEVLELAGNAARDNKKNRIIPRHVLLAVRNDEELGTLLKGVTIAHGGVLPNINPILLPKKSEKAASTTKTPKSPSKATKSPKKS

SEQ ID NO: 26065 - protein, 153 aa, Arabidopsis thaliana
  peptide (1)..(153): Ceres Seq. ID no. 12389132
MDSGTKVKKGAAGRRSGGGPKKKPVSRSVKSGLQFPVGRIGRYLKKGRYSKRVGTGAPVYLAAVLEYLAAEVLELAGNAARDNKKNRIIPRHVLLAVRNDEELGTLLKGVTIAHGGVLPNINPILLPKKSEKAASTTKTPKSPSKATKSPKKS

SEQ ID NO: 26066 - DNA, 879 bp, Arabidopsis thaliana
  misc_feature (1)..(879): Ceres Seq. ID no. 12331390
  misc_feature (1)..(879): Ortholog of  Ceres SEQ ID NO 13595341 as cited in SEQ ID NO 56398
  misc_feature (1)..(879): Ortholog of  Ceres SEQ ID NO 15173764 as cited in SEQ ID NO 57550
  misc_feature (1)..(879): Ortholog of  Ceres SEQ ID NO 15227118 as cited in SEQ ID NO 59038
  misc_feature (1)..(879): Ortholog of  Ceres SEQ ID NO 13597299 as cited in SEQ ID NO 63785
  misc_feature (1)..(879): Ortholog of  Ceres SEQ ID NO 13663895 as cited in SEQ ID NO 66923
acacaacaaacaacacgttctctctcatttttcttcttctccgatcaatctagggtttactctcaccggcgacgaacaatgatccacctcctttacacagtgatcttcgccgaaatggcactgatccttctcctcctcttcaaaactcctctccgaaagctaatcatcctcaccttcgatcgaatcaaacgtggccgtggtcccgtcgtcgtcaaaaccataggaaccaccgtattcgtcgttctcttgtcgagtatctacagtttggttaatatccaacgccgatctgaagatggtgctgttcttaatcccactgatcaagtccttgcgtctaagcatcttctcgaagcttctcttatggggtttgtgttgtttctctcgcttatgattgatagactacaccattacattagagagcttcgtttgttgaggaagacaatggagactgcaaagaagcagaacagaggttttgaggatgggaaaaccacaagtggggaggaagtgaaagcgctcggggaagagatcgcggcgttaaaagcgaagataaagacgttagaatcggagagtgaaagtaaaggcaaagaattgaaaggtgcacaaggtgaaacagaggctttgagaaagcaagctgatgggtttcttatggagtatgataggttgcttgaggataatcagaatttgaggaaccagttggagtctattgggcatagtcctgagggaaagaagggtatgtaagagtaaaaactaaggattctgttttgtagagaacaaagtaactataggaaatgtggttttactgatttttgcttcatgtaatatgcaatatcgtctcctcttttgaatgtattttactattatattgcaatctagtaagtttgg

SEQ ID NO: 26067 - protein, 244 aa, Arabidopsis thaliana
  peptide (1)..(244): Ceres Seq. ID no. 12331391
TQQTTRSLSFFFFSDQSRVYSHRRRTMIHLLYTVIFAEMALILLLLFKTPLRKLIILTFDRIKRGRGPVVVKTIGTTVFVVLLSSIYSLVNIQRRSEDGAVLNPTDQVLASKHLLEASLMGFVLFLSLMIDRLHHYIRELRLLRKTMETAKKQNRGFEDGKTTSGEEVKALGEEIAALKAKIKTLESESESKGKELKGAQGETEALRKQADGFLMEYDRLLEDNQNLRNQLESIGHSPEGKKGM

SEQ ID NO: 26068 - protein, 218 aa, Arabidopsis thaliana
  peptide (1)..(218): Ceres Seq. ID no. 12331392
MIHLLYTVIFAEMALILLLLFKTPLRKLIILTFDRIKRGRGPVVVKTIGTTVFVVLLSSIYSLVNIQRRSEDGAVLNPTDQVLASKHLLEASLMGFVLFLSLMIDRLHHYIRELRLLRKTMETAKKQNRGFEDGKTTSGEEVKALGEEIAALKAKIKTLESESESKGKELKGAQGETEALRKQADGFLMEYDRLLEDNQNLRNQLESIGHSPEGKKGM

SEQ ID NO: 26069 - protein, 206 aa, Arabidopsis thaliana
  peptide (1)..(206): Ceres Seq. ID no. 12331393
MALILLLLFKTPLRKLIILTFDRIKRGRGPVVVKTIGTTVFVVLLSSIYSLVNIQRRSEDGAVLNPTDQVLASKHLLEASLMGFVLFLSLMIDRLHHYIRELRLLRKTMETAKKQNRGFEDGKTTSGEEVKALGEEIAALKAKIKTLESESESKGKELKGAQGETEALRKQADGFLMEYDRLLEDNQNLRNQLESIGHSPEGKKGM

SEQ ID NO: 26070 - DNA, 1052 bp, Arabidopsis thaliana
  misc_feature (1)..(1052): Ceres Seq. ID no. 12331426
  misc_feature (1)..(1052): Ortholog of  Ceres SEQ ID NO 14304224 as cited in SEQ ID NO 56350
  misc_feature (1)..(1052): Ortholog of  Ceres SEQ ID NO 13597679 as cited in SEQ ID NO 65073
attgtatatatagtttgtggcatttctggtatatggtcactagaaaaatggacaaaagattatggagtcttcaaggtatgactgctcttgtgaccggtgcagccagcggaatcggttatgccatagtagaagagttagctggttttggagctaaaatccacatatgtgacatatccaaaactttgctcaatcaaagtttaagcgaatgggaaaataaagggtttcaagtgagtggttcagtatgtgatgtaacctctcatcctgagagagaaaaactgatgcaaaccgtctcctcgattttcgatggcaaactcaacattcttgtaaataacgtgggggtacttcgcggaaagccaacaacagaatatgtggcagacgatttcacttttcatatatcaactaacttggaagctgcttaccatttttgtcaactttcacatcctctcttaaaggcttcaggctatggaagcattgtattcctttcctctgttgctggggttgtatcactaattgactgtggatccatttatggtctaacaaaaggagctctaaatcaattagctagaaacttggcatgtgaatgggcaaaagacggcataagagccaatgctgttgcacctaatgttgtcaagactgctcagtctcaatcgtttcttgaagacgtcagtaaaaaggagggattgttgagtagaactccacttggccgtgttggagagccgaatgaagtttcatcactagtggtcttcttgtgtctacctgcagcttcttatatcacaggtcaaaccatttgtgttgatggaggtctcacggttaacggtttctcctatcaaccacatgcttgagaaatagtcttgtcgctctcaaagttctatatctaataaaagttctcattctatgagtttataaacgtaaacatcaatgagtttgcaattccatattggagatactaatctcgcacatatacaagattcggttacacccgctacgccaacaactcacaccaatgtgatctctcattctctctcataaatgaaatgttatactattttttg

SEQ ID NO: 26071 - protein, 279 aa, Arabidopsis thaliana
  peptide (1)..(279): Ceres Seq. ID no. 12331427
CIYSLWHFWYMVTRKMDKRLWSLQGMTALVTGAASGIGYAIVEELAGFGAKIHICDISKTLLNQSLSEWENKGFQVSGSVCDVTSHPEREKLMQTVSSIFDGKLNILVNNVGVLRGKPTTEYVADDFTFHISTNLEAAYHFCQLSHPLLKASGYGSIVFLSSVAGVVSLIDCGSIYGLTKGALNQLARNLACEWAKDGIRANAVAPNVVKTAQSQSFLEDVSKKEGLLSRTPLGRVGEPNEVSSLVVFLCLPAASYITGQTICVDGGLTVNGFSYQPHA

SEQ ID NO: 26072 - protein, 269 aa, Arabidopsis thaliana
  peptide (1)..(269): Ceres Seq. ID no. 12331428
MVTRKMDKRLWSLQGMTALVTGAASGIGYAIVEELAGFGAKIHICDISKTLLNQSLSEWENKGFQVSGSVCDVTSHPEREKLMQTVSSIFDGKLNILVNNVGVLRGKPTTEYVADDFTFHISTNLEAAYHFCQLSHPLLKASGYGSIVFLSSVAGVVSLIDCGSIYGLTKGALNQLARNLACEWAKDGIRANAVAPNVVKTAQSQSFLEDVSKKEGLLSRTPLGRVGEPNEVSSLVVFLCLPAASYITGQTICVDGGLTVNGFSYQPHA

SEQ ID NO: 26073 - protein, 264 aa, Arabidopsis thaliana
  peptide (1)..(264): Ceres Seq. ID no. 12331429
MDKRLWSLQGMTALVTGAASGIGYAIVEELAGFGAKIHICDISKTLLNQSLSEWENKGFQVSGSVCDVTSHPEREKLMQTVSSIFDGKLNILVNNVGVLRGKPTTEYVADDFTFHISTNLEAAYHFCQLSHPLLKASGYGSIVFLSSVAGVVSLIDCGSIYGLTKGALNQLARNLACEWAKDGIRANAVAPNVVKTAQSQSFLEDVSKKEGLLSRTPLGRVGEPNEVSSLVVFLCLPAASYITGQTICVDGGLTVNGFSYQPHA

SEQ ID NO: 26074 - DNA, 506 bp, Arabidopsis thaliana
  misc_feature (1)..(506): Ceres Seq. ID no. 12394357
  misc_feature (1)..(506): Ortholog of  Ceres SEQ ID NO 13595818 as cited in SEQ ID NO 56698
tcattttgatggttatatataggtttatgatgtgacaaagttcttggatgatcatcctggtggtgatgaggttatcttgacttctacagggaaagatgcgaccgatgatttcgaggatgtgggacatagttcgactgcgaaagccatgctagatgagtactatgtgggtgatattgacacagctactgtgccggttaaagctaagtttgtgcctcctacgtcgacgaaagccgtggctactcaggataagagctcggattttgttattaagctccttcagttccttgttccacttctaatcttaggcttggctttcggcattcggtactacactaagaccaaggctccttcttcttgaaagattgaattgtggcctaagtgaattgcttgtgtacgacgtggttaaactctgtctctacctctgtttgtcttgtaagacatcattatattctctattgcaatcaactgatagacctttgatttttaagccatctacctttgttgtc

SEQ ID NO: 26075 - protein, 70 aa, Arabidopsis thaliana
  peptide (1)..(70): Ceres Seq. ID no. 12394358
MLDEYYVGDIDTATVPVKAKFVPPTSTKAVATQDKSSDFVIKLLQFLVPLLILGLAFGIRYYTKTKAPSS

SEQ ID NO: 26076 - protein, 48 aa, Arabidopsis thaliana
  peptide (1)..(48): Ceres Seq. ID no. 12394359
MSTMWVILTQLLCRLKLSLCLLRRRKPWLLRIRARILLLSSFSSLFHF

SEQ ID NO: 26077 - protein, 45 aa, Arabidopsis thaliana
  peptide (1)..(45): Ceres Seq. ID no. 12394360
MWVILTQLLCRLKLSLCLLRRRKPWLLRIRARILLLSSFSSLFHF

SEQ ID NO: 26078 - DNA, 609 bp, Arabidopsis thaliana
  misc_feature (1)..(609): Ceres Seq. ID no. 12394273
  misc_feature (1)..(609): Ortholog of  Ceres SEQ ID NO 12589775 as cited in SEQ ID NO 0
aaaagattgtgaagatatatcatggagagagtgtgttgcatgtgcggtgatgtcggtttctccgacaagctcttcagctgcggtcactgccgctgccgcttccaacactcttattgtagcaactactacggccagtttgcggagcctaccgagatttgcgactggtgccgcagcgacgaccggaagctgagcaacgttgctagacatggcggttcttcttcaaagaagccttcttcttcggttaaatatgaaaatgacttctcaaacagatcggaatattcgcccggccaccggatcaagcataacaataaccgtcacgatcaagtagccaagggcgttgctggagatggaggcggagttacgtcgcctaagacggccacacgaaggtacaagcttctcaaagatgtcatgtgttagttccacctaaacgagaggtattagaagacttactataatcatactactctttcgagactgtgtgattaaattatgtataattagccactacggagagagcaaattaaaaaagaaaacgtcgttgtttgttttcatcctttttctcctttttacttttgtgtttatatatatgaaatgaatgtgtgtttggcc

SEQ ID NO: 26079 - protein, 131 aa, Arabidopsis thaliana
  peptide (1)..(131): Ceres Seq. ID no. 12394274
MERVCCMCGDVGFSDKLFSCGHCRCRFQHSYCSNYYGQFAEPTEICDWCRSDDRKLSNVARHGGSSSKKPSSSVKYENDFSNRSEYSPGHRIKHNNNRHDQVAKGVAGDGGGVTSPKTATRRYKLLKDVMC

SEQ ID NO: 26080 - protein, 125 aa, Arabidopsis thaliana
  peptide (1)..(125): Ceres Seq. ID no. 12394275
MCGDVGFSDKLFSCGHCRCRFQHSYCSNYYGQFAEPTEICDWCRSDDRKLSNVARHGGSSSKKPSSSVKYENDFSNRSEYSPGHRIKHNNNRHDQVAKGVAGDGGGVTSPKTATRRYKLLKDVMC

SEQ ID NO: 26081 - DNA, 801 bp, Arabidopsis thaliana
  misc_feature (1)..(801): Ceres Seq. ID no. 12370181
  misc_feature (1)..(801): Ortholog of  Ceres SEQ ID NO 13598422 as cited in SEQ ID NO 68856
aaaaagaaaaattgagagtcgccgcagctatcactctgctctgtcactttgtcttttactcagagaatcagagacagagagagaaagagagagagagcgaggggaagggaaatggagaaggcattaacgaaagtgacgagctttaaagtgggaagttcatggatctctaagaaagctaaagaagagctctcaaacatcaccaatgacctcacaacattctccagtactgttgaagagaaagcaaaatgggttttcaacaagcttaaaggaaaaccactgaaaagcttaccagacctcctcaaagaatacaacttaccaccaggactcttcccacaaaacataatctgctacgaattcgatgagacgaagaacaaactcactgtcttcttctcttcaccatgtgaagtcacattcaaagatggatcagcgataagatatgcaacgtgtgtgaaagggattttgcttagagggaagctgatgggtgtggaaggaatgaagacaaaagtgttggtgtgggttaaagtcacaacaatctcagtcgagagctccaagtctgacaaactctggttcactgctggtgtcaagaaatctcgatctaaggatgtttatgacacacctcatgatgctatcaaagtcattggagagttctaaggatttttttcacaattggttattatcatatttgattcatgaatttatttggggttatttgcattttgggaagaggtatacttaaaggaaatgtgtttatataactctcattttcctcctttatatgcaagaaatcacaaatctttatcg

SEQ ID NO: 26082 - protein, 179 aa, Arabidopsis thaliana
  peptide (1)..(179): Ceres Seq. ID no. 12370182
MEKALTKVTSFKVGSSWISKKAKEELSNITNDLTTFSSTVEEKAKWVFNKLKGKPLKSLPDLLKEYNLPPGLFPQNIICYEFDETKNKLTVFFSSPCEVTFKDGSAIRYATCVKGILLRGKLMGVEGMKTKVLVWVKVTTISVESSKSDKLWFTAGVKKSRSKDVYDTPHDAIKVIGEF

SEQ ID NO: 26083 - DNA, 783 bp, Arabidopsis thaliana
  misc_feature (1)..(783): Ceres Seq. ID no. 13487371
  misc_feature (1)..(783): Ortholog of  Ceres SEQ ID NO 12474478 as cited in SEQ ID NO 96
  misc_feature (1)..(783): Ortholog of  Ceres SEQ ID NO 14302025 as cited in SEQ ID NO 52138
  misc_feature (1)..(783): Ortholog of  Ceres SEQ ID NO 15172672 as cited in SEQ ID NO 53908
attttgcacacataaccctaatttggtctcttactctaacccgagagataatggctcctacacaaaatctcttccttgtcgctattgccttcgccgtcattttcaccgcctccaccgtacatggtcgtcataatggtgcagaagatatcgtgcattcctcctgcgaacacgcgagctatccatcactatgcgtccgtactctttcgtcatactccggtccaaccatcaccaaccgccgcgatctagctcaagccgccataaaaatcagcctctcccacgctcaaagcgccgcgaagaaactcgcggtggtgcgagactcggtggggaagaagaagcaagagaaagcggcgcttgtggactgtgtggagatgattggagactctgtggacgagctaagccgtacgctcggcgttttgaagcacctccgtgtctctggcggttcagctaaagagttccggtggcagatgagcaatgcacagacgtgggctagcgcggcacttacggatgacgacacgtgtctcgatgggtttcaagggatggacgacggtgaaatcaaaacggaggtgaagcagtggatgacgaaagtggccagggttacgagcaacgcgctttacatggtcaaccagctagatgagacacgtggcaaaccccacgacgtacatctttgatgttaatgcactagatcgttttaatggacggtctttattgtgtgtgttggtttttcgttcatgtgttttaagtgtgagattatctatcgctacgatatatagaaatgagtttttg

SEQ ID NO: 26084 - protein, 221 aa, Arabidopsis thaliana
  peptide (1)..(221): Ceres Seq. ID no. 13487372
FAHITLIWSLTLTREIMAPTQNLFLVAIAFAVIFTASTVHGRHNGAEDIVHSSCEHASYPSLCVRTLSSYSGPTITNRRDLAQAAIKISLSHAQSAAKKLAVVRDSVGKKKQEKAALVDCVEMIGDSVDELSRTLGVLKHLRVSGGSAKEFRWQMSNAQTWASAALTDDDTCLDGFQGMDDGEIKTEVKQWMTKVARVTSNALYMVNQLDETRGKPHDVHL

SEQ ID NO: 26085 - protein, 205 aa, Arabidopsis thaliana
  peptide (1)..(205): Ceres Seq. ID no. 13487373
MAPTQNLFLVAIAFAVIFTASTVHGRHNGAEDIVHSSCEHASYPSLCVRTLSSYSGPTITNRRDLAQAAIKISLSHAQSAAKKLAVVRDSVGKKKQEKAALVDCVEMIGDSVDELSRTLGVLKHLRVSGGSAKEFRWQMSNAQTWASAALTDDDTCLDGFQGMDDGEIKTEVKQWMTKVARVTSNALYMVNQLDETRGKPHDVHL

SEQ ID NO: 26086 - DNA, 964 bp, Arabidopsis thaliana; identical to SEQ ID NO: 25580
  misc_feature (1)..(964): Ceres Seq. ID no. 12327196
  misc_feature (1)..(964): Ortholog of  Ceres SEQ ID NO 15179153 as cited in SEQ ID NO 1066
  misc_feature (1)..(964): Ortholog of  Ceres SEQ ID NO 15176047 as cited in SEQ ID NO 55988
  misc_feature (1)..(964): Ortholog of  Ceres SEQ ID NO 13582167 as cited in SEQ ID NO 56203
  misc_feature (1)..(964): Ortholog of  Ceres SEQ ID NO 13658295 as cited in SEQ ID NO 66515

SEQ ID NO: 26087 - protein, 253 aa, Arabidopsis thaliana; identical to SEQ ID NO: 25581
  peptide (1)..(253): Ceres Seq. ID no. 12327197

SEQ ID NO: 26088 - protein, 171 aa, Arabidopsis thaliana; identical to SEQ ID NO: 25582
  peptide (1)..(171): Ceres Seq. ID no. 12327198

SEQ ID NO: 26089 - DNA, 723 bp, Arabidopsis thaliana
  misc_feature (1)..(723): Ceres Seq. ID no. 13487374
  misc_feature (1)..(723): Ortholog of  Ceres SEQ ID NO 12610615 as cited in SEQ ID NO 56226
  misc_feature (1)..(723): Ortholog of  Ceres SEQ ID NO 12622129 as cited in SEQ ID NO 67619
gatcgacaaatagggtttagaatccacacacccaaatcggaaggcgaagaaaatggaaggatgggatccgaacacgaagtcgacgttaacgcgaataccgcttctgacgacaaaggcgggtccaagagacggcgcggcatggacgcagaggctgaaagaggagtacaagtctctgattgcgtatacccaaatgaacaagtccaacgacaatgactggttccgtatctccgcttccaatcctgagggcacgcgttggactggcaagtgttggtatgttcacaaccttctcaaatacgaattcgatctccagttcgatatcccgattacctatccagccactgctcctgagcttgagctgcctgagattgacggcaagactcaaaagatgtatcgaggtgggaagatatgtttgactgtgcatttcaagcctctatgggccaaaaactgtcctcggtttggtatagcacatgcactttgtttggggctcgctccgtggttagctgcagagattccaattcttgtggactccggcgcgattaagcacaaagatgacgcagccacatctgcggaatcttaaatctatgtaacctttctatcaatctcagaaatgttgaggtgtttatcagtaatagctgaactcagaaatgactgaggtggatgcgtctaccctataaatacacttacatgaaacccaataaagatttaagctattgcaatgttttt

SEQ ID NO: 26090 - protein, 174 aa, Arabidopsis thaliana
  peptide (1)..(174): Ceres Seq. ID no. 13487375
MEGWDPNTKSTLTRIPLLTTKAGPRDGAAWTQRLKEEYKSLIAYTQMNKSNDNDWFRISASNPEGTRWTGKCWYVHNLLKYEFDLQFDIPITYPATAPELELPEIDGKTQKMYRGGKICLTVHFKPLWAKNCPRFGIAHALCLGLAPWLAAEIPILVDSGAIKHKDDAATSAES

SEQ ID NO: 26091 - protein, 128 aa, Arabidopsis thaliana
  peptide (1)..(128): Ceres Seq. ID no. 13487376
MNKSNDNDWFRISASNPEGTRWTGKCWYVHNLLKYEFDLQFDIPITYPATAPELELPEIDGKTQKMYRGGKICLTVHFKPLWAKNCPRFGIAHALCLGLAPWLAAEIPILVDSGAIKHKDDAATSAES

SEQ ID NO: 26092 - DNA, 771 bp, Arabidopsis thaliana
  misc_feature (1)..(771): Ceres Seq. ID no. 12394354
  misc_feature (1)..(771): Ortholog of  Ceres SEQ ID NO 12624653 as cited in SEQ ID NO 61262
  misc_feature (1)..(771): Ortholog of  Ceres SEQ ID NO 12579223 as cited in SEQ ID NO 0
  misc_feature (1)..(771): Ortholog of  Ceres SEQ ID NO 12635708 as cited in SEQ ID NO 0
gacccaaatctgacgcttctctctctctttctggtatctgcgtttgattcggagaagaaaaaaaaaaaaaaggcaaagagagagcttcaatggagttagcttctttccttggtagagctctgtttgtttccgtatttcttctctccgcatggcaagagttcaatgattttggtgaagatggtggccgatcagctaaatctttgaaaccaaaattcaatgcctttgtaaaccatgtgacaactcacactggccagcaattgccaccagtcgatatgaagattcttgttgctgctgctatagccttgaagggtattgggggactattgtttgtctttggcagctcattgggagcttatctcttgcttctgcatcaagccgttgccaccccaattctgtatgatttctacaactacgatgttgacagaaaggaattcggccaactattttcaaaatttacacagagcttggctcttcttggaggactgctcttcttcattggaatgaaaaactcaaggaaacacggtaggcaactcaggaaaaaggctccaaaggcaaaagcaaactgaagaagccatatctttcatcggttttattcggtctgtattttattttcattttggaatccaggatgggtttaaagagtctatctgatgaggccattgaaaggcaaaatctctgcaaatcattttgcttacttcaagaagcttttatgacacttttttgtagaaatatttatggattattgtttcttagagacaccacttcaatgtc

SEQ ID NO: 26093 - protein, 158 aa, Arabidopsis thaliana
  peptide (1)..(158): Ceres Seq. ID no. 12394355
MELASFLGRALFVSVFLLSAWQEFNDFGEDGGRSAKSLKPKFNAFVNHVTTHTGQQLPPVDMKILVAAAIALKGIGGLLFVFGSSLGAYLLLLHQAVATPILYDFYNYDVDRKEFGQLFSKFTQSLALLGGLLFFIGMKNSRKHGRQLRKKAPKAKAN

SEQ ID NO: 26094 - protein, 97 aa, Arabidopsis thaliana
  peptide (1)..(97): Ceres Seq. ID no. 12394356
MKILVAAAIALKGIGGLLFVFGSSLGAYLLLLHQAVATPILYDFYNYDVDRKEFGQLFSKFTQSLALLGGLLFFIGMKNSRKHGRQLRKKAPKAKAN

SEQ ID NO: 26095 - DNA, 1208 bp, Arabidopsis thaliana
  misc_feature (1)..(1208): Ceres Seq. ID no. 12323550
  misc_feature (1)..(1208): Ortholog of  Ceres SEQ ID NO 12484482 as cited in SEQ ID NO 53324
  misc_feature (1)..(1208): Ortholog of  Ceres SEQ ID NO 15176234 as cited in SEQ ID NO 54949
  misc_feature (1)..(1208): Ortholog of  Ceres SEQ ID NO 14314507 as cited in SEQ ID NO 59337
aagtaggacgacgtgcgtctgcttcgtctcattacaaagcagaagaaacacaaacagaggcagagatcttaagagttaaagactaatcccaacaatggcgtctctcaaagtcccaagcaatgttcctcttcccgaagatgacgccgagcaactccacaaggctttttcaggatggggtaccaacgagaagctgatcatatcaatactagctcacaggaacgcagcacaacgcagcttgatccgcagcgtttatgcagctacctacaatgaggatcttctcaaagcattagacaaagagctttctagcgactttgagagagctgtgatgttgtggactcttgatccaccagagagagatgcttatttggctaaagaatccaccaagatgttcaccaagaacaattgggttcttgttgaaatcgcttgcacaaggcctgctcttgagcttatcaaggtcaagcaagcttaccaagctcgatacaagaaatcaatcgaggaagatgtcgcgcaacacacatctggtgaccttcgtaagctcttgcttcctcttgtgagcactttcaggtatgaaggagatgatgtgaacatgatgcttgcaagatctgaagctaagatacttcacgagaaggtctcagagaaatcttacagtgacgatgacttcatcagaatcttgacaacaagaagcaaagcacagctcggtgcaacactcaaccactacaacaacgagtatggaaacgccattaacaagaacttgaaggaagagtcggacgacaatgactacatgaaactactaagagctgtaatcacatgtttgacataccctgagaagcattttgagaaggttcttcgtctatcaatcaacaaaatgggaacagacgaatggggactaacccgagtcgtgactacacgaactgaagttgacatggaacgcatcaaagaggaatatcagcgaagaaacagcattcctttggaccgtgctatcgccaaagacacttctggtgactatgaggacatgcttgttgctcttctcggacatggcgatgcttgaaactgtttcaactttcgagttcctcctttctcttactgcatggtttgttttaaataaaagagttgtgaaactggttctgcaactatttatcaatgatcgtttgagtttgttaaatttgaatcaaaatctgtttttctttcttttaaatacaatctaaagc

SEQ ID NO: 26096 - protein, 317 aa, Arabidopsis thaliana
  peptide (1)..(317): Ceres Seq. ID no. 12323551
MASLKVPSNVPLPEDDAEQLHKAFSGWGTNEKLIISILAHRNAAQRSLIRSVYAATYNEDLLKALDKELSSDFERAVMLWTLDPPERDAYLAKESTKMFTKNNWVLVEIACTRPALELIKVKQAYQARYKKSIEEDVAQHTSGDLRKLLLPLVSTFRYEGDDVNMMLARSEAKILHEKVSEKSYSDDDFIRILTTRSKAQLGATLNHYNNEYGNAINKNLKEESDDNDYMKLLRAVITCLTYPEKHFEKVLRLSINKMGTDEWGLTRVVTTRTEVDMERIKEEYQRRNSIPLDRAIAKDTSGDYEDMLVALLGHGDA

SEQ ID NO: 26097 - protein, 240 aa, Arabidopsis thaliana
  peptide (1)..(240): Ceres Seq. ID no. 12323552
MLWTLDPPERDAYLAKESTKMFTKNNWVLVEIACTRPALELIKVKQAYQARYKKSIEEDVAQHTSGDLRKLLLPLVSTFRYEGDDVNMMLARSEAKILHEKVSEKSYSDDDFIRILTTRSKAQLGATLNHYNNEYGNAINKNLKEESDDNDYMKLLRAVITCLTYPEKHFEKVLRLSINKMGTDEWGLTRVVTTRTEVDMERIKEEYQRRNSIPLDRAIAKDTSGDYEDMLVALLGHGDA

SEQ ID NO: 26098 - protein, 220 aa, Arabidopsis thaliana
  peptide (1)..(220): Ceres Seq. ID no. 12323553
MFTKNNWVLVEIACTRPALELIKVKQAYQARYKKSIEEDVAQHTSGDLRKLLLPLVSTFRYEGDDVNMMLARSEAKILHEKVSEKSYSDDDFIRILTTRSKAQLGATLNHYNNEYGNAINKNLKEESDDNDYMKLLRAVITCLTYPEKHFEKVLRLSINKMGTDEWGLTRVVTTRTEVDMERIKEEYQRRNSIPLDRAIAKDTSGDYEDMLVALLGHGDA

SEQ ID NO: 26099 - DNA, 678 bp, Arabidopsis thaliana
  misc_feature (1)..(678): Ceres Seq. ID no. 12337775
  misc_feature (1)..(678): Ortholog of  Ceres SEQ ID NO 12610954 as cited in SEQ ID NO 55930
  misc_feature (1)..(678): Ortholog of  Ceres SEQ ID NO 12625335 as cited in SEQ ID NO 63326
  misc_feature (1)..(678): Ortholog of  Ceres SEQ ID NO 12566590 as cited in SEQ ID NO 0
aaagtcaaaactaacctattttcccttgtcttcatatccaacagagatctcttcatggctccaattactgtcggcgatgttgtaccagacggaactatctctttcttcgatgaaaatgatcagcttcagaccgtctccgttcactctatcgccgccggtaaaaaagtcattctctttggtgttcctggtgctttcactcccacatgcagcatgagccatgtgcctggattcattgggaaagcagaggagctgaagtcaaaggttatcgatgagatcatttgctttagtgtgaatgatccatttgtgatgaaggcatgggggaaaacatacacagagaacaagcatgtgaagtttgtagcagatggatctggagaatacacacatcttcttggacttgagcttgatctcaaggacaagggtcttggtattaggtcaaggagatttgctctgttgcttgataaccttaaggtgactgtagctaatgtcgaaaatggtggcgagttcacggtttccagcgcagaggatatcctcaaggctctctaagaaactttattattcgcttgttgtattgtgaatctaaaccgctgtatgtgaagaagagaattatatagcctgatttcaatcaacaagcaagtgtattgacttgcttggcataataaagtatttggttttaatgtc

SEQ ID NO: 26100 - protein, 180 aa, Arabidopsis thaliana
  peptide (1)..(180): Ceres Seq. ID no. 12337776
KVKTNLFSLVFISNRDLFMAPITVGDVVPDGTISFFDENDQLQTVSVHSIAAGKKVILFGVPGAFTPTCSMSHVPGFIGKAEELKSKVIDEIICFSVNDPFVMKAWGKTYTENKHVKFVADGSGEYTHLLGLELDLKDKGLGIRSRRFALLLDNLKVTVANVENGGEFTVSSAEDILKAL

SEQ ID NO: 26101 - protein, 162 aa, Arabidopsis thaliana
  peptide (1)..(162): Ceres Seq. ID no. 12337777
MAPITVGDVVPDGTISFFDENDQLQTVSVHSIAAGKKVILFGVPGAFTPTCSMSHVPGFIGKAEELKSKVIDEIICFSVNDPFVMKAWGKTYTENKHVKFVADGSGEYTHLLGLELDLKDKGLGIRSRRFALLLDNLKVTVANVENGGEFTVSSAEDILKAL

SEQ ID NO: 26102 - protein, 110 aa, Arabidopsis thaliana
  peptide (1)..(110): Ceres Seq. ID no. 12337778
MSHVPGFIGKAEELKSKVIDEIICFSVNDPFVMKAWGKTYTENKHVKFVADGSGEYTHLLGLELDLKDKGLGIRSRRFALLLDNLKVTVANVENGGEFTVSSAEDILKAL

SEQ ID NO: 26103 - DNA, 660 bp, Arabidopsis thaliana
  misc_feature (1)..(660): Ceres Seq. ID no. 12394180
  misc_feature (1)..(660): Ortholog of  Ceres SEQ ID NO 15171813 as cited in SEQ ID NO 57309
aaaaccctacgacccaaaaacaaaagagacgaaacaaaacaaaacaaaaagtctggtttgggtttctcgagctcttcttcttcttacaaagaaaatgactgattctgggcatgatattgaaatcagatgccatcactgcacaggccctcttaccagaaatttggaaaccagtaaatggactgttgatccgttcatcagggatagcttttctatgattggatcagctgttggaggtactgcaagtgcattcattggatttaaccatgcaatgccaattgtacgcaagtggatcaaaggacccatgtggttacattttcttgttggggcaccacctgttatagttctttcatcagcatgtgctggactagcaggtggcactgtaccggcactggcacagctcgcttcatcttcataccgagctgcagtccattcgtctcagccaccacaagcacaaaaggataacaaaatgcagaagtctacgacttctcctttgtaaacgacacacacagcacagctctctcttttgttcttatttatttctcttcattttgtatgtcaaatcttttctttgaaagagagagcttcttggtgtaaattcttcttatcttatacaactatctggtgctaaagaaagcttaatccgtgtcacgggctttatgt

SEQ ID NO: 26104 - protein, 164 aa, Arabidopsis thaliana
  peptide (1)..(164): Ceres Seq. ID no. 12394181
KPYDPKTKETKQNKTKSLVWVSRALLLLTKKMTDSGHDIEIRCHHCTGPLTRNLETSKWTVDPFIRDSFSMIGSAVGGTASAFIGFNHAMPIVRKWIKGPMWLHFLVGAPPVIVLSSACAGLAGGTVPALAQLASSSYRAAVHSSQPPQAQKDNKMQKSTTSPL

SEQ ID NO: 26105 - protein, 133 aa, Arabidopsis thaliana
  peptide (1)..(133): Ceres Seq. ID no. 12394182
MTDSGHDIEIRCHHCTGPLTRNLETSKWTVDPFIRDSFSMIGSAVGGTASAFIGFNHAMPIVRKWIKGPMWLHFLVGAPPVIVLSSACAGLAGGTVPALAQLASSSYRAAVHSSQPPQAQKDNKMQKSTTSPL

SEQ ID NO: 26106 - protein, 94 aa, Arabidopsis thaliana
  peptide (1)..(94): Ceres Seq. ID no. 12394183
MIGSAVGGTASAFIGFNHAMPIVRKWIKGPMWLHFLVGAPPVIVLSSACAGLAGGTVPALAQLASSSYRAAVHSSQPPQAQKDNKMQKSTTSPL

SEQ ID NO: 26107 - DNA, 1141 bp, Arabidopsis thaliana
  misc_feature (1)..(1141): Ceres Seq. ID no. 12325551
  misc_feature (1)..(1141): Ortholog of  Ceres SEQ ID NO 14304202 as cited in SEQ ID NO 56346
  misc_feature (1)..(1141): Ortholog of  Ceres SEQ ID NO 14304159 as cited in SEQ ID NO 56494
  misc_feature (1)..(1141): Ortholog of  Ceres SEQ ID NO 12613472 as cited in SEQ ID NO 60611
  misc_feature (1)..(1141): Ortholog of  Ceres SEQ ID NO 12623915 as cited in SEQ ID NO 61013
cttctcctcatcacaaaattctccgacgcattacattttcttccgatcaatacagagagatcagtttctgagagagaagaagatgtctatagaggaagaaaacgttccaacgactgttgactcaggagctgccgatacaacggtgaaatctccggagaagaaaccggcggcgaaaggtggtaaatctaagaagacgacgacggctaaagcaacgaagaagcctgtgaaagctgctgctccaacgaagaagaaaacaacttcctctcaccctacctatgaagagatgattaaagatgcgattgtaacgttgaaggagagaactggatctagtcaatacgcgattcagaaattcatagaggagaaacataaatcactgcctcctacttttaggaagcttttgcttgtgaatctcaagagacttgttgcttctgagaaattggttaaagtcaaagcttcttttaagattccttctgctagatccgcagcaacacctaaaccggctgctccggttaagaagaaggcaactgtagtagctaaacctaagggtaaggttgctgctgctgttgctcctgctaaagctaaagcggcggctaaaggaactaagaagcctgcggctaaagttgttgctaaggctaaggttactgctaaacctaaggctaaggttactgctgctaaacctaagtctaagtctgttgctgctgtttccaagactaaagctgttgctgctaagcctaaggctaaggagagaccagctaaagcttctaggacttcgactagaacatctccagggaaaaaagttgctgctcctgctaagaaagtggctgtgactaagaaggctccggctaagagtgtgaaggtgaagtctccggcgaagagagcttcgactaggaaggctaagaagtgaagaagattggtttaggataggttttggggggagattgaatacatggtggtggttagcttctatagggtagtcttgtataattgaatcatccttgaaggagcttgctttccaaagttttttacttgtttctttggtttcttcttgaaacttttttttttcttctttgtaagttttggtttgtttgaattttaagctttttgatcaatagctataatgtgatggtttcttcactctttt

SEQ ID NO: 26108 - protein, 300 aa, Arabidopsis thaliana
  peptide (1)..(300): Ceres Seq. ID no. 12325552
FSSSQNSPTHYIFFRSIQRDQFLREKKMSIEEENVPTTVDSGAADTTVKSPEKKPAAKGGKSKKTTTAKATKKPVKAAAPTKKKTTSSHPTYEEMIKDAIVTLKERTGSSQYAIQKFIEEKHKSLPPTFRKLLLVNLKRLVASEKLVKVKASFKIPSARSAATPKPAAPVKKKATVVAKPKGKVAAAVAPAKAKAAAKGTKKPAAKVVAKAKVTAKPKAKVTAAKPKSKSVAAVSKTKAVAAKPKAKERPAKASRTSTRTSPGKKVAAPAKKVAVTKKAPAKSVKVKSPAKRASTRKAKK

SEQ ID NO: 26109 - protein, 273 aa, Arabidopsis thaliana
  peptide (1)..(273): Ceres Seq. ID no. 12325553
MSIEEENVPTTVDSGAADTTVKSPEKKPAAKGGKSKKTTTAKATKKPVKAAAPTKKKTTSSHPTYEEMIKDAIVTLKERTGSSQYAIQKFIEEKHKSLPPTFRKLLLVNLKRLVASEKLVKVKASFKIPSARSAATPKPAAPVKKKATVVAKPKGKVAAAVAPAKAKAAAKGTKKPAAKVVAKAKVTAKPKAKVTAAKPKSKSVAAVSKTKAVAAKPKAKERPAKASRTSTRTSPGKKVAAPAKKVAVTKKAPAKSVKVKSPAKRASTRKAKK

SEQ ID NO: 26110 - protein, 206 aa, Arabidopsis thaliana
  peptide (1)..(206): Ceres Seq. ID no. 12325554
MIKDAIVTLKERTGSSQYAIQKFIEEKHKSLPPTFRKLLLVNLKRLVASEKLVKVKASFKIPSARSAATPKPAAPVKKKATVVAKPKGKVAAAVAPAKAKAAAKGTKKPAAKVVAKAKVTAKPKAKVTAAKPKSKSVAAVSKTKAVAAKPKAKERPAKASRTSTRTSPGKKVAAPAKKVAVTKKAPAKSVKVKSPAKRASTRKAKK

SEQ ID NO: 26111 - DNA, 692 bp, Arabidopsis thaliana
  misc_feature (1)..(692): Ceres Seq. ID no. 12323805
  misc_feature (1)..(692): Ortholog of  Ceres SEQ ID NO 12626698 as cited in SEQ ID NO 66911
gaaagcaaaggaaaaagaagaaatcgaaatcggaaactgtatattgttgttcttcgattcctcctcgctctacgccgcgtcctctctctcaaattcatcggaagcaaccttcttctcccatcatcgcctgaatccaatggcaacgataaggaacttgaagataaaaacatcaacatgtaaaaggattgtgaaagagcttcactcttatgagaaagaagttgagagagaagcggctaagactgctgatatgaaggacaaaggtgctgatccctacgaccttaaacaacaggaaaatgtgttgggtgagtctaggatgatgattccggattgccacaaacgtctcgagtctgcattggctgacctcaagtccactttggcggaattggaagagacggatgagaaggaaggtccagagatcgaagatgcaaagaagacagtcgcggatgtggagaagcagtttcccactgaagatgcctgatttagccagcgatgagtgttaaatctgtattctgagaatggttaatcatctgtaagaatctttatatctaaggttgcttgtcgactgtatacactaaaaatatctttctttaacattttggtgattgttctttcattcaatatctttgaaatggcacacttgctataatgtgttgtaagctgcaacttaacgattgataattgatataactttg

SEQ ID NO: 26112 - protein, 158 aa, Arabidopsis thaliana
  peptide (1)..(158): Ceres Seq. ID no. 12323806
KAKEKEEIEIGNCILLFFDSSSLYAASSLSNSSEATFFSHHRLNPMATIRNLKIKTSTCKRIVKELHSYEKEVEREAAKTADMKDKGADPYDLKQQENVLGESRMMIPDCHKRLESALADLKSTLAELEETDEKEGPEIEDAKKTVADVEKQFPTEDA

SEQ ID NO: 26113 - protein, 113 aa, Arabidopsis thaliana
  peptide (1)..(113): Ceres Seq. ID no. 12323807
MATIRNLKIKTSTCKRIVKELHSYEKEVEREAAKTADMKDKGADPYDLKQQENVLGESRMMIPDCHKRLESALADLKSTLAELEETDEKEGPEIEDAKKTVADVEKQFPTEDA

SEQ ID NO: 26114 - DNA, 940 bp, Arabidopsis thaliana
  misc_feature (1)..(940): Ceres Seq. ID no. 12323802
  misc_feature (1)..(940): Ortholog of  Ceres SEQ ID NO 13595704 as cited in SEQ ID NO 51001
  misc_feature (1)..(940): Ortholog of  Ceres SEQ ID NO 13638279 as cited in SEQ ID NO 57674
  misc_feature (1)..(940): Ortholog of  Ceres SEQ ID NO 15177534 as cited in SEQ ID NO 0
acattcgcgtttcgaatcgaaacgaagaagatcgagatcagtgaagaagaagaagacgaaatcacgaaaccatgttcttgttcgattggttctacggaatcttagcttcgttagggttatggcaaaaagaagcaaagatcttgtttctcggtctcgataatgctggcaaaactacattacttcacatgctcaaagacgagagattagttcagcatcagccgacgcaacatccaacgtctgaagaacttagcattggaaaaatcaagttcaaggcttttgatttgggtggtcatcagattgctcgtagggtttggaaagattactatgccaaggttgatgctgttgtctaccttgtggatgcttatgacaaagaaagatttgcagagtcaaaaagagagcttgatgctcttctctcggatgaagcccttgcaactgtcccgtttctgattcttgggaacaagattgatatcccttatgcagcttctgaagacgaactgaggtatcacttgggtctcactaacttcaccaccggtaagggcaaagtgacgctcggagactctggtgttcgcccacttgaggtcttcatgtgcagcattgtccgtaaaatgggttatggcgagggattcaaatggctctctcagtacatcaactaaagacagacgtcaagtcttttatcatattttcaaaccaaacccaagaagattttccgtacaatttgtctatttcgagctaaaagatttgtgattgacgatgtcacatccttcccttagaagacttgagaacacttttttctcatatttgttctttttgttgttttctgtgtggaacataagtttggtggcttgcatttccaaacttattcatttctcttgtccacatttttgtcaactgcttatgtttcattgaacattattcccaagttagaccaccaacttttttg

SEQ ID NO: 26115 - protein, 193 aa, Arabidopsis thaliana
  peptide (1)..(193): Ceres Seq. ID no. 12323803
MFLFDWFYGILASLGLWQKEAKILFLGLDNAGKTTLLHMLKDERLVQHQPTQHPTSEELSIGKIKFKAFDLGGHQIARRVWKDYYAKVDAVVYLVDAYDKERFAESKRELDALLSDEALATVPFLILGNKIDIPYAASEDELRYHLGLTNFTTGKGKVTLGDSGVRPLEVFMCSIVRKMGYGEGFKWLSQYIN

SEQ ID NO: 26116 - protein, 155 aa, Arabidopsis thaliana
  peptide (1)..(155): Ceres Seq. ID no. 12323804
MLKDERLVQHQPTQHPTSEELSIGKIKFKAFDLGGHQIARRVWKDYYAKVDAVVYLVDAYDKERFAESKRELDALLSDEALATVPFLILGNKIDIPYAASEDELRYHLGLTNFTTGKGKVTLGDSGVRPLEVFMCSIVRKMGYGEGFKWLSQYIN

SEQ ID NO: 26117 - DNA, 1827 bp, Arabidopsis thaliana
  misc_feature (1)..(1827): Ceres Seq. ID no. 12331394
  misc_feature (1)..(1827): Ortholog of  Ceres SEQ ID NO 13598582 as cited in SEQ ID NO 65294
  misc_feature (1)..(1827): Ortholog of  Ceres SEQ ID NO 15176145 as cited in SEQ ID NO 0
aattcgatttggattgcagaaaaagaaaagaaaagaaaagactaaaaatttggacgataagcagaaaagagagaggagggcctctcgccctcttattaaaaccttgccttctccaaatctgaagatttctcaatcctaaaatcttttttttttcctctttctccgtttctttattttcggaatccaagatcgtgggtcgatcggtttttacacaatccgatcacgacccatctgctctttttcatcctattttgcttcccttgagaaatggaaatggaatcatgtaagctcttcatcggtggtatatcttgggaaaccagtgaagatcgtcttcgtgactattttcacagttttggtgaggttttagaggctgttattatgaaggatcgtgccactggccgtgctcgtggctttggtttcgttgtctttgctgatcctaatgttgctgaaagagtcgtcttgcttaaacatatcattgatggtaaaattgttgaggcaaagaaggctgttccaagagatgatcacgtagtatttaataaaagtaacagcagccttcagggatcacctggcccatcaaactccaagaagatctttgtgggaggtttggcatcatccgtgacagaggctgagttcaaaaagtattttgctcagtttgggatgatcactgatgttgtggtgatgtatgaccacagaacccagcggcctagaggctttgggttcatttcatatgactctgaggaagctgttgacaaagtactgcagaagacattccacgaactcaatggtaagatggtggaggtcaaactggctgttcctaaggatatggctctcaacacaatgcggaaccaaatgaatgtaaatagctttggcactagtagaatcagttcattactgaatgagtacacccagggattcagcccgagtccaatctctggttatggagtgaaacctgaagttaggtacagtccagcagtaggtaataggggaggattctcaccgtttggacatggatacggaatcgagctgaattttgagccaaaccagactcagaactacggttctggttccagtggaggctttggacgaccctttagccctggatatgctgcgagtctcggcaggttcggtagccaaatggagtcgggaggagctagtgttgggaacggttctgtcctaaatgcagcaccaaagaaccatttatggggaaatggtggtctaggttacatgtcaaactctccgatatcaagaagcagcttcagtggaaactctggaatgtcttcactaggcagcattggtgacaactggggaacagttgcacgtgcacgcagtagctaccacggtgagagaggaggtgtaggattagaagcaatgagaggagttcatgttggtggttacagcagcggctcaagcatcttggaggcagactctctgtacagcgactcgatgtggctttcgctgcctgcaaaggcagaggaaggattgggaatgggaccattggacttcatgtctagaggaccagctggatacatcaacaggcaaccaaacggaggaattgcagcttagagaagtgacaaatctataccatggagatcagatgattgcagaagagagtttttagaagaggaaaaaagtttattaaaaaaaaaaaaattattggtaccaaaaagcttaaagcttttatttactttttactattttgatttgttgttatagctttcttttcacccttttttctaatttggggttttgtttcttttgtttttatcgttaaagaaaaaagatgtaaacttgagtgatataaaaagagacaaagaaacaatgaagtgt

SEQ ID NO: 26118 - protein, 431 aa, Arabidopsis thaliana
  peptide (1)..(431): Ceres Seq. ID no. 12331395
MEMESCKLFIGGISWETSEDRLRDYFHSFGEVLEAVIMKDRATGRARGFGFVVFADPNVAERVVLLKHIIDGKIVEAKKAVPRDDHVVFNKSNSSLQGSPGPSNSKKIFVGGLASSVTEAEFKKYFAQFGMITDVVVMYDHRTQRPRGFGFISYDSEEAVDKVLQKTFHELNGKMVEVKLAVPKDMALNTMRNQMNVNSFGTSRISSLLNEYTQGFSPSPISGYGVKPEVRYSPAVGNRGGFSPFGHGYGIELNFEPNQTQNYGSGSSGGFGRPFSPGYAASLGRFGSQMESGGASVGNGSVLNAAPKNHLWGNGGLGYMSNSPISRSSFSGNSGMSSLGSIGDNWGTVARARSSYHGERGGVGLEAMRGVHVGGYSSGSSILEADSLYSDSMWLSLPAKAEEGLGMGPLDFMSRGPAGYINRQPNGGIAA

SEQ ID NO: 26119 - protein, 429 aa, Arabidopsis thaliana
  peptide (1)..(429): Ceres Seq. ID no. 12331396
MESCKLFIGGISWETSEDRLRDYFHSFGEVLEAVIMKDRATGRARGFGFVVFADPNVAERVVLLKHIIDGKIVEAKKAVPRDDHVVFNKSNSSLQGSPGPSNSKKIFVGGLASSVTEAEFKKYFAQFGMITDVVVMYDHRTQRPRGFGFISYDSEEAVDKVLQKTFHELNGKMVEVKLAVPKDMALNTMRNQMNVNSFGTSRISSLLNEYTQGFSPSPISGYGVKPEVRYSPAVGNRGGFSPFGHGYGIELNFEPNQTQNYGSGSSGGFGRPFSPGYAASLGRFGSQMESGGASVGNGSVLNAAPKNHLWGNGGLGYMSNSPISRSSFSGNSGMSSLGSIGDNWGTVARARSSYHGERGGVGLEAMRGVHVGGYSSGSSILEADSLYSDSMWLSLPAKAEEGLGMGPLDFMSRGPAGYINRQPNGGIAA

SEQ ID NO: 26120 - protein, 394 aa, Arabidopsis thaliana
  peptide (1)..(394): Ceres Seq. ID no. 12331397
MKDRATGRARGFGFVVFADPNVAERVVLLKHIIDGKIVEAKKAVPRDDHVVFNKSNSSLQGSPGPSNSKKIFVGGLASSVTEAEFKKYFAQFGMITDVVVMYDHRTQRPRGFGFISYDSEEAVDKVLQKTFHELNGKMVEVKLAVPKDMALNTMRNQMNVNSFGTSRISSLLNEYTQGFSPSPISGYGVKPEVRYSPAVGNRGGFSPFGHGYGIELNFEPNQTQNYGSGSSGGFGRPFSPGYAASLGRFGSQMESGGASVGNGSVLNAAPKNHLWGNGGLGYMSNSPISRSSFSGNSGMSSLGSIGDNWGTVARARSSYHGERGGVGLEAMRGVHVGGYSSGSSILEADSLYSDSMWLSLPAKAEEGLGMGPLDFMSRGPAGYINRQPNGGIAA

SEQ ID NO: 26121 - DNA, 1449 bp, Arabidopsis thaliana
  misc_feature (1)..(1449): Ceres Seq. ID no. 12333162
  misc_feature (1)..(1449): Ortholog of  Ceres SEQ ID NO 14306797 as cited in SEQ ID NO 53354
  misc_feature (1)..(1449): Ortholog of  Ceres SEQ ID NO 15176525 as cited in SEQ ID NO 54495
  misc_feature (1)..(1449): Ortholog of  Ceres SEQ ID NO 15169519 as cited in SEQ ID NO 67237
tttttctactcctcgtcatcttctattcgttatccgttttgaagcgtactcggatgggattgagtttcgcagatgctttaaattctagaaaataatgcaatctcttaccttaactcggtacccaactccaatttccccgccaagactcaatctttacccgctaagacaaatcgcagcttctgttctctctgctccgaccgccggtattaaccgtcgcgatatggcgtctcgccatcagtcaacttcctttaagccccttgccgttggtcggaatttgaccggagatgatgatgatggttactgtactcttatagactttgcaggtagtggaggaggagaagggaaaaatgtaggagaggatcttgtggtgttgctttaccacttacaacatgcttgcaaaagaatcgcttctcttgtcgcctctcctttcaattcttcactcggaaagctctctgttaactcctctagtgggtcagaccgagatgcgcctaagccgctcgatattgtctcgaacgatatcgtcttgtcctctcttagaaactcagggaaagtagcagtaatggcttctgaagaaaacgatagtccaacttggatcaaagatgatggtccttacgttgtggttgtagatcctctagatggatcacggaacatcgatgcttcgattcccacgggaactatatttggaatttacaatcgtctcgttgagcttgatcatttacctgttgaagagaaagctgagctcaattctttgcagagaggcagcaggcttgtagcttccggttatgtgctatactcttcagccactatcttctgtgttacacttggatcgggaacacacgccttcacgctagaccattccacaggagaatttgttcttacccatcaaaacatcaagatcccaactcggggacaaatctactcagtgaacgatgcgaggtactttgattggccagaaggtttaaggaagtacattgacacagtgagacaaggcaaaggtcaaaacccgaaaaaatactctgcgcgttatatttgttctctagtagctgatcttcacaggactctcttatacggtggagtggctatgaatccaagagaccatcttcgtttagtctatgaaggtaaccctttggcttttctcgtggagcaagctggtggcaaatcctctgatggaaaaagagggatactttcgatacaacccgtgaagcttcaccaaagattgcctctgtttcttgggagcttagaggatgttgctgagctagagagctatggagatgtgcagcagactgtgaaccctggctatgaagtttaaacaactcctctgtttcatattatctgtaaaaacaataaatgaatcgatgttagatttggttgcttgtaacattatgtattaggaaagttagatccgtgtatatatctgtttatcaagattcaagatcgactggtataatc

SEQ ID NO: 26122 - protein, 404 aa, Arabidopsis thaliana
  peptide (1)..(404): Ceres Seq. ID no. 12333163
MQSLTLTRYPTPISPPRLNLYPLRQIAASVLSAPTAGINRRDMASRHQSTSFKPLAVGRNLTGDDDDGYCTLIDFAGSGGGEGKNVGEDLVVLLYHLQHACKRIASLVASPFNSSLGKLSVNSSSGSDRDAPKPLDIVSNDIVLSSLRNSGKVAVMASEENDSPTWIKDDGPYVVVVDPLDGSRNIDASIPTGTIFGIYNRLVELDHLPVEEKAELNSLQRGSRLVASGYVLYSSATIFCVTLGSGTHAFTLDHSTGEFVLTHQNIKIPTRGQIYSVNDARYFDWPEGLRKYIDTVRQGKGQNPKKYSARYICSLVADLHRTLLYGGVAMNPRDHLRLVYEGNPLAFLVEQAGGKSSDGKRGILSIQPVKLHQRLPLFLGSLEDVAELESYGDVQQTVNPGYEV

SEQ ID NO: 26123 - protein, 362 aa, Arabidopsis thaliana
  peptide (1)..(362): Ceres Seq. ID no. 12333164
MASRHQSTSFKPLAVGRNLTGDDDDGYCTLIDFAGSGGGEGKNVGEDLVVLLYHLQHACKRIASLVASPFNSSLGKLSVNSSSGSDRDAPKPLDIVSNDIVLSSLRNSGKVAVMASEENDSPTWIKDDGPYVVVVDPLDGSRNIDASIPTGTIFGIYNRLVELDHLPVEEKAELNSLQRGSRLVASGYVLYSSATIFCVTLGSGTHAFTLDHSTGEFVLTHQNIKIPTRGQIYSVNDARYFDWPEGLRKYIDTVRQGKGQNPKKYSARYICSLVADLHRTLLYGGVAMNPRDHLRLVYEGNPLAFLVEQAGGKSSDGKRGILSIQPVKLHQRLPLFLGSLEDVAELESYGDVQQTVNPGYEV

SEQ ID NO: 26124 - protein, 249 aa, Arabidopsis thaliana
  peptide (1)..(249): Ceres Seq. ID no. 12333165
MASEENDSPTWIKDDGPYVVVVDPLDGSRNIDASIPTGTIFGIYNRLVELDHLPVEEKAELNSLQRGSRLVASGYVLYSSATIFCVTLGSGTHAFTLDHSTGEFVLTHQNIKIPTRGQIYSVNDARYFDWPEGLRKYIDTVRQGKGQNPKKYSARYICSLVADLHRTLLYGGVAMNPRDHLRLVYEGNPLAFLVEQAGGKSSDGKRGILSIQPVKLHQRLPLFLGSLEDVAELESYGDVQQTVNPGYEV

SEQ ID NO: 26125 - DNA, 831 bp, Arabidopsis thaliana
  misc_feature (1)..(831): Ceres Seq. ID no. 13487307
  misc_feature (1)..(831): Ortholog of  Ceres SEQ ID NO 13495070 as cited in SEQ ID NO 53216
  misc_feature (1)..(831): Ortholog of  Ceres SEQ ID NO 12598241 as cited in SEQ ID NO 61025
  misc_feature (1)..(831): Ortholog of  Ceres SEQ ID NO 13661333 as cited in SEQ ID NO 61620
  misc_feature (1)..(831): Ortholog of  Ceres SEQ ID NO 13596812 as cited in SEQ ID NO 62283
  misc_feature (1)..(831): Ortholog of  Ceres SEQ ID NO 13623021 as cited in SEQ ID NO 0
  misc_feature (1)..(831): Ortholog of  Ceres SEQ ID NO 14302179 as cited in SEQ ID NO 0
  misc_feature (1)..(831): Ortholog of  Ceres SEQ ID NO 14309080 as cited in SEQ ID NO 0
gaagaaagaaagagaaaagaaattgaaaagaaaaaaaaaaggtgaccgtattctccgtcgattgtagccgcctgaagaaatatcttctcctctctcgttgaaccacgaatttgctctgatattagtgtttctctagccatggcgaacgcggcatctggaatggctgtgcatgatgattgcaagctgagatttctggaactgaaggcgaaaaggacacaccgtttcatagtttacaagattgaggagaagcagaagcaagttgttgttgagaaagttggtcaaccgatccaaacttacgaggagtttgcagcatgtcttccagctgatgaatgccgttacgccatttacgattttgactttgtcactgctgagaattgccagaagagcaagatcttcttcatcgcgtggtgcccggatattgctaaggtgagaagcaagatgatctacgcaagctctaaggacaggttcaagagggaactagatgggattcaagtagagctacaggcaactgatccaacagagatggatctcgatgttttcagaagccgtgccaactaaagagtaaaaaccaaagtttattatcatcatccccttgaaagatctattctcttattctgttatttttgagtgatggtactggtacttgattatgtttttacattgtgttgtgaagttatgaacctataaacaacttcattctatcggtgtttcggtcttgtgttcgatgttgtctttggttttaaaatggtgtgtaaggaccccaaatcgtctattgaagatgaacccttttaggtatatcattgatgaaatggatgattaaaagtttctctc

SEQ ID NO: 26126 - protein, 139 aa, Arabidopsis thaliana
  peptide (1)..(139): Ceres Seq. ID no. 15218776
MANAASGMAVHDDCKLRFLELKAKRTHRFIVYKIEEKQKQVVVEKVGQPIQTYEEFAACLPADECRYAIYDFDFVTAENCQKSKIFFIAWCPDIAKVRSKMIYASSKDRFKRELDGIQVELQATDPTEMDLDVFRSRAN

SEQ ID NO: 26127 - protein, 132 aa, Arabidopsis thaliana
  peptide (1)..(132): Ceres Seq. ID no. 15218777
MAVHDDCKLRFLELKAKRTHRFIVYKIEEKQKQVVVEKVGQPIQTYEEFAACLPADECRYAIYDFDFVTAENCQKSKIFFIAWCPDIAKVRSKMIYASSKDRFKRELDGIQVELQATDPTEMDLDVFRSRAN

SEQ ID NO: 26128 - DNA, 1026 bp, Arabidopsis thaliana
  misc_feature (1)..(1026): Ceres Seq. ID no. 13488738
  misc_feature (1)..(1026): Ortholog of  Ceres SEQ ID NO 14308727 as cited in SEQ ID NO 58726
  misc_feature (1)..(1026): Ortholog of  Ceres SEQ ID NO 13663517 as cited in SEQ ID NO 66850
aaattcctcctcattgttaaagtcgaaaaaaagggtaaagcagcaaaaccctaataaaatcacaacaaattaacacaaaaaaaccagatcttaaaactctctctacccaccaagaggatcaaccagtctcttccccttcagattctcctttccacagtgaatggatcaacaagaccatggacagtctggagctatgaactatggcacaaacccataccaaaccaacccgatgagcaccactgctgctactgtagcaggaggtgcggcacaaccaggccagctggcgttccaccagatccatcagcagcagcagcagcaacagctggcacagcagcttcaagcattttgggagaaccaattcaaagagattgagaagactaccgatttcaagaaccacagccttccccttgcgagaatcaagaaaatcatgaaagcggatgaagatgtccgtatgatctcggctgaggcgcctgtcgtgtttgcaagggcctgtgagatgttcatcctggagctgacactcaggtcgtggaaccacactgaggagaataagaggcggacgttgcagaagaacgatattgctgctgctgtgactagaaccgatatttttgatttccttgtggatattgttccccgggaggatctccgagatgaagtcttgggaagtattccgaggggcactgtcccggaagctgctgctgctggttacccgtatggatacttgcctgcaggaactgctccaataggaaatccgggaatggttatgggtaatcccggtggtgcgtatccacctaatccttatatgggtcaaccaatgtggcaacaacaggcacctgaccaacctgaccaggaaaattagcaagaaactgtgagtcttccagcttcttttaggcctaccttgtagtcttggggttttgtttctgttttcgaataatggtaacctttgtataacttatttcagtatcgtctcagtttggtactatgtcagttttggtattcttatcttattgaagtaaaaatgtgatagtg

SEQ ID NO: 26129 - protein, 231 aa, Arabidopsis thaliana
  peptide (1)..(231): Ceres Seq. ID no. 13488739
MDQQDHGQSGAMNYGTNPYQTNPMSTTAATVAGGAAQPGQLAFHQIHQQQQQQQLAQQLQAFWENQFKEIEKTTDFKNHSLPLARIKKIMKADEDVRMISAEAPVVFARACEMFILELTLRSWNHTEENKRRTLQKNDIAAAVTRTDIFDFLVDIVPREDLRDEVLGSIPRGTVPEAAAAGYPYGYLPAGTAPIGNPGMVMGNPGGAYPPNPYMGQPMWQQQAPDQPDQEN

SEQ ID NO: 26130 - protein, 220 aa, Arabidopsis thaliana
  peptide (1)..(220): Ceres Seq. ID no. 13488740
MNYGTNPYQTNPMSTTAATVAGGAAQPGQLAFHQIHQQQQQQQLAQQLQAFWENQFKEIEKTTDFKNHSLPLARIKKIMKADEDVRMISAEAPVVFARACEMFILELTLRSWNHTEENKRRTLQKNDIAAAVTRTDIFDFLVDIVPREDLRDEVLGSIPRGTVPEAAAAGYPYGYLPAGTAPIGNPGMVMGNPGGAYPPNPYMGQPMWQQQAPDQPDQEN

SEQ ID NO: 26131 - protein, 208 aa, Arabidopsis thaliana
  peptide (1)..(208): Ceres Seq. ID no. 13488741
MSTTAATVAGGAAQPGQLAFHQIHQQQQQQQLAQQLQAFWENQFKEIEKTTDFKNHSLPLARIKKIMKADEDVRMISAEAPVVFARACEMFILELTLRSWNHTEENKRRTLQKNDIAAAVTRTDIFDFLVDIVPREDLRDEVLGSIPRGTVPEAAAAGYPYGYLPAGTAPIGNPGMVMGNPGGAYPPNPYMGQPMWQQQAPDQPDQEN

SEQ ID NO: 26132 - DNA, 695 bp, Arabidopsis thaliana
  misc_feature (1)..(695): Ceres Seq. ID no. 13487381
  misc_feature (1)..(695): Ortholog of  Ceres SEQ ID NO 13594525 as cited in SEQ ID NO 51190
  misc_feature (1)..(695): Ortholog of  Ceres SEQ ID NO 15174240 as cited in SEQ ID NO 61866
  misc_feature (1)..(695): Ortholog of  Ceres SEQ ID NO 13596039 as cited in SEQ ID NO 62117
atggaagttagagacttcattttttacactgcaaacgccgtttcgagacttccggcgaagaagacgaacgcaaagatgcagattttcgtgaaaacgctaaccggcaagaccatcaccctcgaggtcgagagcagtgacaccatcgacaatgtcaaggccaagatccaggacaaagaaggaattcctccggaccagcagaggttgatcttcgccggaaaacagcttgaagatggtcgtaccttggctgactacaacatccagaaagagtcgactttgcatcttgttctgaggcttaggggaggtatcattgagccttcattgatgatgttggctcgtaagtataaccaagacaaaatgatttgtcgcaagtgttatgctcgtctccacccaagagctgtgaactgcaggaagaagaagtgtggccatagcaaccagttgaggccaaagaagaagatcaagtgatcttttgttcaccaaaagcttatttacgttatttttgtgtttgctttgagaaagactcctctattgttctgacacaaaccttgtttcagtgaattttgattttacgattattgtttagtaaatctgatttttggctttttttcttcatcaattctaaaatctcttgcaaagtttcttcaaattagagttctgcaatccgaaatataaatttaagagccccattattcatctgt

SEQ ID NO: 26133 - protein, 153 aa, Arabidopsis thaliana
  peptide (1)..(153): Ceres Seq. ID no. 13487382
MEVRDFIFYTANAVSRLPAKKTNAKMQIFVKTLTGKTITLEVESSDTIDNVKAKIQDKEGIPPDQQRLIFAGKQLEDGRTLADYNIQKESTLHLVLRLRGGIIEPSLMMLARKYNQDKMICRKCYARLHPRAVNCRKKKCGHSNQLRPKKKIK

SEQ ID NO: 26134 - protein, 128 aa, Arabidopsis thaliana
  peptide (1)..(128): Ceres Seq. ID no. 13487383
MQIFVKTLTGKTITLEVESSDTIDNVKAKIQDKEGIPPDQQRLIFAGKQLEDGRTLADYNIQKESTLHLVLRLRGGIIEPSLMMLARKYNQDKMICRKCYARLHPRAVNCRKKKCGHSNQLRPKKKIK

SEQ ID NO: 26135 - DNA, 1400 bp, Arabidopsis thaliana
  misc_feature (1)..(1400): Ceres Seq. ID no. 12332414
  misc_feature (1)..(1400): Ortholog of  Ceres SEQ ID NO 14312866 as cited in SEQ ID NO 55630
  misc_feature (1)..(1400): Ortholog of  Ceres SEQ ID NO 13597376 as cited in SEQ ID NO 64002
  misc_feature (1)..(1400): Ortholog of  Ceres SEQ ID NO 13503573 as cited in SEQ ID NO 65402
  misc_feature (1)..(1400): Ortholog of  Ceres SEQ ID NO 13659615 as cited in SEQ ID NO 67248
aaacaaaaagcaaaaaagctttctctttctctacctttttccttaatttcacttttgcggcgtcgttcttatctactcacaagaaagcaaccgatcaaataactcccagaataaagaaagactcaaactttattctctctctctttcttaaatagtgaagaaagcttcgattttgggaagtgggtttgttcgaaaaatgggttcttctgtggaacagaacattttggtgactggtggtgctggattcattggaacacatactgttgttcagcttttgaatcagggttttaaggttacgatcattgataatcttgataactctgtcgttgaagctgttcatagggttagggaacttgttggtcctgatctctctaccaagcttgaattcaatctgggtgatctaagaaacaaaggagatattgagaaactcttttccaatcagagatttgatgctgtgattcactttgctggtcttaaagctgtgggagaaagtgttggaaaccctcgtcgttactttgataataacttagttggaactatcaatctatatgagaccatggcaaaatacaactgcaaaatgatggtgtttttcgtcgtctgcaacagtttatggtcaacctgaaatagtcccatgtgtggaagactttgagttacaggctatgaatccttatggtcgtactaagctgtttcttgaagagatagctagagacattcacgctgcggaaccagaatggaagataattcttctgaggtacttcaatccggttggagctcacgagagtggaagaattggagaagatccaaagggcataccgaataatctcatgccttatatccaacaagtggcggttggaagattacctgaactcaatgtatttggacatgattatcctaccatggatggtagcgcggttagagactacatccatgtaatggatttagcagatggccatgtggctgcgttaaacaaattgttttcagactcaaagattggctgtactgcttataatcttggcactggtcaaggaacttctgtcttagaaatggtttcttcttttgaaaaagcttctggcaagaaaatacctatcaagctatgtccaagaagagctggagatgcaacagctgtttatgcttcaactcagaaagctgagaaggaacttggctggaaggcaaaatatggagttgatgagatgtgcagagatcaatggaactgggcaaataagaatccatggggtttccagaagaagccttgattgattttgttttgtttcaccactcaatataaagaaaaaaaaagatatagatgtcgttttattttcctgcatctatttgatttctctcttcaaaaaaagttgtattgaactcgtcatctttcggttaataaagtataaagtttatct

SEQ ID NO: 26136 - protein, 197 aa, Arabidopsis thaliana
  peptide (1)..(197): Ceres Seq. ID no. 12332415
MNPYGRTKLFLEEIARDIHAAEPEWKIILLRYFNPVGAHESGRIGEDPKGIPNNLMPYIQQVAVGRLPELNVFGHDYPTMDGSAVRDYIHVMDLADGHVAALNKLFSDSKIGCTAYNLGTGQGTSVLEMVSSFEKASGKKIPIKLCPRRAGDATAVYASTQKAEKELGWKAKYGVDEMCRDQWNWANKNPWGFQKKP

SEQ ID NO: 26137 - protein, 142 aa, Arabidopsis thaliana
  peptide (1)..(142): Ceres Seq. ID no. 12332416
MPYIQQVAVGRLPELNVFGHDYPTMDGSAVRDYIHVMDLADGHVAALNKLFSDSKIGCTAYNLGTGQGTSVLEMVSSFEKASGKKIPIKLCPRRAGDATAVYASTQKAEKELGWKAKYGVDEMCRDQWNWANKNPWGFQKKP

SEQ ID NO: 26138 - protein, 141 aa, Arabidopsis thaliana
  peptide (1)..(141): Ceres Seq. ID no. 12332417
MGSSVEQNILVTGGAGFIGTHTVVQLLNQGFKVTIIDNLDNSVVEAVHRVRELVGPDLSTKLEFNLGDLRNKGDIEKLFSNQRFDAVIHFAGLKAVGESVGNPRRYFDNNLVGTINLYETMAKYNCKMMVFFVVCNSLWST

SEQ ID NO: 26139 - DNA, 1541 bp, Arabidopsis thaliana
  misc_feature (1)..(1541): Ceres Seq. ID no. 12357754
  misc_feature (1)..(1541): Ortholog of  Ceres SEQ ID NO 13662745 as cited in SEQ ID NO 66320
  misc_feature (1)..(1541): Ortholog of  Ceres SEQ ID NO 13660029 as cited in SEQ ID NO 67353
ttcttcttcttatttcttgtataccgtcgtcgaaaagctttaccaaaatctcacgcccccgacgattctgccgattcatcgggatttgagtttgcacaaaacccacaatggtttcgtatcgtgctaccacagagacgatttccctggctttagaagccaacagctcggaggctattacgatactgtaccaggttttggaagacccttcttcatctcctgaggctatacggatcaaggagcaagcgattacaaacctttgtgatcgattgactgaagagaagagaggtgaggatctccggaaactgttgaccaagttgaggcctttcttctcgttaatccccaaggcgaaaactgccaaaatcgtcagaggaatcattgatgctgtggcaaagattcctggaacaactgatctccagatcactctctgcaaagagatggtggagtggactcgcgctgagaagcgtactttcctcaggcagcgagtagaggctaggcttgcagctcttttgatggagaacaaggagtatgttgaagctttggcgctgttgagtactttggtaaaagaggttaggagattagatgataagctccttctggtcgacatagacttgctggagagcaaacttcacttctcattgagaaacttacccaaggcaaaagctgcactcactgcagctaggacagctgctaacgctatatatgtcccaccggcccaacaaggcaccatagatctgcagagtgggattcttcacgctgaagagaaggactacaaaaccggatacagttacttctttgaagcctttgaatccttcaacgctctcggagatccaagagccgttttcagtctgaagtacatgttactgtgcaagatcatggttagccaagctgatgatgttgcaggaataatctcctcaaaggctggactacagtacgttggccctgacctggatgccatgaaagcagtcgctgatgctcactcgaagaggtccttgaagttgtttgagaacgcactccgtgactacaaagcacagcttgaagatgacccaattgtccacaggcatctctcttctctctatgacacgcttctggagcaaaatctgtgtcgtttgatcgagcccttctcaagagttgagatagctcacattgctgagctgattggattgccgctcgaccatgtggagaagaagctatctcagatgatactcgacaagaaatttgcaggtaccttggatcaaggagctggatgcctcatcatcttcgaagacccaaaggcagatgctatctactcggctactcttgacaccattgcaaacatggggaaggtcgtcgacagcctttatgtccggtctgccaaaatcatgtcctgagtgagtgagtgagttgatcgtatgaatctcattctatcgttctttctttctggttttagatatcgtttggactcaaagaaactgatgtttctcaatggaggaagtaaacttgtctgaattgttcccattactcgttttgcttatgatcttattatgtcatggttaccttttatt

SEQ ID NO: 26140 - protein, 419 aa, Arabidopsis thaliana
  peptide (1)..(419): Ceres Seq. ID no. 12357755
MVSYRATTETISLALEANSSEAITILYQVLEDPSSSPEAIRIKEQAITNLCDRLTEEKRGEDLRKLLTKLRPFFSLIPKAKTAKIVRGIIDAVAKIPGTTDLQITLCKEMVEWTRAEKRTFLRQRVEARLAALLMENKEYVEALALLSTLVKEVRRLDDKLLLVDIDLLESKLHFSLRNLPKAKAALTAARTAANAIYVPPAQQGTIDLQSGILHAEEKDYKTGYSYFFEAFESFNALGDPRAVFSLKYMLLCKIMVSQADDVAGIISSKAGLQYVGPDLDAMKAVADAHSKRSLKLFENALRDYKAQLEDDPIVHRHLSSLYDTLLEQNLCRLIEPFSRVEIAHIAELIGLPLDHVEKKLSQMILDKKFAGTLDQGAGCLIIFEDPKADAIYSATLDTIANMGKVVDSLYVRSAKIMS

SEQ ID NO: 26141 - protein, 310 aa, Arabidopsis thaliana
  peptide (1)..(310): Ceres Seq. ID no. 12357756
MVEWTRAEKRTFLRQRVEARLAALLMENKEYVEALALLSTLVKEVRRLDDKLLLVDIDLLESKLHFSLRNLPKAKAALTAARTAANAIYVPPAQQGTIDLQSGILHAEEKDYKTGYSYFFEAFESFNALGDPRAVFSLKYMLLCKIMVSQADDVAGIISSKAGLQYVGPDLDAMKAVADAHSKRSLKLFENALRDYKAQLEDDPIVHRHLSSLYDTLLEQNLCRLIEPFSRVEIAHIAELIGLPLDHVEKKLSQMILDKKFAGTLDQGAGCLIIFEDPKADAIYSATLDTIANMGKVVDSLYVRSAKIMS

SEQ ID NO: 26142 - protein, 285 aa, Arabidopsis thaliana
  peptide (1)..(285): Ceres Seq. ID no. 12357757
MENKEYVEALALLSTLVKEVRRLDDKLLLVDIDLLESKLHFSLRNLPKAKAALTAARTAANAIYVPPAQQGTIDLQSGILHAEEKDYKTGYSYFFEAFESFNALGDPRAVFSLKYMLLCKIMVSQADDVAGIISSKAGLQYVGPDLDAMKAVADAHSKRSLKLFENALRDYKAQLEDDPIVHRHLSSLYDTLLEQNLCRLIEPFSRVEIAHIAELIGLPLDHVEKKLSQMILDKKFAGTLDQGAGCLIIFEDPKADAIYSATLDTIANMGKVVDSLYVRSAKIMS

SEQ ID NO: 26143 - DNA, 626 bp, Arabidopsis thaliana
  misc_feature (1)..(626): Ceres Seq. ID no. 12338158
  misc_feature (1)..(626): Ortholog of  Ceres SEQ ID NO 13502952 as cited in SEQ ID NO 62271
caacggcaaagattactggattgtgagaaactcatggggtaaaagctggggagagagtggatacctaaggatggcgcgtaacattgcgtcttcatcaggaaaatgtggaatcgcgattgaaccttcatacccgataaagaatggcgaaaacccgccaaacccgggaccttcacctccatctcccatcaagcctccaacccaatgtgacagttactacacttgtcctgagagcaacacttgttgttgtctgtttgagtatggcaagtattgctttgcttggggatgttgcccactagaagcagccacttgctgtgatgacaactatagttgctgccctcacgagtacccggtttgtgaccttgatcaaggaacctgtttattgagcaagaacagtccatttagtgttaaggccttaaagcgtaaacccgcaacgccattctggtcacaaggcagaaagaacattgcctaaacattgcttcttcaagaggactctggctcatgagagaagagatctctctgaagagatttatcagatgctttttaatgttgttgtttatgccataactagatacataaaaaatgcagctgttgggtttcgtgtatataaaaaaaggaccctatgtttc

SEQ ID NO: 26144 - protein, 155 aa, Arabidopsis thaliana
  peptide (1)..(155): Ceres Seq. ID no. 12338159
NGKDYWIVRNSWGKSWGESGYLRMARNIASSSGKCGIAIEPSYPIKNGENPPNPGPSPPSPIKPPTQCDSYYTCPESNTCCCLFEYGKYCFAWGCCPLEAATCCDDNYSCCPHEYPVCDLDQGTCLLSKNSPFSVKALKRKPATPFWSQGRKNIA

SEQ ID NO: 26145 - protein, 132 aa, Arabidopsis thaliana
  peptide (1)..(132): Ceres Seq. ID no. 12338160
MARNIASSSGKCGIAIEPSYPIKNGENPPNPGPSPPSPIKPPTQCDSYYTCPESNTCCCLFEYGKYCFAWGCCPLEAATCCDDNYSCCPHEYPVCDLDQGTCLLSKNSPFSVKALKRKPATPFWSQGRKNIA

SEQ ID NO: 26146 - DNA, 1187 bp, Arabidopsis thaliana
  misc_feature (1)..(1187): Ceres Seq. ID no. 12371727
  misc_feature (1)..(1187): Ortholog of  Ceres SEQ ID NO 13597416 as cited in SEQ ID NO 60674
  misc_feature (1)..(1187): Ortholog of  Ceres SEQ ID NO 13654155 as cited in SEQ ID NO 68352
aaattttcgttaatgattaattagtaagcttcggaatatatcctatctgtcaaaacaacatttttctgttttgtccgaaatcatcaaagactcttccttcggcgatcgctgctcagaagtttgatttcgatatcaagaatcgtgatagaaaaaatgcgacacaattgttgccatgtctcgttcgcttcgattctcaagatccttaattttctccaagctttcatcggtatatcaatcataatctactcgatttggatgctcgatcaatacaatcatcacgttcccgttgaccctcctccgtctcagcctccggcagcttcatcaccggattcttcttattccttctctaattcaataattgagatcaacagtgtttctgattctttgaagaatccgatcgatttcgtatcgggtatcgttctcgggtctggtggtggagattcgggtttcaatctccgttctttagatcttcctgctccatggtttatctactgtttcatggcgattgggattttggtctgcattgtcactatcattggtttcattgcagctgaagctatcaatggatgttgcttgtgtttctattcaattctcaaaactcttttaatcattatcgaagcagctctagtgggattcatagtgattgaccgtcactgggagaaggatcttccttatgatccaactggagaactcaatagtcttcgagctttcatcgaagaaaacatcgatatttgcaaatgggtcggaattgttgtggtagccatccagttactgtcattgctactggctttggttttgagagctatggtttcacctcggcaatcagagcttgatgatgaagatgattttgagaatccgatgagtagagcacgagacaatcttcttggtccacaggcaaaccagacatcttctggatcaagcaatattgacaactggaggtcccgaatcagagagaagtacggattgatcaacagtcagagccacactccatcagcttaactcaaaagactgagttcttgtgtctggaattatcagtactttggtttggttcttctctctgttaactttcgagtgtgcatagatatttacacatttatgttatcgtttgatacttttttcgaaactctgtttagatcgcaacatagctttcattttggtgtacaaaagagttacgagatttgtgtttg

SEQ ID NO: 26147 - protein, 281 aa, Arabidopsis thaliana
  peptide (1)..(281): Ceres Seq. ID no. 12371728
MRHNCCHVSFASILKILNFLQAFIGISIIIYSIWMLDQYNHHVPVDPPPSQPPAASSPDSSYSFSNSIIEINSVSDSLKNPIDFVSGIVLGSGGGDSGFNLRSLDLPAPWFIYCFMAIGILVCIVTIIGFIAAEAINGCCLCFYSILKTLLIIIEAALVGFIVIDRHWEKDLPYDPTGELNSLRAFIEENIDICKWVGIVVVAIQLLSLLLALVLRAMVSPRQSELDDEDDFENPMSRARDNLLGPQANQTSSGSSNIDNWRSRIREKYGLINSQSHTPSA

SEQ ID NO: 26148 - protein, 247 aa, Arabidopsis thaliana
  peptide (1)..(247): Ceres Seq. ID no. 12371729
MLDQYNHHVPVDPPPSQPPAASSPDSSYSFSNSIIEINSVSDSLKNPIDFVSGIVLGSGGGDSGFNLRSLDLPAPWFIYCFMAIGILVCIVTIIGFIAAEAINGCCLCFYSILKTLLIIIEAALVGFIVIDRHWEKDLPYDPTGELNSLRAFIEENIDICKWVGIVVVAIQLLSLLLALVLRAMVSPRQSELDDEDDFENPMSRARDNLLGPQANQTSSGSSNIDNWRSRIREKYGLINSQSHTPSA

SEQ ID NO: 26149 - protein, 166 aa, Arabidopsis thaliana
  peptide (1)..(166): Ceres Seq. ID no. 12371730
MAIGILVCIVTIIGFIAAEAINGCCLCFYSILKTLLIIIEAALVGFIVIDRHWEKDLPYDPTGELNSLRAFIEENIDICKWVGIVVVAIQLLSLLLALVLRAMVSPRQSELDDEDDFENPMSRARDNLLGPQANQTSSGSSNIDNWRSRIREKYGLINSQSHTPSA

SEQ ID NO: 26150 - DNA, 1914 bp, Arabidopsis thaliana
  misc_feature (1)..(1914): Ceres Seq. ID no. 12370725
  misc_feature (1)..(1914): Ortholog of  Ceres SEQ ID NO 15177304 as cited in SEQ ID NO 52668
acaaaactcacaccccaaaaccgatccaaattccgagaaagacaaccaaattttccttttcctctgcaaaaatgtttattgagagcttcaaagttgagagcccgaacgtgaagtacacagagaatgagattcactctgtgtacgattacgagacgacggaggttgttcatgagaagaccgtcaatggcacttaccaatggattgtgaagccaaagactgtcaaatacgatttcaaaaccgatattcgtgtccccaaattaggggttatgcttgtgggtttgggaggaaacaatggatcaactctcaccgctggtgtgattgcgaacaaagaaggaatctcgtgggcaacgaaggacaaagtgcaacaagcgaattacttcgggtcactaactcaagcttcatcgattcgtgtcggatcttttaacggtgaagagatctatgctcctttcaagagtctccttccaatggtgaatccggatgatgttgtgtttggaggatgggatataagtgacatgaacttagcagatgccatggctagagccagggttcttgatatcgacttgcagaaacagctcaggccttacatggagaacattgtgccactccctgggatcttcgatcctgatttcatagctgctaatcaagggtcacgtgctaaccacgtgatcaaaggtaccaagaaggaacaagtcgaccacatcatcaaggacatgagggagtttaaggagaagaataaggtggataaggttgtggttctctggacggctaacacagagcgttatagcaatgtggtcgttgggatgaacgatacaatggagaatctcatggagtctgtggatagggatgaggctgagatctctccttcaacactttatgcgattgcttgtgttcttgagggaatcccgttcatcaatggaagccctcaaaacacctttgttccaggtctaattgatatggcgatcaggaacaatgttttgatcggtggagatgatttcaagagtggtcaaaccaagatgaaatctgtcttggttgatttcctagttggcgcaggaatcaagcctacttcaattgtgagctacaatcacttgggaaacaacgatggaatgaatctctcagctccacagactttcagatctaaggagatctccaaaagcaatgtcgtggacgatatggttgctagcaatggtatcctctttgagcctggggaacacccggaccatgttgttgtcatcaagtatgtaccgtatgttgcggatagtaagcgagccatggacgagtacacatcagagatattcatgggagggaagaacacaattgtgatgcacaatacctgcgaggactctctcttagctgctccaatcatcttggatcttgttctcctcgcggagctcagcaccaggatccagttcaaatccgagggagagggaaagtttcactctttccatcctgtggccaccatactcagctacctcaccaaggcaccacttgtaccgccgggaactccggtgattaacgcactgtcgaagcagcgggctatgctggagaatattatgagggcgtgcgttggactggctccggagaacaacatgatcatggaattcaagtgaacatgaagaagcatgaatctaagacctttaattagctcataatttaagagtctttaatttgtgtcgttgtttggtttttatataatgtttttaaattatgaaagcttgtgtttctgagagaccaaagagcttttagtttggtctctgtagggtgtgaagtaacttgtatttgtagtaatccggatgggttggtatattttgcaagtgtgtctaggttggaccataatttcaatatctcttatgattttgtttcatatgtttgtaaaacagcttatcttttgagatatataatcatggttttggttcc

SEQ ID NO: 26151 - protein, 534 aa, Arabidopsis thaliana
  peptide (1)..(534): Ceres Seq. ID no. 12370726
KTHTPKPIQIPRKTTKFSFSSAKMFIESFKVESPNVKYTENEIHSVYDYETTEVVHEKTVNGTYQWIVKPKTVKYDFKTDIRVPKLGVMLVGLGGNNGSTLTAGVIANKEGISWATKDKVQQANYFGSLTQASSIRVGSFNGEEIYAPFKSLLPMVNPDDVVFGGWDISDMNLADAMARARVLDIDLQKQLRPYMENIVPLPGIFDPDFIAANQGSRANHVIKGTKKEQVDHIIKDMREFKEKNKVDKVVVLWTANTERYSNVVVGMNDTMENLMESVDRDEAEISPSTLYAIACVLEGIPFINGSPQNTFVPGLIDMAIRNNVLIGGDDFKSGQTKMKSVLVDFLVGAGIKPTSIVSYNHLGNNDGMNLSAPQTFRSKEISKSNVVDDMVASNGILFEPGEHPDHVVVIKYVPYVADSKRAMDEYTSEIFMGGKNTIVMHNTCEDSLLAAPIILDLVLLAELSTRIQFKSEGEGKFHSFHPVATILSYLTKAPLVPPGTPVINALSKQRAMLENIMRACVGLAPENNMIMEFK

SEQ ID NO: 26152 - protein, 511 aa, Arabidopsis thaliana
  peptide (1)..(511): Ceres Seq. ID no. 12370727
MFIESFKVESPNVKYTENEIHSVYDYETTEVVHEKTVNGTYQWIVKPKTVKYDFKTDIRVPKLGVMLVGLGGNNGSTLTAGVIANKEGISWATKDKVQQANYFGSLTQASSIRVGSFNGEEIYAPFKSLLPMVNPDDVVFGGWDISDMNLADAMARARVLDIDLQKQLRPYMENIVPLPGIFDPDFIAANQGSRANHVIKGTKKEQVDHIIKDMREFKEKNKVDKVVVLWTANTERYSNVVVGMNDTMENLMESVDRDEAEISPSTLYAIACVLEGIPFINGSPQNTFVPGLIDMAIRNNVLIGGDDFKSGQTKMKSVLVDFLVGAGIKPTSIVSYNHLGNNDGMNLSAPQTFRSKEISKSNVVDDMVASNGILFEPGEHPDHVVVIKYVPYVADSKRAMDEYTSEIFMGGKNTIVMHNTCEDSLLAAPIILDLVLLAELSTRIQFKSEGEGKFHSFHPVATILSYLTKAPLVPPGTPVINALSKQRAMLENIMRACVGLAPENNMIMEFK

SEQ ID NO: 26153 - protein, 446 aa, Arabidopsis thaliana
  peptide (1)..(446): Ceres Seq. ID no. 12370728
MLVGLGGNNGSTLTAGVIANKEGISWATKDKVQQANYFGSLTQASSIRVGSFNGEEIYAPFKSLLPMVNPDDVVFGGWDISDMNLADAMARARVLDIDLQKQLRPYMENIVPLPGIFDPDFIAANQGSRANHVIKGTKKEQVDHIIKDMREFKEKNKVDKVVVLWTANTERYSNVVVGMNDTMENLMESVDRDEAEISPSTLYAIACVLEGIPFINGSPQNTFVPGLIDMAIRNNVLIGGDDFKSGQTKMKSVLVDFLVGAGIKPTSIVSYNHLGNNDGMNLSAPQTFRSKEISKSNVVDDMVASNGILFEPGEHPDHVVVIKYVPYVADSKRAMDEYTSEIFMGGKNTIVMHNTCEDSLLAAPIILDLVLLAELSTRIQFKSEGEGKFHSFHPVATILSYLTKAPLVPPGTPVINALSKQRAMLENIMRACVGLAPENNMIMEFK

SEQ ID NO: 26154 - DNA, 817 bp, Arabidopsis thaliana
  misc_feature (1)..(817): Ceres Seq. ID no. 12421073
  misc_feature (1)..(817): Ortholog of  Ceres SEQ ID NO 13594418 as cited in SEQ ID NO 60153
aactctatagagcttccgaagaacgacgctgcgacgagagagactaatagcagaggaggaagacgaagacgacaatgaatgcgccaccggagaacgaagtttgttcgatatgccatggccacttcaacgctccttgccaatccaattgctctcactggttctgcgggaactgcattatgctagtttggaggcatggatctacattacggccatgcaaatgtcccttgtgtcgtcgtccgataagtttgttagttccttctgaggaaacagtgagaagtcggaatgatgctacagtttctgaggttcttcatgatgttgaaacttacaaccgtgtctttggtggacagtcaagtggccttattcagaggatgcaagaccttcccttcttactccgaaggttgttgcgagaaatgatggatccacaaagaacgcttccactcgtcatcagagctcgtgtttatattgcgttgatactcagtgcgatttacataatcagcccaatagatatcattccggaaggagtcttgggggttatcggtttactagatgatcttctcatagccctgatttgtttcctccatgtcgctgctctctaccgatccgttctctattcccgtcatggtggttcgtgaacctctttgaagttttcacatcattaatcatcacagttgaagtaccatggtttacttgtttgaccctatctttttgactgttagacttaggaaacttgatttggatgataaaacgaaatggtcctttcctttattactatttcagtaacagatgcattatattggtgaaggaattgaatttctct

SEQ ID NO: 26155 - protein, 185 aa, Arabidopsis thaliana
  peptide (1)..(185): Ceres Seq. ID no. 12421074
MNAPPENEVCSICHGHFNAPCQSNCSHWFCGNCIMLVWRHGSTLRPCKCPLCRRPISLLVPSEETVRSRNDATVSEVLHDVETYNRVFGGQSSGLIQRMQDLPFLLRRLLREMMDPQRTLPLVIRARVYIALILSAIYIISPIDIIPEGVLGVIGLLDDLLIALICFLHVAALYRSVLYSRHGGS

SEQ ID NO: 26156 - protein, 151 aa, Arabidopsis thaliana
  peptide (1)..(151): Ceres Seq. ID no. 12421075
MLVWRHGSTLRPCKCPLCRRPISLLVPSEETVRSRNDATVSEVLHDVETYNRVFGGQSSGLIQRMQDLPFLLRRLLREMMDPQRTLPLVIRARVYIALILSAIYIISPIDIIPEGVLGVIGLLDDLLIALICFLHVAALYRSVLYSRHGGS

SEQ ID NO: 26157 - DNA, 1256 bp, Arabidopsis thaliana
  misc_feature (1)..(1256): Ceres Seq. ID no. 12422643
  misc_feature (1)..(1256): Ortholog of  Ceres SEQ ID NO 14306059 as cited in SEQ ID NO 52249
  misc_feature (1)..(1256): Ortholog of  Ceres SEQ ID NO 15170479 as cited in SEQ ID NO 52835
  misc_feature (1)..(1256): Ortholog of  Ceres SEQ ID NO 13596087 as cited in SEQ ID NO 68336
aaaagattctttcttctaaacccattcgctctctccgatcaacacaacatttgatctaacggtttaattttctcgagaaaccgaaggaaaacaaacagaggtgcataacgattctgacggaaacttttgagatattttttttagagccaaaaggattcactttttttggttttatcttcgcatcgatctatgacgtacagcaatggcgtcgatgggacggtgcctgagctgaaattgagagtcgaagaagattccgataatggtgattatctgaaattgagaggaggatcaaatgaagaagatgaaggatcatcggcggaatcatcgagatgtccgataggatcggttacttctgtctggttctgggtgaaattgatctccttggtcgtttgtttgggttcattggcctttgttatcatcaaatgggttggtcccttttttattgaaaaggagctgattccatttataaattgggtgagaaacacattcagcataccggttctcggtcttctactatttgcctcagtggcattgtttccaagcattcttcttccttcttccccttccatgtggatggctggtcttacatttggttatggaaaagggtttcttctgattttatcagctgcttccatcggtgttactcttcctttcttaattggacatctcttcctccacaagatgcaagaatggttgaagaaataccctaaaaaagcagccatacttagagctgctggtgaaggaacctggtttcatcagtttcaagcagtcacactaatccgtgtctctccatttccttacatcatttacaactactgcgctttagcgactggagttcattatggtccttatatcttaggctctcttgttggaatggttcctgagatctttgtctcaatttacacgggtataatgctaaggacactagcagttgcatcagacacgagacacacactttcggttgtggagatagtcgtgaatgttcttggcttctgtgtaactgcgagcgcgactatagtctgcacaatctatgcgaagaagaagctaagtgcgatgcaatcagaggacgtagagacattacaaaatccaatactttattaactcttttcaccatgaccacaacataccatcatctaacacgatcttgaaattgataatatataatgttttttttttttttgttattcttattcatttgaaaatgaatatttatgtctttttctcttgtatatatgatatgtatcaattgaattttg

SEQ ID NO: 26158 - protein, 303 aa, Arabidopsis thaliana
  peptide (1)..(303): Ceres Seq. ID no. 12422644
MTYSNGVDGTVPELKLRVEEDSDNGDYLKLRGGSNEEDEGSSAESSRCPIGSVTSVWFWVKLISLVVCLGSLAFVIIKWVGPFFIEKELIPFINWVRNTFSIPVLGLLLFASVALFPSILLPSSPSMWMAGLTFGYGKGFLLILSAASIGVTLPFLIGHLFLHKMQEWLKKYPKKAAILRAAGEGTWFHQFQAVTLIRVSPFPYIIYNYCALATGVHYGPYILGSLVGMVPEIFVSIYTGIMLRTLAVASDTRHTLSVVEIVVNVLGFCVTASATIVCTIYAKKKLSAMQSEDVETLQNPILY

SEQ ID NO: 26159 - protein, 177 aa, Arabidopsis thaliana
  peptide (1)..(177): Ceres Seq. ID no. 12422645
MWMAGLTFGYGKGFLLILSAASIGVTLPFLIGHLFLHKMQEWLKKYPKKAAILRAAGEGTWFHQFQAVTLIRVSPFPYIIYNYCALATGVHYGPYILGSLVGMVPEIFVSIYTGIMLRTLAVASDTRHTLSVVEIVVNVLGFCVTASATIVCTIYAKKKLSAMQSEDVETLQNPILY

SEQ ID NO: 26160 - protein, 175 aa, Arabidopsis thaliana
  peptide (1)..(175): Ceres Seq. ID no. 12422646
MAGLTFGYGKGFLLILSAASIGVTLPFLIGHLFLHKMQEWLKKYPKKAAILRAAGEGTWFHQFQAVTLIRVSPFPYIIYNYCALATGVHYGPYILGSLVGMVPEIFVSIYTGIMLRTLAVASDTRHTLSVVEIVVNVLGFCVTASATIVCTIYAKKKLSAMQSEDVETLQNPILY

SEQ ID NO: 26161 - DNA, 652 bp, Arabidopsis thaliana
  misc_feature (1)..(652): Ceres Seq. ID no. 12331385
  misc_feature (1)..(652): Ortholog of  Ceres SEQ ID NO 13646254 as cited in SEQ ID NO 20314
  misc_feature (1)..(652): Ortholog of  Ceres SEQ ID NO 12323993 as cited in SEQ ID NO 20720
actcatcaaaacatcacatacactatttttctcctctccttattgtctatatatttttcctctttagctttttcatttcgaaatggccaccgttgaggttgaacaagtcactccagtagcagtagagaacgttgaggtaccaacaaagacagtggaggagacagtggtggagacagaggtgacccaacagccggaagaatccgtccccgccgtgacagaacaaaaatccgaagcaccaattgtagaaacaaacgaagaagtggttgtggaagaggcagagaagaaagatgaagaaaccgagaagaaaacagaggagaaagacgagaagacagaagtgatcacggaaactccggtagttgaggaggaggagaagaaagctgaggaagtgaccgaaactccggcggttgtggaggaggagaagaagacagaggtggttgaggagaaacagactgaggttgcggctgctgaggaagtcgccgttgagaaggccgaggagtaaagaggaaggaagaagctatatatgaccttttttggtctcatatcgttttctgtttattttattttatcaacatttcataagtattttctatgtttgttgggtttgttatgatgaaatcagatgtttggatcttttaatggttgctacattgtt

SEQ ID NO: 26162 - protein, 138 aa, Arabidopsis thaliana
  peptide (1)..(138): Ceres Seq. ID no. 12331386
MATVEVEQVTPVAVENVEVPTKTVEETVVETEVTQQPEESVPAVTEQKSEAPIVETNEEVVVEEAEKKDEETEKKTEEKDEKTEVITETPVVEEEEKKAEEVTETPAVVEEEKKTEVVEEKQTEVAAAEEVAVEKAEE

SEQ ID NO: 26163 - DNA, 1281 bp, Arabidopsis thaliana
  misc_feature (1)..(1281): Ceres Seq. ID no. 13489923
  misc_feature (1)..(1281): Ortholog of  Ceres SEQ ID NO 15180785 as cited in SEQ ID NO 0
atcttgtagaaacagaaacttgtctggtcttttcgaatgtgatttttggttgatgatgatgaggctagttcaagtatcttccactgaatccatttcttctatttccgcttcctcggcccggaatggtggagttctctacttgaagcgtggttctgtctgtgtatgtagagtcttgaagccgaataaagttgctctcaacagtatgattctttcagctatgaggacttgctcaatctctgggttccatactcatcttccgaagtcaagcggttcagtttcttcgagaaagaggttttcttctactgctttatcactcatcactcaaaccatttcaccatttgctcatccccgttcatcagtaattgtgtcaagccttctctccccatctgatatccctcagaaatctgaagaatggtttgctttaaggaaagacaagttaaccacaagtacattcagtacagcgctggggttttggaaaggaaaccggcgtgccgagctctggcatgaaaaggtttatgattcagatgcacgagttgttgaggagtctgcacggtttgctatgaactggggtgtacaaatggaatcatctgcgatagaaaggtacaaaagaataatgggttgtgaggttggaacaatgggatttgctattcactccaatgaggaatttcactggcttggcgcttcaccggatggaatcctcgattgctttggtattctagaagtgaaatgtccatataacaaagggaaaaccgaaactgtattaccctggaaaaaagtgccctactattacatgcctcagctgcagggtcaaatggagataatggaccgggaatgggtcaacttatactgctggacacgaaatggaagcacggttttccgtgtgatgagagaccgaagctattggagaatcatacatgatgtattaagggagttctggtgggagagtgtgattcctgcaagggaggctttgttgttagggaaagaggatgaggaggtgaaaaagtatgagccaacatctacgcataaacgaaccaagcttgccatagctaaaagcctaaatttggctgcggaatcaaaactagtatgcagagaaattgctgatcatgtcgagttcttttagatgaaataggagaatgatgattcatcttattagatcacgcattgttgtacttatgaaactggttaaatgatgtaacactctttaatcagatttcactctttggagtttagtggttttctatcgtctgtaaattaattggatgtgaaatgattttcattgct

SEQ ID NO: 26164 - protein, 372 aa, Arabidopsis thaliana
  peptide (1)..(372): Ceres Seq. ID no. 13489924
SCRNRNLSGLFECDFWLMMMRLVQVSSTESISSISASSARNGGVLYLKRGSVCVCRVLKPNKVALNSMILSAMRTCSISGFHTHLPKSSGSVSSRKRFSSTALSLITQTISPFAHPRSSVIVSSLLSPSDIPQKSEEWFALRKDKLTTSTFSTALGFWKGNRRAELWHEKVYDSDARVVEESARFAMNWGVQMESSAIERYKRIMGCEVGTMGFAIHSNEEFHWLGASPDGILDCFGILEVKCPYNKGKTETVLPWKKVPYYYMPQLQGQMEIMDREWVNLYCWTRNGSTVFRVMRDRSYWRIIHDVLREFWWESVIPAREALLLGKEDEEVKKYEPTSTHKRTKLAIAKSLNLAAESKLVCREIADHVEFF

SEQ ID NO: 26165 - protein, 355 aa, Arabidopsis thaliana
  peptide (1)..(355): Ceres Seq. ID no. 13489925
MMMRLVQVSSTESISSISASSARNGGVLYLKRGSVCVCRVLKPNKVALNSMILSAMRTCSISGFHTHLPKSSGSVSSRKRFSSTALSLITQTISPFAHPRSSVIVSSLLSPSDIPQKSEEWFALRKDKLTTSTFSTALGFWKGNRRAELWHEKVYDSDARVVEESARFAMNWGVQMESSAIERYKRIMGCEVGTMGFAIHSNEEFHWLGASPDGILDCFGILEVKCPYNKGKTETVLPWKKVPYYYMPQLQGQMEIMDREWVNLYCWTRNGSTVFRVMRDRSYWRIIHDVLREFWWESVIPAREALLLGKEDEEVKKYEPTSTHKRTKLAIAKSLNLAAESKLVCREIADHVEFF

SEQ ID NO: 26166 - protein, 354 aa, Arabidopsis thaliana
  peptide (1)..(354): Ceres Seq. ID no. 13489926
MMRLVQVSSTESISSISASSARNGGVLYLKRGSVCVCRVLKPNKVALNSMILSAMRTCSISGFHTHLPKSSGSVSSRKRFSSTALSLITQTISPFAHPRSSVIVSSLLSPSDIPQKSEEWFALRKDKLTTSTFSTALGFWKGNRRAELWHEKVYDSDARVVEESARFAMNWGVQMESSAIERYKRIMGCEVGTMGFAIHSNEEFHWLGASPDGILDCFGILEVKCPYNKGKTETVLPWKKVPYYYMPQLQGQMEIMDREWVNLYCWTRNGSTVFRVMRDRSYWRIIHDVLREFWWESVIPAREALLLGKEDEEVKKYEPTSTHKRTKLAIAKSLNLAAESKLVCREIADHVEFF

SEQ ID NO: 26167 - DNA, 884 bp, Arabidopsis thaliana
  misc_feature (1)..(884): Ceres Seq. ID no. 12482146
  misc_feature (1)..(884): Ortholog of  Ceres SEQ ID NO 15171884 as cited in SEQ ID NO 54505
  misc_feature (1)..(884): Ortholog of  Ceres SEQ ID NO 13596515 as cited in SEQ ID NO 62306
  misc_feature (1)..(884): Ortholog of  Ceres SEQ ID NO 14308999 as cited in SEQ ID NO 0
  misc_feature (1)..(884): Ortholog of  Ceres SEQ ID NO 15225075 as cited in SEQ ID NO 0
aaagaagctatggcttccaatttctggacttcgacgcactacaaagagcttaaggacccagaagaggttaatgttgttcatcctcttgatgctcagagaggaatctctgttgaagatttcagactcattaagcttcatatgtctaattatatatcgaaactggcacaacacattaagattaggcaaagagttgttgcaactgcagtaacctatatgcgtcgtgtttacacaagaaagagtttgacggaatatgagcctcggcttgttgctcctacatgcttgtatttggcttgcaaagcagaagagagtgtggtgcatgccaaacttcttgtcttctacatgaaaaaactttatgcggatgaaaagtttcgatatgagattaaagatattctggaaatggagatgaaggtcttggaagcattgaacttctatcttgttgtattccacccatatcgatctctgcctgagttcttgcaggattctggaatcaatgacactagtatgacccatctaacttggggtcttgtcaacgacacatatagaatggacctcatccttatacatccgccgtttctcataacactcgcttgcatttacattgcttctgtacacaaagagaaagacataaagacatggtttgaagagctttctgtcgacatgaacattgtgaagaatattgcaatggagatattagatttctatgaaaaccatagactgttcacggaagagagagttcacgccgccttcaacaaacttgctacaaacccataaagtttcgacttgtctgtgtgttttgttcccttgagaaaatataatgttttgccagaagttttggaaatgagattattctgtttattgtacatcagttttgctcgtcttggttc

SEQ ID NO: 26168 - protein, 256 aa, Arabidopsis thaliana
  peptide (1)..(256): Ceres Seq. ID no. 12482147
KEAMASNFWTSTHYKELKDPEEVNVVHPLDAQRGISVEDFRLIKLHMSNYISKLAQHIKIRQRVVATAVTYMRRVYTRKSLTEYEPRLVAPTCLYLACKAEESVVHAKLLVFYMKKLYADEKFRYEIKDILEMEMKVLEALNFYLVVFHPYRSLPEFLQDSGINDTSMTHLTWGLVNDTYRMDLILIHPPFLITLACIYIASVHKEKDIKTWFEELSVDMNIVKNIAMEILDFYENHRLFTEERVHAAFNKLATNP

SEQ ID NO: 26169 - protein, 253 aa, Arabidopsis thaliana
  peptide (1)..(253): Ceres Seq. ID no. 12482148
MASNFWTSTHYKELKDPEEVNVVHPLDAQRGISVEDFRLIKLHMSNYISKLAQHIKIRQRVVATAVTYMRRVYTRKSLTEYEPRLVAPTCLYLACKAEESVVHAKLLVFYMKKLYADEKFRYEIKDILEMEMKVLEALNFYLVVFHPYRSLPEFLQDSGINDTSMTHLTWGLVNDTYRMDLILIHPPFLITLACIYIASVHKEKDIKTWFEELSVDMNIVKNIAMEILDFYENHRLFTEERVHAAFNKLATNP

SEQ ID NO: 26170 - protein, 210 aa, Arabidopsis thaliana
  peptide (1)..(210): Ceres Seq. ID no. 12482149
MSNYISKLAQHIKIRQRVVATAVTYMRRVYTRKSLTEYEPRLVAPTCLYLACKAEESVVHAKLLVFYMKKLYADEKFRYEIKDILEMEMKVLEALNFYLVVFHPYRSLPEFLQDSGINDTSMTHLTWGLVNDTYRMDLILIHPPFLITLACIYIASVHKEKDIKTWFEELSVDMNIVKNIAMEILDFYENHRLFTEERVHAAFNKLATNP

SEQ ID NO: 26171 - DNA, 924 bp, Arabidopsis thaliana
  misc_feature (1)..(924): Ceres Seq. ID no. 13497048
  misc_feature (1)..(924): Ortholog of  Ceres SEQ ID NO 14301994 as cited in SEQ ID NO 56653
  misc_feature (1)..(924): Ortholog of  Ceres SEQ ID NO 13595658 as cited in SEQ ID NO 59888
  misc_feature (1)..(924): Ortholog of  Ceres SEQ ID NO 13661330 as cited in SEQ ID NO 61614
  misc_feature (1)..(924): Ortholog of  Ceres SEQ ID NO 13596025 as cited in SEQ ID NO 62024
  misc_feature (1)..(924): Ortholog of  Ceres SEQ ID NO 13662324 as cited in SEQ ID NO 62162
  misc_feature (1)..(924): Ortholog of  Ceres SEQ ID NO 12625713 as cited in SEQ ID NO 64160
  misc_feature (1)..(924): Ortholog of  Ceres SEQ ID NO 14302860 as cited in SEQ ID NO 67667
acaccaaaagctacacaatggctaaaacctctcttcctctcgccgcctccttcctcctcctcatctccttctcctccgccgtagacacttcccgtctcttcctcaccgtcgtcaacaactgtcccttcactgtctggccagccattcaacccaacgccggccaccccgtcctagagaaaggtggcttcgctctcccaactttcactcaccgctccttcaacgttccaaccacacactggtccggtcgcatctgggccagaacctggtgtgcccactacaacggaaaattctcctgcctcaccggagactgcggaaaccgcctggaatgcaacggtctcggcggggcaccaccagcttctctagctcagttcgacctccaccacggtggtcaccacgacttctcctcttacggtgtctctctcgttgacggttacaatgttccgatgaccgtgactcctcacgaaggccatggtgtctgtcctgtcgttggttgtcgtgaagatctaataaaaacgtgtccggctcatcttcaggtccggtcacacagtggacacgtggtggcttgtaagagtgggtgtgaggctttccatacagacgagctgtgttgtcgtggtcattacaatagccctaacacgtgtaaagcttcgagccattcgctgttctttaagcatgcgtgtccttcgagtttcacttttgctcatgatagtccttcgcttatgcatgactgtgcttctcctagagagctcaaagtcatcttctgccactaatgtttcggccatgttctagggttattgtcgtaacatcggactgatcttctaatgcttttgtttggttagtctgattttgattggtttagtatgcgatttcccggttcagttatgtagtccaactatgaaattatgtattatcttgaaattgctctcg

SEQ ID NO: 26172 - protein, 254 aa, Arabidopsis thaliana
  peptide (1)..(254): Ceres Seq. ID no. 13497049
TKSYTMAKTSLPLAASFLLLISFSSAVDTSRLFLTVVNNCPFTVWPAIQPNAGHPVLEKGGFALPTFTHRSFNVPTTHWSGRIWARTWCAHYNGKFSCLTGDCGNRLECNGLGGAPPASLAQFDLHHGGHHDFSSYGVSLVDGYNVPMTVTPHEGHGVCPVVGCREDLIKTCPAHLQVRSHSGHVVACKSGCEAFHTDELCCRGHYNSPNTCKASSHSLFFKHACPSSFTFAHDSPSLMHDCASPRELKVIFCH

SEQ ID NO: 26173 - protein, 249 aa, Arabidopsis thaliana
  peptide (1)..(249): Ceres Seq. ID no. 13497050
MAKTSLPLAASFLLLISFSSAVDTSRLFLTVVNNCPFTVWPAIQPNAGHPVLEKGGFALPTFTHRSFNVPTTHWSGRIWARTWCAHYNGKFSCLTGDCGNRLECNGLGGAPPASLAQFDLHHGGHHDFSSYGVSLVDGYNVPMTVTPHEGHGVCPVVGCREDLIKTCPAHLQVRSHSGHVVACKSGCEAFHTDELCCRGHYNSPNTCKASSHSLFFKHACPSSFTFAHDSPSLMHDCASPRELKVIFCH

SEQ ID NO: 26174 - DNA, 1116 bp, Arabidopsis thaliana
  misc_feature (1)..(1116): Ceres Seq. ID no. 12323578
  misc_feature (1)..(1116): Ortholog of  Ceres SEQ ID NO 15169972 as cited in SEQ ID NO 51692
acaaaagtgacatcgtcggaggagaaaaggtagtgccaatattagccggcgattcagatggagacggtggtcgataaagatgttctgaagtcttccggggctgagcttcttcccgacggacgtcgaggtttacgcatccatgactgggagatcgaaaccctccgcggcacgattctcacttctctcgctgtcgaagagtgggaaaaaaagcttaagacatctcacttacctgaaatggtttttggcgagaatgcattagtccttaaacacttaggtagcaacactaagattcattttaatgcgtttgacgcactagctggttggaagcaggaagggcttccacctgttgaagttcctgctgcagcacaatggaaattcaggagccaagccgtctcagcaggtgatactagattatgattacacgtttacaacgccatactgtggaagtgaagtagttgagaaagacaaagaaacgcaggttgaggcaaaagctaatccaaagggggaagctactcttcagtgggagaactgtgaagatcagattgatttggctgctctctcacttaaagaacctattctcttctatgatgaggtagttttgtatgaagatgaactggctgacaatggagtgtcacttctgactgtgaaagtgagagtcatgccaagctcatggttcctcctcttgcgattttggctgagagttgatggtgtgcttatgagattgagagagacgagaatgcattataggtttggcgaagatgaggcaccaactgttcttcgtgaaaactgttggagagaagcaacatttcagtctctatctgcgaaagggtatccagttgacttagcagtctggagcgacccgagctccatcagtcagaggcttccagtgattaagcatacgacacagaaactgaagatccctagtaaagtttaagctgtttataaagttgcaaattatatccaaaagaacgtaccgatgagctttctttacagccaaacaaactacttactattgaaaaaggagttactccactgacttattgtggtggtttcatatgaacattcaaacccttttcacgttgttcttacactcttattgttccctaccttgttccc

SEQ ID NO: 26175 - protein, 119 aa, Arabidopsis thaliana
  peptide (1)..(119): Ceres Seq. ID no. 12323579
METVVDKDVLKSSGAELLPDGRRGLRIHDWEIETLRGTILTSLAVEEWEKKLKTSHLPEMVFGENALVLKHLGSNTKIHFNAFDALAGWKQEGLPPVEVPAAAQWKFRSQAVSAGDTRL

SEQ ID NO: 26176 - protein, 91 aa, Arabidopsis thaliana
  peptide (1)..(91): Ceres Seq. ID no. 12323580
MPSSWFLLLRFWLRVDGVLMRLRETRMHYRFGEDEAPTVLRENCWREATFQSLSAKGYPVDLAVWSDPSSISQRLPVIKHTTQKLKIPSKV

SEQ ID NO: 26177 - protein, 72 aa, Arabidopsis thaliana
  peptide (1)..(72): Ceres Seq. ID no. 12323581
MRLRETRMHYRFGEDEAPTVLRENCWREATFQSLSAKGYPVDLAVWSDPSSISQRLPVIKHTTQKLKIPSKV

SEQ ID NO: 26178 - DNA, 1295 bp, Arabidopsis thaliana
  misc_feature (1)..(1295): Ceres Seq. ID no. 12324151
  misc_feature (1)..(1295): Ortholog of  Ceres SEQ ID NO 14306381 as cited in SEQ ID NO 58812
ataatcatctaaagactcagccttttaagtatccccagaagtcgtatgaccttacgtagcttaatccttgagatgcgttcgagaccgcatcgtgtggtccacgaccttgccgccgccgcagctgccgattccacttctgtgtcatcgcaagattatcgctggtcagagattcctgaagagcttcttagggagattctgattcgtgttgaagcggcggacggtggcggatggccgtcacgacgcagcgtggtggcttgtgccggcgtttgtcgtggctggcggctacttatgaacgaaaccgtcgttgtccctgagatctcttctaagttgactttccccatctctctcaagcagcctggtccaagggattcactgtttcaatgctttatcaaacgtaatcgaattacgcaatcatatcatctctatctcggattaaccaactctttaacggatgatgggaagtttttgcttgctgcgtgtaagttgaagcacacaacttgtacggattacattatctctttacgttctgatgatatgtcgagaagaagccaagcttatgttggcaaagtgagatcgaacttcctaggaacgaaattcactgtctttgatggaaatctgctgccttcaacgggagccgcaaagttgagaaagagccgatcttataatcccgcaaaagtttcagcaaaagttcctcttggaagttatcctgtcgctcatatcacatatgagctgaatgtcttaggatcccggggaccaagaaagatgcaatgtcttatggacacaatacctacaagcacaatggagcctcaaggagtagcttcagaaccatcagagtttcccttactcggtactcggtcaaccttatccaggtctcagtcaaaaccattacgcagtagctcaagccacctgaaagaaacaccattagtgctgagcaacaagacaccacggtggcacgagcagctacgctgctggtgcttgaatttccatggccgtgtcacagtagcgtcagtgaagaactttcagctcgtggcagcaggagctagctgtggcagtggcacgggaatgtcaccggagaggcagagcgagcggattatattgcagtttgggaaagtcgggaaagatatgttcacgatggattatggatacccgatctcagctttccaggcttttgccatttgcttgagcagctttgagactagaatcgcttgtgaatgatttacaagactttgttaagatatcgctatatctatcttgtaaagagcaatttgtagccttttgtaaattgtgttcttttt

SEQ ID NO: 26179 - protein, 389 aa, Arabidopsis thaliana
  peptide (1)..(389): Ceres Seq. ID no. 12324152
MTLRSLILEMRSRPHRVVHDLAAAAAADSTSVSSQDYRWSEIPEELLREILIRVEAADGGGWPSRRSVVACAGVCRGWRLLMNETVVVPEISSKLTFPISLKQPGPRDSLFQCFIKRNRITQSYHLYLGLTNSLTDDGKFLLAACKLKHTTCTDYIISLRSDDMSRRSQAYVGKVRSNFLGTKFTVFDGNLLPSTGAAKLRKSRSYNPAKVSAKVPLGSYPVAHITYELNVLGSRGPRKMQCLMDTIPTSTMEPQGVASEPSEFPLLGTRSTLSRSQSKPLRSSSSHLKETPLVLSNKTPRWHEQLRCWCLNFHGRVTVASVKNFQLVAAGASCGSGTGMSPERQSERIILQFGKVGKDMFTMDYGYPISAFQAFAICLSSFETRIACE

SEQ ID NO: 26180 - protein, 380 aa, Arabidopsis thaliana
  peptide (1)..(380): Ceres Seq. ID no. 12324153
MRSRPHRVVHDLAAAAAADSTSVSSQDYRWSEIPEELLREILIRVEAADGGGWPSRRSVVACAGVCRGWRLLMNETVVVPEISSKLTFPISLKQPGPRDSLFQCFIKRNRITQSYHLYLGLTNSLTDDGKFLLAACKLKHTTCTDYIISLRSDDMSRRSQAYVGKVRSNFLGTKFTVFDGNLLPSTGAAKLRKSRSYNPAKVSAKVPLGSYPVAHITYELNVLGSRGPRKMQCLMDTIPTSTMEPQGVASEPSEFPLLGTRSTLSRSQSKPLRSSSSHLKETPLVLSNKTPRWHEQLRCWCLNFHGRVTVASVKNFQLVAAGASCGSGTGMSPERQSERIILQFGKVGKDMFTMDYGYPISAFQAFAICLSSFETRIACE

SEQ ID NO: 26181 - protein, 308 aa, Arabidopsis thaliana
  peptide (1)..(308): Ceres Seq. ID no. 12324154
MNETVVVPEISSKLTFPISLKQPGPRDSLFQCFIKRNRITQSYHLYLGLTNSLTDDGKFLLAACKLKHTTCTDYIISLRSDDMSRRSQAYVGKVRSNFLGTKFTVFDGNLLPSTGAAKLRKSRSYNPAKVSAKVPLGSYPVAHITYELNVLGSRGPRKMQCLMDTIPTSTMEPQGVASEPSEFPLLGTRSTLSRSQSKPLRSSSSHLKETPLVLSNKTPRWHEQLRCWCLNFHGRVTVASVKNFQLVAAGASCGSGTGMSPERQSERIILQFGKVGKDMFTMDYGYPISAFQAFAICLSSFETRIACE

SEQ ID NO: 26182 - DNA, 1438 bp, Arabidopsis thaliana
  misc_feature (1)..(1438): Ceres Seq. ID no. 12371731
  misc_feature (1)..(1438): Ortholog of  Ceres SEQ ID NO 15226515 as cited in SEQ ID NO 58519
ctctgtgtcgcctgaagtgataacattctcattattcacccaaggagagagatcggagctaaaaagccatctctcgccggaaaatttctcagttttcttattaccttagccacagacaacaagacgacagaggaatctaatcttagccccctttcctctctgtctctctctatatctctgtctttaggctttgagatatcttcaacacgaagctttttgcttcttttttttatctctttaaaaaattccagccaatggttcgaatccaatagtagcttcaaaggtcatggatttagtcaggggtttgtggaggaaacatagaaggaagattttggtgacgacgacttgtttgggaagtgggtatttgctctataaactatacaatgcccatactcgtaagctcgctgatttggaacgagagcttgctaatgagcgtgaaaacgacgagatcatcaaaacccaaatgaaggcacatttcgataacattcagatgattgctgatactactacattgcctcacgcaattcatcacttgagtagtcgtgtagttgaagagattgatgtctcgagtattatggataagctaagcaaaggcaaaggaatattgattccttctgagaagcttcaactctggaatgagctcaaaattttgagtttcacgagaatggtcttgtccctttggtcggtcactatgcttagtttgtacattagggttcaagtcaatattttgggcagacatttatatatcgacactgctagaggtcttgggagctcccatttacttgacgaactagatctcatagagagagatgatgaacaaaagtttttgacaagcgctgattttcttgcgaccagtggcatgccgagtttgatttctaacatgcagaacgcagtgaaagaagttctcaagggaaagcagttaaaggatgtgttaaccacaagtgctcttcgagaaactgtgatgcggattctcgatgtgtttatgagcacaggaagtccacaccactgggtagattatctaatgatgtcccaagacgcaaccactgatgtttcctcttctgatgcaactgttaccaagtttcatctactcataaccgagacacgggaagtactcgcaagcaatgatttttcaaatgtagcagagatctcactcaagtgttgtgccgttgcgttagtagaggagatggaaacgcagaccggtctggccacagggatgcaattggcaaagctattaccacagattgagaaaaccatgccggagatttcagctgagccggagaagaaccggttcttgcaactcatccgagatttgcctgaagttaaactcttttttactcttttatacgcaaatatgcctcagtagcattattaaaccccattgccaaaaattgtttcctgatcactttttatcatatgtttcaatttacttcaaaatagt

SEQ ID NO: 26183 - protein, 358 aa, Arabidopsis thaliana
  peptide (1)..(358): Ceres Seq. ID no. 12371732
MDLVRGLWRKHRRKILVTTTCLGSGYLLYKLYNAHTRKLADLERELANERENDEIIKTQMKAHFDNIQMIADTTTLPHAIHHLSSRVVEEIDVSSIMDKLSKGKGILIPSEKLQLWNELKILSFTRMVLSLWSVTMLSLYIRVQVNILGRHLYIDTARGLGSSHLLDELDLIERDDEQKFLTSADFLATSGMPSLISNMQNAVKEVLKGKQLKDVLTTSALRETVMRILDVFMSTGSPHHWVDYLMMSQDATTDVSSSDATVTKFHLLITETREVLASNDFSNVAEISLKCCAVALVEEMETQTGLATGMQLAKLLPQIEKTMPEISAEPEKNRFLQLIRDLPEVKLFFTLLYANMPQ

SEQ ID NO: 26184 - protein, 299 aa, Arabidopsis thaliana
  peptide (1)..(299): Ceres Seq. ID no. 12371733
MKAHFDNIQMIADTTTLPHAIHHLSSRVVEEIDVSSIMDKLSKGKGILIPSEKLQLWNELKILSFTRMVLSLWSVTMLSLYIRVQVNILGRHLYIDTARGLGSSHLLDELDLIERDDEQKFLTSADFLATSGMPSLISNMQNAVKEVLKGKQLKDVLTTSALRETVMRILDVFMSTGSPHHWVDYLMMSQDATTDVSSSDATVTKFHLLITETREVLASNDFSNVAEISLKCCAVALVEEMETQTGLATGMQLAKLLPQIEKTMPEISAEPEKNRFLQLIRDLPEVKLFFTLLYANMPQ

SEQ ID NO: 26185 - protein, 290 aa, Arabidopsis thaliana
  peptide (1)..(290): Ceres Seq. ID no. 12371734
MIADTTTLPHAIHHLSSRVVEEIDVSSIMDKLSKGKGILIPSEKLQLWNELKILSFTRMVLSLWSVTMLSLYIRVQVNILGRHLYIDTARGLGSSHLLDELDLIERDDEQKFLTSADFLATSGMPSLISNMQNAVKEVLKGKQLKDVLTTSALRETVMRILDVFMSTGSPHHWVDYLMMSQDATTDVSSSDATVTKFHLLITETREVLASNDFSNVAEISLKCCAVALVEEMETQTGLATGMQLAKLLPQIEKTMPEISAEPEKNRFLQLIRDLPEVKLFFTLLYANMPQ

SEQ ID NO: 26186 - DNA, 694 bp, Arabidopsis thaliana
  misc_feature (1)..(694): Ceres Seq. ID no. 13580701
  misc_feature (1)..(694): Ortholog of  Ceres SEQ ID NO 14304353 as cited in SEQ ID NO 20380
  misc_feature (1)..(694): Ortholog of  Ceres SEQ ID NO 12562293 as cited in SEQ ID NO 20690
atcacttacttaacatactaagagagttattagaacttgcaaaaaatggcttccaaggctttgattctgttaggtctcttctcagttcttctcgtcgtctccgaagtgtctgccgcaaggcaatcgggcatggtgaagccagagagtgaggaaactgtgcaacctgaaggttatggcggtggccacggaggacatggtggtcacggagggggaggaggccacggacatggaggacacaacggaggagggggccacggacttgacggatacggaggaggtggaggacactatggaggaggtggaggacactacggaggaggtggaggacactacggaggaggtggaggacactacggaggaggtggaggacactacggaggaggtggtggaggacacggaggtggaggacactacggaggtggtggaggaggatacggaggtggaggaggacaccacggaggaggaggccacgggctaaacgaacctgttcagactaagccgggtgtttaaaactatataatatcttcactaccatgcatgattgcatatatatatatacgcttatgtattatctatatgcctataaataaaccatggtgagtttgtaacgcagtgccttcagaaatgttcggaataaatttccataatattagtataatgtctctctgtttgaattataaactgcgctgtttgc

SEQ ID NO: 26187 - protein, 154 aa, Arabidopsis thaliana
  peptide (1)..(154): Ceres Seq. ID no. 13580702
MASKALILLGLFSVLLVVSEVSAARQSGMVKPESEETVQPEGYGGGHGGHGGHGGGGGHGHGGHNGGGGHGLDGYGGGGGHYGGGGGHYGGGGGHYGGGGGHYGGGGGHYGGGGGGHGGGGHYGGGGGGYGGGGGHHGGGGHGLNEPVQTKPGV

SEQ ID NO: 26188 - protein, 126 aa, Arabidopsis thaliana
  peptide (1)..(126): Ceres Seq. ID no. 13580703
MVKPESEETVQPEGYGGGHGGHGGHGGGGGHGHGGHNGGGGHGLDGYGGGGGHYGGGGGHYGGGGGHYGGGGGHYGGGGGHYGGGGGGHGGGGHYGGGGGGYGGGGGHHGGGGHGLNEPVQTKPGV

SEQ ID NO: 26189 - protein, 101 aa, Arabidopsis thaliana
  peptide (1)..(101): Ceres Seq. ID no. 13580704
MAVATEDMVVTEGEEATDMEDTTEEGATDLTDTEEVEDTMEEVEDTTEEVEDTTEEVEDTTEEVEDTTEEVVEDTEVEDTTEVVEEDTEVEEDTTEEEATG

SEQ ID NO: 26190 - DNA, 1230 bp, Arabidopsis thaliana
  misc_feature (1)..(1230): Ceres Seq. ID no. 12326026
  misc_feature (1)..(1230): Ortholog of  Ceres SEQ ID NO 13593955 as cited in SEQ ID NO 54278
  misc_feature (1)..(1230): Ortholog of  Ceres SEQ ID NO 13655302 as cited in SEQ ID NO 63307
  misc_feature (1)..(1230): Ortholog of  Ceres SEQ ID NO 13597380 as cited in SEQ ID NO 64054
  misc_feature (1)..(1230): Ortholog of  Ceres SEQ ID NO 12625474 as cited in SEQ ID NO 64169
  misc_feature (1)..(1230): Ortholog of  Ceres SEQ ID NO 13597502 as cited in SEQ ID NO 64681
gacaaaatgttgatccatgtaattatattcatgatcataacgacaatgcaattctcgacgacatgccatgcatatgtgattaacgtgaccaacgttaacgtatcaatgttcccggctattcttgtattcggggattcaacaatcgataccggcaacaacaactacatcaaaacctacatccgggctaatttccctccttacggctgcaatttccccggccacaacgctaccggaagattctctaacggtaaacttattccggacttcatagcatctcttatgggaatcaaagacaccgttcctcctttcctagaccctcacttgtctgattccgatatcatcaccggagtgtgctttgcttcggctggttccggttacgacaacctcacagatcgagcaacttcaactctatccgttgataaacaggcggatatgctcagaagttacgtggagaggttgagccagatcgtcggggacgagaaagcggcctcgatagtcagcgaggctctggtgattgtaagctccggaactaacgatttcaatctaaatctctacgatactccttctcgtcgtcagaagcttggcgttgatggctatcaaagcttcattctctcgaatgtacacaacttcgttcaagaactatatgacattggatgccgtaaaataatggtgttgggtctaccgccggtcgggtgtttaccaattcagatgacaatggctatgcaaaagcagaacgagagacgatgcatcgacaaacaaaactcagattcacaagagtttaaccagaagctaaaaaactccttgacggagatgcaatccaacctcactggaagtgtcatcttctacggcgatatctacggagcattgttcgacatggccactaatcctcaaagatacgggttaaaggagacgacgagaggatcttgcgggactggagaaatagagttagcgtacttgtgcaatgctttaactcggatttgtcctaaccctaaccagtaccttttctgggacgatattcatccttcccaaattgcttacatagtcatcagtctcagtcttgttgaacaaattttccacgtactctcttgattttcattttgctttcatatatattaattaatctgtagtcaatctataattatttccctgtgggttcacataatctttcgtatttgcttaagctaggttttacatgtatactattatgatattatactactctatcctggt

SEQ ID NO: 26191 - protein, 362 aa, Arabidopsis thaliana
  peptide (1)..(362): Ceres Seq. ID no. 12326027
DKMLIHVIIFMIITTMQFSTTCHAYVINVTNVNVSMFPAILVFGDSTIDTGNNNYIKTYIRANFPPYGCNFPGHNATGRFSNGKLIPDFIASLMGIKDTVPPFLDPHLSDSDIITGVCFASAGSGYDNLTDRATSTLSVDKQADMLRSYVERLSQIVGDEKAASIVSEALVIVSSGTNDFNLNLYDTPSRRQKLGVDGYQSFILSNVHNFVQELYDIGCRKIMVLGLPPVGCLPIQMTMAMQKQNERRCIDKQNSDSQEFNQKLKNSLTEMQSNLTGSVIFYGDIYGALFDMATNPQRYGLKETTRGSCGTGEIELAYLCNALTRICPNPNQYLFWDDIHPSQIAYIVISLSLVEQIFHVLS

SEQ ID NO: 26192 - protein, 360 aa, Arabidopsis thaliana
  peptide (1)..(360): Ceres Seq. ID no. 12326028
MLIHVIIFMIITTMQFSTTCHAYVINVTNVNVSMFPAILVFGDSTIDTGNNNYIKTYIRANFPPYGCNFPGHNATGRFSNGKLIPDFIASLMGIKDTVPPFLDPHLSDSDIITGVCFASAGSGYDNLTDRATSTLSVDKQADMLRSYVERLSQIVGDEKAASIVSEALVIVSSGTNDFNLNLYDTPSRRQKLGVDGYQSFILSNVHNFVQELYDIGCRKIMVLGLPPVGCLPIQMTMAMQKQNERRCIDKQNSDSQEFNQKLKNSLTEMQSNLTGSVIFYGDIYGALFDMATNPQRYGLKETTRGSCGTGEIELAYLCNALTRICPNPNQYLFWDDIHPSQIAYIVISLSLVEQIFHVLS

SEQ ID NO: 26193 - protein, 352 aa, Arabidopsis thaliana
  peptide (1)..(352): Ceres Seq. ID no. 12326029
MIITTMQFSTTCHAYVINVTNVNVSMFPAILVFGDSTIDTGNNNYIKTYIRANFPPYGCNFPGHNATGRFSNGKLIPDFIASLMGIKDTVPPFLDPHLSDSDIITGVCFASAGSGYDNLTDRATSTLSVDKQADMLRSYVERLSQIVGDEKAASIVSEALVIVSSGTNDFNLNLYDTPSRRQKLGVDGYQSFILSNVHNFVQELYDIGCRKIMVLGLPPVGCLPIQMTMAMQKQNERRCIDKQNSDSQEFNQKLKNSLTEMQSNLTGSVIFYGDIYGALFDMATNPQRYGLKETTRGSCGTGEIELAYLCNALTRICPNPNQYLFWDDIHPSQIAYIVISLSLVEQIFHVLS

SEQ ID NO: 26194 - DNA, 1462 bp, Arabidopsis thaliana
  misc_feature (1)..(1462): Ceres Seq. ID no. 12333181
  misc_feature (1)..(1462): Ortholog of  Ceres SEQ ID NO 14313264 as cited in SEQ ID NO 67300
  misc_feature (1)..(1462): Ortholog of  Ceres SEQ ID NO 14302824 as cited in SEQ ID NO 67794
cttcgttccaaaaagtcgcaactcttcttcatcttcttcctctgacgatcattttcagaagaatctgattccgatcaaaattgcagaagaagatgtctcgccaatcgttttctctactgaagaatcttcgtagcatcgcttccggttccaaaatccagacccgatccgtgacttacatgcccagacccggtgacggaaaaccaagaccagtgacgttaatccccggagacggagttggtccgttggtaacaaacgcggttcaacaagtgatggaagcgatgcacgctccggtttacttcgaaccgttcgaagttcatggagatatgaagagtttacctgaaggattgttggaatcgattaagaagaacaaagtttgtttgaaaggtggtcttaagactcccgtcggtggtggtgtgagctctctcaatgttaatctgagaaaggagcttgatctctttgcttctttggtcaactgtttcaatttgcctggtttagcttctcgtcatgagaatgttgatattgttgtgattagagagaacactgaaggtgaatatgcaggtcttgaacatgaagttgttcctggtgttgttgagagccttaaggtgattacaaagttctgttcagagcgtattgcaaagtatgcgtttgagtatgcttacttgaacaacaggaagaaagttacagcagtgcacaaggctaatatcatgaaattggctgatggtttgttcttggagtcttgtcaagaggttgctaagaagtatccaagcattgcctacaatgaaatcattgttgataattgttgtatgcaacttgtggctagaccagagcaattcgatgtcatggtgacgcctaatctctatggtaatctagtggcaaacactgctgctggtattgctggaggtactggagtcatgcctggaggaaatgttggggcggagtatgcggtctttgagcaaggtgcatcagcgggaaacgtggggaaggatacaacggaagagcaaaaaaatgcaaaccctgtggctttgttgctgtcatcagccatgatgcttagacaccttcagttcccttcttttgctgacaggcttgaaaccgctgtgaagcgtgttatcgctgaaggaaattgtcggactgaagatcttggcggaaacagtacgactcaagaggtcgttgacgctgtcattgcaaatttggattgacttgacaattccaacttcgctagtcttcgcttgtgtaaacatcagtcacacgtcggtatgattcacgcttaccggaaaatacttctagttcccacattctttcgagataactcgaattgggatttcagatttcgagaaaaataacatatggttttttgttttgttttgcttctttttgttcatgtataatatgcaaagtgcaaagtgaaaagtgaaaactgcctcagagcattattttttgaataatgaaaattacgtttaacttc

SEQ ID NO: 26195 - protein, 367 aa, Arabidopsis thaliana
  peptide (1)..(367): Ceres Seq. ID no. 12333182
MSRQSFSLLKNLRSIASGSKIQTRSVTYMPRPGDGKPRPVTLIPGDGVGPLVTNAVQQVMEAMHAPVYFEPFEVHGDMKSLPEGLLESIKKNKVCLKGGLKTPVGGGVSSLNVNLRKELDLFASLVNCFNLPGLASRHENVDIVVIRENTEGEYAGLEHEVVPGVVESLKVITKFCSERIAKYAFEYAYLNNRKKVTAVHKANIMKLADGLFLESCQEVAKKYPSIAYNEIIVDNCCMQLVARPEQFDVMVTPNLYGNLVANTAAGIAGGTGVMPGGNVGAEYAVFEQGASAGNVGKDTTEEQKNANPVALLLSSAMMLRHLQFPSFADRLETAVKRVIAEGNCRTEDLGGNSTTQEVVDAVIANLD

SEQ ID NO: 26196 - protein, 339 aa, Arabidopsis thaliana
  peptide (1)..(339): Ceres Seq. ID no. 12333183
MPRPGDGKPRPVTLIPGDGVGPLVTNAVQQVMEAMHAPVYFEPFEVHGDMKSLPEGLLESIKKNKVCLKGGLKTPVGGGVSSLNVNLRKELDLFASLVNCFNLPGLASRHENVDIVVIRENTEGEYAGLEHEVVPGVVESLKVITKFCSERIAKYAFEYAYLNNRKKVTAVHKANIMKLADGLFLESCQEVAKKYPSIAYNEIIVDNCCMQLVARPEQFDVMVTPNLYGNLVANTAAGIAGGTGVMPGGNVGAEYAVFEQGASAGNVGKDTTEEQKNANPVALLLSSAMMLRHLQFPSFADRLETAVKRVIAEGNCRTEDLGGNSTTQEVVDAVIANLD

SEQ ID NO: 26197 - protein, 308 aa, Arabidopsis thaliana
  peptide (1)..(308): Ceres Seq. ID no. 12333184
MEAMHAPVYFEPFEVHGDMKSLPEGLLESIKKNKVCLKGGLKTPVGGGVSSLNVNLRKELDLFASLVNCFNLPGLASRHENVDIVVIRENTEGEYAGLEHEVVPGVVESLKVITKFCSERIAKYAFEYAYLNNRKKVTAVHKANIMKLADGLFLESCQEVAKKYPSIAYNEIIVDNCCMQLVARPEQFDVMVTPNLYGNLVANTAAGIAGGTGVMPGGNVGAEYAVFEQGASAGNVGKDTTEEQKNANPVALLLSSAMMLRHLQFPSFADRLETAVKRVIAEGNCRTEDLGGNSTTQEVVDAVIANLD

SEQ ID NO: 26198 - DNA, 931 bp, Arabidopsis thaliana
  misc_feature (1)..(931): Ceres Seq. ID no. 12323674
  misc_feature (1)..(931): Ortholog of  Ceres SEQ ID NO 14304569 as cited in SEQ ID NO 53472
  misc_feature (1)..(931): Ortholog of  Ceres SEQ ID NO 13584234 as cited in SEQ ID NO 64110
agatcctcgattccttcgttttctcgcttatcagtgcgatcaatggcggattcagctttcaggaaaattcagatccaaagagatgacactacatttgatgcctatgtggtcggtaaagatgatgcgcctgggattgtggtgattcaagaatggtggggtgttgactttgagatcaagaaccatgctattaaaatctcacaacttgagcctggattcaaagcccttatacctgacttgtatcgaggaaaggttggtttggatactgcagaggcacagcatctaatggatggccttgattggccaggtgctatcaaagatatccgcgcttctgttaattggctaaaatccaatggctcaaaaaaggttggtgccactggaatgtgcatgggaggtgcattagctatagctagctctgtattggttcctgaggtggatgctgttgttggattctatggaaccccttcctcagagctcgcagatccagcacaagctaaggcacctattcaggctcattttggagagctcgacaattttgttggtttttctgatgtcacggcagcaaagaatctcgaagagaagctgaaagcgtctggagtagcacatgaagttcacatctatccaggtaatggacacgcgttcttgaacaggagtccagaaggagtgagcagaaggaaaagcatgggactttctgatgaagatgaagccgcagtggagcttgcttggtctcgcttcacctcctggatgaaacagtacttggcttaagctttcttccatcaggcagcaatggttgatgtaagtcccaaaacgttgtgtgatgcccaatcatctttaaataaggacattgctcttagaacttttaatctgaaccaaataaagaggtttgttcacttgtgaatcagtattgagtggaaatgttcgaagccttttttgc

SEQ ID NO: 26199 - protein, 253 aa, Arabidopsis thaliana
  peptide (1)..(253): Ceres Seq. ID no. 12323675
RSSIPSFSRLSVRSMADSAFRKIQIQRDDTTFDAYVVGKDDAPGIVVIQEWWGVDFEIKNHAIKISQLEPGFKALIPDLYRGKVGLDTAEAQHLMDGLDWPGAIKDIRASVNWLKSNGSKKVGATGMCMGGALAIASSVLVPEVDAVVGFYGTPSSELADPAQAKAPIQAHFGELDNFVGFSDVTAAKNLEEKLKASGVAHEVHIYPGNGHAFLNRSPEGVSRRKSMGLSDEDEAAVELAWSRFTSWMKQYLA

SEQ ID NO: 26200 - protein, 239 aa, Arabidopsis thaliana
  peptide (1)..(239): Ceres Seq. ID no. 12323676
MADSAFRKIQIQRDDTTFDAYVVGKDDAPGIVVIQEWWGVDFEIKNHAIKISQLEPGFKALIPDLYRGKVGLDTAEAQHLMDGLDWPGAIKDIRASVNWLKSNGSKKVGATGMCMGGALAIASSVLVPEVDAVVGFYGTPSSELADPAQAKAPIQAHFGELDNFVGFSDVTAAKNLEEKLKASGVAHEVHIYPGNGHAFLNRSPEGVSRRKSMGLSDEDEAAVELAWSRFTSWMKQYLA

SEQ ID NO: 26201 - protein, 159 aa, Arabidopsis thaliana
  peptide (1)..(159): Ceres Seq. ID no. 12323677
MDGLDWPGAIKDIRASVNWLKSNGSKKVGATGMCMGGALAIASSVLVPEVDAVVGFYGTPSSELADPAQAKAPIQAHFGELDNFVGFSDVTAAKNLEEKLKASGVAHEVHIYPGNGHAFLNRSPEGVSRRKSMGLSDEDEAAVELAWSRFTSWMKQYLA

SEQ ID NO: 26202 - DNA, 946 bp, Arabidopsis thaliana
  misc_feature (1)..(946): Ceres Seq. ID no. 13487250
  misc_feature (1)..(946): Ortholog of  Ceres SEQ ID NO 13597542 as cited in SEQ ID NO 64986
agtaagtcatcatcactcagatctagtagttccacaaactcacattgggtcggatcgttgaccagaaaaacacacagagaaaggagaaaaacatgaaggagttggcgcatccgtacgttccgagagatctgaacctacccggatacgtaccaatctcaatgtcaatgtcctccatcgtctctatctacctcggttcttccctccttgttgtctccctcgtctggcttctcttcgggaggaagaaagctaaacttgataagttgcttatgtgttggtggacattcactggtctcactcatgttattctcgagggctatttcgttttctcccctgagtttttcaaggacaacacttctgcttatcttgctgaagtttggaaagaatatagcaaaggtgattcgagatacgtaggtagagattctgcagttgtatctgttgaagggatcactgctgttatcgttggcccagcttctctcctagctatttatgccattgctaaggagaagtcgtatagctacgtgcttcagcttgcgatttcggtttgccagctctacggatgtttggtttatttcattactgctatcttggaaggagacaactttgccacaaactctttctactattactcctactacatcggggctaactgttggtgggtcttgataccttcactcatttctttccgttgctggaaaaagatttgtgcagctgctgccattgccaacaacaacgtcgagacaaagacgaagaagaaaacccgttgaagcaaggatcaaactctcttttatctcttcaggttactgctgctatagcaaatgaacatgagtctccttttgcggataatttatccattttaaaaactttagctatgttgtctgtctctcttacagcaataaacttgtgaggataatttatccatttttcatatgatatttgcgcttttgtt

SEQ ID NO: 26203 - protein, 223 aa, Arabidopsis thaliana
  peptide (1)..(223): Ceres Seq. ID no. 13487251
MKELAHPYVPRDLNLPGYVPISMSMSSIVSIYLGSSLLVVSLVWLLFGRKKAKLDKLLMCWWTFTGLTHVILEGYFVFSPEFFKDNTSAYLAEVWKEYSKGDSRYVGRDSAVVSVEGITAVIVGPASLLAIYAIAKEKSYSYVLQLAISVCQLYGCLVYFITAILEGDNFATNSFYYYSYYIGANCWWVLIPSLISFRCWKKICAAAAIANNNVETKTKKKTR

SEQ ID NO: 26204 - protein, 201 aa, Arabidopsis thaliana
  peptide (1)..(201): Ceres Seq. ID no. 13487252
MSMSSIVSIYLGSSLLVVSLVWLLFGRKKAKLDKLLMCWWTFTGLTHVILEGYFVFSPEFFKDNTSAYLAEVWKEYSKGDSRYVGRDSAVVSVEGITAVIVGPASLLAIYAIAKEKSYSYVLQLAISVCQLYGCLVYFITAILEGDNFATNSFYYYSYYIGANCWWVLIPSLISFRCWKKICAAAAIANNNVETKTKKKTR

SEQ ID NO: 26205 - protein, 199 aa, Arabidopsis thaliana
  peptide (1)..(199): Ceres Seq. ID no. 13487253
MSSIVSIYLGSSLLVVSLVWLLFGRKKAKLDKLLMCWWTFTGLTHVILEGYFVFSPEFFKDNTSAYLAEVWKEYSKGDSRYVGRDSAVVSVEGITAVIVGPASLLAIYAIAKEKSYSYVLQLAISVCQLYGCLVYFITAILEGDNFATNSFYYYSYYIGANCWWVLIPSLISFRCWKKICAAAAIANNNVETKTKKKTR

SEQ ID NO: 26206 - DNA, 916 bp, Arabidopsis thaliana
  misc_feature (1)..(916): Ceres Seq. ID no. 13499613
  misc_feature (1)..(916): Ortholog of  Ceres SEQ ID NO 13595808 as cited in SEQ ID NO 50995
  misc_feature (1)..(916): Ortholog of  Ceres SEQ ID NO 12609096 as cited in SEQ ID NO 52019
  misc_feature (1)..(916): Ortholog of  Ceres SEQ ID NO 15177207 as cited in SEQ ID NO 58287
  misc_feature (1)..(916): Ortholog of  Ceres SEQ ID NO 15178854 as cited in SEQ ID NO 0
aatcaagaaaagctctgtaacattattatcaatcgaaattccaaccgactcaacaatgtcttcatccaacgcctgcgcctctccgtcaccgttccccgccgtcacgaagcttcatgtagactccgtcacgtttgtaccgtccgtcaagtcaccggcctcctccaatccattattcctcggcggcgccggtgtccgaggccttgatatccaaggtaaattcgtgatcttcaccgtcattggagtatacctagagggtaacgccgttccttctctatctgtcaagtggaagggaaaaactacggaggagctaacagaatctatcccgttcttccgtgaaatagtcaccggtgcgtttgagaagtttatcaaggtgacaatgaaactgccgttaacgggacaacaatattcggagaaagtgacggagaattgtgtggctatatggaaacaattagggctttatacggactgtgaagctaaagctgtggagaagttcttggagatcttcaaggaagaaacattccctcccggttcatcgatcctcttcgctctctcccctaccggctctcttacggttgcgttttcgaaagatgatagtatccctgaaaccgggatcgctgtgatcgagaacaaattgttggcggaggcggttctggaatctatcatcgggaagaacggtgtgtcacctggcactaggttaagtgttgcagaaagattatctcagctaatgatgaagaacaaggacgaaaaggaagttagtgatcactctgttgaggaaaaactagccaaagagaactgagaatgatagatttttcttgtgtttttgtcattttctatttcttatgttttctatatctaatttcttatgcggtactcaagtggagaataaagaacatgcatttacattataataaagttt

SEQ ID NO: 26207 - protein, 264 aa, Arabidopsis thaliana
  peptide (1)..(264): Ceres Seq. ID no. 13499614
IKKSSVTLLSIEIPTDSTMSSSNACASPSPFPAVTKLHVDSVTFVPSVKSPASSNPLFLGGAGVRGLDIQGKFVIFTVIGVYLEGNAVPSLSVKWKGKTTEELTESIPFFREIVTGAFEKFIKVTMKLPLTGQQYSEKVTENCVAIWKQLGLYTDCEAKAVEKFLEIFKEETFPPGSSILFALSPTGSLTVAFSKDDSIPETGIAVIENKLLAEAVLESIIGKNGVSPGTRLSVAERLSQLMMKNKDEKEVSDHSVEEKLAKEN

SEQ ID NO: 26208 - protein, 246 aa, Arabidopsis thaliana
  peptide (1)..(246): Ceres Seq. ID no. 13499615
MSSSNACASPSPFPAVTKLHVDSVTFVPSVKSPASSNPLFLGGAGVRGLDIQGKFVIFTVIGVYLEGNAVPSLSVKWKGKTTEELTESIPFFREIVTGAFEKFIKVTMKLPLTGQQYSEKVTENCVAIWKQLGLYTDCEAKAVEKFLEIFKEETFPPGSSILFALSPTGSLTVAFSKDDSIPETGIAVIENKLLAEAVLESIIGKNGVSPGTRLSVAERLSQLMMKNKDEKEVSDHSVEEKLAKEN

SEQ ID NO: 26209 - protein, 139 aa, Arabidopsis thaliana
  peptide (1)..(139): Ceres Seq. ID no. 13499616
MKLPLTGQQYSEKVTENCVAIWKQLGLYTDCEAKAVEKFLEIFKEETFPPGSSILFALSPTGSLTVAFSKDDSIPETGIAVIENKLLAEAVLESIIGKNGVSPGTRLSVAERLSQLMMKNKDEKEVSDHSVEEKLAKEN

SEQ ID NO: 26210 - DNA, 1004 bp, Arabidopsis thaliana
  misc_feature (1)..(1004): Ceres Seq. ID no. 12385807
  misc_feature (1)..(1004): Ortholog of  Ceres SEQ ID NO 13597333 as cited in SEQ ID NO 63974
  misc_feature (1)..(1004): Ortholog of  Ceres SEQ ID NO 13599307 as cited in SEQ ID NO 0
aaaaacaaacaaaaaaatcagtgttcggctctaacacgctcgacgaccatggcggtctcgtttaatacaacgcttcaccagccttctctgagtccgagctgtagcatcaagctttattctgggttaaagcctcaatctgcaagctttttggcaagtgggtatcagaatttgaacaaggagttctatggaagagtttataagagtctgcaatctgggactgggaaagcgagcaggtcacgggtaaagatgatgccaataggaacaccgagagtaccctacagaaaccgagaagaagggacttggcaatgggttgatatatggaatgccctttatcgagagcgtgtaatcttcattggacaaaacattgatgaagagtttagcaaccagatattagcaaccatgttgtaccttgatactcttgatgactcgaggaggatttatatgtacctaaatggtccgggtggtgatcttactccaagtctagccatctatgatacaatgaagagcttgaaaagtccggttgggacacattgcgttgggcttgcttacaaccttgcaggttttcttcttgcggctggagaaaagggtcaccgatttgcgatgccattatcaagaatcgccctccagtcaccagctggtgcagcccgtggtcaggctgatgatatccaaaatgaagcaaaagagctttcaaggataagagactacctcttcaatgaactagccaagaatacaggccagcctgcggaaagggtcttcaaagacttgagccgggtgaaaaggttcaatgcagaggaagcaatcgagtatggacttattgataagattgttagaccaccgcgcatcaaagaagacgctcctcgccaagacgaaagcgcagggctaggctagtctttttgtttgtttgttatgtcaaaagttttaatctttatgttattgtgattgtgattgttacctaaaaaaatcactgattattgttttttcattccaccgattttctgatttct

SEQ ID NO: 26211 - protein, 295 aa, Arabidopsis thaliana
  peptide (1)..(295): Ceres Seq. ID no. 12385808
KNKQKNQCSALTRSTTMAVSFNTTLHQPSLSPSCSIKLYSGLKPQSASFLASGYQNLNKEFYGRVYKSLQSGTGKASRSRVKMMPIGTPRVPYRNREEGTWQWVDIWNALYRERVIFIGQNIDEEFSNQILATMLYLDTLDDSRRIYMYLNGPGGDLTPSLAIYDTMKSLKSPVGTHCVGLAYNLAGFLLAAGEKGHRFAMPLSRIALQSPAGAARGQADDIQNEAKELSRIRDYLFNELAKNTGQPAERVFKDLSRVKRFNAEEAIEYGLIDKIVRPPRIKEDAPRQDESAGLG

SEQ ID NO: 26212 - protein, 279 aa, Arabidopsis thaliana
  peptide (1)..(279): Ceres Seq. ID no. 12385809
MAVSFNTTLHQPSLSPSCSIKLYSGLKPQSASFLASGYQNLNKEFYGRVYKSLQSGTGKASRSRVKMMPIGTPRVPYRNREEGTWQWVDIWNALYRERVIFIGQNIDEEFSNQILATMLYLDTLDDSRRIYMYLNGPGGDLTPSLAIYDTMKSLKSPVGTHCVGLAYNLAGFLLAAGEKGHRFAMPLSRIALQSPAGAARGQADDIQNEAKELSRIRDYLFNELAKNTGQPAERVFKDLSRVKRFNAEEAIEYGLIDKIVRPPRIKEDAPRQDESAGLG

SEQ ID NO: 26213 - protein, 213 aa, Arabidopsis thaliana
  peptide (1)..(213): Ceres Seq. ID no. 12385810
MMPIGTPRVPYRNREEGTWQWVDIWNALYRERVIFIGQNIDEEFSNQILATMLYLDTLDDSRRIYMYLNGPGGDLTPSLAIYDTMKSLKSPVGTHCVGLAYNLAGFLLAAGEKGHRFAMPLSRIALQSPAGAARGQADDIQNEAKELSRIRDYLFNELAKNTGQPAERVFKDLSRVKRFNAEEAIEYGLIDKIVRPPRIKEDAPRQDESAGLG

SEQ ID NO: 26214 - DNA, 1011 bp, Arabidopsis thaliana
  misc_feature (1)..(1011): Ceres Seq. ID no. 12323753
  misc_feature (1)..(1011): Ortholog of  Ceres SEQ ID NO 13594992 as cited in SEQ ID NO 55798
  misc_feature (1)..(1011): Ortholog of  Ceres SEQ ID NO 14308171 as cited in SEQ ID NO 58912
gataaggctcttttccactgtcttccctccattttctccgagtaactgagagtttgctgcagctatggcgatgagctttcatcgtcttcctcaggcattgcatatgatacccagaaaccctacgcaatcatcgaagaatttagggttttcttcgtttctatcgtgtgcaccatcgatggattctcgtatatcagtttctaggctttctctgaatcatcccggctcgaaatttgggttctcactcgatactagggtgagaaatgagtttatcgttagagcagaagaaggtaacacagaagctgaatctgaagaatttgttgctgaaatcgctgatacggaaggaaatgtagaggaagtggtcgaagctaaacctacaagaaaacctaggatcaagctcggagatgtcatggggatactgaaccagaaagcaattgaggtagcagagaaagtgagacctgttccagaaatcaggacaggagatattgtagaaatcaaattggaagttcctgagaacaaacgtaggctatctatctacaaaggcatagtgatgtcgagacaaaatgcaggcatacacactaccattcgtattcggagaattattgcgggtatcggtgttgaaattgtgtttcccatatactctcccaacatcaaagagataaaagtggtgagtcacaggaaagtaagaagagcaaggctttactatctgagggacaagcttcctcgtctgtccactttcaagtgaacaccatccaccgtgctgtgtttgacctccagaggtagtaatcttccgcattgtgctctttttttgtaagaattgtttctttctttcttttttttaagcctgtaagtcattccctgcacattttctgagaaagtaaattaagattagttgaacttccggttgatggatgtagacctgttccttgtttgataatgaatgatatatggcttaggatgacctaaagtccatactttaatagaaactatgtatgaatgagtctgtgttctgtg

SEQ ID NO: 26215 - protein, 225 aa, Arabidopsis thaliana
  peptide (1)..(225): Ceres Seq. ID no. 12323754
MAMSFHRLPQALHMIPRNPTQSSKNLGFSSFLSCAPSMDSRISVSRLSLNHPGSKFGFSLDTRVRNEFIVRAEEGNTEAESEEFVAEIADTEGNVEEVVEAKPTRKPRIKLGDVMGILNQKAIEVAEKVRPVPEIRTGDIVEIKLEVPENKRRLSIYKGIVMSRQNAGIHTTIRIRRIIAGIGVEIVFPIYSPNIKEIKVVSHRKVRRARLYYLRDKLPRLSTFK

SEQ ID NO: 26216 - protein, 223 aa, Arabidopsis thaliana
  peptide (1)..(223): Ceres Seq. ID no. 12323755
MSFHRLPQALHMIPRNPTQSSKNLGFSSFLSCAPSMDSRISVSRLSLNHPGSKFGFSLDTRVRNEFIVRAEEGNTEAESEEFVAEIADTEGNVEEVVEAKPTRKPRIKLGDVMGILNQKAIEVAEKVRPVPEIRTGDIVEIKLEVPENKRRLSIYKGIVMSRQNAGIHTTIRIRRIIAGIGVEIVFPIYSPNIKEIKVVSHRKVRRARLYYLRDKLPRLSTFK

SEQ ID NO: 26217 - protein, 212 aa, Arabidopsis thaliana
  peptide (1)..(212): Ceres Seq. ID no. 12323756
MIPRNPTQSSKNLGFSSFLSCAPSMDSRISVSRLSLNHPGSKFGFSLDTRVRNEFIVRAEEGNTEAESEEFVAEIADTEGNVEEVVEAKPTRKPRIKLGDVMGILNQKAIEVAEKVRPVPEIRTGDIVEIKLEVPENKRRLSIYKGIVMSRQNAGIHTTIRIRRIIAGIGVEIVFPIYSPNIKEIKVVSHRKVRRARLYYLRDKLPRLSTFK

SEQ ID NO: 26218 - DNA, 1029 bp, Arabidopsis thaliana
  misc_feature (1)..(1029): Ceres Seq. ID no. 12370220
  misc_feature (1)..(1029): Ortholog of  Ceres SEQ ID NO 12557432 as cited in SEQ ID NO 92
  misc_feature (1)..(1029): Ortholog of  Ceres SEQ ID NO 13598045 as cited in SEQ ID NO 66822
aagttcacaagtttcgttaaatcaagcaccaagttctcagcgaaatcaaggaatcgaaaacccagaagagaactcagagtagaaaattttctccagctttttcaaaatgtctcggaggtatgatagtcgcaccacgatcttctcaccggaaggtcgtctctaccaagttgaatatgctatggaagctattggcaatgctggttctgcgattggaatcttagcaaaagatggagttgtgttgattggtgagaagaaagtcacttctaaacttcttcaaacctcttcatccatggagaaaatgtacaagatcgatggccatgtggcttgtgcagtggctggtataatgtctgatgccaacattctgattaacactgctcgagttcaagctcagcgttacacctttatgtaccaagagccaatgcctgttgagcagctggttcagtctctatgtgacaccaagcaaggatacacccagtttggtggtctccgcccgtttggagtttcctttctatttgcaggctgggacaggaaccacgggtttcagctgtatatgagtgacccaagtggaaactatggtggatggaaagctgcagctgttggagcaaataatcaagcggctcagtctattcttaagcaagactataaggatgatgcaacgagggaagaagtggttcagctcgctatcaaggttttgagcaagacgatggacagcacgagcttgacagctgaaaaactcgagcttgctgagttgtatctgactccttcaaaatgtgttaagtaccatgttcactcgcctgactcgctcactaagctcttggttaagcatggtgtgactcaaccagccgcagaaacttcctaagcttgaaactggtgacagttttatctgacccgcctggttactgtagatgtccatttgatttatttccctttggatttaaagatatcgtatcagaaacaatttaccactctgattatgtcatgtgattcatttgggttgactatcttttatcttgagattgatcttcttcc

SEQ ID NO: 26219 - protein, 250 aa, Arabidopsis thaliana
  peptide (1)..(250): Ceres Seq. ID no. 12370221
MSRRYDSRTTIFSPEGRLYQVEYAMEAIGNAGSAIGILAKDGVVLIGEKKVTSKLLQTSSSMEKMYKIDGHVACAVAGIMSDANILINTARVQAQRYTFMYQEPMPVEQLVQSLCDTKQGYTQFGGLRPFGVSFLFAGWDRNHGFQLYMSDPSGNYGGWKAAAVGANNQAAQSILKQDYKDDATREEVVQLAIKVLSKTMDSTSLTAEKLELAELYLTPSKCVKYHVHSPDSLTKLLVKHGVTQPAAETS

SEQ ID NO: 26220 - protein, 226 aa, Arabidopsis thaliana
  peptide (1)..(226): Ceres Seq. ID no. 12370222
MEAIGNAGSAIGILAKDGVVLIGEKKVTSKLLQTSSSMEKMYKIDGHVACAVAGIMSDANILINTARVQAQRYTFMYQEPMPVEQLVQSLCDTKQGYTQFGGLRPFGVSFLFAGWDRNHGFQLYMSDPSGNYGGWKAAAVGANNQAAQSILKQDYKDDATREEVVQLAIKVLSKTMDSTSLTAEKLELAELYLTPSKCVKYHVHSPDSLTKLLVKHGVTQPAAETS

SEQ ID NO: 26221 - protein, 189 aa, Arabidopsis thaliana
  peptide (1)..(189): Ceres Seq. ID no. 12370223
MEKMYKIDGHVACAVAGIMSDANILINTARVQAQRYTFMYQEPMPVEQLVQSLCDTKQGYTQFGGLRPFGVSFLFAGWDRNHGFQLYMSDPSGNYGGWKAAAVGANNQAAQSILKQDYKDDATREEVVQLAIKVLSKTMDSTSLTAEKLELAELYLTPSKCVKYHVHSPDSLTKLLVKHGVTQPAAETS

SEQ ID NO: 26222 - DNA, 557 bp, Arabidopsis thaliana
  misc_feature (1)..(557): Ceres Seq. ID no. 12331723
  misc_feature (1)..(557): Ortholog of  Ceres SEQ ID NO 12587416 as cited in SEQ ID NO 68868
  misc_feature (1)..(557): Ortholog of  Ceres SEQ ID NO 13600689 as cited in SEQ ID NO 0
attttctcaattattccttttgacttcgccgcttgcttttgagagacggagacaaaaacacacacgacgaagaaatctccgggcggtcgaagaagatgaaatcgttcaaggaacaatacacgttggatgaaaggctcgcggagtcgcgggagataatcgctaagtaccctactcggattccagtaattgctgagaagtattgcaaaacggatctgcctgccatcgagaaaaagaagtttctggttccaagagatatgtcagttggccaattcatctacatattgagtgctaggttacatttgtctcctggtaaagccttattcgtgtttgtcaacaacactctccctcaaactgctgctctgatggactcggtctacgaatcttacaaagatgatgatggattcgtttacatgtgctatagcagtgagaaaacctttggttgatccaataatgatgttagtgtctgtgtacatatactttaaacataagatgttcactacatcaaaagacatcaaacacttgttaagctttatatgactgctgcttgttttatcctt

SEQ ID NO: 26223 - protein, 115 aa, Arabidopsis thaliana
  peptide (1)..(115): Ceres Seq. ID no. 12331724
MKSFKEQYTLDERLAESREIIAKYPTRIPVIAEKYCKTDLPAIEKKKFLVPRDMSVGQFIYILSARLHLSPGKALFVFVNNTLPQTAALMDSVYESYKDDDGFVYMCYSSEKTFG

SEQ ID NO: 26224 - protein, 62 aa, Arabidopsis thaliana
  peptide (1)..(62): Ceres Seq. ID no. 12331725
MSVGQFIYILSARLHLSPGKALFVFVNNTLPQTAALMDSVYESYKDDDGFVYMCYSSEKTFG

SEQ ID NO: 26225 - DNA, 717 bp, Arabidopsis thaliana
  misc_feature (1)..(717): Ceres Seq. ID no. 12338728
  misc_feature (1)..(717): Ortholog of  Ceres SEQ ID NO 15176596 as cited in SEQ ID NO 55168
cttgtttatactaatgaccaaggagagactgttaaaggagtttgctcaaatttcttgtgtgatttggcacccggaagtgatgttaagctgactggtcctgtaggcaaagaaatgcttatgcctaaggatccaaacgccaccgtaattatgcttgccacagggacaggaattgctcctttcaggtctttcttatggaagatgttctttgagaaacatgatgactacaagttcaatggcttagcttggttgttcttgggtgtaccaaccactagctcattgctctaccaagaggagtttgataagatgaaagcaaaggcccccgagaacttcagggtggattacgcgataagcagagaacaagcgaacgataaaggagagaaaatgtatatccagactcggatggcacagtacgcagctgaattatgggagttgttgaagaaagacaacacttttgtttacatgtgtggactcaagggaatggagaaaggaattgatgacattatggtctcattggctgcaaatgacggtattgactggtttgattacaagaagcagttgaagaaggcagagcaatggaacgttgaagtctactgatcaaaaagcctttgacatttctgtagcaaagtatagctgaacaaaactgtaattttcgcttccgaatttctgtattttgaagataagttttttagatatgttatactaaaaaaagagttcttt

SEQ ID NO: 26226 - protein, 197 aa, Arabidopsis thaliana
  peptide (1)..(197): Ceres Seq. ID no. 12338729
LVYTNDQGETVKGVCSNFLCDLAPGSDVKLTGPVGKEMLMPKDPNATVIMLATGTGIAPFRSFLWKMFFEKHDDYKFNGLAWLFLGVPTTSSLLYQEEFDKMKAKAPENFRVDYAISREQANDKGEKMYIQTRMAQYAAELWELLKKDNTFVYMCGLKGMEKGIDDIMVSLAANDGIDWFDYKKQLKKAEQWNVEVY

SEQ ID NO: 26227 - protein, 160 aa, Arabidopsis thaliana
  peptide (1)..(160): Ceres Seq. ID no. 12338731
MLMPKDPNATVIMLATGTGIAPFRSFLWKMFFEKHDDYKFNGLAWLFLGVPTTSSLLYQEEFDKMKAKAPENFRVDYAISREQANDKGEKMYIQTRMAQYAAELWELLKKDNTFVYMCGLKGMEKGIDDIMVSLAANDGIDWFDYKKQLKKAEQWNVEVY

SEQ ID NO: 26228 - protein, 158 aa, Arabidopsis thaliana
  peptide (1)..(158): Ceres Seq. ID no. 12338732
MPKDPNATVIMLATGTGIAPFRSFLWKMFFEKHDDYKFNGLAWLFLGVPTTSSLLYQEEFDKMKAKAPENFRVDYAISREQANDKGEKMYIQTRMAQYAAELWELLKKDNTFVYMCGLKGMEKGIDDIMVSLAANDGIDWFDYKKQLKKAEQWNVEVY

SEQ ID NO: 26229 - DNA, 1294 bp, Arabidopsis thaliana
  misc_feature (1)..(1294): Ceres Seq. ID no. 12325578
  misc_feature (1)..(1294): Ortholog of  Ceres SEQ ID NO 13581848 as cited in SEQ ID NO 51340
  misc_feature (1)..(1294): Ortholog of  Ceres SEQ ID NO 13595392 as cited in SEQ ID NO 56164
  misc_feature (1)..(1294): Ortholog of  Ceres SEQ ID NO 14316412 as cited in SEQ ID NO 59209
  misc_feature (1)..(1294): Ortholog of  Ceres SEQ ID NO 12618341 as cited in SEQ ID NO 64256
acccgtaatctcaatcacaaactatttccccccttcgttcatcaaatcctcaagagaaaaaaaaaatccccaaaagcttcctcaaaaccctaacacagatctctcgatcttctccgatctgtcttttctcctaatctggtttagtttgatttaattggattgaagatgtcagacgctttgaatatgactcttgatgaaattgtgaagaagagtaagagtgaaaggtctgcagctgcaaggtctggaggtaaaggagtttcccgtaagagtggacgtggacgtggtggacctaatggtgttgtaggagctggaagaggaggtggacctgttcgtagaggtcctcttgctgttaatactcggccatcatcatccttctccataaacaagcttgcccgcaggaagaggagcttgccatggcagaatcagaatgattgtatgaagaaacccttagagctgttggggtgtcaggagtggaagtcggaaccacagtttatattaccaaccttgatcagggagtgacaaatgaagatataagggaactctatgctgagattggagagctgaaaagatatgcaattcactatgacaaaaatgggcgtccaagtggatcggctgaagttgtgtatatgagaagaagtgatgcaattcaagctatgaggaaatacaacaatgtacttttggatggaaggcctatgaaactggagattctgggtggaagtactgaatctgctcctgtcgcagctcgtgttaatgtgactggattgaatggaaggatgaagaggagtgtcttcattggacaaggagttagaggtgggagagtaggaagaggaagaggttcaggtccttctggaagacgccttccagtccaacaaaaccaacaaggtggtcgaggtggtcgaggcggggtccgtggtagaggcagaggtgctggtggaggcagagggaataaaagtggtggccgaggtggaaagaagccggtggagaagtctgctgcggatctcgacaaagatctcgaaagctatcatgctgaagctatgaacatctcttaaagcaagacttcgcatcttgtcatgtacttttgtgttctttattcgtagtctctgactaaatatgtgccaaagtctggtttggtttaattacgtttaggatggctctactctgctttcgttttcctcttttcttgtttcacactttcacagtcacttttggttattgaagttaaaagagatttagctgtaaatgagaaagctgttcttgttagttggttgaatctaatcatatacgaatttatctt

SEQ ID NO: 26230 - protein, 140 aa, Arabidopsis thaliana
  peptide (1)..(140): Ceres Seq. ID no. 12325579
MRRSDAIQAMRKYNNVLLDGRPMKLEILGGSTESAPVAARVNVTGLNGRMKRSVFIGQGVRGGRVGRGRGSGPSGRRLPVQQNQQGGRGGRGGVRGRGRGAGGGRGNKSGGRGGKKPVEKSAADLDKDLESYHAEAMNIS

SEQ ID NO: 26231 - protein, 131 aa, Arabidopsis thaliana
  peptide (1)..(131): Ceres Seq. ID no. 12325580
MRKYNNVLLDGRPMKLEILGGSTESAPVAARVNVTGLNGRMKRSVFIGQGVRGGRVGRGRGSGPSGRRLPVQQNQQGGRGGRGGVRGRGRGAGGGRGNKSGGRGGKKPVEKSAADLDKDLESYHAEAMNIS

SEQ ID NO: 26232 - protein, 118 aa, Arabidopsis thaliana
  peptide (1)..(118): Ceres Seq. ID no. 12325581
MKLEILGGSTESAPVAARVNVTGLNGRMKRSVFIGQGVRGGRVGRGRGSGPSGRRLPVQQNQQGGRGGRGGVRGRGRGAGGGRGNKSGGRGGKKPVEKSAADLDKDLESYHAEAMNIS

SEQ ID NO: 26233 - DNA, 1524 bp, Arabidopsis thaliana
  misc_feature (1)..(1524): Ceres Seq. ID no. 13489966
  misc_feature (1)..(1524): Ortholog of  Ceres SEQ ID NO 15176835 as cited in SEQ ID NO 1046
  misc_feature (1)..(1524): Ortholog of  Ceres SEQ ID NO 14315403 as cited in SEQ ID NO 59259
aaaatcacatttcacacgaaaaacctcgagtgagtgaagaaacaatggcagctatgaagctcctactctctcaagctcgccgccaaggtctaatcaaacccttttcgtctccatttcaacaaatcccaagactcttctcttcatcttcatcttcatcttcatcttcatcttcatcatccgattcgaatccatctcccgattcaaacgaatctcgcaaaaaggctgttacaatcgagccagtatcgtacgcggccaaacccaaggatcagaaatctgaaccgaaaaatgttgaatcgacggagaaccttcagtctccagaatcagcgaactggactcgtgaagaaatccgatatgtgaaagactctccttcgatcaatccggtttcttacgctcagcgtgtggctccacttccggaggatcgtgtcgccggtgagaatgaaggagatagaactccagaggagatggagagggagaggaagaggattgaattagagaatcgagctagaagaaggtttttaagagctaatgctgttgaagaagatacttcttcacttcctttgccaactttgcttaaaccagagttgaagcatggaaagaaacctattttcgatctcatggaggccattagagagattaagggcaatgccaaggcgaaatttgatgaaactcttgaggcgcatgtgagattgggcattgaaaaaggaagatctgagctgatagttcgtggtactttggctctaccccactctgttaagaaggatgtgaaagtggctttctttgccgagggagctgatgcagaggatgcaaaagctgcaggagctgatgtcgttggtggtcttgagcttattgaagagatcttgaaaagtggcaagattgactttgatagatgtcttgcaactccaaaaatgatgccccgtgtttacaagatatcaagaattcttaacaatcatggtttgatgccaaaccccaaacaaggtagtgtgaccaaggatgttacgaaagcagtcaaagacgcaaaagctggacataccaaatttagaatggataaaacgtctattcttcatgtgccacttggaaagatgagcttttctgaagaggctttacgagagaatgttggtgcgtttatgaacgcccttttgctagcgaagcctgctggattgaaaaagacttcaaaatatgctggttatgtgaatgcattccacttatgcagtacgatgggaaagggttatccagtatcgatacagtcgttatccagagcagcggacctccataccaaattgcagctcaagtgagctagtggagtccaaaagattaatcttaatcatcccgtaaaagttttttttactgttttccaaatgctgaatctttgaaaacattatgatttgttgtctcttaggtagtctattgctcaattgatcgaattggcttctgtccttttctcctttgtttttgttgtttgagagcttatcatccactttccatagaggcccttcacttgaataaaacatcataaatttttgtccg

SEQ ID NO: 26234 - protein, 429 aa, Arabidopsis thaliana
  peptide (1)..(429): Ceres Seq. ID no. 13489967
NHISHEKPRVSEETMAAMKLLLSQARRQGLIKPFSSPFQQIPRLFSSSSSSSSSSSSSSDSNPSPDSNESRKKAVTIEPVSYAAKPKDQKSEPKNVESTENLQSPESANWTREEIRYVKDSPSINPVSYAQRVAPLPEDRVAGENEGDRTPEEMERERKRIELENRARRRFLRANAVEEDTSSLPLPTLLKPELKHGKKPIFDLMEAIREIKGNAKAKFDETLEAHVRLGIEKGRSELIVRGTLALPHSVKKDVKVAFFAEGADAEDAKAAGADVVGGLELIEEILKSGKIDFDRCLATPKMMPRVYKISRILNNHGLMPNPKQGSVTKDVTKAVKDAKAGHTKFRMDKTSILHVPLGKMSFSEEALRENVGAFMNALLLAKPAGLKKTSKYAGYVNAFHLCSTMGKGYPVSIQSLSRAADLHTKLQLK

SEQ ID NO: 26235 - protein, 415 aa, Arabidopsis thaliana
  peptide (1)..(415): Ceres Seq. ID no. 13489968
MAAMKLLLSQARRQGLIKPFSSPFQQIPRLFSSSSSSSSSSSSSSDSNPSPDSNESRKKAVTIEPVSYAAKPKDQKSEPKNVESTENLQSPESANWTREEIRYVKDSPSINPVSYAQRVAPLPEDRVAGENEGDRTPEEMERERKRIELENRARRRFLRANAVEEDTSSLPLPTLLKPELKHGKKPIFDLMEAIREIKGNAKAKFDETLEAHVRLGIEKGRSELIVRGTLALPHSVKKDVKVAFFAEGADAEDAKAAGADVVGGLELIEEILKSGKIDFDRCLATPKMMPRVYKISRILNNHGLMPNPKQGSVTKDVTKAVKDAKAGHTKFRMDKTSILHVPLGKMSFSEEALRENVGAFMNALLLAKPAGLKKTSKYAGYVNAFHLCSTMGKGYPVSIQSLSRAADLHTKLQLK

SEQ ID NO: 26236 - protein, 412 aa, Arabidopsis thaliana
  peptide (1)..(412): Ceres Seq. ID no. 13489969
MKLLLSQARRQGLIKPFSSPFQQIPRLFSSSSSSSSSSSSSSDSNPSPDSNESRKKAVTIEPVSYAAKPKDQKSEPKNVESTENLQSPESANWTREEIRYVKDSPSINPVSYAQRVAPLPEDRVAGENEGDRTPEEMERERKRIELENRARRRFLRANAVEEDTSSLPLPTLLKPELKHGKKPIFDLMEAIREIKGNAKAKFDETLEAHVRLGIEKGRSELIVRGTLALPHSVKKDVKVAFFAEGADAEDAKAAGADVVGGLELIEEILKSGKIDFDRCLATPKMMPRVYKISRILNNHGLMPNPKQGSVTKDVTKAVKDAKAGHTKFRMDKTSILHVPLGKMSFSEEALRENVGAFMNALLLAKPAGLKKTSKYAGYVNAFHLCSTMGKGYPVSIQSLSRAADLHTKLQLK

SEQ ID NO: 26237 - DNA, 2062 bp, Arabidopsis thaliana
  misc_feature (1)..(2062): Ceres Seq. ID no. 13491352
  misc_feature (1)..(2062): Ortholog of  Ceres SEQ ID NO 14315469 as cited in SEQ ID NO 57169
  misc_feature (1)..(2062): Ortholog of  Ceres SEQ ID NO 13657008 as cited in SEQ ID NO 69164
atgcggtctgggagaagaccacaaggaagaagaatagctataaggaacgaaacagagacggaattgagatcgagaatcggagagaaatcgggatcggagaagcggaatctgatcggatctgatgttgggatgcagcttcacatatcgccgagtatgagaagcattacgatttcgagcagcaatgagtttattgacttgatgaagatcaaggtcgcagctcgtcacatctcttaccgaactctcttccacaccatcttaatcctcgctttcttgttgccttttgttttcattctcaccgctgttgttacccttgagggtgtcaacaaatgctcctccattgggaggcggataggtccacgtcttcttggtagggtagatgattcagagagactagctagagacttttataaaattctaaacgaagtaagcactcaagaaattccagatggtttgaagcttccaaattcttttagtcaacttgtttccgatatgaagaataaccactatgatgcaaaaacatttgctcttgtgctgcgagccatgatggagaagtttgaacgtgatatgagggaatcgaaatttgcagaacttatgaacaagcactttgcagcaagttccattcccaaaggcattcattgtctctctctaagactgacagatgaatattcctccaatgctcatgctcgaagacagcttccttcaccagagtttctccctgttctttcagataatgcttaccaccactttattttgtccacggacaatattttggctgcctcagttgtggtctcatccgctgttcagtcatcttcaaaacccgagaaaattgtctttcacatcattacagacaagaaaacctatgcgggtatgcattcatggtttgcgcttaattctgttgcaccagcaattgttgaggttaaaggtgttcatcagtttgactggttgacgagagagaatgttccggttttggaagctgtggaaagccataatggtgtcagggactattatcatgggaatcatgtcgctggggcaaacctcaccgaaacaactcctcgaacatttgcttcaaaattgcagtctagaagtccaaaatacatatctttgctcaaccatcttagaatatatataccagagcttttcccgaacttggacaaggtggttttcttagacgatgatatagttgtccagggagacttaactccactttgggatgttgacctcggtggtaaggtcaatggggcagtagagacttgcaggggtgaagatgaatgggtgatgtcaaagcgtttaaggaactacttcaatttctctcacccgctcatcgcaaagcatttagatcctgaagaatgtgcttgggcatatggtatgaatatcttcgatctacaagcttggaggaaaacaaatatcagagaaacgtatcactcttggcttagagagaatctaaagtcaaatctgacaatgtggaaacttggaaccttgcctcctgctcttatcgcgttcaagggtcacgtacacataatagactcgtcatggcatatgctaggattaggctaccagagcaagaccaacatagaaaatgtgaagaaagcagcagtgatccactacaatgggcagtcaaagccatggctggagattggtttcgagcatctgcggccattctggaccaaatacgtcaactactcaaatgatttcatcaagaactgtcacatattggagtaggaaaaccgaaactttgagatgatcatgaaggtaagagttacaggtgtatgatcatgaaggtagttacaggtgtaaaagaggagaagtagtaaaaaagacaaggcagtctgcagatattacactcagtctaaagaaggaagaatcagaaatttagtttgccacatacataagagaaacttggttgcagcgaagggaaggttgcataacagaaagagagagagagagataaagattcattctttctgtaaaatagaaggttaccctttttttgaaattcttttggagaatccaattcttgaatctttttataagaatggggaaagaaagattgggtttataattc

SEQ ID NO: 26238 - protein, 572 aa, Arabidopsis thaliana
  peptide (1)..(572): Ceres Seq. ID no. 13491353
MRSGRRPQGRRIAIRNETETELRSRIGEKSGSEKRNLIGSDVGMQLHISPSMRSITISSSNEFIDLMKIKVAARHISYRTLFHTILILAFLLPFVFILTAVVTLEGVNKCSSIGRRIGPRLLGRVDDSERLARDFYKILNEVSTQEIPDGLKLPNSFSQLVSDMKNNHYDAKTFALVLRAMMEKFERDMRESKFAELMNKHFAASSIPKGIHCLSLRLTDEYSSNAHARRQLPSPEFLPVLSDNAYHHFILSTDNILAASVVVSSAVQSSSKPEKIVFHIITDKKTYAGMHSWFALNSVAPAIVEVKGVHQFDWLTRENVPVLEAVESHNGVRDYYHGNHVAGANLTETTPRTFASKLQSRSPKYISLLNHLRIYIPELFPNLDKVVFLDDDIVVQGDLTPLWDVDLGGKVNGAVETCRGEDEWVMSKRLRNYFNFSHPLIAKHLDPEECAWAYGMNIFDLQAWRKTNIRETYHSWLRENLKSNLTMWKLGTLPPALIAFKGHVHIIDSSWHMLGLGYQSKTNIENVKKAAVIHYNGQSKPWLEIGFEHLRPFWTKYVNYSNDFIKNCHILE

SEQ ID NO: 26239 - protein, 529 aa, Arabidopsis thaliana
  peptide (1)..(529): Ceres Seq. ID no. 13491354
MQLHISPSMRSITISSSNEFIDLMKIKVAARHISYRTLFHTILILAFLLPFVFILTAVVTLEGVNKCSSIGRRIGPRLLGRVDDSERLARDFYKILNEVSTQEIPDGLKLPNSFSQLVSDMKNNHYDAKTFALVLRAMMEKFERDMRESKFAELMNKHFAASSIPKGIHCLSLRLTDEYSSNAHARRQLPSPEFLPVLSDNAYHHFILSTDNILAASVVVSSAVQSSSKPEKIVFHIITDKKTYAGMHSWFALNSVAPAIVEVKGVHQFDWLTRENVPVLEAVESHNGVRDYYHGNHVAGANLTETTPRTFASKLQSRSPKYISLLNHLRIYIPELFPNLDKVVFLDDDIVVQGDLTPLWDVDLGGKVNGAVETCRGEDEWVMSKRLRNYFNFSHPLIAKHLDPEECAWAYGMNIFDLQAWRKTNIRETYHSWLRENLKSNLTMWKLGTLPPALIAFKGHVHIIDSSWHMLGLGYQSKTNIENVKKAAVIHYNGQSKPWLEIGFEHLRPFWTKYVNYSNDFIKNCHILE

SEQ ID NO: 26240 - protein, 521 aa, Arabidopsis thaliana
  peptide (1)..(521): Ceres Seq. ID no. 13491355
MRSITISSSNEFIDLMKIKVAARHISYRTLFHTILILAFLLPFVFILTAVVTLEGVNKCSSIGRRIGPRLLGRVDDSERLARDFYKILNEVSTQEIPDGLKLPNSFSQLVSDMKNNHYDAKTFALVLRAMMEKFERDMRESKFAELMNKHFAASSIPKGIHCLSLRLTDEYSSNAHARRQLPSPEFLPVLSDNAYHHFILSTDNILAASVVVSSAVQSSSKPEKIVFHIITDKKTYAGMHSWFALNSVAPAIVEVKGVHQFDWLTRENVPVLEAVESHNGVRDYYHGNHVAGANLTETTPRTFASKLQSRSPKYISLLNHLRIYIPELFPNLDKVVFLDDDIVVQGDLTPLWDVDLGGKVNGAVETCRGEDEWVMSKRLRNYFNFSHPLIAKHLDPEECAWAYGMNIFDLQAWRKTNIRETYHSWLRENLKSNLTMWKLGTLPPALIAFKGHVHIIDSSWHMLGLGYQSKTNIENVKKAAVIHYNGQSKPWLEIGFEHLRPFWTKYVNYSNDFIKNCHILE

SEQ ID NO: 26241 - DNA, 1053 bp, Arabidopsis thaliana
  misc_feature (1)..(1053): Ceres Seq. ID no. 12331743
  misc_feature (1)..(1053): Ortholog of  Ceres SEQ ID NO 14315553 as cited in SEQ ID NO 60445
  misc_feature (1)..(1053): Ortholog of  Ceres SEQ ID NO 13598045 as cited in SEQ ID NO 66822
acagatcacacagaagcaaaaattccaactccgatttcagaagaaagttcttctcttctctgagaagaagaagaagatgagcagaggaagcggcgctggttacgatcgtcacattactattttctcaccggaaggtcgtctcttccaagtcgagtatgctttcaaagccgtgaaagcagctggaatcacatcgatcggtgtccgagggaaagattcagtatgcgtcgttacgcagaagaaagttccggacaagcttttggatcagtctagtgtatctcaccttttccctgttacaaagtaccttggattgttagccactggcatgacagctgattcaaggtcattggtacaacaagcaaggaatgaggctgctgagtttaggttccaatatggttatgagatgcctgcagatattcttgctaaatggattgcagataagtctcaggtttacacacaacatgcttacatgagaccccttggagtagttgccatggttctaggtattgatgaagagagaggacctctactttacaagtgtgacccagctggacatttttacggtcacaaggcaactagtgctggtatgaaagaacaagaagcagtcaatttcttggagaagaaaatgaaagaaaaccctgccttcacatatgatgaaacagtacagactgctatatccgctctccaatctgttcttcaagaagacttcaaagcaactgaaattgaggtgggagttgtgagagctgatgaccctctcttccgttccctgagaacagaggagatcgacgagcacttgacggccattagtgaacgtgactgatcactttcactggaacattcagtcgggactttgcatctctttcttttgctttaattctatctaagatgattcacgtttcagagaaacgtgtttccattagtcatgagtcgtgtagttttcatttgaatcatctgcttcctcctaataggagttacatgtaagggtgtcaaattaaggtcgaatgagatggtttaaggttttgaattttaaaaggcaaaacaaagaaagttatttgc

SEQ ID NO: 26242 - protein, 271 aa, Arabidopsis thaliana
  peptide (1)..(271): Ceres Seq. ID no. 12331744
QITQKQKFQLRFQKKVLLFSEKKKKMSRGSGAGYDRHITIFSPEGRLFQVEYAFKAVKAAGITSIGVRGKDSVCVVTQKKVPDKLLDQSSVSHLFPVTKYLGLLATGMTADSRSLVQQARNEAAEFRFQYGYEMPADILAKWIADKSQVYTQHAYMRPLGVVAMVLGIDEERGPLLYKCDPAGHFYGHKATSAGMKEQEAVNFLEKKMKENPAFTYDETVQTAISALQSVLQEDFKATEIEVGVVRADDPLFRSLRTEEIDEHLTAISERD

SEQ ID NO: 26243 - protein, 246 aa, Arabidopsis thaliana
  peptide (1)..(246): Ceres Seq. ID no. 12331745
MSRGSGAGYDRHITIFSPEGRLFQVEYAFKAVKAAGITSIGVRGKDSVCVVTQKKVPDKLLDQSSVSHLFPVTKYLGLLATGMTADSRSLVQQARNEAAEFRFQYGYEMPADILAKWIADKSQVYTQHAYMRPLGVVAMVLGIDEERGPLLYKCDPAGHFYGHKATSAGMKEQEAVNFLEKKMKENPAFTYDETVQTAISALQSVLQEDFKATEIEVGVVRADDPLFRSLRTEEIDEHLTAISERD

SEQ ID NO: 26244 - protein, 164 aa, Arabidopsis thaliana
  peptide (1)..(164): Ceres Seq. ID no. 12331746
MTADSRSLVQQARNEAAEFRFQYGYEMPADILAKWIADKSQVYTQHAYMRPLGVVAMVLGIDEERGPLLYKCDPAGHFYGHKATSAGMKEQEAVNFLEKKMKENPAFTYDETVQTAISALQSVLQEDFKATEIEVGVVRADDPLFRSLRTEEIDEHLTAISERD

SEQ ID NO: 26245 - DNA, 937 bp, Arabidopsis thaliana
  misc_feature (1)..(937): Ceres Seq. ID no. 12331739
  misc_feature (1)..(937): Ortholog of  Ceres SEQ ID NO 13595452 as cited in SEQ ID NO 56454
cctcctcgagtcctttccatcaggaccttatccacagtccacacacagcgagactctatttactcgccggcggaagaacaaaatggcgggaagagcgattttctctgtatcttgttcatctactccttccttgtgtatcccttattcaactgcttcgttttcatcgatgaatcgactggcgctccccgccgtccggatttctccccgaaccaacagatttcccaggattcactgctctatgtctgctaacgacatcaaagcgggaaccaatatcgaagtcgatggtgctccttggcgtgttcttgagtttcttcatgttaaaccaggaaaaggtgcggcatttgtgagaactaagatcaggaactatgtgaatggtagcacagtcgagagaacatttcgtgctggaatttctgttgaggaagctaatatatataaagaaaccaaacaattcacatacaaagatgggtctcagtttgttttcatggatttgaccacatacgaagaaacacgtcttaacgaatctgatatgggtgagaagacgaaatggttgaaagaaggaatggattgcattttgctctattggaaagacaaggttatcgatttcgatctaccgattacagttaagctaaaagtggttgacgttgatcctggccttcgcggtgatactgtgcaaggtggatcaaaaccggcgacaatggaaacgggtgcaatagttgctgtaccactctttattaacgtcggtgaagagatatttgtggacacaagaactggtgcatacatgaaccgagcgtgatccgggtctactacacctagttaattgggtcgttaacaacaaggcaatgatacatcttttttgtatatgagaatgttcgaatccggggacacatgtttgtttttctgaacatcgagagacaatttttcgattaaataaatttat

SEQ ID NO: 26246 - protein, 263 aa, Arabidopsis thaliana
  peptide (1)..(263): Ceres Seq. ID no. 12331740
LLESFPSGPYPQSTHSETLFTRRRKNKMAGRAIFSVSCSSTPSLCIPYSTASFSSMNRLALPAVRISPRTNRFPRIHCSMSANDIKAGTNIEVDGAPWRVLEFLHVKPGKGAAFVRTKIRNYVNGSTVERTFRAGISVEEANIYKETKQFTYKDGSQFVFMDLTTYEETRLNESDMGEKTKWLKEGMDCILLYWKDKVIDFDLPITVKLKVVDVDPGLRGDTVQGGSKPATMETGAIVAVPLFINVGEEIFVDTRTGAYMNRA

SEQ ID NO: 26247 - protein, 236 aa, Arabidopsis thaliana
  peptide (1)..(236): Ceres Seq. ID no. 12331741
MAGRAIFSVSCSSTPSLCIPYSTASFSSMNRLALPAVRISPRTNRFPRIHCSMSANDIKAGTNIEVDGAPWRVLEFLHVKPGKGAAFVRTKIRNYVNGSTVERTFRAGISVEEANIYKETKQFTYKDGSQFVFMDLTTYEETRLNESDMGEKTKWLKEGMDCILLYWKDKVIDFDLPITVKLKVVDVDPGLRGDTVQGGSKPATMETGAIVAVPLFINVGEEIFVDTRTGAYMNRA

SEQ ID NO: 26248 - protein, 208 aa, Arabidopsis thaliana
  peptide (1)..(208): Ceres Seq. ID no. 12331742
MNRLALPAVRISPRTNRFPRIHCSMSANDIKAGTNIEVDGAPWRVLEFLHVKPGKGAAFVRTKIRNYVNGSTVERTFRAGISVEEANIYKETKQFTYKDGSQFVFMDLTTYEETRLNESDMGEKTKWLKEGMDCILLYWKDKVIDFDLPITVKLKVVDVDPGLRGDTVQGGSKPATMETGAIVAVPLFINVGEEIFVDTRTGAYMNRA

SEQ ID NO: 26249 - DNA, 1013 bp, Arabidopsis thaliana
  misc_feature (1)..(1013): Ceres Seq. ID no. 12580328
  misc_feature (1)..(1013): Ortholog of  Ceres SEQ ID NO 13589868 as cited in SEQ ID NO 55521
  misc_feature (1)..(1013): Ortholog of  Ceres SEQ ID NO 15226426 as cited in SEQ ID NO 55985
  misc_feature (1)..(1013): Ortholog of  Ceres SEQ ID NO 14312250 as cited in SEQ ID NO 59168
  misc_feature (1)..(1013): Ortholog of  Ceres SEQ ID NO 15173326 as cited in SEQ ID NO 63793
  misc_feature (1)..(1013): Ortholog of  Ceres SEQ ID NO 12617659 as cited in SEQ ID NO 65286
  misc_feature (1)..(1013): Ortholog of  Ceres SEQ ID NO 12780566 as cited in SEQ ID NO 65822
  misc_feature (1)..(1013): Ortholog of  Ceres SEQ ID NO 15179979 as cited in SEQ ID NO 0
ataagaaagaaagtcgtgaagatgagaggcgtaacaccaaactattaccattcttacactttcttcttcttcttcttcgttgtcttattagctctgtttcttcatgttttctcgataaacactttgtcatctacagaaactctaacaatctcaagcaaccgaaccattgtgtctcccggtaacatcttcgagctaggtttctgtagatgacaaagtgtttatcgagaaaagaagaagaaaagatctgagaggtggtcgaatgatccaagagaagaagaacaatctctcttagatcgtttgatctgatccaatcgaagaagaagaagaagatgggaatcttattcacgcggatgttctcttccgtctttggtaacaaagaagctcgaatcctcgtcctcggtctcgacaatgctggaaaaaccacaatcctctatcggcttcagatgggggaagttgtctctacgattccgactattggatttaacgttgagactgtgcagtacaacaatatcaagtttcaggtctgggatttaggtggacaaacaagcatcaggccatactggcgatgctatttcccgaatacacaagcagtgatctatgttgttgactcgagtgatacagatagaatcggggtggcgaaagaggagtttcatgcaattttagaggaagatgaattgaaaggtgcggtggttctgatatttgcaaacaagcaggatcttcccggtgcactcgatgatgcggctgttacagaagccttggagttgcataagataaagagtcgtcaatgggcaatcttcaaaacttgtgctgtgaaaggcgagggacttttcgagggattggactggttgagtaatacattgaagtcgggaagtggctaaaatcatcgtcatacaccaatctgtcacatttctcaagagtgtaactttgatcatttttacttattggtttgtttagtatttttttttgtcttagttcttcatcttaaagagttaatatcaatgacatgttcactc

SEQ ID NO: 26250 - protein, 182 aa, Arabidopsis thaliana
  peptide (1)..(182): Ceres Seq. ID no. 12580329
MGILFTRMFSSVFGNKEARILVLGLDNAGKTTILYRLQMGEVVSTIPTIGFNVETVQYNNIKFQVWDLGGQTSIRPYWRCYFPNTQAVIYVVDSSDTDRIGVAKEEFHAILEEDELKGAVVLIFANKQDLPGALDDAAVTEALELHKIKSRQWAIFKTCAVKGEGLFEGLDWLSNTLKSGSG

SEQ ID NO: 26251 - protein, 175 aa, Arabidopsis thaliana
  peptide (1)..(175): Ceres Seq. ID no. 12580330
MFSSVFGNKEARILVLGLDNAGKTTILYRLQMGEVVSTIPTIGFNVETVQYNNIKFQVWDLGGQTSIRPYWRCYFPNTQAVIYVVDSSDTDRIGVAKEEFHAILEEDELKGAVVLIFANKQDLPGALDDAAVTEALELHKIKSRQWAIFKTCAVKGEGLFEGLDWLSNTLKSGSG

SEQ ID NO: 26252 - protein, 144 aa, Arabidopsis thaliana
  peptide (1)..(144): Ceres Seq. ID no. 12580331
MGEVVSTIPTIGFNVETVQYNNIKFQVWDLGGQTSIRPYWRCYFPNTQAVIYVVDSSDTDRIGVAKEEFHAILEEDELKGAVVLIFANKQDLPGALDDAAVTEALELHKIKSRQWAIFKTCAVKGEGLFEGLDWLSNTLKSGSG

SEQ ID NO: 26253 - DNA, 734 bp, Arabidopsis thaliana
  misc_feature (1)..(734): Ceres Seq. ID no. 13486941
  misc_feature (1)..(734): Ortholog of  Ceres SEQ ID NO 15173015 as cited in SEQ ID NO 51216
catcgctgtctggaacagcgatgactcgagaaccgaaagaaaacaaaaagccaagaatcaaagaatcaggaaagcaaacacaacacaactaacaatggatttaggaaggtttccaataatctcaatcctcgaagacatgcttgaagtccccgaagaccacaacaacgagaagacccgcaacaacccttcacgagtttacatgcgagacgctaaggcaatggctgctacacctgctgacgtcatcgagcaccctaacgcatatgcattcgtcgtggacatgcctggaatcaaaggagatgagatcaaggttcaggtcgagaacgacaatgtgcttgtggtgagtggagagaggcagagagagaacaaagaaaacgaaggtgtgaagtatgtgaggatggagagaagaatgggtaagttcatgaggaagtttcagttgcctgaaaatgcagatttggacaagatctctgctgtttgtcatgacggtgtgttgaaggttactgttcagaaacttcctcctccggaaccaaagaaaccaaagacaattcaagttcaagttgcttgagtttgttttgtgattgtgtgttggatttatctattttgttttgatttatggatttgatgaatgtaatcggaatgcgtgagggatatggtgttttgttctaagatgaaataaaagtttgttctgtttctttcattctcctttgggatattcaaattaatgaagttgttataag

SEQ ID NO: 26254 - protein, 186 aa, Arabidopsis thaliana
  peptide (1)..(186): Ceres Seq. ID no. 13486942
IAVWNSDDSRTERKQKAKNQRIRKANTTQLTMDLGRFPIISILEDMLEVPEDHNNEKTRNNPSRVYMRDAKAMAATPADVIEHPNAYAFVVDMPGIKGDEIKVQVENDNVLVVSGERQRENKENEGVKYVRMERRMGKFMRKFQLPENADLDKISAVCHDGVLKVTVQKLPPPEPKKPKTIQVQVA

SEQ ID NO: 26255 - protein, 155 aa, Arabidopsis thaliana
  peptide (1)..(155): Ceres Seq. ID no. 13486943
MDLGRFPIISILEDMLEVPEDHNNEKTRNNPSRVYMRDAKAMAATPADVIEHPNAYAFVVDMPGIKGDEIKVQVENDNVLVVSGERQRENKENEGVKYVRMERRMGKFMRKFQLPENADLDKISAVCHDGVLKVTVQKLPPPEPKKPKTIQVQVA

SEQ ID NO: 26256 - protein, 141 aa, Arabidopsis thaliana
  peptide (1)..(141): Ceres Seq. ID no. 13486944
MLEVPEDHNNEKTRNNPSRVYMRDAKAMAATPADVIEHPNAYAFVVDMPGIKGDEIKVQVENDNVLVVSGERQRENKENEGVKYVRMERRMGKFMRKFQLPENADLDKISAVCHDGVLKVTVQKLPPPEPKKPKTIQVQVA

SEQ ID NO: 26257 - DNA, 1168 bp, Arabidopsis thaliana
  misc_feature (1)..(1168): Ceres Seq. ID no. 13504863
  misc_feature (1)..(1168): Ortholog of  Ceres SEQ ID NO 13596876 as cited in SEQ ID NO 62696
  misc_feature (1)..(1168): Ortholog of  Ceres SEQ ID NO 13655442 as cited in SEQ ID NO 64359
  misc_feature (1)..(1168): Ortholog of  Ceres SEQ ID NO 14303652 as cited in SEQ ID NO 67569
aaatagaaatttgtggtgcttcattggatcgacgaaaggcgtcccgatattgaggttcgttacgccggcgaagattttcatcggaaacttatctgatcgtttacgccggcgaagatttccatcggaaacttaatctgatcggaaggaagaaggctcgatgaagagcagattgaagagctacaggaggaagaagctagggttagccacagttatcgtcttctgttctctctgtttcctcttcggtttctatggctccactctactttctcagaatgtgcctcgtgttaaacccaggttgagaatgttggatatggttgagaatggggaagaagaagctagctcgatgcctcatggtgttactggagaagaatctattggatcgattccttttcaggtacttagttggagacctagggctatatattttccgaattttgcaactgcagaacaatgccaagctattattgagagagcaaaggttaatctgaaaccttctgctttggctctccggaaaggagaaactgctgagaacactaagggcactagaacaagctcaggaacttttatcagtgcttcagaagagagtactggtgctctggattttgttgaaaggaaaatcgcaagagctacgatgatcccaaggtcccatggagagtcattcaatattttacggtatgaacttggccaaaagtatgattcccactatgatgttttcaacccaacagaatatggaccacaatcaagccaaaggattgcctccttcctgttgtacttatctgatgttgaagaaggcggtgaaaccatgttcccatttgagaacggttctaatatgggcatcggatacgattacaagcaatgtattgggttgaaagtaaagcctcggaaaggagatggtcttcttttttattccgtgtttccaaatggaacgattgatcagacttcgcttcacgggagctgcccggtgaccaaaggagagaaatgggtggcaaccaaatggatcagagaccaagaccaggaagaataagttaggtttttttccatatatctatctcactctcacagcttctatcttttgactaaaaatctgctgctggatccctcgtgtacagttcttcgctgaaacagtgtaactatttagctttcttataatgcgaatgatacaaaaatc

SEQ ID NO: 26258 - protein, 288 aa, Arabidopsis thaliana
  peptide (1)..(288): Ceres Seq. ID no. 13504864
MKSRLKSYRRKKLGLATVIVFCSLCFLFGFYGSTLLSQNVPRVKPRLRMLDMVENGEEEASSMPHGVTGEESIGSIPFQVLSWRPRAIYFPNFATAEQCQAIIERAKVNLKPSALALRKGETAENTKGTRTSSGTFISASEESTGALDFVERKIARATMIPRSHGESFNILRYELGQKYDSHYDVFNPTEYGPQSSQRIASFLLYLSDVEEGGETMFPFENGSNMGIGYDYKQCIGLKVKPRKGDGLLFYSVFPNGTIDQTSLHGSCPVTKGEKWVATKWIRDQDQEE

SEQ ID NO: 26259 - protein, 240 aa, Arabidopsis thaliana
  peptide (1)..(240): Ceres Seq. ID no. 13504865
MLDMVENGEEEASSMPHGVTGEESIGSIPFQVLSWRPRAIYFPNFATAEQCQAIIERAKVNLKPSALALRKGETAENTKGTRTSSGTFISASEESTGALDFVERKIARATMIPRSHGESFNILRYELGQKYDSHYDVFNPTEYGPQSSQRIASFLLYLSDVEEGGETMFPFENGSNMGIGYDYKQCIGLKVKPRKGDGLLFYSVFPNGTIDQTSLHGSCPVTKGEKWVATKWIRDQDQEE

SEQ ID NO: 26260 - protein, 237 aa, Arabidopsis thaliana
  peptide (1)..(237): Ceres Seq. ID no. 13504866
MVENGEEEASSMPHGVTGEESIGSIPFQVLSWRPRAIYFPNFATAEQCQAIIERAKVNLKPSALALRKGETAENTKGTRTSSGTFISASEESTGALDFVERKIARATMIPRSHGESFNILRYELGQKYDSHYDVFNPTEYGPQSSQRIASFLLYLSDVEEGGETMFPFENGSNMGIGYDYKQCIGLKVKPRKGDGLLFYSVFPNGTIDQTSLHGSCPVTKGEKWVATKWIRDQDQEE

SEQ ID NO: 26261 - DNA, 1067 bp, Arabidopsis thaliana
  misc_feature (1)..(1067): Ceres Seq. ID no. 12335644
  misc_feature (1)..(1067): Ortholog of  Ceres SEQ ID NO 12616162 as cited in SEQ ID NO 63260
aatctatcaaccaaaagcaaagaaagagagggggaaaaaatggctcaattggctgctttgtcgggaaagcaagctgatgagtacttgaacgcaaggccaaaatatcctacaatatggtacaaagtgttggctggtcgaaccagcaaccataaggtggcttgggatgttgggaccggcaacggtcaggctgctattggggtcgctgagtactaccagaaagtggtggcaactgatataaatgaatcacaactccaacgtgcaatgaagcacccaaaagtcacttactatcacactccatcatcaatgtccgacgacgatctagtgactctactcggtggagaaaactccatagatatcataatagccgctcaagctcttcactacttcgacctaaagagattctaccccatagtgaaacgtgttcttcgtaaacaaggcggtatcatcgtagtttgggtttacaacgatctcatcatcaccccaaaggttgattccatcatgaaacgtcttgtggattcaacattaccttacagaaacccgactatgaatttggcgtttgatggttataaaacaatagagtttccttttaaaaacattaggatggggactcaaggaaggcctaaagctcttgacatcccacatatgctttcgctagatggatttctagggttcttaaaatcatggcagcctctagtgaaagcaaaggagcaaggagaggatcttttaacttcttatatgattgatgagtttaaggaagcttggggtgatgatgaacaagtcaaggatgttcactacaaggcatttatgcttgcagggaaactttaggtaattaatatatgttcccctttgagatatatattaactatatgtcatacacgcatgtcatcaatgatcaatcgaattaggattgaaaacttatgtttaacaggtcttgagagcaacctggttgatttacaagcggatcattactttgtataactttcgtttctgtataaattaatatattaattaatatatttatagcactgtaaatataaagatgttatatataaataaaaggttaatat

SEQ ID NO: 26262 - protein, 274 aa, Arabidopsis thaliana
  peptide (1)..(274): Ceres Seq. ID no. 12335645
NLSTKSKEREGEKMAQLAALSGKQADEYLNARPKYPTIWYKVLAGRTSNHKVAWDVGTGNGQAAIGVAEYYQKVVATDINESQLQRAMKHPKVTYYHTPSSMSDDDLVTLLGGENSIDIIIAAQALHYFDLKRFYPIVKRVLRKQGGIIVVWVYNDLIITPKVDSIMKRLVDSTLPYRNPTMNLAFDGYKTIEFPFKNIRMGTQGRPKALDIPHMLSLDGFLGFLKSWQPLVKAKEQGEDLLTSYMIDEFKEAWGDDEQVKDVHYKAFMLAGKL

SEQ ID NO: 26263 - protein, 261 aa, Arabidopsis thaliana
  peptide (1)..(261): Ceres Seq. ID no. 12335646
MAQLAALSGKQADEYLNARPKYPTIWYKVLAGRTSNHKVAWDVGTGNGQAAIGVAEYYQKVVATDINESQLQRAMKHPKVTYYHTPSSMSDDDLVTLLGGENSIDIIIAAQALHYFDLKRFYPIVKRVLRKQGGIIVVWVYNDLIITPKVDSIMKRLVDSTLPYRNPTMNLAFDGYKTIEFPFKNIRMGTQGRPKALDIPHMLSLDGFLGFLKSWQPLVKAKEQGEDLLTSYMIDEFKEAWGDDEQVKDVHYKAFMLAGKL

SEQ ID NO: 26264 - protein, 187 aa, Arabidopsis thaliana
  peptide (1)..(187): Ceres Seq. ID no. 12335647
MKHPKVTYYHTPSSMSDDDLVTLLGGENSIDIIIAAQALHYFDLKRFYPIVKRVLRKQGGIIVVWVYNDLIITPKVDSIMKRLVDSTLPYRNPTMNLAFDGYKTIEFPFKNIRMGTQGRPKALDIPHMLSLDGFLGFLKSWQPLVKAKEQGEDLLTSYMIDEFKEAWGDDEQVKDVHYKAFMLAGKL

SEQ ID NO: 26265 - DNA, 1775 bp, Arabidopsis thaliana
  misc_feature (1)..(1775): Ceres Seq. ID no. 12335880
  misc_feature (1)..(1775): Ortholog of  Ceres SEQ ID NO 13595900 as cited in SEQ ID NO 69289
acacgcgcagtcttcttcatcttgcttgcttctggttgcttaaccaaaacaccatggaatctccctaaatttcctcacctactcacttccaatttcaacctgctcgattcttcccctcttcttcgcaaaagccctagttttgatcatcgcacttcactctcctccgcatgagaaatcgagaaatccgctcgacgtagtagatagataaaaccacaaagttagggttttttcaattgggtatggaacctcgtgttgggaacaagtttcgccttggccgcaaaattgggagcggctctttcggagagatttacctcggaactgatgttcagactaacgaagaagttgctattaagcttgaaagtgtgaagactgcgcatccgcaattgtcatatgagtcgaggatatatagagttcttcagggtggaactgggattccaaatatgaaatggtatggtgttgagggggactacaatgtcttagtcatggatttgcttggtccaagtcttgaagatttgtttagttattgcaagaggcagtttagcttgaagactgttcttatgcttgctgatcaaatgataaatcgtctcgagttcattcattctaagtcgtatcttcatcgtgatataaagccggataattttctcatgggcttagggaggcgggcaaatcaggtctacatcatagactatggtttggctaagaaatatagagacagctcaactcatagacatatcccatacagggagaataaaagtctaattgggactccgaggtatgccagcttgaacactcacctagggattgagcaaagtcggagagatgatatagaatcgcttggttacatcctcatgtatttcctcaagggaagtctcccttggcaagggctgaaagctggaaacaagaaacagaagtatgataagatcagcgaaaagaaggtttcaacttccatcgaaacgttatgcagaggtcatccaacagagtttgcatcttacttccattactgccgctcacttaggtttgatgataagccagactatgcatatttgaagagactattccgcaacctttttatccgggaaggttttcagtttgattttgtgtttgactggacagtatacaagtatcagcaatcacaatctggaaaccctcaacctcgtccccatgatggtggtgttggaactagttctggattaaaccctgcggttggcaattctgagaagcgtccagatgtcccaaatcagaggacaaatccggattttaccctgaagcagaaagacaagaatggaaatgattctgcaattgcaaaggacaagctgctacctggatctttgaacttgggccgatcagagggatcatcgtcaagacgagttgtggacacgagcagtcgtgaaccatttagtggcgggagtgacaatgcaaactatgaaaccgcactcaaaggcattgatggtttacggatcaataacaatgcaggcgatgagacagcagcaacgccacaatcaaatggagacgatgtagaaccccaaagcaaagctctctgactgattcatacaaagcagctataaaacaaaacctgtactcactcagtgacgttgtctatgattcttctgaagaaaggctattttcacagctagagaactgatgatatataagagagagataatatagatttattataccaaacgaaagtgcttaaactatgattcttcaaatattcatttgtctcctccatttgtatagagaaactcttcgaattttaagatccttcctctctg

SEQ ID NO: 26266 - protein, 433 aa, Arabidopsis thaliana
  peptide (1)..(433): Ceres Seq. ID no. 12335881
MEPRVGNKFRLGRKIGSGSFGEIYLGTDVQTNEEVAIKLESVKTAHPQLSYESRIYRVLQGGTGIPNMKWYGVEGDYNVLVMDLLGPSLEDLFSYCKRQFSLKTVLMLADQMINRLEFIHSKSYLHRDIKPDNFLMGLGRRANQVYIIDYGLAKKYRDSSTHRHIPYRENKSLIGTPRYASLNTHLGIEQSRRDDIESLGYILMYFLKGSLPWQGLKAGNKKQKYDKISEKKVSTSIETLCRGHPTEFASYFHYCRSLRFDDKPDYAYLKRLFRNLFIREGFQFDFVFDWTVYKYQQSQSGNPQPRPHDGGVGTSSGLNPAVGNSEKRPDVPNQRTNPDFTLKQKDKNGNDSAIAKDKLLPGSLNLGRSEGSSSRRVVDTSSREPFSGGSDNANYETALKGIDGLRINNNAGDETAATPQSNGDDVEPQSKAL

SEQ ID NO: 26267 - protein, 366 aa, Arabidopsis thaliana
  peptide (1)..(366): Ceres Seq. ID no. 12335882
MKWYGVEGDYNVLVMDLLGPSLEDLFSYCKRQFSLKTVLMLADQMINRLEFIHSKSYLHRDIKPDNFLMGLGRRANQVYIIDYGLAKKYRDSSTHRHIPYRENKSLIGTPRYASLNTHLGIEQSRRDDIESLGYILMYFLKGSLPWQGLKAGNKKQKYDKISEKKVSTSIETLCRGHPTEFASYFHYCRSLRFDDKPDYAYLKRLFRNLFIREGFQFDFVFDWTVYKYQQSQSGNPQPRPHDGGVGTSSGLNPAVGNSEKRPDVPNQRTNPDFTLKQKDKNGNDSAIAKDKLLPGSLNLGRSEGSSSRRVVDTSSREPFSGGSDNANYETALKGIDGLRINNNAGDETAATPQSNGDDVEPQSKAL

SEQ ID NO: 26268 - protein, 352 aa, Arabidopsis thaliana
  peptide (1)..(352): Ceres Seq. ID no. 12335883
MDLLGPSLEDLFSYCKRQFSLKTVLMLADQMINRLEFIHSKSYLHRDIKPDNFLMGLGRRANQVYIIDYGLAKKYRDSSTHRHIPYRENKSLIGTPRYASLNTHLGIEQSRRDDIESLGYILMYFLKGSLPWQGLKAGNKKQKYDKISEKKVSTSIETLCRGHPTEFASYFHYCRSLRFDDKPDYAYLKRLFRNLFIREGFQFDFVFDWTVYKYQQSQSGNPQPRPHDGGVGTSSGLNPAVGNSEKRPDVPNQRTNPDFTLKQKDKNGNDSAIAKDKLLPGSLNLGRSEGSSSRRVVDTSSREPFSGGSDNANYETALKGIDGLRINNNAGDETAATPQSNGDDVEPQSKAL

SEQ ID NO: 26269 - DNA, 1664 bp, Arabidopsis thaliana
  misc_feature (1)..(1664): Ceres Seq. ID no. 13591642
  misc_feature (1)..(1664): Ortholog of  Ceres SEQ ID NO 14305697 as cited in SEQ ID NO 52505
  misc_feature (1)..(1664): Ortholog of  Ceres SEQ ID NO 15179023 as cited in SEQ ID NO 0
gatatcatcaccttccccactaatactctatagtttgtttttgttcttcttataatctttatattttcagcaaacgaaagggaagtgtgtcagaaatctcagagggtgagaatcccaatgaggatcttacccgaacctcgaggttcggttccgtgtcttctccttcttgtgtcggttctcttatcagcgactctctcactcgctcgtgtcgtcgaagttgtcggttacgccgagagcaagatcaaaaccccccatgcattttcaggacttcgagtgacgatcgactgtaaggtgaataaaggccattttgttacaaaaggttcgggaaacattgacgacaaaggaaagtttggtcttaatattcctcatgacattgtctccgacaacggagcgttaaaggaggagtgttacgctcagcttcacagcgcggcgggaacaccttgtccggctcacgacggccttgagtccaccaagatcgtgtttttatccaaatccggggataaacacattttgggtctcaaacaaaatctgaaattttcaccggagatttgcgtttccaaattcttctggcctatgcctaagttgcctccttttaagggctttgatcatcctttccctttacctccacctttggaacttccaccgtttctcaagaagccatgtccacctaaatacagtcctcctgtggaggttccacccccggtaccagtttacgagccgccgccaaagaaagagattcccccgccggttccggtttacgatccaccgcctaagaaagaggttccaccacctgtcccagtttacaagccaccaccaaaggtggagcttccaccgcctattcctaagaagccttgtccacctaaaccgccgaagatagagcacccacctccggttccggtttacaagccaccgccaaagatagagaagccacctccggttccggtttacaagcccccgccaaagatagagcacccacctcccgttccggtacacaagctaccgaagaagccatgtccgcctaagaaagttgatccaccgccggtgccagtccacaaaccaccaacgaagaagccttgtccgcctaagaaagttgatccaccgccggttccagtccacaagccgccgccaaagatagtcattccaccgccgaagatagagcacccacctccagttccggtttacaagccgccgccgaagatagagcatccaccaatctacataccaccaattgtgaagaagccgtgtcctccgccggtaccaatatacaaaccaccggttgtgatccccaagaagccatgccctccgccggtaccagtatacaaaccaccggtagtggtgattccaaagaagccatgtccgccacttccacagctcccaccacttccaaagtttccacctcttcctcctaaatacattcaccaccccaagttcgggaaatggcctccgttgcctccacacccttgagaaacattaaatacgtatatatagatatacgtatactcatgtataatcaacgtgtttgcctttttttaatattttatctttgcatatgttttatatcttgtttcttttgttggctttgagttctctttgtgtagactggttgtttatattcccgcaatcttccaacaataatatggtaatgatacgtttctcttttatct

SEQ ID NO: 26270 - protein, 448 aa, Arabidopsis thaliana
  peptide (1)..(448): Ceres Seq. ID no. 13591643
MRILPEPRGSVPCLLLLVSVLLSATLSLARVVEVVGYAESKIKTPHAFSGLRVTIDCKVNKGHFVTKGSGNIDDKGKFGLNIPHDIVSDNGALKEECYAQLHSAAGTPCPAHDGLESTKIVFLSKSGDKHILGLKQNLKFSPEICVSKFFWPMPKLPPFKGFDHPFPLPPPLELPPFLKKPCPPKYSPPVEVPPPVPVYEPPPKKEIPPPVPVYDPPPKKEVPPPVPVYKPPPKVELPPPIPKKPCPPKPPKIEHPPPVPVYKPPPKIEKPPPVPVYKPPPKIEHPPPVPVHKLPKKPCPPKKVDPPPVPVHKPPTKKPCPPKKVDPPPVPVHKPPPKIVIPPPKIEHPPPVPVYKPPPKIEHPPIYIPPIVKKPCPPPVPIYKPPVVIPKKPCPPPVPVYKPPVVVIPKKPCPPLPQLPPLPKFPPLPPKYIHHPKFGKWPPLPPHP

SEQ ID NO: 26271 - protein, 296 aa, Arabidopsis thaliana
  peptide (1)..(296): Ceres Seq. ID no. 13591644
MPKLPPFKGFDHPFPLPPPLELPPFLKKPCPPKYSPPVEVPPPVPVYEPPPKKEIPPPVPVYDPPPKKEVPPPVPVYKPPPKVELPPPIPKKPCPPKPPKIEHPPPVPVYKPPPKIEKPPPVPVYKPPPKIEHPPPVPVHKLPKKPCPPKKVDPPPVPVHKPPTKKPCPPKKVDPPPVPVHKPPPKIVIPPPKIEHPPPVPVYKPPPKIEHPPIYIPPIVKKPCPPPVPIYKPPVVIPKKPCPPPVPVYKPPVVVIPKKPCPPLPQLPPLPKFPPLPPKYIHHPKFGKWPPLPPHP

SEQ ID NO: 26272 - DNA, 1271 bp, Arabidopsis thaliana
  misc_feature (1)..(1271): Ceres Seq. ID no. 12335648
  misc_feature (1)..(1271): Ortholog of  Ceres SEQ ID NO 15180036 as cited in SEQ ID NO 0
gtcctcaatacttcggtgtcaatcatcctcttcctctaaattctcttcttctctttgctgctacagaaaaagaatcaagctttagaggcaagcaaggactcactcacccacaagtatcctcaccccatctactcatggacacagcattgacctcagaatcaggctgtgccgttatagccgataagggattcaatgtggatccttttttggtcgaggctcttcaaaaccctcgacatcgtctaacgattttgcggatggaacttgatgttcagaggttcttgcaaagccctgatcagcagcaattcgagttccagcatttccctacatcatacctccgtcttgcggctcatcgtgttgctaatcactatggactaattacatcagttcgagatggtggtgcagatggtaatgagagcagaattgtcgtgactaaatctagtgatagcagatttcctgctgctcgactatctgaaatccctgtgaaacagtcagaaactggcaagtttgagcatatgaaagttgttataaagccaagacctactaaaggatctggaatggaaggtgatgaactgaaaggtggtcttctgaaaagtgttgaagagaggaaagaagattacgacagggctcgagcacgcatatttaacggtcttgtgaacattgattgtaacgattcttcatctgaaactaatccttggagggtgaattgtagttctagcagagatgaaaatcaagtgttgaagaatggtaatatcgaagcagacaagaacaatatctctaggaagagcaatcctgcatctcgtattgcaattctcagagacagagagaaagatcgatatgaccctgactatgaccgcagcaattacaggtacattagtaacctcccagtcgatcaaaatttatgcgtggcacacttcaacattcagacaatggggacaccaatctatgatatgggatttagagggtatagtccaactgctcctccatctcttaacttgggtcaacattctgtcatgagcccctgcgtcaccacaggtttaaaccagccttcaagagatgctgctatgtacatgcaatggccaaatgcagcagctgtgatgtatactcattcatatgaccacttcagaaactccccttttcaggcgcagttctatccgcagccccttagtttcgattacatgcagaaccggtaattacttttctcatcatggctaaggatttgtgtaatccagattttgagacagtttgatgtcaaaaatagacaaacttaacct

SEQ ID NO: 26273 - protein, 395 aa, Arabidopsis thaliana
  peptide (1)..(395): Ceres Seq. ID no. 12335649
PQYFGVNHPLPLNSLLLFAATEKESSFRGKQGLTHPQVSSPHLLMDTALTSESGCAVIADKGFNVDPFLVEALQNPRHRLTILRMELDVQRFLQSPDQQQFEFQHFPTSYLRLAAHRVANHYGLITSVRDGGADGNESRIVVTKSSDSRFPAARLSEIPVKQSETGKFEHMKVVIKPRPTKGSGMEGDELKGGLLKSVEERKEDYDRARARIFNGLVNIDCNDSSSETNPWRVNCSSSRDENQVLKNGNIEADKNNISRKSNPASRIAILRDREKDRYDPDYDRSNYRYISNLPVDQNLCVAHFNIQTMGTPIYDMGFRGYSPTAPPSLNLGQHSVMSPCVTTGLNQPSRDAAMYMQWPNAAAVMYTHSYDHFRNSPFQAQFYPQPLSFDYMQNR

SEQ ID NO: 26274 - protein, 351 aa, Arabidopsis thaliana
  peptide (1)..(351): Ceres Seq. ID no. 12335650
MDTALTSESGCAVIADKGFNVDPFLVEALQNPRHRLTILRMELDVQRFLQSPDQQQFEFQHFPTSYLRLAAHRVANHYGLITSVRDGGADGNESRIVVTKSSDSRFPAARLSEIPVKQSETGKFEHMKVVIKPRPTKGSGMEGDELKGGLLKSVEERKEDYDRARARIFNGLVNIDCNDSSSETNPWRVNCSSSRDENQVLKNGNIEADKNNISRKSNPASRIAILRDREKDRYDPDYDRSNYRYISNLPVDQNLCVAHFNIQTMGTPIYDMGFRGYSPTAPPSLNLGQHSVMSPCVTTGLNQPSRDAAMYMQWPNAAAVMYTHSYDHFRNSPFQAQFYPQPLSFDYMQNR

SEQ ID NO: 26275 - protein, 311 aa, Arabidopsis thaliana
  peptide (1)..(311): Ceres Seq. ID no. 12335651
MELDVQRFLQSPDQQQFEFQHFPTSYLRLAAHRVANHYGLITSVRDGGADGNESRIVVTKSSDSRFPAARLSEIPVKQSETGKFEHMKVVIKPRPTKGSGMEGDELKGGLLKSVEERKEDYDRARARIFNGLVNIDCNDSSSETNPWRVNCSSSRDENQVLKNGNIEADKNNISRKSNPASRIAILRDREKDRYDPDYDRSNYRYISNLPVDQNLCVAHFNIQTMGTPIYDMGFRGYSPTAPPSLNLGQHSVMSPCVTTGLNQPSRDAAMYMQWPNAAAVMYTHSYDHFRNSPFQAQFYPQPLSFDYMQNR

SEQ ID NO: 26276 - DNA, 1408 bp, Arabidopsis thaliana
  misc_feature (1)..(1408): Ceres Seq. ID no. 12335876
  misc_feature (1)..(1408): Ortholog of  Ceres SEQ ID NO 15168476 as cited in SEQ ID NO 60262
gttccctttttcattgtattcctcaaatctctttacttgatcgttggttctctcaaaaatcagatttttatttctgggttttgttcgattttgtgatcatggcggtcattgagagcgtcggagctaatactactgtggaagctggtggtttgatctcgccgtcgccgccgtcttccgtcaccagtcaagaatcaggagcttcttctaacaacgatcacggtggaaatggaatccatgatgagatcggagtccacgtggcgagatccgacggtggtgagagttttaagcgtgatatgagagagcttcacgagctcttgtctaagcttaatcctatggctaaagagtttattcctccttcacttactaagccagttgttaatggttttaacggcggtttcttcgccgttaataatggctttgttgctgccggaaatttccccgtcaacgaagacggtagctttcgtcggaagaagtcgttcggacaacaagggaaacggagaatgaatcctaggacaagtttggctcagcgtgaagagatcataagaagaactgtctatgtgtctgatattgaccaacaggtcactgaggagcagcttgctggtttgtttatcggctttggacaggttgttgactgtcgtatatgtggtgatcccaactcagtacttaggtttgctttcatcgagttcactgatgaagtgggtgcaaggactgctctgaatttgtctgggacgatgcttggattctatcctgtgaaggttatgccgtctaagacagctattgcaccggttaacccaaccttcttgccaaggactgaagatgagcgtgagatgtgtgcaagaactatctactgcactaacattgacaagaagctcactcaaaccgacattaaactcttctttgagtctgtgtgtggcgaggtgtaccgtctgaggctactgggcgattatcatcatccaactcgcatcggcttcgtggagtttgtcatggctgaaagcgcgatagcggctctcaactgcagtggtgtccttcttggttctttaccgataagggtgagtccatcaaagacaccggttcgttcccgtgctatcccgcgacatcaaatgcattaaccgtagctacaagttttatatatatttctgctcctcacagacatgtaaagaatgtttgtctgaaacttctggttcttctgttttcccgtatgtaatgctagaagcttgatgatgcttctgttgccttttgcttttgggtaaatctcttagggagagttttttcgatttgggttcctacgtttagtagtttacacagagcagaagagtaaaacactgagagaggcttttgaagattgtctctgttttttagttatttatactcttacccctgaagttattagaaacttgctttggtgctt

SEQ ID NO: 26277 - protein, 368 aa, Arabidopsis thaliana
  peptide (1)..(368): Ceres Seq. ID no. 12335877
SLFHCIPQISLLDRWFSQKSDFYFWVLFDFVIMAVIESVGANTTVEAGGLISPSPPSSVTSQESGASSNNDHGGNGIHDEIGVHVARSDGGESFKRDMRELHELLSKLNPMAKEFIPPSLTKPVVNGFNGGFFAVNNGFVAAGNFPVNEDGSFRRKKSFGQQGKRRMNPRTSLAQREEIIRRTVYVSDIDQQVTEEQLAGLFIGFGQVVDCRICGDPNSVLRFAFIEFTDEVGARTALNLSGTMLGFYPVKVMPSKTAIAPVNPTFLPRTEDEREMCARTIYCTNIDKKLTQTDIKLFFESVCGEVYRLRLLGDYHHPTRIGFVEFVMAESAIAALNCSGVLLGSLPIRVSPSKTPVRSRAIPRHQMH

SEQ ID NO: 26278 - protein, 336 aa, Arabidopsis thaliana
  peptide (1)..(336): Ceres Seq. ID no. 12335878
MAVIESVGANTTVEAGGLISPSPPSSVTSQESGASSNNDHGGNGIHDEIGVHVARSDGGESFKRDMRELHELLSKLNPMAKEFIPPSLTKPVVNGFNGGFFAVNNGFVAAGNFPVNEDGSFRRKKSFGQQGKRRMNPRTSLAQREEIIRRTVYVSDIDQQVTEEQLAGLFIGFGQVVDCRICGDPNSVLRFAFIEFTDEVGARTALNLSGTMLGFYPVKVMPSKTAIAPVNPTFLPRTEDEREMCARTIYCTNIDKKLTQTDIKLFFESVCGEVYRLRLLGDYHHPTRIGFVEFVMAESAIAALNCSGVLLGSLPIRVSPSKTPVRSRAIPRHQMH

SEQ ID NO: 26279 - protein, 271 aa, Arabidopsis thaliana
  peptide (1)..(271): Ceres Seq. ID no. 12335879
MRELHELLSKLNPMAKEFIPPSLTKPVVNGFNGGFFAVNNGFVAAGNFPVNEDGSFRRKKSFGQQGKRRMNPRTSLAQREEIIRRTVYVSDIDQQVTEEQLAGLFIGFGQVVDCRICGDPNSVLRFAFIEFTDEVGARTALNLSGTMLGFYPVKVMPSKTAIAPVNPTFLPRTEDEREMCARTIYCTNIDKKLTQTDIKLFFESVCGEVYRLRLLGDYHHPTRIGFVEFVMAESAIAALNCSGVLLGSLPIRVSPSKTPVRSRAIPRHQMH

SEQ ID NO: 26280 - DNA, 1165 bp, Arabidopsis thaliana
  misc_feature (1)..(1165): Ceres Seq. ID no. 12395664
  misc_feature (1)..(1165): Ortholog of  Ceres SEQ ID NO 14315461 as cited in SEQ ID NO 57150
atttttgtcacaccacacaaagtcgtctttggagagagagaagggccaacgaccacacatacacacacagaccaataaaccatgagcccttccaagcagcgacatcgttgctctaccggagaaaacaagtcaaagccggtcagatccgcttcatcctccgccataccggaatggattaccgaatcaaccaacggcggatctctccgtcgcgtagatcccgatacaggtaccgacggctgggcttctcctcccggcgatgttttctctctccgctccgattcttacttgtccaaaaaacaaaaaactcccgccggtgattacctcctttctcccgccggcatggactggctcaaatcaagtaccaaactcgagaacgcgctcgctcgtcccgataaccgtgtagctcacgcgcttagaaaagctcaatctcgcggtcaatctctcaagagcttcatcttcgccgtgaatctccagattccaggtaaggatcatcacagcgccgtgttctacttcgcgacggaagaaccgattccttccggttcgcttctccaccggttcatcaacggcgacgatgccttccggaaccagagattcaaaatcgtgaatcggattgtgaaaggtccttgggtagttaaagccgcggtggggaactatagcgcttgtcttctaggtaaagccttgacgtgcaattaccacagaggtcctaactactttgaaattgacgtcgacattagcagctcagcgatcgcaacggcgattctacggctggctttagggtacgtgacgagcgtgacaatcgatatggggttcttagcagaggcacaaacggaagaggagctgccggagagattaatcggagctgttagagtttgccaaatggagatgtcgtcagcgtttgttgtcgacgcgccaccaccgcagcaactgccgtcacaaccgtgtagaacattaagttcggcgaaagttaaccatgacgaggacgaggattgagattaaaccacaacatgtcaatgaagtatttttctctttactgtctctcaaagaatctgaaacaattttcattaatctcaatcaaatttatattaattatttttttgttaatggattttgtaattaatcaagaggtttcatgatatatttaatggaattaaattgaagttcgacg

SEQ ID NO: 26281 - protein, 302 aa, Arabidopsis thaliana
  peptide (1)..(302): Ceres Seq. ID no. 12395665
MSPSKQRHRCSTGENKSKPVRSASSSAIPEWITESTNGGSLRRVDPDTGTDGWASPPGDVFSLRSDSYLSKKQKTPAGDYLLSPAGMDWLKSSTKLENALARPDNRVAHALRKAQSRGQSLKSFIFAVNLQIPGKDHHSAVFYFATEEPIPSGSLLHRFINGDDAFRNQRFKIVNRIVKGPWVVKAAVGNYSACLLGKALTCNYHRGPNYFEIDVDISSSAIATAILRLALGYVTSVTIDMGFLAEAQTEEELPERLIGAVRVCQMEMSSAFVVDAPPPQQLPSQPCRTLSSAKVNHDEDED

SEQ ID NO: 26282 - protein, 216 aa, Arabidopsis thaliana
  peptide (1)..(216): Ceres Seq. ID no. 12395666
MDWLKSSTKLENALARPDNRVAHALRKAQSRGQSLKSFIFAVNLQIPGKDHHSAVFYFATEEPIPSGSLLHRFINGDDAFRNQRFKIVNRIVKGPWVVKAAVGNYSACLLGKALTCNYHRGPNYFEIDVDISSSAIATAILRLALGYVTSVTIDMGFLAEAQTEEELPERLIGAVRVCQMEMSSAFVVDAPPPQQLPSQPCRTLSSAKVNHDEDED

SEQ ID NO: 26283 - DNA, 1214 bp, Arabidopsis thaliana
  misc_feature (1)..(1214): Ceres Seq. ID no. 12333771
  misc_feature (1)..(1214): Ortholog of  Ceres SEQ ID NO 14310819 as cited in SEQ ID NO 53794
aggttgttgagttttgtactaaaaccctaaatcagagaatttagcgttgtttcttcttcaatagacacaaaaaatggggaggaagagaaagcacagcgagactgttacggcggcaccggtgaaggattctgctccggagagacctcaaaggactcttttgggttggaaagataagaaggaagatgctgagaactctaaacctgcgtatgcgtctgtattcaggaataaagagaaggttctcgttacttgttcccgtcggatcaatttcaggtatcgacatttgatgttgaacatggtgtcacttttacctcactgtaagaaggatagtaaggtagaagctaagagcagtagaggtgccactcttaatgagctcatcgagcttaagggctcttcttcctgtttgtttttcgagtgtaggaagcacaaagatctttacatgtggatggtgaagtcccctggtggaccttccgttaagttcttggttaatgctgttcacacaatggaggagctgaaactcactggaaatcatctgaaaggttcacgcccacttttgacattctcatccaattttgaaaacgatgcacactggaaacttctgaaagagatgttaactcagatttttggaattcccgagggacataggaagtctaaaccttaccatgaccatgtgtttgttttctccattgttgatgaccatatatggttccgtaattaccagatatcggtacctcataacgagtcagacaagattgcacgaggcgatctggataaaatgactcttattgaggttggtccaaggttttgtttaaatccaattaagatatttggaggcagctttggaggtacaacgctttacgagaacccattctatgtatctccaaaccagattcgagctttggagaaaagaaataaagctgggaaatttgctaagaaaataaaggcaaaaacaagaagaaagatgcatgaactctcaaacccattggagcctgatgaatttacagacatgtggaacgatgaatgataaaagtcgaccaaagtttcttttttgctattgtaaacttctaaattcacaaaatcaacacagttttgtctttaccactgctttcttccctccctcttatctatcaaagagtgagattgcgaatttatcacacagttgtctaagtaaagactgctatgtcacgaagaagcaaatcaattttatttctttatcg

SEQ ID NO: 26284 - protein, 315 aa, Arabidopsis thaliana
  peptide (1)..(315): Ceres Seq. ID no. 12333772
MGRKRKHSETVTAAPVKDSAPERPQRTLLGWKDKKEDAENSKPAYASVFRNKEKVLVTCSRRINFRYRHLMLNMVSLLPHCKKDSKVEAKSSRGATLNELIELKGSSSCLFFECRKHKDLYMWMVKSPGGPSVKFLVNAVHTMEELKLTGNHLKGSRPLLTFSSNFENDAHWKLLKEMLTQIFGIPEGHRKSKPYHDHVFVFSIVDDHIWFRNYQISVPHNESDKIARGDLDKMTLIEVGPRFCLNPIKIFGGSFGGTTLYENPFYVSPNQIRALEKRNKAGKFAKKIKAKTRRKMHELSNPLEPDEFTDMWNDE

SEQ ID NO: 26285 - protein, 245 aa, Arabidopsis thaliana
  peptide (1)..(245): Ceres Seq. ID no. 12333773
MLNMVSLLPHCKKDSKVEAKSSRGATLNELIELKGSSSCLFFECRKHKDLYMWMVKSPGGPSVKFLVNAVHTMEELKLTGNHLKGSRPLLTFSSNFENDAHWKLLKEMLTQIFGIPEGHRKSKPYHDHVFVFSIVDDHIWFRNYQISVPHNESDKIARGDLDKMTLIEVGPRFCLNPIKIFGGSFGGTTLYENPFYVSPNQIRALEKRNKAGKFAKKIKAKTRRKMHELSNPLEPDEFTDMWNDE

SEQ ID NO: 26286 - protein, 242 aa, Arabidopsis thaliana
  peptide (1)..(242): Ceres Seq. ID no. 12333774
MVSLLPHCKKDSKVEAKSSRGATLNELIELKGSSSCLFFECRKHKDLYMWMVKSPGGPSVKFLVNAVHTMEELKLTGNHLKGSRPLLTFSSNFENDAHWKLLKEMLTQIFGIPEGHRKSKPYHDHVFVFSIVDDHIWFRNYQISVPHNESDKIARGDLDKMTLIEVGPRFCLNPIKIFGGSFGGTTLYENPFYVSPNQIRALEKRNKAGKFAKKIKAKTRRKMHELSNPLEPDEFTDMWNDE

SEQ ID NO: 26287 - DNA, 845 bp, Arabidopsis thaliana
  misc_feature (1)..(845): Ceres Seq. ID no. 12333349
  misc_feature (1)..(845): Ortholog of  Ceres SEQ ID NO 13662677 as cited in SEQ ID NO 63824
aggacactttaacgtttcttcacttgcccaaagctctctgaagataaaagacaaaagagtaaagagagaaagaagcacgaaaaccaaatcaatggcggtttcagtttcaatcctcaccgtcgtcactgctcttcacctccttgctttcgtcttcgccttcggtgccgagcgtcgccgtagcaccgctgtgccggttccggatcagtacgatgagaagactatttgtaagtacggaactgaggcgtcgacagtgtacggtatgtcggcgtttgggttgcttcttgttagccaagcggtggttaacggtgttactaagtgtctctgttttggaaagggtcttgttactggtacttcttacactgtctgggctattgtcttcttcgttgtttcttgggtaagctttttaggagctgaggcgtgcttgttgggtggatcagcgaggaacgcgtaccacactaaaagtgaaggcatttacaaagggaaagagctttcgtgtgccgtcttacccgttggagtctttgctgctggagctgctttcactctcatgtctttgattgcaaccattctttactacttggctcattctaaggctgatactggcggatgggagaagcatcagaacgatggcattaacattggtatgaccactccttcagatgctccaaagcaacaaaacaccgagtttaacaaggtctaaaccagtttctgtttggtcttatgttggctatgcttttaaaaacagggtaaaactataaaaaaaatagttgtttgttaattgtcaatataaacttgtgtcgtcagatataatgttggcttatgtatgtctatgagaaatttggtttggc

SEQ ID NO: 26288 - protein, 231 aa, Arabidopsis thaliana
  peptide (1)..(231): Ceres Seq. ID no. 12333350
GHFNVSSLAQSSLKIKDKRVKRERSTKTKSMAVSVSILTVVTALHLLAFVFAFGAERRRSTAVPVPDQYDEKTICKYGTEASTVYGMSAFGLLLVSQAVVNGVTKCLCFGKGLVTGTSYTVWAIVFFVVSWVSFLGAEACLLGGSARNAYHTKSEGIYKGKELSCAVLPVGVFAAGAAFTLMSLIATILYYLAHSKADTGGWEKHQNDGINIGMTTPSDAPKQQNTEFNKV

SEQ ID NO: 26289 - protein, 201 aa, Arabidopsis thaliana
  peptide (1)..(201): Ceres Seq. ID no. 12333351
MAVSVSILTVVTALHLLAFVFAFGAERRRSTAVPVPDQYDEKTICKYGTEASTVYGMSAFGLLLVSQAVVNGVTKCLCFGKGLVTGTSYTVWAIVFFVVSWVSFLGAEACLLGGSARNAYHTKSEGIYKGKELSCAVLPVGVFAAGAAFTLMSLIATILYYLAHSKADTGGWEKHQNDGINIGMTTPSDAPKQQNTEFNKV

SEQ ID NO: 26290 - protein, 145 aa, Arabidopsis thaliana
  peptide (1)..(145): Ceres Seq. ID no. 12333352
MSAFGLLLVSQAVVNGVTKCLCFGKGLVTGTSYTVWAIVFFVVSWVSFLGAEACLLGGSARNAYHTKSEGIYKGKELSCAVLPVGVFAAGAAFTLMSLIATILYYLAHSKADTGGWEKHQNDGINIGMTTPSDAPKQQNTEFNKV

SEQ ID NO: 26291 - DNA, 929 bp, Arabidopsis thaliana
  misc_feature (1)..(929): Ceres Seq. ID no. 13489769
  misc_feature (1)..(929): Ortholog of  Ceres SEQ ID NO 15177923 as cited in SEQ ID NO 0
atcggtttaaagtattgaaccaatccaatatatgaggccggtttaataatccttcgatttcgattcgaactttggtttcatctccccaaatcgaagcgaaggtctctcaacaatggcgaaatcagtgtcgacggcggcttcctcgcttgtgcaaaaccttaggcggtacatcaagaagccatggcagatcaccggaccttgcgctcacccagaatacctcgaagctgttccaaaggcgacggagtatcgtctccgatgccccgctacgattgatgaagaagcaatcgtgccttcctcggatccagagaccgtatacaacatcgtataccacggcagagatcagcgcagaaaccgcccaccgatccggcgatacgtattgacgaaggacaacgtggttcagatgatgaacgagaagaagagttttgacgtctcggacttccctaaggtttacttgaccaccacagtcgaggaggatttggatacgcgtggtggaggctacgagaaataatcaggttttttgctcatctcgtctttctcttgtaacgtactgatgggggaaagactgcgcgtgacacatctctaccgacaaaaaatatctcccttgtttgattattcaataagatatctagtagctttatgaactacaaaacacttcattttccttcacaagaaacagattgttgttcagttgtattccctatctttatgatgaacccgtgatcgtgattgtttcaagtctgagtgatttagaaatggttaataatgtaatacaaagagagaaccagttagtagtagtctctgtgttcttggggaccctttcttctctccatcagtgactacctttcttctctgcatcagtgactaagaagaaggagaagaagcagaaacactatgtctccatcaatttgtgtttttatgaattttacccc

SEQ ID NO: 26292 - protein, 131 aa, Arabidopsis thaliana
  peptide (1)..(131): Ceres Seq. ID no. 13489770
MAKSVSTAASSLVQNLRRYIKKPWQITGPCAHPEYLEAVPKATEYRLRCPATIDEEAIVPSSDPETVYNIVYHGRDQRRNRPPIRRYVLTKDNVVQMMNEKKSFDVSDFPKVYLTTTVEEDLDTRGGGYEK

SEQ ID NO: 26293 - DNA, 1053 bp, Arabidopsis thaliana
  misc_feature (1)..(1053): Ceres Seq. ID no. 13488231
  misc_feature (1)..(1053): Ortholog of  Ceres SEQ ID NO 14313060 as cited in SEQ ID NO 59447
  misc_feature (1)..(1053): Ortholog of  Ceres SEQ ID NO 12624676 as cited in SEQ ID NO 61197
atccaactatccatccatcatcggtcagtccccaaagtcggcggaagaagatggtgtcgccgaaaatagcaccgtcgatgctgtcatcggacttcgcaaatctagcggcggaggccaatcggatgatcgatttgggcgccaactggcttcacatggatattatggacgggcattttgtccctaatcttacgattggtgctcctgtcatcgagagtttgcgaaagcacactaatgcatatcttgattgccaccttatggtgacgaaccccatggattacgttgcacagatggctaaagctggggcttctggtttcacattccacgtcgaggtggcccaagataattggcaacaacttgtcgagaagattaagtctactggaatgagaccaggcgtggctctaaagcctggaacacctgttgaacaagtctatcctctggttgaagggacaactccggttgaaatggttcttgtgatgactgtagaacctggatttggaggccagaagtttatgcctgacatgatggacaaggtccgggcattgaggcaaaaatacccaacacttgatattcaggtggatggcggcttaggcccttcaacgatcgacacagcggctgcagcaggcgccaactgtattgttgctggaagttcagtgtttggagctccggagccaggagatgtcatctcccttctgaggaccagtgttgagaaagcccaacccaccacttgaaagctgcacgtggtggcggtggtgctgagacggcgttgtattctcatcggaagatggtacctcttcgtttctctcaaggttaaaaagctggtcctttatgttttaaaatcatctcgtgaatcgtgatacttagtcttggttccaagaactgtataacgtcattttgagttattaattccctcaccacacagattatttcataggagttgggtaccaagagtagtgtgcaatgtataattagtaatttaataaacgtattaggttcagtcattttggaatggttataattatgaatacaagtatacaacatgaacattccagtgtt

SEQ ID NO: 26294 - protein, 241 aa, Arabidopsis thaliana
  peptide (1)..(241): Ceres Seq. ID no. 13488232
PTIHPSSVSPQSRRKKMVSPKIAPSMLSSDFANLAAEANRMIDLGANWLHMDIMDGHFVPNLTIGAPVIESLRKHTNAYLDCHLMVTNPMDYVAQMAKAGASGFTFHVEVAQDNWQQLVEKIKSTGMRPGVALKPGTPVEQVYPLVEGTTPVEMVLVMTVEPGFGGQKFMPDMMDKVRALRQKYPTLDIQVDGGLGPSTIDTAAAAGANCIVAGSSVFGAPEPGDVISLLRTSVEKAQPTT

SEQ ID NO: 26295 - protein, 225 aa, Arabidopsis thaliana
  peptide (1)..(225): Ceres Seq. ID no. 13488233
MVSPKIAPSMLSSDFANLAAEANRMIDLGANWLHMDIMDGHFVPNLTIGAPVIESLRKHTNAYLDCHLMVTNPMDYVAQMAKAGASGFTFHVEVAQDNWQQLVEKIKSTGMRPGVALKPGTPVEQVYPLVEGTTPVEMVLVMTVEPGFGGQKFMPDMMDKVRALRQKYPTLDIQVDGGLGPSTIDTAAAAGANCIVAGSSVFGAPEPGDVISLLRTSVEKAQPTT

SEQ ID NO: 26296 - protein, 216 aa, Arabidopsis thaliana
  peptide (1)..(216): Ceres Seq. ID no. 13488234
MLSSDFANLAAEANRMIDLGANWLHMDIMDGHFVPNLTIGAPVIESLRKHTNAYLDCHLMVTNPMDYVAQMAKAGASGFTFHVEVAQDNWQQLVEKIKSTGMRPGVALKPGTPVEQVYPLVEGTTPVEMVLVMTVEPGFGGQKFMPDMMDKVRALRQKYPTLDIQVDGGLGPSTIDTAAAAGANCIVAGSSVFGAPEPGDVISLLRTSVEKAQPTT

SEQ ID NO: 26297 - DNA, 770 bp, Arabidopsis thaliana
  misc_feature (1)..(770): Ceres Seq. ID no. 12331696
  misc_feature (1)..(770): Ortholog of  Ceres SEQ ID NO 15225138 as cited in SEQ ID NO 65710
  misc_feature (1)..(770): Ortholog of  Ceres SEQ ID NO 15176713 as cited in SEQ ID NO 0
acgattctcccgccaccacaccacagctttttgcttcatctccttcttactctctgtgtctctaactcctcgtgcactcagacatcacagatatggcttgtgttcggtcgattggttctttaacttctgtcaaccattctcaacgaaatgttcctcgctcaggcattgtcttatcttcatgctctgttcttcccatcaaaagctcatctttcactggatcccctgtttctctcccgcgggctcaaccatcatcccgaacagctctaagaccgatgaaacccgtctctatcacgatgatggtaaagccggcgctccaattcatccaagggacggatgagatgacaatccctgatgttaagctgactcgatcaagagacggaagcaacggaatggcactgttctctttcgaccaaccatccgttttcgactcgagcggtgaagtcggagagattacaggattgtacatgattgatgaggaaggtgtgattcagtcgacggatgtgaacgcgagattcgtgaatgggaaaccggaagggattgtggcgaagcacataatgcgatcgccgaaagaatgggacaggttcatgaggtttatggagcgatactcggaccagaatggcttgcagtttgttaagaagcaatgaggttggagagaattttcaatgagcaaaacaaaatgtgtatgttacattaaattttttcactcttttgatttataatcttgtactctcctagttttgatctttacttgagtttcaacttacaatggc

SEQ ID NO: 26298 - protein, 183 aa, Arabidopsis thaliana
  peptide (1)..(183): Ceres Seq. ID no. 12331697
MACVRSIGSLTSVNHSQRNVPRSGIVLSSCSVLPIKSSSFTGSPVSLPRAQPSSRTALRPMKPVSITMMVKPALQFIQGTDEMTIPDVKLTRSRDGSNGMALFSFDQPSVFDSSGEVGEITGLYMIDEEGVIQSTDVNARFVNGKPEGIVAKHIMRSPKEWDRFMRFMERYSDQNGLQFVKKQ

SEQ ID NO: 26299 - protein, 123 aa, Arabidopsis thaliana
  peptide (1)..(123): Ceres Seq. ID no. 12331698
MKPVSITMMVKPALQFIQGTDEMTIPDVKLTRSRDGSNGMALFSFDQPSVFDSSGEVGEITGLYMIDEEGVIQSTDVNARFVNGKPEGIVAKHIMRSPKEWDRFMRFMERYSDQNGLQFVKKQ

SEQ ID NO: 26300 - protein, 116 aa, Arabidopsis thaliana
  peptide (1)..(116): Ceres Seq. ID no. 12331699
MMVKPALQFIQGTDEMTIPDVKLTRSRDGSNGMALFSFDQPSVFDSSGEVGEITGLYMIDEEGVIQSTDVNARFVNGKPEGIVAKHIMRSPKEWDRFMRFMERYSDQNGLQFVKKQ

SEQ ID NO: 26301 - DNA, 1233 bp, Arabidopsis thaliana
  misc_feature (1)..(1233): Ceres Seq. ID no. 13495914
  misc_feature (1)..(1233): Ortholog of  Ceres SEQ ID NO 12618740 as cited in SEQ ID NO 65846
  misc_feature (1)..(1233): Ortholog of  Ceres SEQ ID NO 12635446 as cited in SEQ ID NO 0
cacgagattttttattttaatatcacgctcgaatatacaattcggaatgtgcagatgttttttttgaaggcaatttagaaaaatagacaaaaatcgaacaaacatatatagaaatagagatctaaataaaaacatttattttatttcctcttggaaacaaggaaaaaatgaattggggtgggtgacgtggcagtcatacccttgccacacccttcctatacgcatataaacagcagctgcgaggagagagagatttcagagtattttctagggtttcgttttttttaaagatttagagaaaaaagtgagttattaagagattccaatcaaaatgagcggagacaacggcggtggtgagaggcgcaaaggctccgtcaagtggtttgatacccagaagggtttcggcttcatcactcctgacgacggtggcgacgatctcttcgttcaccagtcctccatcagatctgagggtttccgtagcctcgctgccgaagaagccgtagagttcgaggttgagatcgacaacaacaaccgtcccaaggccatcgatgtttctggacccgacggcgctcccgtccaaggaaacagcggtggtggttcatctggcggacgcggcggtttcggtggaggaagaggaggtggacgcggatctggaggtggatacggcggtggcggtggtggatacggaggaagaggaggtggtggtcgaggaggcagcgactgctacaagtgtggtgagcccggtcacatggcgagagactgttctgaaggcggtggaggttacggaggaggcggcggtggctacggaggtggaggcggatacggcggaggaggtggtggttacggaggtggtggccgtggaggtggtggcggcgggggaagctgctacagctgtggcgagtcgggacatttcgccagggattgcaccagcggtggacgttaaaaccaacgccggttacgcggtggagaagagtgagttggttatctcacaagtgatcggttctttctcccgccgccttctatctctctattatccactttttgcttattatgatggatctctatctttgttagttggttttttcttgatggtttcggattaggactcttcttttggttttgctacttatggttggttttatttatggtacttgtgatatgggtgaaatgctctacttgttgctctgtttcaagtgttcataatatgcgaacaaatattctgggttttgtttc

SEQ ID NO: 26302 - protein, 203 aa, Arabidopsis thaliana
  peptide (1)..(203): Ceres Seq. ID no. 13495915
MSGDNGGGERRKGSVKWFDTQKGFGFITPDDGGDDLFVHQSSIRSEGFRSLAAEEAVEFEVEIDNNNRPKAIDVSGPDGAPVQGNSGGGSSGGRGGFGGGRGGGRGSGGGYGGGGGGYGGRGGGGRGGSDCYKCGEPGHMARDCSEGGGGYGGGGGGYGGGGGYGGGGGGYGGGGRGGGGGGGSCYSCGESGHFARDCTSGGR

SEQ ID NO: 26303 - protein, 184 aa, Arabidopsis thaliana
  peptide (1)..(184): Ceres Seq. ID no. 13495916
MFLDPTALPSKETAVVVHLADAAVSVEEEEVDADLEVDTAVAVVDTEEEEVVVEEAATATSVVSPVTWRETVLKAVEVTEEAAVATEVEADTAEEVVVTEVVAVEVVAAGEAATAVASRDISPGIAPAVDVKTNAGYAVEKSELVISQVIGSFSRRLLSLYYPLFAYYDGSLSLLVGFFLMVSD

SEQ ID NO: 26304 - DNA, 2368 bp, Arabidopsis thaliana
  misc_feature (1)..(2368): Ceres Seq. ID no. 14307859
  misc_feature (1)..(2368): Ortholog of  Ceres SEQ ID NO 13663839 as cited in SEQ ID NO 60834
  misc_feature (1)..(2368): Ortholog of  Ceres SEQ ID NO 14313284 as cited in SEQ ID NO 67146
  misc_feature (1)..(2368): Ortholog of  Ceres SEQ ID NO 14308925 as cited in SEQ ID NO 0
atcaatacttctctctgctctcaagataattttgttctctcaatttcattcttaaaccctaattcttcgtttttatccgatctacgaaaatggcggacgctgaaacctttgctttccaagctgagatcaaccagttgctctccctcatcatcaataccttttactccaacaaggagatcttcctccgtgaactcatcagtaactcttctgatgctttagacaagattagattcgagtccttgacggacaagagcaagcttgatggtcagcctgagctcttcattcacatcattcccgacaagactaacaacaccttgaccattattgatagtggtatcggcatgaccaaggctgatttggtcaacaacctcggaacaattgcaagatctggtaccaaggaattcatggaagcgttggctgctggagctgatgttagcatgattggtcagtttggtgttggtttctactctgcatacttggttgctgacaaagtggttgttactaccaagcacaatgacgatgagcaatacgtgtgggagtctcaggccggtggatctttcaccgtgaccagagacacctctggggaggctcttggtagaggaacaaagatggtcctttacctcaaggaagaccagttggagtaccttgaggagcgaaggcttaaggatttggtgaagaagcactctgagttcatcagctacccaatctctctctggattgagaagaccattgagaaggagatctctgatgatgaagaggaggaagaaaagaaagatgaggaaggaaaggttgaggaggtcgatgaggagaaagagaaggaggagaagaaaaagaagaagattaaggaggtttctcatgagtgggatttggtgaacaagcagaaaccgatttggatgaggaagccagaggagatcaacaaggaggagtacgctgctttctacaagagtttgagcaatgactgggaagagcatttggctgtgaagcatttctcagttgaaggacagcttgagttcaaagctatcctctttgttcccaagagagctcctttcgatctctttgacactaagaagaagcccaacaacatcaagctctatgtccgtcgtgtcttcatcatggacaactgtgaagacatcattcctgagtaccttgggtttgttaagggtattgttgactctgaagatcttcctctcaacatctcgagagaaacattgcagcagaacaagatcctcaaggtcatccgcaagaaccttgtgaagaagtgccttgagctcttctttgagattgctgagaacaaggaggactacaacaagttttacgaagctttctctaagaacctgaagcttggtatccacgaggactcccaaaacagaaccaagattgctgagttgctccgttaccactcaaccaagagcggtgatgaattgaccagtctcaaggactacgtgacaaggatgaaggaaggtcagaacgatatcttctacatcactggtgagagcaagaaggctgttgagaactctccattccttgagaagctcaagaagaagggtattgaagttctctacatggttgatgcgattgatgagtacgctattggtcagcttaaggaattcgagggaaagaaacttgtttctgcaaccaaggaaggtctgaaactggatgagaccgaagatgaaaagaagaagaaagaagagctcaaggagaagtttgaaggactctgcaaagtgataaaagatgttttgggagacaaggtcgagaaggttattgtttctgaccgtgttgtggactcaccttgctgtcttgtaaccggcgaatatggctggactgcaaacatggagaggatcatgaaagctcaagccttgagagacagcagcatggctggttacatgtcgagcaagaagacaatggagattaacccagagaactccatcatggatgagctgagaaagagagctgacgcagacaagaacgataagtctgtgaaggatcttgtgcttctcctctttgagaccgcccttctcacctctggtttcagccttgacgagccaaacactttcggaagcaggattcacaggatgttgaagcttggactgagtattgatgacgatgatgctgttgaagccgatgctgagatgcctccccttgaagacgatgctgatgcggaaggtagcaagatggaggaagtcgactaatttatcacacaaaagtcgactaaattattagcggttttttaagactctggttttctttttactttttcgttaaaacttctgttattttggtgatcatcttcacgaattttttctatggtttcatttgttgtgaagatatttccctgaactcggttttatgacaaagattctattatgcc

SEQ ID NO: 26305 - protein, 699 aa, Arabidopsis thaliana
  peptide (1)..(699): Ceres Seq. ID no. 14307860
MADAETFAFQAEINQLLSLIINTFYSNKEIFLRELISNSSDALDKIRFESLTDKSKLDGQPELFIHIIPDKTNNTLTIIDSGIGMTKADLVNNLGTIARSGTKEFMEALAAGADVSMIGQFGVGFYSAYLVADKVVVTTKHNDDEQYVWESQAGGSFTVTRDTSGEALGRGTKMVLYLKEDQLEYLEERRLKDLVKKHSEFISYPISLWIEKTIEKEISDDEEEEEKKDEEGKVEEVDEEKEKEEKKKKKIKEVSHEWDLVNKQKPIWMRKPEEINKEEYAAFYKSLSNDWEEHLAVKHFSVEGQLEFKAILFVPKRAPFDLFDTKKKPNNIKLYVRRVFIMDNCEDIIPEYLGFVKGIVDSEDLPLNISRETLQQNKILKVIRKNLVKKCLELFFEIAENKEDYNKFYEAFSKNLKLGIHEDSQNRTKIAELLRYHSTKSGDELTSLKDYVTRMKEGQNDIFYITGESKKAVENSPFLEKLKKKGIEVLYMVDAIDEYAIGQLKEFEGKKLVSATKEGLKLDETEDEKKKKEELKEKFEGLCKVIKDVLGDKVEKVIVSDRVVDSPCCLVTGEYGWTANMERIMKAQALRDSSMAGYMSSKKTMEINPENSIMDELRKRADADKNDKSVKDLVLLLFETALLTSGFSLDEPNTFGSRIHRMLKLGLSIDDDDAVEADAEMPPLEDDADAEGSKMEEVD

SEQ ID NO: 26306 - protein, 615 aa, Arabidopsis thaliana
  peptide (1)..(615): Ceres Seq. ID no. 14307861
MTKADLVNNLGTIARSGTKEFMEALAAGADVSMIGQFGVGFYSAYLVADKVVVTTKHNDDEQYVWESQAGGSFTVTRDTSGEALGRGTKMVLYLKEDQLEYLEERRLKDLVKKHSEFISYPISLWIEKTIEKEISDDEEEEEKKDEEGKVEEVDEEKEKEEKKKKKIKEVSHEWDLVNKQKPIWMRKPEEINKEEYAAFYKSLSNDWEEHLAVKHFSVEGQLEFKAILFVPKRAPFDLFDTKKKPNNIKLYVRRVFIMDNCEDIIPEYLGFVKGIVDSEDLPLNISRETLQQNKILKVIRKNLVKKCLELFFEIAENKEDYNKFYEAFSKNLKLGIHEDSQNRTKIAELLRYHSTKSGDELTSLKDYVTRMKEGQNDIFYITGESKKAVENSPFLEKLKKKGIEVLYMVDAIDEYAIGQLKEFEGKKLVSATKEGLKLDETEDEKKKKEELKEKFEGLCKVIKDVLGDKVEKVIVSDRVVDSPCCLVTGEYGWTANMERIMKAQALRDSSMAGYMSSKKTMEINPENSIMDELRKRADADKNDKSVKDLVLLLFETALLTSGFSLDEPNTFGSRIHRMLKLGLSIDDDDAVEADAEMPPLEDDADAEGSKMEEVD

SEQ ID NO: 26307 - protein, 594 aa, Arabidopsis thaliana
  peptide (1)..(594): Ceres Seq. ID no. 14307862
MEALAAGADVSMIGQFGVGFYSAYLVADKVVVTTKHNDDEQYVWESQAGGSFTVTRDTSGEALGRGTKMVLYLKEDQLEYLEERRLKDLVKKHSEFISYPISLWIEKTIEKEISDDEEEEEKKDEEGKVEEVDEEKEKEEKKKKKIKEVSHEWDLVNKQKPIWMRKPEEINKEEYAAFYKSLSNDWEEHLAVKHFSVEGQLEFKAILFVPKRAPFDLFDTKKKPNNIKLYVRRVFIMDNCEDIIPEYLGFVKGIVDSEDLPLNISRETLQQNKILKVIRKNLVKKCLELFFEIAENKEDYNKFYEAFSKNLKLGIHEDSQNRTKIAELLRYHSTKSGDELTSLKDYVTRMKEGQNDIFYITGESKKAVENSPFLEKLKKKGIEVLYMVDAIDEYAIGQLKEFEGKKLVSATKEGLKLDETEDEKKKKEELKEKFEGLCKVIKDVLGDKVEKVIVSDRVVDSPCCLVTGEYGWTANMERIMKAQALRDSSMAGYMSSKKTMEINPENSIMDELRKRADADKNDKSVKDLVLLLFETALLTSGFSLDEPNTFGSRIHRMLKLGLSIDDDDAVEADAEMPPLEDDADAEGSKMEEVD

SEQ ID NO: 26308 - DNA, 1150 bp, Arabidopsis thaliana
  misc_feature (1)..(1150): Ceres Seq. ID no. 12439637
  misc_feature (1)..(1150): Ortholog of  Ceres SEQ ID NO 14301765 as cited in SEQ ID NO 61955
  misc_feature (1)..(1150): Ortholog of  Ceres SEQ ID NO 12618205 as cited in SEQ ID NO 65153
  misc_feature (1)..(1150): Ortholog of  Ceres SEQ ID NO 12620986 as cited in SEQ ID NO 66720
aaaactcaagggtttgatttttcttcttcaactacgttaagatttctcctacacttttctttttcaccgtattctcttttagtcctcgattctctacgcgtttcagcgtcaagtcttctagatctctaaagccttcgtgctcgccaatataaatctctgagatcggtcccgtaaaatcggattcgcgtcgtttttgagtaaaaaaaatggcgcaacaatcgttgatctacagtttcgtcgctcgtggtaccgttatcctcgttgagttcacagatttcaaaggcaatttcacatcaatcgctgctcagtgccttcagaagcttccttcttctaacaacaagtttacctacaactgcgatggtcacacgttcaattacctcgtcgaaaatggattcacctattgtgttgttgcagttgattctgctgggaggcagattcctatggctttcttggaacgagttaaggaggatttcaacaagagatatggtggtggaaaggctgcaactgctcaagcaaacagcttgaataaagaatttgggtcgaaactgaaagagcatatgcagtattgcatggatcatcctgatgagattagcaagcttgctaaggttaaagctcaagtgtctgaagttaaaggtgttatgatggaaaacattgagaaggttcttgaccgtggtgagaagattgagcttttggttgacaaaacagaaaaccttcgctcacaggcgcaagattttagaacacaaggaactcaaatgagaagaaagatgtggtttcagaacatgaagataaagctcattgtccttgcaattatcattgccttgattctcatcatcatcctctcaatttgtgggggattcaactgcggtaaataagtctggaacatttcttcccggcgttatcgactgcgctctgtgcttcccaagatctctgagaatatcttcattcagttcgttgtgctacctttttgttttgtttttgtttttgtgatttctatattctcatactatatgtttcttcttagattgtacttcttgaaatttgttttgtataggctatatatattatacatatatgtatgcatgttcgacaatctgcaatgttgctattgctggtactgacactaattcttgcaaaccaatatttggacgat

SEQ ID NO: 26309 - protein, 221 aa, Arabidopsis thaliana
  peptide (1)..(221): Ceres Seq. ID no. 12439638
MAQQSLIYSFVARGTVILVEFTDFKGNFTSIAAQCLQKLPSSNNKFTYNCDGHTFNYLVENGFTYCVVAVDSAGRQIPMAFLERVKEDFNKRYGGGKAATAQANSLNKEFGSKLKEHMQYCMDHPDEISKLAKVKAQVSEVKGVMMENIEKVLDRGEKIELLVDKTENLRSQAQDFRTQGTQMRRKMWFQNMKIKLIVLAIIIALILIIILSICGGFNCGK

SEQ ID NO: 26310 - protein, 143 aa, Arabidopsis thaliana
  peptide (1)..(143): Ceres Seq. ID no. 12439639
MAFLERVKEDFNKRYGGGKAATAQANSLNKEFGSKLKEHMQYCMDHPDEISKLAKVKAQVSEVKGVMMENIEKVLDRGEKIELLVDKTENLRSQAQDFRTQGTQMRRKMWFQNMKIKLIVLAIIIALILIIILSICGGFNCGK

SEQ ID NO: 26311 - DNA, 1219 bp, Arabidopsis thaliana
  misc_feature (1)..(1219): Ceres Seq. ID no. 12422525
  misc_feature (1)..(1219): Ortholog of  Ceres SEQ ID NO 13599631 as cited in SEQ ID NO 0
aatctataatcattttgtgactcttggagcactctcttctctttgtctctgtgactcacattcatccaatccaggaggcatgtcgacatctgaggataaaccggaaatcatcagtagagtagttcatcaggagggtgacgtggaaatcgtcgatagaagtcagaaggataaggacgaggaaaaagaagaagggaaaggtggattcctcgataaggtgaaagatttcattcatgacattggtgagaaactcgagggaaccattggctttgggaagccaactgctgatgtctctgcgattcatatccctaagatcaatcttgagagggcagatattgttgtggatgtgcttgtcaagaacccgaatccagttcctatccctctcatcgatgtcaactacctggtcgagagcgatgggaggaaactggtttctggtttgatcccggatgctggaacactcaaggctcatggaggaagaactgtgaagataccattgacgttgatctatgatgacatcaagagcacttacaacgatatcaaccccgggatgatcataccttacagaatcaaggttgatctgattgtggatgtgccagtattgggaagactgacattgccgctggagaaatgtggagagatcccaattccaaagaaacctgatgttgatatcgagaagattaagttccagaagttctctttggaggaaaccgtggcgattctccatgtgaggcttcagaacatgaatgatttcgacttggggctcaatgacttggactgtgaagtttggctgtgtgatgtaagcattgggaaagcagagatcgcggactcgatcaagcttgacaaaaacggaagcggattgattaatgtgccgatgacattccgaccaaaggactttggttctgcgctttgggatatgattcgtggtaaaggaacagggtacacaatcaaaggtaatattgatgttgatacaccatttggagctatgaagcttcctattatcaaggaaggtggagagacccgtctgaagaaggaagatgatgatgacgacgatgagtaataaggaaacaaagtgctgcagagacagaatggtcatagttactaaatctccgatcttgaaatgtctatttaaaattaaaaaaaaaaagaaagacttgttttgtgtgctttttgataactgatggatcagacttttgaatagagccgtctttttattggacttctt

SEQ ID NO: 26312 - protein, 350 aa, Arabidopsis thaliana
  peptide (1)..(350): Ceres Seq. ID no. 12422526
IYNHFVTLGALSSLCLCDSHSSNPGGMSTSEDKPEIISRVVHQEGDVEIVDRSQKDKDEEKEEGKGGFLDKVKDFIHDIGEKLEGTIGFGKPTADVSAIHIPKINLERADIVVDVLVKNPNPVPIPLIDVNYLVESDGRKLVSGLIPDAGTLKAHGGRTVKIPLTLIYDDIKSTYNDINPGMIIPYRIKVDLIVDVPVLGRLTLPLEKCGEIPIPKKPDVDIEKIKFQKFSLEETVAILHVRLQNMNDFDLGLNDLDCEVWLCDVSIGKAEIADSIKLDKNGSGLINVPMTFRPKDFGSALWDMIRGKGTGYTIKGNIDVDTPFGAMKLPIIKEGGETRLKKEDDDDDDE

SEQ ID NO: 26313 - protein, 324 aa, Arabidopsis thaliana
  peptide (1)..(324): Ceres Seq. ID no. 12422527
MSTSEDKPEIISRVVHQEGDVEIVDRSQKDKDEEKEEGKGGFLDKVKDFIHDIGEKLEGTIGFGKPTADVSAIHIPKINLERADIVVDVLVKNPNPVPIPLIDVNYLVESDGRKLVSGLIPDAGTLKAHGGRTVKIPLTLIYDDIKSTYNDINPGMIIPYRIKVDLIVDVPVLGRLTLPLEKCGEIPIPKKPDVDIEKIKFQKFSLEETVAILHVRLQNMNDFDLGLNDLDCEVWLCDVSIGKAEIADSIKLDKNGSGLINVPMTFRPKDFGSALWDMIRGKGTGYTIKGNIDVDTPFGAMKLPIIKEGGETRLKKEDDDDDDE

SEQ ID NO: 26314 - DNA, 1066 bp, Arabidopsis thaliana
  misc_feature (1)..(1066): Ceres Seq. ID no. 13500015
  misc_feature (1)..(1066): Ortholog of  Ceres SEQ ID NO 13505291 as cited in SEQ ID NO 56614
  misc_feature (1)..(1066): Ortholog of  Ceres SEQ ID NO 13596535 as cited in SEQ ID NO 62321
  misc_feature (1)..(1066): Ortholog of  Ceres SEQ ID NO 13597394 as cited in SEQ ID NO 63457
ggtattcattgtcggggagtttctcctctctgcaccagatttcaaatccttgtttacaatctcttctctggctatcttagagggatttttgattgagattttaaaattttctgagttggattagttggttggtaaagagatggatccggatacggtgaagtcgaccctctcgaatctggcattcgggaatgtattggcggcagctgctagagattataaaaaggaagttcttgcaaatgaaaaggcacaaggatcaagacctgtcaacgaggaagttgatcttgacgaattgatggatgatccagagctagaaaagttgcacgcagataggattgcagcactcaggagagaagtggaaaagagagaagcattcaaaagacaaggacatggtgaataccgagaagttagcgaaggcgacttcttgggagaagtcacaaggagtgaaaaagttatatgtcacttctaccacaaggagttctatcgctgcaagataatggacaagcatttgaagacccttgctcctagacatgtggacacaaagttcattaagatggacgctgagaacgctcccttcttcgtcaccaagcttgcaatcaagactttgccgtgtgttatcctttttagcaagggaatcgcgatggataggcttgtcgggtttcaagatctaggtgccaaggacgatttctccacgacgaagctggagaatcttctggtcaagaaaggaatgcttagtgaaaagagaaaagaggaagatgaggaagattacgagtatcaagaaagcatacgtcggtccgttaggtcttcagcgaatgtcgactctgattcagattgatctcgaagcttttctcatagtagacctccgagcctttttgtattttgttttcaccgctgctctgtttgaattgtttggtctatgaatcttatgcttctataagtctttatagtgggaaatttcgttccacaatgtttttgtttatttgaaaactgcaaattatggtgtctaaccatataaacaaaagtcattaggtgaatgacaagatttgaaaagaaatgataagagttgagc

SEQ ID NO: 26315 - protein, 230 aa, Arabidopsis thaliana
  peptide (1)..(230): Ceres Seq. ID no. 13500016
MDPDTVKSTLSNLAFGNVLAAAARDYKKEVLANEKAQGSRPVNEEVDLDELMDDPELEKLHADRIAALRREVEKREAFKRQGHGEYREVSEGDFLGEVTRSEKVICHFYHKEFYRCKIMDKHLKTLAPRHVDTKFIKMDAENAPFFVTKLAIKTLPCVILFSKGIAMDRLVGFQDLGAKDDFSTTKLENLLVKKGMLSEKRKEEDEEDYEYQESIRRSVRSSANVDSDSD

SEQ ID NO: 26316 - protein, 179 aa, Arabidopsis thaliana
  peptide (1)..(179): Ceres Seq. ID no. 13500017
MDDPELEKLHADRIAALRREVEKREAFKRQGHGEYREVSEGDFLGEVTRSEKVICHFYHKEFYRCKIMDKHLKTLAPRHVDTKFIKMDAENAPFFVTKLAIKTLPCVILFSKGIAMDRLVGFQDLGAKDDFSTTKLENLLVKKGMLSEKRKEEDEEDYEYQESIRRSVRSSANVDSDSD

SEQ ID NO: 26317 - DNA, 1194 bp, Arabidopsis thaliana
  misc_feature (1)..(1194): Ceres Seq. ID no. 12335479
  misc_feature (1)..(1194): Ortholog of  Ceres SEQ ID NO 14305963 as cited in SEQ ID NO 52290
  misc_feature (1)..(1194): Ortholog of  Ceres SEQ ID NO 14307492 as cited in SEQ ID NO 59504
  misc_feature (1)..(1194): Ortholog of  Ceres SEQ ID NO 13597255 as cited in SEQ ID NO 63874
atccaaagaattaaaaaccataataaaaaaaaaaaagataaaaagacgaattccagaaaaaaaaagacgcaaaatcgtcgtcgtcgtcttcgtctttgcatttcgtcggaatcttttgattcttgaatcggaatatctctgtttttgttttatccggactcaagatcaattcggattcttggaatttatttgattttttgttgttgttgttgaaaaagtggattctttggtttcgatttgtaataatcttcgtagaaaaaatggattctgattcttggagtgatcgtctcgcatcggcttcaagaagatatcagctcgatttcttgtctcgatctgacaatttcttggggtttgaggagatagaaggagaagatgacttcagggaggagtatgcttgcccgttctgttcagactattttgatatcgtctctctatgctgtcacattgatgaagatcatcctatggatgcaaaaaatggggtatgtcccgtttgtgcggtgaaagtgagctctgatatgattgctcatataaccctacaacatgcaaatatgttcaaggtgacgcggaaaaggaaatcaagaagaggcggggctcaatccatgctatcgatcttgaagagagagtttcctgatggaaattttcagagcctatttgaaggaacatcacgtgctgtatcctcttcttctgccagtatagctgctgatcctttactgtcttcattcatttcaccaatggctgatgactttttcatttctgagtcaagtctatgtgcagacacaagttctgccaagaaaacattgaatcagagtttgcctgaaaggaatgttgagaagcagtctctttcagcagaggatcacagagaaaagttgaaacagagcgagttcgttcaagggatattgagctctatgattcttgaagacggcttataaaggagaaacatattccggtaacttgtctacggttagatgattcagcgattggaaaatgtaacggctttgttgtgttaaacgcaacaattgatttgggaaagggtttgggaataagcagaataatgtaaaagagagacatgataatgagtattatttttaacttatgaactacatatttgctttaatgaacactcgaattgtctgtacaccgtaggtcttacaaaaaaaacccaaaaaaaaggtatgtatttgatcatatatttgc

SEQ ID NO: 26318 - protein, 222 aa, Arabidopsis thaliana
  peptide (1)..(222): Ceres Seq. ID no. 12335480
MDSDSWSDRLASASRRYQLDFLSRSDNFLGFEEIEGEDDFREEYACPFCSDYFDIVSLCCHIDEDHPMDAKNGVCPVCAVKVSSDMIAHITLQHANMFKVTRKRKSRRGGAQSMLSILKREFPDGNFQSLFEGTSRAVSSSSASIAADPLLSSFISPMADDFFISESSLCADTSSAKKTLNQSLPERNVEKQSLSAEDHREKLKQSEFVQGILSSMILEDGL

SEQ ID NO: 26319 - protein, 155 aa, Arabidopsis thaliana
  peptide (1)..(155): Ceres Seq. ID no. 12335481
MDAKNGVCPVCAVKVSSDMIAHITLQHANMFKVTRKRKSRRGGAQSMLSILKREFPDGNFQSLFEGTSRAVSSSSASIAADPLLSSFISPMADDFFISESSLCADTSSAKKTLNQSLPERNVEKQSLSAEDHREKLKQSEFVQGILSSMILEDGL

SEQ ID NO: 26320 - protein, 137 aa, Arabidopsis thaliana
  peptide (1)..(137): Ceres Seq. ID no. 12335482
MIAHITLQHANMFKVTRKRKSRRGGAQSMLSILKREFPDGNFQSLFEGTSRAVSSSSASIAADPLLSSFISPMADDFFISESSLCADTSSAKKTLNQSLPERNVEKQSLSAEDHREKLKQSEFVQGILSSMILEDGL

SEQ ID NO: 26321 - DNA, 1001 bp, Arabidopsis thaliana
  misc_feature (1)..(1001): Ceres Seq. ID no. 13489962
  misc_feature (1)..(1001): Ortholog of  Ceres SEQ ID NO 15169786 as cited in SEQ ID NO 59711
aaggaagagaagagtgtccatatcatagattaaaaatcattcgttaatcaaaccacaaaatctaacttccacacacaaaacacacatacacaagaaaataaaaataaaaatggaattagttgaagagaccattccaaaagaagggaaaaagatgggagaaagaattgtggtcgacaaagcttatctttaccaagaagacaaaccactcaccgtctgcaagacttctctcttctacaccggcgatggcttcgccgcctatgactgccgtggtgatatcatcttcagggttgattcttatggacctgacacaagagataacgatgagattgtcctcatggacgcgaccgggaagtgtctccttaccgttaaacgaaagagaccaactctacaccaaagatgggaaggttttctcggcgagagatcggaaggtcagaaaccgatattcagcgtccgtagatcgtcgataatcggacggtgtacgatggaagtagaagtttacgacggaacaggagaagagtacattatcgatggagacttctcgcaacgaagctgtctcatatacgacacgaagaaatgtactgtggctgagatcaaacgcaaagtagacgcgtcaacgaacgtgatgcttggtcgagatgtgttcactctagagattaaaccgggttttgatggcgctttcgcgatgggtttggtcgttgtgcttgaccagatcaacggtgatgatccagttgagattggtgatgaacaggtacacccttttgtagaggattagtgtcggtctctctctcacctctctcagcggtcttcacgttaacatatcgaatctaatctttagtttttcaatctttggatttggaccatatgggattatggagatctgtttgtatcattctgtgttaagtcatttaagttgctacgttacataatatttatagactatagtctgtctcgggaaattcgttgactatacgtttgatgttacaaaattatttgtgcgttcc

SEQ ID NO: 26322 - protein, 220 aa, Arabidopsis thaliana
  peptide (1)..(220): Ceres Seq. ID no. 13489963
MELVEETIPKEGKKMGERIVVDKAYLYQEDKPLTVCKTSLFYTGDGFAAYDCRGDIIFRVDSYGPDTRDNDEIVLMDATGKCLLTVKRKRPTLHQRWEGFLGERSEGQKPIFSVRRSSIIGRCTMEVEVYDGTGEEYIIDGDFSQRSCLIYDTKKCTVAEIKRKVDASTNVMLGRDVFTLEIKPGFDGAFAMGLVVVLDQINGDDPVEIGDEQVHPFVED

SEQ ID NO: 26323 - protein, 206 aa, Arabidopsis thaliana
  peptide (1)..(206): Ceres Seq. ID no. 13489964
MGERIVVDKAYLYQEDKPLTVCKTSLFYTGDGFAAYDCRGDIIFRVDSYGPDTRDNDEIVLMDATGKCLLTVKRKRPTLHQRWEGFLGERSEGQKPIFSVRRSSIIGRCTMEVEVYDGTGEEYIIDGDFSQRSCLIYDTKKCTVAEIKRKVDASTNVMLGRDVFTLEIKPGFDGAFAMGLVVVLDQINGDDPVEIGDEQVHPFVED

SEQ ID NO: 26324 - protein, 145 aa, Arabidopsis thaliana
  peptide (1)..(145): Ceres Seq. ID no. 13489965
MDATGKCLLTVKRKRPTLHQRWEGFLGERSEGQKPIFSVRRSSIIGRCTMEVEVYDGTGEEYIIDGDFSQRSCLIYDTKKCTVAEIKRKVDASTNVMLGRDVFTLEIKPGFDGAFAMGLVVVLDQINGDDPVEIGDEQVHPFVED

SEQ ID NO: 26325 - DNA, 1267 bp, Arabidopsis thaliana
  misc_feature (1)..(1267): Ceres Seq. ID no. 12488498
  misc_feature (1)..(1267): Ortholog of  Ceres SEQ ID NO 14303417 as cited in SEQ ID NO 54923
  misc_feature (1)..(1267): Ortholog of  Ceres SEQ ID NO 15169084 as cited in SEQ ID NO 59115
  misc_feature (1)..(1267): Ortholog of  Ceres SEQ ID NO 12635513 as cited in SEQ ID NO 0
  misc_feature (1)..(1267): Ortholog of  Ceres SEQ ID NO 15179044 as cited in SEQ ID NO 0
aaccgataagcctgtatctccgctcaaaccaatctcatccgtcaaatcaaccacgtcatctaatccaacggtagatactcagccatcaaaccacagccacaaaaactcgtttcaagaaacgaataaacttacaaaatcccctccaagtcttatttcttcacaaccatctctgaactcatctttcaatctctcttgattccaatccattcttcttcaagtgccgggttctcgggtcggatcttctaagtctagctagggataatggctactgtcactactcatgcctcggcctcgattttccgaccttgtacttcaaagccaagattcctcaccggttcttccggtaggttgaaccgcgacttgtcgtttacatcgatcggttcatcggccaaaacgtcgtcgttcaaggttgaagctaagaaaggagaatggttgcccggtttggcatcgcctgattatctcaccggcagtcttgccggtgacaatgggtttgacccgttgggtctagcagaggatccagagaacttgaaatggttcgtccaggcagagctggtcaacggacgatgggctatgctcggtgtcgctgggatgcttttgccggaagttttcaccaagatcggaatcataaatgttcctgagtggtacgatgctgggaaagagcagtattttgcatcgtcgtcgacattgttcgtgatcgagttcatattgtttcattacgttgagatcagacggtggcaagacatcaagaacccaggaagtgtgaaccaagaccctatctttaagcaatacagcttacctaagggtgaagttggttaccctggtggaatctttaacccgcttaactttgctcctacgcaagaggccaaggagaaagagctagcaaacgggaggttggcgatgttggcattcttagggtttgtggttcaacacaatgtgactggaaaaggaccatttgagaatctgttgcagcacttgtctgacccatggcacaacactattgtccaaaccttcaactaaagagtgaagacagacttatgatctcatacctatctatcttccatcactttcatgtctgtctgtgagtgtgtttcatcttagagttcttggtttttgagcttgaattattgttgaaccgttgtagctccatgaacaaatttggaatcttcaatgtacagaggaactaagttaatcaacattgttgtactctttaatatctattattcatgtggcaacagttatatataagcacaccataacttagattcac

SEQ ID NO: 26326 - protein, 251 aa, Arabidopsis thaliana
  peptide (1)..(251): Ceres Seq. ID no. 12488499
MATVTTHASASIFRPCTSKPRFLTGSSGRLNRDLSFTSIGSSAKTSSFKVEAKKGEWLPGLASPDYLTGSLAGDNGFDPLGLAEDPENLKWFVQAELVNGRWAMLGVAGMLLPEVFTKIGIINVPEWYDAGKEQYFASSSTLFVIEFILFHYVEIRRWQDIKNPGSVNQDPIFKQYSLPKGEVGYPGGIFNPLNFAPTQEAKEKELANGRLAMLAFLGFVVQHNVTGKGPFENLLQHLSDPWHNTIVQTFN

SEQ ID NO: 26327 - protein, 148 aa, Arabidopsis thaliana
  peptide (1)..(148): Ceres Seq. ID no. 12488500
MLGVAGMLLPEVFTKIGIINVPEWYDAGKEQYFASSSTLFVIEFILFHYVEIRRWQDIKNPGSVNQDPIFKQYSLPKGEVGYPGGIFNPLNFAPTQEAKEKELANGRLAMLAFLGFVVQHNVTGKGPFENLLQHLSDPWHNTIVQTFN

SEQ ID NO: 26328 - protein, 142 aa, Arabidopsis thaliana
  peptide (1)..(142): Ceres Seq. ID no. 12488501
MLLPEVFTKIGIINVPEWYDAGKEQYFASSSTLFVIEFILFHYVEIRRWQDIKNPGSVNQDPIFKQYSLPKGEVGYPGGIFNPLNFAPTQEAKEKELANGRLAMLAFLGFVVQHNVTGKGPFENLLQHLSDPWHNTIVQTFN

SEQ ID NO: 26329 - DNA, 1139 bp, Arabidopsis thaliana
  misc_feature (1)..(1139): Ceres Seq. ID no. 12333768
  misc_feature (1)..(1139): Ortholog of  Ceres SEQ ID NO 13596816 as cited in SEQ ID NO 62287
actttttatggataatagatctagtagtcttcgtttactaattctctctcacaaatccaaacaaaaaggaactgtgtacttaaatcctgtaatgacaatttcatacatactaaacaagaactattaaatactaggataatacatacttgaagaaataacaactcttcatgtagtcgtgtctttttacaatttaaaatttgaaaaataaaagttacatttacctttacaacgtcggtcgttttccacacaatagattacccacttctactcgatagttttctctataatatagagacaaaagaagagagcatttaaattctaaagaacaaaaaaggaaaaacagagcagccatgagagcttctgtttattcattgatcctactcttcttctcgtgtttactacatctatcaaagtctcaaccgttcctcggagtaaactacggcctaaccgccgacaatcttccacctccgtcagcgagtgcaaagctccttcaatccacaactttccaaaaagtccgtctttacggatccgacccggctgtaatcaaggccctagcaaacacggggatcgagatcgtcatcggggcgtctaacggcgatgtacccggtctagcatcggacccgagtttcgcccgaagctgggtcgaaaccaacgtggtaccttattatccagcgagcaagattgttctcattgccgtgggaaatgagatcacatcatacggcgacaatagtctcatgtcgcagcttttgccggcgatgaaaaatgtccaaggtgcccttgaggctgtgtcacttggtggcggaaaaatcaaagtctcgacagtacacataatgtcggttctagccgggtcagaccctccttcggccgcggtatttaaaccggagcatgctgatatattgaagggattgctagagtttaatagtgaaaccgggtcgccattcgcggttaacccgtacccgttttttgcttaccaagatgaccggagacccgaaacgttggcttattgcttgtttcaggccaatcctggccgtgtcgaccccaacagcaacctcaagtatatgaacatgttcgatgctcaggttgatgcggtgtattcagctttgaactcgatggggttcaaggacgtagagataatggtc

SEQ ID NO: 26330 - protein, 263 aa, Arabidopsis thaliana
  peptide (1)..(263): Ceres Seq. ID no. 12333769
MRASVYSLILLFFSCLLHLSKSQPFLGVNYGLTADNLPPPSASAKLLQSTTFQKVRLYGSDPAVIKALANTGIEIVIGASNGDVPGLASDPSFARSWVETNVVPYYPASKIVLIAVGNEITSYGDNSLMSQLLPAMKNVQGALEAVSLGGGKIKVSTVHIMSVLAGSDPPSAAVFKPEHADILKGLLEFNSETGSPFAVNPYPFFAYQDDRRPETLAYCLFQANPGRVDPNSNLKYMNMFDAQVDAVYSALNSMGFKDVEIMV

SEQ ID NO: 26331 - protein, 135 aa, Arabidopsis thaliana
  peptide (1)..(135): Ceres Seq. ID no. 12333770
MSQLLPAMKNVQGALEAVSLGGGKIKVSTVHIMSVLAGSDPPSAAVFKPEHADILKGLLEFNSETGSPFAVNPYPFFAYQDDRRPETLAYCLFQANPGRVDPNSNLKYMNMFDAQVDAVYSALNSMGFKDVEIMV

SEQ ID NO: 26332 - DNA, 2118 bp, Arabidopsis thaliana
  misc_feature (1)..(2118): Ceres Seq. ID no. 12329069
  misc_feature (1)..(2118): Ortholog of  Ceres SEQ ID NO 14302419 as cited in SEQ ID NO 66752
aaaaaccaaatccgccataactctctctctctctcccacttcccacagagagacacattcatgccagcaatgccaggtctcgtctcagtcaaaactccttccgatacaccgccgctacgtgtagccgtaccagacacgcaacctctctcaaacccgccgcgaactccgatgaagaaaaccccttcctctacaccatctcgatccaaaccatcaccaaatagatccaccggcaaaaaagattccccaaccgtatcctcctccaccgcagccgtaatcgacgtcgacgatccatctctagataatccagatctcggtcctttccttctaaaattagctcgtgacgctattgcttctggtgaaggtcctaacaaagcattagattacgcgatccgagcaactaagtcctttgagagatgttgcgccgccgttgctccgcctattcccggtggtagcgatggtggacctgttcttgatctcgctatgagccttcatgttctcgctgctatttactgtagtctcggccgatttgatgaagctgtaccacctcttgaacgagctattcaagtccctgatccgactcgtggccctgaccactctctcgctgcgttttctggtcatatgcaacttggtgatacgttgtctatgcttggtcagattgatagatctattgcttgttatgaagaaggtcttaagatccagatccagactttgggtgatactgatccacgagttggtgaaacttgcaggtacttagcagaagcatatgttcaagcaatgcagttcaataaagcggaagagttatgcaagaagactctagagattcaccgagcgcatagtgaacctgcttcactggaggaagcagctgataggagattgatggcaattatctgcgaggctaaaggagattatgaaaacgctcttgagcatcttgttcttgctagtatggctatgattgcgagtggacaagaatctgaggttgcatcgattgatgttagtattgggaatatttacatgtcgctgtgccggtttgatgaagctgtgttttcatatcagaaggctcttactgtgtttaaggcttctaaaggagagactcatccgacggttgcgtcagtgtttgttagattggctgagctttaccatagaacagggaaacttcgtgagtctaagtcttactgtgagaatgcgttgaggatatacaataagccggtgcctgggacaactgtggaggagattgctggtggattaactgagatttctgctatttatgagtctgtagatgaacctgaggaagcattgaagctacttcagaagtctatgaaattgcttgaggataagccaggacagcagagcgccattgcagggttagaggcacggatgggagttatgtattacacagtggggaggtacgaggacgcaagaaacgcgtttgagagcgctgtgacaaagctacgggcagcaggtgagaaatctgccttcttcggtgttgtattaaaccagatgggactagcctgcgttcagcttttcaagattgatgaagcgggtgagctgtttgaagaagcaagaggtattcttgaacaagaacgtggaccgtgcgatcaggacactctcggtgtttatagcaatctagctgctacctatgacgctatgggaaggatagaggatgcgattgagatattagagcaggttctgaagctgagagaggaaaagctcgggactgcgaatccggattttgaagacgagaagaaacgtttggccgagcttttgaaggaagctgggcggtcgcggaactacaaagccaagtcgctccagaatctgattgatccaaatgcaagacctccgaagaaagagtcttctgctaagaaatggcccagcctcggtttcaagttctgaggaaaaaattatcatataaaataaatcatccacatatatattcaatattttattttattgttattgttatattttttatctgatctattttctgtatcataatctgaggttgatgaattaatttcatgtatagtgtttttatttgagtttggtgaaatactgccaagatggtgagctgtttgtttgagtttgaaatttctttaattcaatcacttttttcttcttctg

SEQ ID NO: 26333 - protein, 629 aa, Arabidopsis thaliana
  peptide (1)..(629): Ceres Seq. ID no. 12329070
KNQIRHNSLSLSHFPQRDTFMPAMPGLVSVKTPSDTPPLRVAVPDTQPLSNPPRTPMKKTPSSTPSRSKPSPNRSTGKKDSPTVSSSTAAVIDVDDPSLDNPDLGPFLLKLARDAIASGEGPNKALDYAIRATKSFERCCAAVAPPIPGGSDGGPVLDLAMSLHVLAAIYCSLGRFDEAVPPLERAIQVPDPTRGPDHSLAAFSGHMQLGDTLSMLGQIDRSIACYEEGLKIQIQTLGDTDPRVGETCRYLAEAYVQAMQFNKAEELCKKTLEIHRAHSEPASLEEAADRRLMAIICEAKGDYENALEHLVLASMAMIASGQESEVASIDVSIGNIYMSLCRFDEAVFSYQKALTVFKASKGETHPTVASVFVRLAELYHRTGKLRESKSYCENALRIYNKPVPGTTVEEIAGGLTEISAIYESVDEPEEALKLLQKSMKLLEDKPGQQSAIAGLEARMGVMYYTVGRYEDARNAFESAVTKLRAAGEKSAFFGVVLNQMGLACVQLFKIDEAGELFEEARGILEQERGPCDQDTLGVYSNLAATYDAMGRIEDAIEILEQVLKLREEKLGTANPDFEDEKKRLAELLKEAGRSRNYKAKSLQNLIDPNARPPKKESSAKKWPSLGFKF

SEQ ID NO: 26334 - protein, 609 aa, Arabidopsis thaliana
  peptide (1)..(609): Ceres Seq. ID no. 12329071
MPAMPGLVSVKTPSDTPPLRVAVPDTQPLSNPPRTPMKKTPSSTPSRSKPSPNRSTGKKDSPTVSSSTAAVIDVDDPSLDNPDLGPFLLKLARDAIASGEGPNKALDYAIRATKSFERCCAAVAPPIPGGSDGGPVLDLAMSLHVLAAIYCSLGRFDEAVPPLERAIQVPDPTRGPDHSLAAFSGHMQLGDTLSMLGQIDRSIACYEEGLKIQIQTLGDTDPRVGETCRYLAEAYVQAMQFNKAEELCKKTLEIHRAHSEPASLEEAADRRLMAIICEAKGDYENALEHLVLASMAMIASGQESEVASIDVSIGNIYMSLCRFDEAVFSYQKALTVFKASKGETHPTVASVFVRLAELYHRTGKLRESKSYCENALRIYNKPVPGTTVEEIAGGLTEISAIYESVDEPEEALKLLQKSMKLLEDKPGQQSAIAGLEARMGVMYYTVGRYEDARNAFESAVTKLRAAGEKSAFFGVVLNQMGLACVQLFKIDEAGELFEEARGILEQERGPCDQDTLGVYSNLAATYDAMGRIEDAIEILEQVLKLREEKLGTANPDFEDEKKRLAELLKEAGRSRNYKAKSLQNLIDPNARPPKKESSAKKWPSLGFKF

SEQ ID NO: 26335 - protein, 606 aa, Arabidopsis thaliana
  peptide (1)..(606): Ceres Seq. ID no. 12329072
MPGLVSVKTPSDTPPLRVAVPDTQPLSNPPRTPMKKTPSSTPSRSKPSPNRSTGKKDSPTVSSSTAAVIDVDDPSLDNPDLGPFLLKLARDAIASGEGPNKALDYAIRATKSFERCCAAVAPPIPGGSDGGPVLDLAMSLHVLAAIYCSLGRFDEAVPPLERAIQVPDPTRGPDHSLAAFSGHMQLGDTLSMLGQIDRSIACYEEGLKIQIQTLGDTDPRVGETCRYLAEAYVQAMQFNKAEELCKKTLEIHRAHSEPASLEEAADRRLMAIICEAKGDYENALEHLVLASMAMIASGQESEVASIDVSIGNIYMSLCRFDEAVFSYQKALTVFKASKGETHPTVASVFVRLAELYHRTGKLRESKSYCENALRIYNKPVPGTTVEEIAGGLTEISAIYESVDEPEEALKLLQKSMKLLEDKPGQQSAIAGLEARMGVMYYTVGRYEDARNAFESAVTKLRAAGEKSAFFGVVLNQMGLACVQLFKIDEAGELFEEARGILEQERGPCDQDTLGVYSNLAATYDAMGRIEDAIEILEQVLKLREEKLGTANPDFEDEKKRLAELLKEAGRSRNYKAKSLQNLIDPNARPPKKESSAKKWPSLGFKF

SEQ ID NO: 26336 - DNA, 1324 bp, Arabidopsis thaliana
  misc_feature (1)..(1324): Ceres Seq. ID no. 12334062
  misc_feature (1)..(1324): Ortholog of  Ceres SEQ ID NO 13598527 as cited in SEQ ID NO 64914
acaagctagctgatatgtcgggacggctgcaattccttttttattagtggagaaaaaaacaaaaaaaatacccgaaagagaaaaaaaagatagagatggagaatcacacgaccatgaaagtttcatctcttaattgtatcgatctagccaacgacgatcttaatcattctgttgtttccctcaaacaggcatgtttggattgtggatttttctatgtgatcaatcatgggataagcgaagagttcatggacgatgttttcgagcagagcaagaagctttttgctcttcctttagaagaaaagatgaaagtgttgagaaacgaaaagcatcgaggctatacacctgttcttgatgaacttttagatcccaagaatcaaatcaatggggatcacaaagagggttattacattggaattgaagttcctaaagatgatcctcattgggataagccattctatggtcctaacccttggcctgatgctgatgttttacctggttggcgagaaacaatggagaaatatcatcaagaagcatagagggtttctatggctattgcaagacttttggcgttagcacttgacttggatgtgggatactttgataggacggagatgcttggaaaacctattgcaactatgcgactgttgcggtatcaagggatttctgatccttcgaaaggaatatatgcatgtggagcacattctgacttcggaatgatgactctgttagccactgatggtgtaatgggactccagatatgcaaagataagaacgcgatgccgcagaagtgggaatatgtaccgccgattaaaggagcatttatagtgaatcttggcgatatgctggaacgttggagcaatggcttttttaaatccacgttgcatcgggttcttggaaacggtcaggaacgatattctattccattctttgtggaaccaaatcatgactgtctcgtggagtgtctcccaacctgcaagtcggaaagcgagcttcctaaatatccaccgatcaaatgttcgacatacctcacccagcgttacgaggaaacacatgcgaatttaagcatctaccaccaacaaacatgaatgctctttgtgagatcgacactaggagggagtctacaaaagtaaattttatgtaagttcgttgttagctcaaagcaaagtaaaagatattgtaagaatgtaaggtaagtgaagtttacggccacaccctcccttacttattgggagggatacacatacttatgtcttgtttcaatctatgtatctgtacgaattgacagtctctttaacgtttagaatctacacgggctagacttgtt

SEQ ID NO: 26337 - protein, 179 aa, Arabidopsis thaliana
  peptide (1)..(179): Ceres Seq. ID no. 12334063
MAIARLLALALDLDVGYFDRTEMLGKPIATMRLLRYQGISDPSKGIYACGAHSDFGMMTLLATDGVMGLQICKDKNAMPQKWEYVPPIKGAFIVNLGDMLERWSNGFFKSTLHRVLGNGQERYSIPFFVEPNHDCLVECLPTCKSESELPKYPPIKCSTYLTQRYEETHANLSIYHQQT

SEQ ID NO: 26338 - protein, 157 aa, Arabidopsis thaliana
  peptide (1)..(157): Ceres Seq. ID no. 12334064
MLGKPIATMRLLRYQGISDPSKGIYACGAHSDFGMMTLLATDGVMGLQICKDKNAMPQKWEYVPPIKGAFIVNLGDMLERWSNGFFKSTLHRVLGNGQERYSIPFFVEPNHDCLVECLPTCKSESELPKYPPIKCSTYLTQRYEETHANLSIYHQQT

SEQ ID NO: 26339 - protein, 149 aa, Arabidopsis thaliana
  peptide (1)..(149): Ceres Seq. ID no. 12334065
MRLLRYQGISDPSKGIYACGAHSDFGMMTLLATDGVMGLQICKDKNAMPQKWEYVPPIKGAFIVNLGDMLERWSNGFFKSTLHRVLGNGQERYSIPFFVEPNHDCLVECLPTCKSESELPKYPPIKCSTYLTQRYEETHANLSIYHQQT

SEQ ID NO: 26340 - DNA, 1336 bp, Arabidopsis thaliana
  misc_feature (1)..(1336): Ceres Seq. ID no. 12327627
  misc_feature (1)..(1336): Ortholog of  Ceres SEQ ID NO 12610930 as cited in SEQ ID NO 55892
aaaaacagcaaacagttttgatgataaaagccatggctctatcttctgccggcgtcgtctctcatcttcatcctccgtcgttttcttcgtcgtcaggtttatccgtcaacagagttctgtttcggaatcggaacgctagtccttgtggtctatctcttccaattctcaatccgtctcggtctgtacttgtttttgctcgtggcaagaatcgaaaaggattcgtgtcttcgtcttcttcgtctccgaagaaaaacaaaaagaaaagtttcgatggagctgataatggaggaggtgaggaggaggaggatccatttgaggcattgtttaatcttttagaagaagatttgaagaatgataactcggatgatgaggagataagtgaggaagagttagaggcattagccgatgagttagctcgagcattgggtgttggtgacgatgttgatgacatcgacttgtctggttcagtcactggtgatgttgatgttgataatgatgatgatgataatgaagatgaagatgatgatgacagcgaagaagatgaaagaccgactaagctgaagaattggcagcttaaaagattggcatatgcattgaaagctgggcgccgtaaaactagtattaaaaatctggcagctgaagtttgtcttgacagggcttatgttcttgaattgcttcgtgacccgcctccaaagctgctaatgctaagtgctacattaccagatgaaaaaccaccagtagcagcacctgagaactcctcacctgatccaagtcctgtggaatcatcatcagctgaagatgttgtggtcgaacctaaggaaaaagtaaaagatgaagcagtccatgtgatgcaacagagatggtctgctcagaaaagagtgaagaaagctcacattgaaacgctagagaaagtttacagaagatcaaaacgacccactaatgctgtggttagcagcattgttcaagtgaccaatcttccaaggaagcgagttttgaagtggtttgaagataaaagagcagaagacggagttccagataagcgagctccatatcaagctccggtttgatctaatattaacgttgagatgggcaatgattttgtatacttgattctcagaaactcatcaacattgtcgtcaaggacaatttgttttggtgatacgaggagtctttatattagtagattctgtccgaatccaatggtgtggctggatatgttagagtactactgtacttaagaaattttaggatatcttgtattcagtttttagttatttccttgctgagattgtgtcttgtagaaaaccgtttcaactttgtttggtttatggcggct

SEQ ID NO: 26341 - protein, 354 aa, Arabidopsis thaliana
  peptide (1)..(354): Ceres Seq. ID no. 12327628
KQQTVLMIKAMALSSAGVVSHLHPPSFSSSSGLSVNRVLFRNRNASPCGLSLPILNPSRSVLVFARGKNRKGFVSSSSSSPKKNKKKSFDGADNGGGEEEEDPFEALFNLLEEDLKNDNSDDEEISEEELEALADELARALGVGDDVDDIDLSGSVTGDVDVDNDDDDNEDEDDDDSEEDERPTKLKNWQLKRLAYALKAGRRKTSIKNLAAEVCLDRAYVLELLRDPPPKLLMLSATLPDEKPPVAAPENSSPDPSPVESSSAEDVVVEPKEKVKDEAVHVMQQRWSAQKRVKKAHIETLEKVYRRSKRPTNAVVSSIVQVTNLPRKRVLKWFEDKRAEDGVPDKRAPYQAPV

SEQ ID NO: 26342 - protein, 348 aa, Arabidopsis thaliana
  peptide (1)..(348): Ceres Seq. ID no. 12327629
MIKAMALSSAGVVSHLHPPSFSSSSGLSVNRVLFRNRNASPCGLSLPILNPSRSVLVFARGKNRKGFVSSSSSSPKKNKKKSFDGADNGGGEEEEDPFEALFNLLEEDLKNDNSDDEEISEEELEALADELARALGVGDDVDDIDLSGSVTGDVDVDNDDDDNEDEDDDDSEEDERPTKLKNWQLKRLAYALKAGRRKTSIKNLAAEVCLDRAYVLELLRDPPPKLLMLSATLPDEKPPVAAPENSSPDPSPVESSSAEDVVVEPKEKVKDEAVHVMQQRWSAQKRVKKAHIETLEKVYRRSKRPTNAVVSSIVQVTNLPRKRVLKWFEDKRAEDGVPDKRAPYQAPV

SEQ ID NO: 26343 - protein, 344 aa, Arabidopsis thaliana
  peptide (1)..(344): Ceres Seq. ID no. 12327630
MALSSAGVVSHLHPPSFSSSSGLSVNRVLFRNRNASPCGLSLPILNPSRSVLVFARGKNRKGFVSSSSSSPKKNKKKSFDGADNGGGEEEEDPFEALFNLLEEDLKNDNSDDEEISEEELEALADELARALGVGDDVDDIDLSGSVTGDVDVDNDDDDNEDEDDDDSEEDERPTKLKNWQLKRLAYALKAGRRKTSIKNLAAEVCLDRAYVLELLRDPPPKLLMLSATLPDEKPPVAAPENSSPDPSPVESSSAEDVVVEPKEKVKDEAVHVMQQRWSAQKRVKKAHIETLEKVYRRSKRPTNAVVSSIVQVTNLPRKRVLKWFEDKRAEDGVPDKRAPYQAPV

SEQ ID NO: 26344 - DNA, 1620 bp, Arabidopsis thaliana
  misc_feature (1)..(1620): Ceres Seq. ID no. 12325289
  misc_feature (1)..(1620): Ortholog of  Ceres SEQ ID NO 12625831 as cited in SEQ ID NO 65139
aattcatgttattatggtcaacaacagaatctgaatcccatttccccattttcggatcacaataactaacaaaccctagatttctatctatagtccttcgatctgtttctgtgtctccttaaagctgtgatttttgcaattggggtttgtgagattcgatcaattaattgtgtttgttgaatggaccttcttcgattgagagaaaagggtatatttttatctcagagaagaaggaaatggctgatttttatggcgatctctggagtttctggctatggagcttacaaggtttatcatttgccatctgttgccagaaaaaggaagcgtctttttaagcttttcggagccattgtctctgtagctgaattgatctctgattcagctgagaccttaagtatggtatcacgagacgtgaagggttttctcaattcagattcagatgaaatccctaacagcttgaagcagatcgcgaagatcacaacttcgaatgagtttacggattcgctttctagggtttctcaggctgtgactattggtgcctttcgtgggtacaaatccgaatcgtctattggtgattcaggaattgagaaatcatcagactcgagtgttgttgatagagtgattgataaggttttctcagaggctggaactggttttgtttcagttgttgttggtagctttgctaagaatcttgttcttggattttactctggtaaggtagagagtggtgtgaaatgtgagggttctgattcttctgagacacctagatgggtgactttgcttggtgatgacaagtgtagagagcttttagctgattgtattgagagattcaccagcactgcaattggtgtgtatcttgacaagacgatggatatcaatacttatgatcaaatctttgaaggcttgacgaatccgaaacatcaggacagtgtcaaggacgttcttgtttcggtttgtaacggtgctctcgagactattgttaggacatctcacgatgtgtttacatcatcaaggtctaagaatgcgatagaagagatcgaagatgatgatttcaagagtaatggttccgcgagaagcaagatggtttcggaatcaggagatggggtcaagagtaatgggtggactgaggctatcgcaactacattggcagttccgagcaatcggaggtttatgtttgatgtaacaggaagagtaacactagaaacgacgagatcaatcatcgcatttataatggtgaagacatttcaagggttcagaaaaagtattaatgtggttcatgaagaggttacagatagaggacgccaagcagttgaatatgttggagccaaatcttctgttataatcactgtgtgccttgcgttgtacttgcacatcataagcggctgtgttcggaattctcccataggcgtaagccagcatttttagttcttcagatgaagagcagatcatcgatttggttggatataggataatatttgttaggtacacaagatttatcagctcgttgtttatagttggagctgagaatattgtaaagattgtgtgcgtgtattagcacaacttgattcttattgatggatcatggatcatatatatatacatattgaaaaggttcttggc

SEQ ID NO: 26345 - protein, 414 aa, Arabidopsis thaliana
  peptide (1)..(414): Ceres Seq. ID no. 12325290
MDLLRLREKGIFLSQRRRKWLIFMAISGVSGYGAYKVYHLPSVARKRKRLFKLFGAIVSVAELISDSAETLSMVSRDVKGFLNSDSDEIPNSLKQIAKITTSNEFTDSLSRVSQAVTIGAFRGYKSESSIGDSGIEKSSDSSVVDRVIDKVFSEAGTGFVSVVVGSFAKNLVLGFYSGKVESGVKCEGSDSSETPRWVTLLGDDKCRELLADCIERFTSTAIGVYLDKTMDINTYDQIFEGLTNPKHQDSVKDVLVSVCNGALETIVRTSHDVFTSSRSKNAIEEIEDDDFKSNGSARSKMVSESGDGVKSNGWTEAIATTLAVPSNRRFMFDVTGRVTLETTRSIIAFIMVKTFQGFRKSINVVHEEVTDRGRQAVEYVGAKSSVIITVCLALYLHIISGCVRNSPIGVSQHF

SEQ ID NO: 26346 - protein, 391 aa, Arabidopsis thaliana
  peptide (1)..(391): Ceres Seq. ID no. 12325291
MAISGVSGYGAYKVYHLPSVARKRKRLFKLFGAIVSVAELISDSAETLSMVSRDVKGFLNSDSDEIPNSLKQIAKITTSNEFTDSLSRVSQAVTIGAFRGYKSESSIGDSGIEKSSDSSVVDRVIDKVFSEAGTGFVSVVVGSFAKNLVLGFYSGKVESGVKCEGSDSSETPRWVTLLGDDKCRELLADCIERFTSTAIGVYLDKTMDINTYDQIFEGLTNPKHQDSVKDVLVSVCNGALETIVRTSHDVFTSSRSKNAIEEIEDDDFKSNGSARSKMVSESGDGVKSNGWTEAIATTLAVPSNRRFMFDVTGRVTLETTRSIIAFIMVKTFQGFRKSINVVHEEVTDRGRQAVEYVGAKSSVIITVCLALYLHIISGCVRNSPIGVSQHF

SEQ ID NO: 26347 - protein, 342 aa, Arabidopsis thaliana
  peptide (1)..(342): Ceres Seq. ID no. 12325292
MVSRDVKGFLNSDSDEIPNSLKQIAKITTSNEFTDSLSRVSQAVTIGAFRGYKSESSIGDSGIEKSSDSSVVDRVIDKVFSEAGTGFVSVVVGSFAKNLVLGFYSGKVESGVKCEGSDSSETPRWVTLLGDDKCRELLADCIERFTSTAIGVYLDKTMDINTYDQIFEGLTNPKHQDSVKDVLVSVCNGALETIVRTSHDVFTSSRSKNAIEEIEDDDFKSNGSARSKMVSESGDGVKSNGWTEAIATTLAVPSNRRFMFDVTGRVTLETTRSIIAFIMVKTFQGFRKSINVVHEEVTDRGRQAVEYVGAKSSVIITVCLALYLHIISGCVRNSPIGVSQHF

SEQ ID NO: 26348 - DNA, 640 bp, Arabidopsis thaliana
  misc_feature (1)..(640): Ceres Seq. ID no. 12394923
  misc_feature (1)..(640): Ortholog of  Ceres SEQ ID NO 14305657 as cited in SEQ ID NO 52544
cagcaaaaaaaaaccctaaatttcttcacaaattcagcggcgatgaagttcaatccgcgtgtgagctcttctcgccggaagaacaggaaggctcacttcacagctccttcaagcgtgaggcgcgttctcatgagctcgccgttatccaaggatctccgtaacaaacacaacgtcagatccatgccgattcgtaaagacgacgaagtgcaagttgttcgtgggacgttcaagggaagagaagggaaggtgatgcaggtgtatcgccgcaagtgggtgattcacatcgagagaatcacaagggagaaagtcaacggatccacggtcaacgtcggagtcaatgcttcgaatgtgatgatcactaagctccgtctcgataaggataggaagtcgcttttggagcgtaaggctaatggacgcgccgccgccgataaggagaagggaaccaagttttcagccgaagatgtcatggagaacgtagattgatcttaacgtatggttttttcttcttcttttctagttttctattttgatttcattgatgatgatatgattcagaattcgaagttgaattttgtggttttcttatcaatgtacctcatttatgcttatatttctagctattgaaattggattgagattt

SEQ ID NO: 26349 - protein, 160 aa, Arabidopsis thaliana
  peptide (1)..(160): Ceres Seq. ID no. 12394924
QQKKTLNFFTNSAAMKFNPRVSSSRRKNRKAHFTAPSSVRRVLMSSPLSKDLRNKHNVRSMPIRKDDEVQVVRGTFKGREGKVMQVYRRKWVIHIERITREKVNGSTVNVGVNASNVMITKLRLDKDRKSLLERKANGRAAADKEKGTKFSAEDVMENVD

SEQ ID NO: 26350 - protein, 146 aa, Arabidopsis thaliana
  peptide (1)..(146): Ceres Seq. ID no. 12394925
MKFNPRVSSSRRKNRKAHFTAPSSVRRVLMSSPLSKDLRNKHNVRSMPIRKDDEVQVVRGTFKGREGKVMQVYRRKWVIHIERITREKVNGSTVNVGVNASNVMITKLRLDKDRKSLLERKANGRAAADKEKGTKFSAEDVMENVD

SEQ ID NO: 26351 - protein, 117 aa, Arabidopsis thaliana
  peptide (1)..(117): Ceres Seq. ID no. 12394926
MSSPLSKDLRNKHNVRSMPIRKDDEVQVVRGTFKGREGKVMQVYRRKWVIHIERITREKVNGSTVNVGVNASNVMITKLRLDKDRKSLLERKANGRAAADKEKGTKFSAEDVMENVD

SEQ ID NO: 26352 - DNA, 1323 bp, Arabidopsis thaliana
  misc_feature (1)..(1323): Ceres Seq. ID no. 12714731
  misc_feature (1)..(1323): Ortholog of  Ceres SEQ ID NO 13593955 as cited in SEQ ID NO 54278
  misc_feature (1)..(1323): Ortholog of  Ceres SEQ ID NO 13655302 as cited in SEQ ID NO 63307
  misc_feature (1)..(1323): Ortholog of  Ceres SEQ ID NO 13597380 as cited in SEQ ID NO 64054
  misc_feature (1)..(1323): Ortholog of  Ceres SEQ ID NO 12625474 as cited in SEQ ID NO 64169
  misc_feature (1)..(1323): Ortholog of  Ceres SEQ ID NO 13597502 as cited in SEQ ID NO 64681
  misc_feature (1)..(1323): Ortholog of  Ceres SEQ ID NO 13600397 as cited in SEQ ID NO 0
atcttaaatgcttgctccaattgttcttcccaattaatcgtgaggttcttgttttgcagaagcaaaaaattgaaaaaacttgtgtaaaaagcatgcagcgaaacagagttcttgcgttcttgttgctagcagctcagctcttggtgaagatacctgaaacgtgtgcaaaatttcccgcacttatcgtatttggtgactcaactgttgattcaggcaacaacaaccagatttctactgttctgaagagcaatttccagccatatggccgggattactttgacggcaaagcgactgggagattttcaaatggccggattgcaccagacttcatttctgaaggtttgggactcaagaacgcagtccctgcctacctagatccagcatacaacattgcagactttgccactggtgtctgtttcgcttcagctggaaccggcttagacaatgcaacctctgccgtgttatctgtaatgccgctatggaaggaagtggaatactacaaagaataccaaaccaggctaagaagctacttgggtgaagagaaagctaatgagattattagtgaatcactttacctgattagtatcggaaccaacgatttcctggagaattactatcttcttccccgcaagttacggaagtactcagtgaacgagtaccaatatttcctgataggaatagcagcagatttcgtgacagatatatacagactcggagctcggaagatgtctttgtcgggactctctccttttggatgcttacccctggaaagaacaactcagctcttttatggaagcaaatgtattgaagaatacaacattgtggctagagatttcaacatcaagatggaagagaaagtcttccagttgaacagagatctgaacggaatccagctggtgttttcaaatccatatgaccttgtttcagaaatcatataccatcctgaagcattcggtttcgaaaacgtaagaagtgcgtgttgcggaacgggatactatgagatgagctacttgtgtgataaaatgaacccattcacatgttcggatgcaagcaaatatgtattttgggactcatttcacccaacagagaagacaaacgccatcgtagcaaatcatgttctgaaatacgacttatctcggtttcagtgataaaataagaaattgctacaccacaagcactatagttattagttaacctactaaattctttcctccacaacatatatatttttttctgtgagtttcttgtctagatatcactcaaatcaagcttccaaaatgttgtacaagaaccattcttcttactctatgttcgtgtgactac

SEQ ID NO: 26353 - protein, 381 aa, Arabidopsis thaliana
  peptide (1)..(381): Ceres Seq. ID no. 12714732
LKCLLQLFFPINREVLVLQKQKIEKTCVKSMQRNRVLAFLLLAAQLLVKIPETCAKFPALIVFGDSTVDSGNNNQISTVLKSNFQPYGRDYFDGKATGRFSNGRIAPDFISEGLGLKNAVPAYLDPAYNIADFATGVCFASAGTGLDNATSAVLSVMPLWKEVEYYKEYQTRLRSYLGEEKANEIISESLYLISIGTNDFLENYYLLPRKLRKYSVNEYQYFLIGIAADFVTDIYRLGARKMSLSGLSPFGCLPLERTTQLFYGSKCIEEYNIVARDFNIKMEEKVFQLNRDLNGIQLVFSNPYDLVSEIIYHPEAFGFENVRSACCGTGYYEMSYLCDKMNPFTCSDASKYVFWDSFHPTEKTNAIVANHVLKYDLSRFQ

SEQ ID NO: 26354 - protein, 351 aa, Arabidopsis thaliana
  peptide (1)..(351): Ceres Seq. ID no. 12714733
MQRNRVLAFLLLAAQLLVKIPETCAKFPALIVFGDSTVDSGNNNQISTVLKSNFQPYGRDYFDGKATGRFSNGRIAPDFISEGLGLKNAVPAYLDPAYNIADFATGVCFASAGTGLDNATSAVLSVMPLWKEVEYYKEYQTRLRSYLGEEKANEIISESLYLISIGTNDFLENYYLLPRKLRKYSVNEYQYFLIGIAADFVTDIYRLGARKMSLSGLSPFGCLPLERTTQLFYGSKCIEEYNIVARDFNIKMEEKVFQLNRDLNGIQLVFSNPYDLVSEIIYHPEAFGFENVRSACCGTGYYEMSYLCDKMNPFTCSDASKYVFWDSFHPTEKTNAIVANHVLKYDLSRFQ

SEQ ID NO: 26355 - protein, 225 aa, Arabidopsis thaliana
  peptide (1)..(225): Ceres Seq. ID no. 12714734
MPLWKEVEYYKEYQTRLRSYLGEEKANEIISESLYLISIGTNDFLENYYLLPRKLRKYSVNEYQYFLIGIAADFVTDIYRLGARKMSLSGLSPFGCLPLERTTQLFYGSKCIEEYNIVARDFNIKMEEKVFQLNRDLNGIQLVFSNPYDLVSEIIYHPEAFGFENVRSACCGTGYYEMSYLCDKMNPFTCSDASKYVFWDSFHPTEKTNAIVANHVLKYDLSRFQ

SEQ ID NO: 26356 - DNA, 1329 bp, Arabidopsis thaliana
  misc_feature (1)..(1329): Ceres Seq. ID no. 12395764
  misc_feature (1)..(1329): Ortholog of  Ceres SEQ ID NO 12611971 as cited in SEQ ID NO 53205
  misc_feature (1)..(1329): Ortholog of  Ceres SEQ ID NO 12615976 as cited in SEQ ID NO 62440
aaaggattccgaaaaaaagcttagacctttttgatctgatacgtatctataaatctggaaaggagctgagagtttcaaggggttttaatttcgctgagaaaacgtttaattatctttgtcgagatggattgtggtatggagaattgtaatggtgggatctcaaacggtgacgttttgggtaagcatgagaagctcattatcgatacagacccaggaattgatgatagcatggcgatattgatggcgtttcaaacaccggagctggagatattaggattaactactgtgtttggtaatgtttctacacaagatgctactcgcaacgctttactcttgtgtgagattgctggcttccctgatgttcccgttgcagaaggaagttccgaacctttaaagggtggaattccgcgtgttgctgattttgtgcatggtaaaaacggactaggagatgtctctcttcctcctccgagtagaaagaaatctgagaaaagtgcagctgagtttctagatgagaaggtcgaagaatatccgggtgaagtcaccattctcgccctcggacctctaaccaacctggcattagccatcaaacgcgatagttcatttgcgagcaaggtgaagaaaattgttattcttggtggagctttcttttctttgggaaatgtcaatcctgcagctgaggctaatatatatggtgacccggaagcagctgatgttgttttcacatctggagcggatatcactgttgtcggtataaacatcacaacccaacttaaactatcagatgatgacctcttggagcttggtaactgcaaggggaaacactctaaattgataagcgatatgtgcaaattttatagagattggcacgtcaaatctgatggtgtttacggagtgtacctccatgacccagtcagctttgtggctgtagtacggcctgatttattcacatataagaaaggcgttgttcgggtggagactcaagggatatgtgttggccacacgctcatggatcaaggcctcaagagatggaacggaagcaatccgtgggtgggatattcaccgatatcagttgcttggacggttgacgtagaaggagttttggaatatgtcaaagcaaagctgatgaagccataaaagatgagtttcagagcacgttagagtgtgaatattcatttaaaatggcatcatcacattcatctcttctggttctaaccggaatcttatattcatctctgtatttgatctgtataaatgctatattcgattaaaagaaaagactaatgaatgaaaactatcttcgttttctcttatcgatctttgtttctttcc

SEQ ID NO: 26357 - protein, 336 aa, Arabidopsis thaliana
  peptide (1)..(336): Ceres Seq. ID no. 12395765
MDCGMENCNGGISNGDVLGKHEKLIIDTDPGIDDSMAILMAFQTPELEILGLTTVFGNVSTQDATRNALLLCEIAGFPDVPVAEGSSEPLKGGIPRVADFVHGKNGLGDVSLPPPSRKKSEKSAAEFLDEKVEEYPGEVTILALGPLTNLALAIKRDSSFASKVKKIVILGGAFFSLGNVNPAAEANIYGDPEAADVVFTSGADITVVGINITTQLKLSDDDLLELGNCKGKHSKLISDMCKFYRDWHVKSDGVYGVYLHDPVSFVAVVRPDLFTYKKGVVRVETQGICVGHTLMDQGLKRWNGSNPWVGYSPISVAWTVDVEGVLEYVKAKLMKP

SEQ ID NO: 26358 - protein, 332 aa, Arabidopsis thaliana
  peptide (1)..(332): Ceres Seq. ID no. 12395766
MENCNGGISNGDVLGKHEKLIIDTDPGIDDSMAILMAFQTPELEILGLTTVFGNVSTQDATRNALLLCEIAGFPDVPVAEGSSEPLKGGIPRVADFVHGKNGLGDVSLPPPSRKKSEKSAAEFLDEKVEEYPGEVTILALGPLTNLALAIKRDSSFASKVKKIVILGGAFFSLGNVNPAAEANIYGDPEAADVVFTSGADITVVGINITTQLKLSDDDLLELGNCKGKHSKLISDMCKFYRDWHVKSDGVYGVYLHDPVSFVAVVRPDLFTYKKGVVRVETQGICVGHTLMDQGLKRWNGSNPWVGYSPISVAWTVDVEGVLEYVKAKLMKP

SEQ ID NO: 26359 - protein, 301 aa, Arabidopsis thaliana
  peptide (1)..(301): Ceres Seq. ID no. 12395767
MAILMAFQTPELEILGLTTVFGNVSTQDATRNALLLCEIAGFPDVPVAEGSSEPLKGGIPRVADFVHGKNGLGDVSLPPPSRKKSEKSAAEFLDEKVEEYPGEVTILALGPLTNLALAIKRDSSFASKVKKIVILGGAFFSLGNVNPAAEANIYGDPEAADVVFTSGADITVVGINITTQLKLSDDDLLELGNCKGKHSKLISDMCKFYRDWHVKSDGVYGVYLHDPVSFVAVVRPDLFTYKKGVVRVETQGICVGHTLMDQGLKRWNGSNPWVGYSPISVAWTVDVEGVLEYVKAKLMKP

SEQ ID NO: 26360 - DNA, 1178 bp, Arabidopsis thaliana
  misc_feature (1)..(1178): Ceres Seq. ID no. 12333778
  misc_feature (1)..(1178): Ortholog of  Ceres SEQ ID NO 13598714 as cited in SEQ ID NO 62656
  misc_feature (1)..(1178): Ortholog of  Ceres SEQ ID NO 13596969 as cited in SEQ ID NO 63375
  misc_feature (1)..(1178): Ortholog of  Ceres SEQ ID NO 13597519 as cited in SEQ ID NO 64759
  misc_feature (1)..(1178): Ortholog of  Ceres SEQ ID NO 13597870 as cited in SEQ ID NO 64982
  misc_feature (1)..(1178): Ortholog of  Ceres SEQ ID NO 13656123 as cited in SEQ ID NO 65212
attaaacgcaacaaatcaaaagtaataatccaaattatatatacatatatgcaccatttggttaaaaactaagaagaaaccaaaatgagaagttttactaatttaaatccttgctacgttctcttaccgttcttccttgtcctagccacgaatgcaacacatacaaacaatttcctcccaaggccacggactgggtattacggtagtgcatgctggaatgtagaatcgatagttcggtccgtggttgagtctaactatcttgctaatccagccaatgctccaggcattttgcgtatgcactttcacgattgtttcgttcaaggctgtgacgcctccgttctcctagccggacctaactctgagcgaacggcgattccaaatctatcgttgagagggtttaatgtcattgaagaagctaagactcagcttgagatcgcttgtcctcgaacagtctcttgtgctgatatcctcgcactcgctgcacgtgacttcgtccatttggccggtggaccatggtggccagttccattggggagactcgatggccgaatttctctagcctcgaatgtcattttgccgggacctaccgactccgttgccgtgcagaagctgaggtttgccgaaaaaaatcttaatacccaagatctcgttgtccttgctgctggacatacgataggaacggccggatgtattgtgtttagggacagattcttcaactacgacaacacaggaagtccggacccaaccatcgccccgagttttgtccctctgatccaagctcaatgccctctgaatggtgaccccgcgactcgtgtagtgctggacacgggaagtggtgaccaatttgatacgtcgtaccttaacaacttgaagaacggtcgaggtctcctcgagtctgatcaggtcctatggactaatctcgagacccgacccatcgtggaaaggcttctaggactacggtttccgtttcttattttcggactggagttcgcgaggtccatgaccaagatgagtcaaatcgagatcaagacgggtttggatggggagattcgtagggtttgttctgcggttaactaattaatataagattaattaaccattacaatatgatataaagtaatgaataaaaatggagattatatagactctccagcttttaataataaaccagctagttt

SEQ ID NO: 26361 - protein, 330 aa, Arabidopsis thaliana
  peptide (1)..(330): Ceres Seq. ID no. 12333779
MRSFTNLNPCYVLLPFFLVLATNATHTNNFLPRPRTGYYGSACWNVESIVRSVVESNYLANPANAPGILRMHFHDCFVQGCDASVLLAGPNSERTAIPNLSLRGFNVIEEAKTQLEIACPRTVSCADILALAARDFVHLAGGPWWPVPLGRLDGRISLASNVILPGPTDSVAVQKLRFAEKNLNTQDLVVLAAGHTIGTAGCIVFRDRFFNYDNTGSPDPTIAPSFVPLIQAQCPLNGDPATRVVLDTGSGDQFDTSYLNNLKNGRGLLESDQVLWTNLETRPIVERLLGLRFPFLIFGLEFARSMTKMSQIEIKTGLDGEIRRVCSAVN

SEQ ID NO: 26362 - protein, 260 aa, Arabidopsis thaliana
  peptide (1)..(260): Ceres Seq. ID no. 12333780
MHFHDCFVQGCDASVLLAGPNSERTAIPNLSLRGFNVIEEAKTQLEIACPRTVSCADILALAARDFVHLAGGPWWPVPLGRLDGRISLASNVILPGPTDSVAVQKLRFAEKNLNTQDLVVLAAGHTIGTAGCIVFRDRFFNYDNTGSPDPTIAPSFVPLIQAQCPLNGDPATRVVLDTGSGDQFDTSYLNNLKNGRGLLESDQVLWTNLETRPIVERLLGLRFPFLIFGLEFARSMTKMSQIEIKTGLDGEIRRVCSAVN

SEQ ID NO: 26363 - DNA, 1332 bp, Arabidopsis thaliana
  misc_feature (1)..(1332): Ceres Seq. ID no. 13493921
  misc_feature (1)..(1332): Ortholog of  Ceres SEQ ID NO 12612470 as cited in SEQ ID NO 55136
  misc_feature (1)..(1332): Ortholog of  Ceres SEQ ID NO 12612425 as cited in SEQ ID NO 56789
  misc_feature (1)..(1332): Ortholog of  Ceres SEQ ID NO 13503512 as cited in SEQ ID NO 65121
tggaagatcatcacaagcaaagaaaatggagagcgattcagagatggttccgtttcctcaactaccgatgccaatagaaaacaactacagagcttgcacaattccttacagatttccttctgatgatcccaagaaagccactccaaatgaaatctcgtggatcaacgtcttcgccaattccattccttctttcaagaaacgtgcagagagcgatatcactgttccagatgctcctgctagagctgaaaaatttgcagaaagatatgctgggattcttgaagacttgaagaaagatccagagagtcatggcggaccaccagatggcattcttctatgccgacttcgtgagcaagtactcagagagttaggatttagggacatattcaagaaagttaaggatgaggagaatgcaaaggctatatcactatttcctcaagttgtcagtctgagtgatgctattgaagatgacggaaaacggttagagaatttggtgagagggatatttgctggaaacatctttgatcttggttctgcacagcttgctgaagttttctcaagggatggtatgtctttcttggctagctgtcaaaacttggttccacgaccatgggtcattgatgacttggaaaacttccaagccaaatggatcaataagtcttggaagaaggcagtgatttttgttgataattctggtgcagacataattttgggtattttgccgtttgcaagagagttgctccgtcgaggagctcaggtggtgctggctgctaatgagctgccatctatcaatgacataacatgtaccgagcttacagaaatcttgtcacagttgaaggatgaaaatggccaattgctaggtgttgatacttcgaagcttctgattgcaaattcggggaatgacttaccagttatcgatctctcaagagtatcacaggagcttgcttacctttcatctgatgccgacttagtcatcgtagaaggcatgggtcgtggaattgagacaaacctttatgctcagttcaagtgtgattctctcaagattggaatggtgaagcatcttgaagtagcagagtttctcggaggacggctctatgactgtgtcttcaaattcaatgaagttcagagctaattagtatttcagtactctccagtctcacttctctcttactgtcatttttaattcaaaacatagggtacaaaaagtaatatttttccatcttgatatggtaaatcaatttgaaacaaaaatatttattcgtttgtgatggactgatggataaaatggaaaccataactaaaccaactatatacactctaataaagggacttgtt

SEQ ID NO: 26364 - protein, 375 aa, Arabidopsis thaliana
  peptide (1)..(375): Ceres Seq. ID no. 13493922
GRSSQAKKMESDSEMVPFPQLPMPIENNYRACTIPYRFPSDDPKKATPNEISWINVFANSIPSFKKRAESDITVPDAPARAEKFAERYAGILEDLKKDPESHGGPPDGILLCRLREQVLRELGFRDIFKKVKDEENAKAISLFPQVVSLSDAIEDDGKRLENLVRGIFAGNIFDLGSAQLAEVFSRDGMSFLASCQNLVPRPWVIDDLENFQAKWINKSWKKAVIFVDNSGADIILGILPFARELLRRGAQVVLAANELPSINDITCTELTEILSQLKDENGQLLGVDTSKLLIANSGNDLPVIDLSRVSQELAYLSSDADLVIVEGMGRGIETNLYAQFKCDSLKIGMVKHLEVAEFLGGRLYDCVFKFNEVQS

SEQ ID NO: 26365 - protein, 367 aa, Arabidopsis thaliana
  peptide (1)..(367): Ceres Seq. ID no. 13493923
MESDSEMVPFPQLPMPIENNYRACTIPYRFPSDDPKKATPNEISWINVFANSIPSFKKRAESDITVPDAPARAEKFAERYAGILEDLKKDPESHGGPPDGILLCRLREQVLRELGFRDIFKKVKDEENAKAISLFPQVVSLSDAIEDDGKRLENLVRGIFAGNIFDLGSAQLAEVFSRDGMSFLASCQNLVPRPWVIDDLENFQAKWINKSWKKAVIFVDNSGADIILGILPFARELLRRGAQVVLAANELPSINDITCTELTEILSQLKDENGQLLGVDTSKLLIANSGNDLPVIDLSRVSQELAYLSSDADLVIVEGMGRGIETNLYAQFKCDSLKIGMVKHLEVAEFLGGRLYDCVFKFNEVQS

SEQ ID NO: 26366 - protein, 361 aa, Arabidopsis thaliana
  peptide (1)..(361): Ceres Seq. ID no. 13493924
MVPFPQLPMPIENNYRACTIPYRFPSDDPKKATPNEISWINVFANSIPSFKKRAESDITVPDAPARAEKFAERYAGILEDLKKDPESHGGPPDGILLCRLREQVLRELGFRDIFKKVKDEENAKAISLFPQVVSLSDAIEDDGKRLENLVRGIFAGNIFDLGSAQLAEVFSRDGMSFLASCQNLVPRPWVIDDLENFQAKWINKSWKKAVIFVDNSGADIILGILPFARELLRRGAQVVLAANELPSINDITCTELTEILSQLKDENGQLLGVDTSKLLIANSGNDLPVIDLSRVSQELAYLSSDADLVIVEGMGRGIETNLYAQFKCDSLKIGMVKHLEVAEFLGGRLYDCVFKFNEVQS

SEQ ID NO: 26367 - DNA, 1150 bp, Arabidopsis thaliana
  misc_feature (1)..(1150): Ceres Seq. ID no. 12327126
  misc_feature (1)..(1150): Ortholog of  Ceres SEQ ID NO 13581579 as cited in SEQ ID NO 58361
  misc_feature (1)..(1150): Ortholog of  Ceres SEQ ID NO 13598714 as cited in SEQ ID NO 62656
  misc_feature (1)..(1150): Ortholog of  Ceres SEQ ID NO 13596969 as cited in SEQ ID NO 63375
  misc_feature (1)..(1150): Ortholog of  Ceres SEQ ID NO 13597870 as cited in SEQ ID NO 64982
  misc_feature (1)..(1150): Ortholog of  Ceres SEQ ID NO 13656123 as cited in SEQ ID NO 65212
  misc_feature (1)..(1150): Ortholog of  Ceres SEQ ID NO 13595926 as cited in SEQ ID NO 67778
  misc_feature (1)..(1150): Ortholog of  Ceres SEQ ID NO 12567001 as cited in SEQ ID NO 0
atatacacatatagagagattgagtgaaaatattttttttaaaatggttgtggtgaacaaaacgaatctcttattgcttcttctctctctatgtctcaccctcgacctctcctccgcacaactccgccgtaacttctacgccggaagttgtcctaacgtcgaacaaatcgttagaaacgccgtacagaaaaaagtccaacaaactttcaccaccattcccgccactctacgcctctatttccatgattgtttcgtcaatgggtgtgatgcatcagtgatgatagcgtcaacaaataataataaggcggagaaggatcatgaggaaaatttatcgttggccggagatggattcgacaccgtcattaaaactaaagaagctctcgatgccgtcccaaattgtcgtaacaaagtttcatgcgctgatattctcacgatggccactcgtgacgtcgttaatcttgcgggtggaccacaatacgacgtggaattgggaaggctagatggactatcatcaacagcggctagcgtcggagggaagttgccgcatccgaccgacgatgtcaataaactcacttcactcttcgccaaaaacggccttagccttaacgacatgatcgctctctccggggcacacacattaggattcgcgcattgcacaaaagtgttcaatcggatatacactttcaacaagacaactaaagtggatcccacggttaacaaagattacgtgacagagctaaaagcgtcgtgtcctcgaaacatagatccaagagtggctattaacatggacccaacaacaccaagacaattcgacaacgtttactacaaaaacttgcaacaagggaaaggattgttcacgtcggatcaagtcttattcacggatcgtcggtcaaagccaaccgttgacttatgggctaataatggacagttgtttaatcaagcttttattaactcgatgatcaagcttggtcgtgttggtgttaaaactggtagtaatggtaatatccgtcgtgattgtggagcttttaattgatttaaatatatctgttttagattttgtttattgtatttgggtataggatgggtcatgggtctcataaagctggttaagctaaattgaaaattgtaataaatctctgtcttgggtttc

SEQ ID NO: 26368 - protein, 343 aa, Arabidopsis thaliana
  peptide (1)..(343): Ceres Seq. ID no. 12327127
YTHIERLSENIFFKMVVVNKTNLLLLLLSLCLTLDLSSAQLRRNFYAGSCPNVEQIVRNAVQKKVQQTFTTIPATLRLYFHDCFVNGCDASVMIASTNNNKAEKDHEENLSLAGDGFDTVIKTKEALDAVPNCRNKVSCADILTMATRDVVNLAGGPQYDVELGRLDGLSSTAASVGGKLPHPTDDVNKLTSLFAKNGLSLNDMIALSGAHTLGFAHCTKVFNRIYTFNKTTKVDPTVNKDYVTELKASCPRNIDPRVAINMDPTTPRQFDNVYYKNLQQGKGLFTSDQVLFTDRRSKPTVDLWANNGQLFNQAFINSMIKLGRVGVKTGSNGNIRRDCGAFN

SEQ ID NO: 26369 - protein, 329 aa, Arabidopsis thaliana
  peptide (1)..(329): Ceres Seq. ID no. 12327128
MVVVNKTNLLLLLLSLCLTLDLSSAQLRRNFYAGSCPNVEQIVRNAVQKKVQQTFTTIPATLRLYFHDCFVNGCDASVMIASTNNNKAEKDHEENLSLAGDGFDTVIKTKEALDAVPNCRNKVSCADILTMATRDVVNLAGGPQYDVELGRLDGLSSTAASVGGKLPHPTDDVNKLTSLFAKNGLSLNDMIALSGAHTLGFAHCTKVFNRIYTFNKTTKVDPTVNKDYVTELKASCPRNIDPRVAINMDPTTPRQFDNVYYKNLQQGKGLFTSDQVLFTDRRSKPTVDLWANNGQLFNQAFINSMIKLGRVGVKTGSNGNIRRDCGAFN

SEQ ID NO: 26370 - protein, 251 aa, Arabidopsis thaliana
  peptide (1)..(251): Ceres Seq. ID no. 12327129
MIASTNNNKAEKDHEENLSLAGDGFDTVIKTKEALDAVPNCRNKVSCADILTMATRDVVNLAGGPQYDVELGRLDGLSSTAASVGGKLPHPTDDVNKLTSLFAKNGLSLNDMIALSGAHTLGFAHCTKVFNRIYTFNKTTKVDPTVNKDYVTELKASCPRNIDPRVAINMDPTTPRQFDNVYYKNLQQGKGLFTSDQVLFTDRRSKPTVDLWANNGQLFNQAFINSMIKLGRVGVKTGSNGNIRRDCGAFN

SEQ ID NO: 26371 - DNA, 1344 bp, Arabidopsis thaliana
  misc_feature (1)..(1344): Ceres Seq. ID no. 12388499
  misc_feature (1)..(1344): Ortholog of  Ceres SEQ ID NO 13598488 as cited in SEQ ID NO 63862
  misc_feature (1)..(1344): Ortholog of  Ceres SEQ ID NO 13659640 as cited in SEQ ID NO 67101
attagccccttctttcagataccagctcccacaccatcaaacttactacatctgagttattatgttgaaacaagagagtaacgacataggtagtggagagaacaacagggcacgaccctgtgacacatgccggtcaaacgcctgcaccgtgtattgccatgcagattctgcctacttgtgcatgagctgtgatgctcaagttcactctgccaatcgcgttgcttcccgccataaacgtgtccgggtctgcgagtcatgtgagcgtgctccggctgcttttttgtgtgaggcagatgatgcctctctatgcacagcctgtgattcagaggttcattctgcaaacccacttgctagacgccatcagcgagttccaattctaccaatttctggaaactctttcagctccatgaccactactcaccaccaaagcgagaaaacaatgaccgatccagagaagagactggtggtggatcaagaggaaggtgaagaaggtgataaggatgccaaggaggttgcttcgtggctgttccctaattcagacaaaaataacaataaccaaaacaatgggttattgtttagtgatgagtatctaaaccttgtggattacaactcgagtatggactacaaattcacaggtgaatacagtcaacaccaacaaaactgcagcgtaccacagacgagctacgggggagatagagttgttccgcttaaacttgaagaatcaaggggccaccagtgccataaccaacagaattttcagttcaatatcaaatatggctcctcagggactcactacaacgacaatggttccattaaccataacgcatacatttcatccatggaaactggtgttgtgccggagtcaacagcatgtgtcacaacagcttcacacccaagaacgcccaaagggacagtagagcaacaacctgaccctgcaagccagatgataacagtaacacaactcagtccaatggacagagaagccagggtcctgagatacagagagaagaggaagacaaggaaatttgagaagacaataaggtatgcttcgaggaaggcatatgcagagataagaccgcgggtcaatggccggttcgcaaagagagaaatcgaagccgaggagcaagggttcaacacgatgctaatgtacaacacaggatatgggattgttccttcattctgatactcctgtggcaaaaagaaaaactagattgcaagctgtaaattacttttagtttgagattatgttaggtttggtgaaattcttagcttcaagaagtattactactgttgtgcaaatgggtttgtagttttggctaattaaaactatagtattcttctttc

SEQ ID NO: 26372 - protein, 373 aa, Arabidopsis thaliana
  peptide (1)..(373): Ceres Seq. ID no. 12388500
MLKQESNDIGSGENNRARPCDTCRSNACTVYCHADSAYLCMSCDAQVHSANRVASRHKRVRVCESCERAPAAFLCEADDASLCTACDSEVHSANPLARRHQRVPILPISGNSFSSMTTTHHQSEKTMTDPEKRLVVDQEEGEEGDKDAKEVASWLFPNSDKNNNNQNNGLLFSDEYLNLVDYNSSMDYKFTGEYSQHQQNCSVPQTSYGGDRVVPLKLEESRGHQCHNQQNFQFNIKYGSSGTHYNDNGSINHNAYISSMETGVVPESTACVTTASHPRTPKGTVEQQPDPASQMITVTQLSPMDREARVLRYREKRKTRKFEKTIRYASRKAYAEIRPRVNGRFAKREIEAEEQGFNTMLMYNTGYGIVPSF

SEQ ID NO: 26373 - protein, 333 aa, Arabidopsis thaliana
  peptide (1)..(333): Ceres Seq. ID no. 12388501
MSCDAQVHSANRVASRHKRVRVCESCERAPAAFLCEADDASLCTACDSEVHSANPLARRHQRVPILPISGNSFSSMTTTHHQSEKTMTDPEKRLVVDQEEGEEGDKDAKEVASWLFPNSDKNNNNQNNGLLFSDEYLNLVDYNSSMDYKFTGEYSQHQQNCSVPQTSYGGDRVVPLKLEESRGHQCHNQQNFQFNIKYGSSGTHYNDNGSINHNAYISSMETGVVPESTACVTTASHPRTPKGTVEQQPDPASQMITVTQLSPMDREARVLRYREKRKTRKFEKTIRYASRKAYAEIRPRVNGRFAKREIEAEEQGFNTMLMYNTGYGIVPSF

SEQ ID NO: 26374 - protein, 258 aa, Arabidopsis thaliana
  peptide (1)..(258): Ceres Seq. ID no. 12388502
MTTTHHQSEKTMTDPEKRLVVDQEEGEEGDKDAKEVASWLFPNSDKNNNNQNNGLLFSDEYLNLVDYNSSMDYKFTGEYSQHQQNCSVPQTSYGGDRVVPLKLEESRGHQCHNQQNFQFNIKYGSSGTHYNDNGSINHNAYISSMETGVVPESTACVTTASHPRTPKGTVEQQPDPASQMITVTQLSPMDREARVLRYREKRKTRKFEKTIRYASRKAYAEIRPRVNGRFAKREIEAEEQGFNTMLMYNTGYGIVPSF

SEQ ID NO: 26375 - DNA, 1199 bp, Arabidopsis thaliana
  misc_feature (1)..(1199): Ceres Seq. ID no. 12395627
  misc_feature (1)..(1199): Ortholog of  Ceres SEQ ID NO 15180043 as cited in SEQ ID NO 0
acgtcaaactctctctatacacagagttaaattgagtttgtgtctcgtaacttatcctgtgagcgaaaatggtgaaagcaactaaggcagagaagaagatcgcctacgataccaagctatgtcagcttatcgatgagtacacccagatcttggtcgttgcggccgataacgtcggatcaactcagcttcagaacatcagaaagggtcttcttggagactccgtcgtgcttatggggaagaacactatgatgaagcgttccgttaggattcactctgagaacaccggaaacactgcaatcctgaatctgcttcctctccttcagggaaacgttggtttgatctttaccaaaggtgacctcaaggaagtgagcgaggaggttgctaagtacaaggtcggtgcccctgctcgtgtgggtttggtggctccaattgatgtggttgtccaacctggcaacactggtctcgacccatcccaaacatctttcttccaggtgcttaacatcccaaccaagattaacaagggtaccgtcgaaatcatcaccccagttgagcttatcaagcaaggtgacaaggtcgggtcttctgaggctgcgcttctagccaagcttggcatcaggccgttctcatatggtcttgttgtccagtctgtctatgacaatggctcagtcttcagcccagaggttcttgatcttactgaagaccaacttgtggagaagtttgcttctggtatctccatggtcacttccttggctcttgctgtgtcgtaccctacccttgctgctgcaccgcatatgttcatcaatgcgtacaagaatgccttggctattgctgttgccactgagtacaccttccctcaagcagagaaggtcaaggaatacttgaaggatccaagcaagtttgctgttgcttcagtagctgcggtgtctgctgatgcaggtggtggtgccccagctgctgctaaggtagaggagaaggaagagtccgacgaagaagactatggaggtgatttcggtttgttcgatgaagagtagattttgtcggttaagatcttacctttttgtcgtggattataagtgttgctttgtttttagtatgttggacctcaattttcttggttttagccaatccagttttatgttactactgtcttttattttttggaaagatttcgttttcttatggttgctttaatatttttc

SEQ ID NO: 26376 - protein, 320 aa, Arabidopsis thaliana
  peptide (1)..(320): Ceres Seq. ID no. 12395628
MVKATKAEKKIAYDTKLCQLIDEYTQILVVAADNVGSTQLQNIRKGLLGDSVVLMGKNTMMKRSVRIHSENTGNTAILNLLPLLQGNVGLIFTKGDLKEVSEEVAKYKVGAPARVGLVAPIDVVVQPGNTGLDPSQTSFFQVLNIPTKINKGTVEIITPVELIKQGDKVGSSEAALLAKLGIRPFSYGLVVQSVYDNGSVFSPEVLDLTEDQLVEKFASGISMVTSLALAVSYPTLAAAPHMFINAYKNALAIAVATEYTFPQAEKVKEYLKDPSKFAVASVAAVSADAGGGAPAAAKVEEKEESDEEDYGGDFGLFDEE

SEQ ID NO: 26377 - protein, 266 aa, Arabidopsis thaliana
  peptide (1)..(266): Ceres Seq. ID no. 12395629
MGKNTMMKRSVRIHSENTGNTAILNLLPLLQGNVGLIFTKGDLKEVSEEVAKYKVGAPARVGLVAPIDVVVQPGNTGLDPSQTSFFQVLNIPTKINKGTVEIITPVELIKQGDKVGSSEAALLAKLGIRPFSYGLVVQSVYDNGSVFSPEVLDLTEDQLVEKFASGISMVTSLALAVSYPTLAAAPHMFINAYKNALAIAVATEYTFPQAEKVKEYLKDPSKFAVASVAAVSADAGGGAPAAAKVEEKEESDEEDYGGDFGLFDEE

SEQ ID NO: 26378 - protein, 261 aa, Arabidopsis thaliana
  peptide (1)..(261): Ceres Seq. ID no. 12395630
MMKRSVRIHSENTGNTAILNLLPLLQGNVGLIFTKGDLKEVSEEVAKYKVGAPARVGLVAPIDVVVQPGNTGLDPSQTSFFQVLNIPTKINKGTVEIITPVELIKQGDKVGSSEAALLAKLGIRPFSYGLVVQSVYDNGSVFSPEVLDLTEDQLVEKFASGISMVTSLALAVSYPTLAAAPHMFINAYKNALAIAVATEYTFPQAEKVKEYLKDPSKFAVASVAAVSADAGGGAPAAAKVEEKEESDEEDYGGDFGLFDEE

SEQ ID NO: 26379 - DNA, 1429 bp, Arabidopsis thaliana
  misc_feature (1)..(1429): Ceres Seq. ID no. 13491286
  misc_feature (1)..(1429): Ortholog of  Ceres SEQ ID NO 13594308 as cited in SEQ ID NO 57706
ctttaaaaaaaaaaaataccaaaagaagcggaaacagagaaaaagagagaaaaatgctgagtagatcagttgcttctgctgttacaccggtctcatcttcttctctcttaccaaactcaaagcctatcttctgtctgaaaaccctctccggttatcgttcttcttctttctgtggcggctgtattcgtaaaatcaaccataagcctcttcgaatgacgagttccaatattacaccaagagctatggccacacaacagcttgagaacgctgatcagctcattgattctgtcgaaacttttatcttcgattgtgatggtgtgatttggaagggagataaattgatagagggagttcctgaaactcttgatatgcttcgtgccaagggaaagagattggtttttgtgacaaacaactcaacaaaatctaggaaacagtatggaaaaaagttcgagactcttggcctgaatgttaacgaggaggagatatttgcttcatcttttgctgctgctgcatacttgcagtctattaatttcccaaaagataagaaggtctatgtgattggtgaggaaggtatcttgaaagagctagagcttgctggttttcaataccttggaggtccggatgatggtaaaagacagattgaattgaagccaggttttctaatggagcatgatcatgatgttggagctgttgtggttggatttgatcgctatttcaactactacaaaattcagtatggaacactctgtatccgtgaaaacccggggtgtcttttcatcgctacaaaccgagatgctgtcactcaccttactgatgctcaagaatgggcaggtggtggctctatggttggtgctcttgttggatccactcaacgtgagcctcttgttgttggaaaaccctcaacttttatgatggactatttagcagacaaatttggaatccaaaagtcacagatatgcatggttggtgatagattggacactgacattttattcgggcagaatggcggttgtaagactctactcgtcctctcgggtgttacttcaatctctatgttggaaagccctgagaacaagatacaaccagatttctacaccagcaagatctccgattttctgtctccgaaagccgcaactgtataatctagtaagccccgcgtcaatcactctgtagaactcagggtactgaatctatttatgggtatacaactacagtctattcatttttctttgtgactatgtgtataataataagaactttcttgcttgtttttggcaagcttattttatttgcagtgcctttgtgtgcatagcaaattagggagccaatgtgtttttttttaggaagagtttacagaattgaaccaagctctaatctgtaagggtttctctcttcattgcctttaaattatttgtttgtggtcatgtat

SEQ ID NO: 26380 - protein, 379 aa, Arabidopsis thaliana
  peptide (1)..(379): Ceres Seq. ID no. 13491287
LKKKNTKRSGNREKERKMLSRSVASAVTPVSSSSLLPNSKPIFCLKTLSGYRSSSFCGGCIRKINHKPLRMTSSNITPRAMATQQLENADQLIDSVETFIFDCDGVIWKGDKLIEGVPETLDMLRAKGKRLVFVTNNSTKSRKQYGKKFETLGLNVNEEEIFASSFAAAAYLQSINFPKDKKVYVIGEEGILKELELAGFQYLGGPDDGKRQIELKPGFLMEHDHDVGAVVVGFDRYFNYYKIQYGTLCIRENPGCLFIATNRDAVTHLTDAQEWAGGGSMVGALVGSTQREPLVVGKPSTFMMDYLADKFGIQKSQICMVGDRLDTDILFGQNGGCKTLLVLSGVTSISMLESPENKIQPDFYTSKISDFLSPKAATV

SEQ ID NO: 26381 - protein, 362 aa, Arabidopsis thaliana
  peptide (1)..(362): Ceres Seq. ID no. 13491288
MLSRSVASAVTPVSSSSLLPNSKPIFCLKTLSGYRSSSFCGGCIRKINHKPLRMTSSNITPRAMATQQLENADQLIDSVETFIFDCDGVIWKGDKLIEGVPETLDMLRAKGKRLVFVTNNSTKSRKQYGKKFETLGLNVNEEEIFASSFAAAAYLQSINFPKDKKVYVIGEEGILKELELAGFQYLGGPDDGKRQIELKPGFLMEHDHDVGAVVVGFDRYFNYYKIQYGTLCIRENPGCLFIATNRDAVTHLTDAQEWAGGGSMVGALVGSTQREPLVVGKPSTFMMDYLADKFGIQKSQICMVGDRLDTDILFGQNGGCKTLLVLSGVTSISMLESPENKIQPDFYTSKISDFLSPKAATV

SEQ ID NO: 26382 - protein, 309 aa, Arabidopsis thaliana
  peptide (1)..(309): Ceres Seq. ID no. 13491289
MTSSNITPRAMATQQLENADQLIDSVETFIFDCDGVIWKGDKLIEGVPETLDMLRAKGKRLVFVTNNSTKSRKQYGKKFETLGLNVNEEEIFASSFAAAAYLQSINFPKDKKVYVIGEEGILKELELAGFQYLGGPDDGKRQIELKPGFLMEHDHDVGAVVVGFDRYFNYYKIQYGTLCIRENPGCLFIATNRDAVTHLTDAQEWAGGGSMVGALVGSTQREPLVVGKPSTFMMDYLADKFGIQKSQICMVGDRLDTDILFGQNGGCKTLLVLSGVTSISMLESPENKIQPDFYTSKISDFLSPKAATV

SEQ ID NO: 26383 - DNA, 958 bp, Arabidopsis thaliana
  misc_feature (1)..(958): Ceres Seq. ID no. 13496786
  misc_feature (1)..(958): Ortholog of  Ceres SEQ ID NO 15170458 as cited in SEQ ID NO 52842
  misc_feature (1)..(958): Ortholog of  Ceres SEQ ID NO 13597679 as cited in SEQ ID NO 65073
taggggttctgtggttcataatcagaaatggctaagacaggggaaagcttgagagacaaacctagatggagtcttgtaggcatgaccgctcttgtcaccggtggctcaaaaggcatcggagaagctgtggttgaggaactagctacgttaggggcaagaatccacacatgtgccagagacgaaactcagcttcaagaaagcttacgtaagtggcaagcaaaagggtttcaggttaccacttctgtctgcgacgtttcttctcgtgataaacgagagaagctcatggaaaccgtttccactatcttcgaaggaaaactcaacatacttgtcaacaatgtgggaacgtgtatagtcaaaccgaccttacaacatacagccgaagatttctcatttacaatggcaacgaatctcgagtcagcttttcatctctcgcagctcgcgcatcctttgttgaaagcttctggttcagggagcatcgtgctcatctcctccgtatctggagttgtacatgtcaatggtgcatccatatatggagtatctaaaggagctatgaatcagctaggaagaaacttagcgtgcgagtgggcaagtgacaacataaggactaactctgtgtgtccatggttcatagaaactcctttagttaccgaaagtcttagtaatgaggagtttagaaaagaagtggagagtagaccaccaatgggacgtgttggagaagtaaatgaagtatcatcgcttgtggcatttctttgtcttcctgcagcttcttatattacaggtcaaaccatttgtgttgatggaggtttcactgttaatggtttctctttcaagcctctgccttaagacgtcgattgttttcattttacgttatttttttaacatttacaatttgtttagatatgtaaacataaacacaattacacaaacaaacaaaaaaaattggcgtttggaatgtaag

SEQ ID NO: 26384 - protein, 271 aa, Arabidopsis thaliana
  peptide (1)..(271): Ceres Seq. ID no. 13496787
MAKTGESLRDKPRWSLVGMTALVTGGSKGIGEAVVEELATLGARIHTCARDETQLQESLRKWQAKGFQVTTSVCDVSSRDKREKLMETVSTIFEGKLNILVNNVGTCIVKPTLQHTAEDFSFTMATNLESAFHLSQLAHPLLKASGSGSIVLISSVSGVVHVNGASIYGVSKGAMNQLGRNLACEWASDNIRTNSVCPWFIETPLVTESLSNEEFRKEVESRPPMGRVGEVNEVSSLVAFLCLPAASYITGQTICVDGGFTVNGFSFKPLP

SEQ ID NO: 26385 - protein, 253 aa, Arabidopsis thaliana
  peptide (1)..(253): Ceres Seq. ID no. 13496788
MTALVTGGSKGIGEAVVEELATLGARIHTCARDETQLQESLRKWQAKGFQVTTSVCDVSSRDKREKLMETVSTIFEGKLNILVNNVGTCIVKPTLQHTAEDFSFTMATNLESAFHLSQLAHPLLKASGSGSIVLISSVSGVVHVNGASIYGVSKGAMNQLGRNLACEWASDNIRTNSVCPWFIETPLVTESLSNEEFRKEVESRPPMGRVGEVNEVSSLVAFLCLPAASYITGQTICVDGGFTVNGFSFKPLP

SEQ ID NO: 26386 - protein, 186 aa, Arabidopsis thaliana
  peptide (1)..(186): Ceres Seq. ID no. 13496789
METVSTIFEGKLNILVNNVGTCIVKPTLQHTAEDFSFTMATNLESAFHLSQLAHPLLKASGSGSIVLISSVSGVVHVNGASIYGVSKGAMNQLGRNLACEWASDNIRTNSVCPWFIETPLVTESLSNEEFRKEVESRPPMGRVGEVNEVSSLVAFLCLPAASYITGQTICVDGGFTVNGFSFKPLP

SEQ ID NO: 26387 - DNA, 1568 bp, Arabidopsis thaliana
  misc_feature (1)..(1568): Ceres Seq. ID no. 12394697
  misc_feature (1)..(1568): Ortholog of  Ceres SEQ ID NO 15170483 as cited in SEQ ID NO 52827
  misc_feature (1)..(1568): Ortholog of  Ceres SEQ ID NO 14303943 as cited in SEQ ID NO 53802
  misc_feature (1)..(1568): Ortholog of  Ceres SEQ ID NO 14311804 as cited in SEQ ID NO 59058
gtctctgctggtcggctgctgaaacaagttgtaattgtggtgcatttgttcttcagcgcagccgagaagattcgaaaccggagctaagctatgacgacgattgttcccacctccgaagaaaatccctttctcgctgttgtccgattcacttcccagctcgcctgggccgatgctggtcccgaggcagcagagccagaaattaccaggctctgtagggaggctgaggagtcaatggtagcagagaagtggcttgaattgtcttcgttaatggtcacttcagctgaattggtatcttctaagatatctgagaaagatcttgagtgtacctacaccatcatttgcagcattgtcaagaatgcgaaaagccctgagcaagtccttgaaatggtgaaagctatagcttccaaggttgctcaacaacccagtgacaaagcttcacttcgtttgaagatcctcttcaatctctataacctggttgaccacccgtatgctcgatttcaagtatacatgaaagctcttacactagctgttgatgggaaggttactgagtacatagtttcttcttttaagaagatcgataactttctgaaagagtggaatattgacattaaagatcagagggaactctttcttgccattgctaatgtgctgaaagaaaacaaaagcttggtgaatgaatcccttaagttcttgacgaagtacctagcaactttctccaatgaggatgctcaggtcctggatgaagccaaggaggaggctgtgcgtgcagttatcgaatttgtcaaagcttccagtattttccagtgtgatttattggacttgccagccgtagcacaattggaaaaggatgctaaatatgcacctgtttaccaacttctgaagatttttcttactcagaggttaaatgcctacacggaattccaaaatgcaaattcgggatttctgcaaagctatggactttccaatgaagattgtgttacgaagatgaggttgttgtcactagtggatttggcctcagatgaatctggcaaaataccttacacctcgattaaagacactcttcaggtaaatgaacaggatgtcgagttatggatcgtgaaggcaataactgcaaaactgattgagtgtaagatggatcagatgaaccaagttttaattgtcagccgctcttccgaacgtgaatttgggacaaagcaatggcaatctctccgaacaaagcttgcgacttggaaggacaacatttcaagtatcataactaccatcgaatcgaataaggtaacggaggaaggttctcaggcatcatcatcatctgctgcagctattcaaggcttgagtgttcgttgaaaaagctatcaagaaaaaccgtttcatccccagagaagctcaattctataacgaatcttttgtcttccttaaagctttttctctgtgtatttggctgcagggtttttttgatctttgaatcttttttttgtccctgaaacatatgcggagacttttcctatacattattttttgctagtaatgtttcttaacttgatgctacacactatttcaaaagtttatac

SEQ ID NO: 26388 - protein, 417 aa, Arabidopsis thaliana
  peptide (1)..(417): Ceres Seq. ID no. 12394698
MTTIVPTSEENPFLAVVRFTSQLAWADAGPEAAEPEITRLCREAEESMVAEKWLELSSLMVTSAELVSSKISEKDLECTYTIICSIVKNAKSPEQVLEMVKAIASKVAQQPSDKASLRLKILFNLYNLVDHPYARFQVYMKALTLAVDGKVTEYIVSSFKKIDNFLKEWNIDIKDQRELFLAIANVLKENKSLVNESLKFLTKYLATFSNEDAQVLDEAKEEAVRAVIEFVKASSIFQCDLLDLPAVAQLEKDAKYAPVYQLLKIFLTQRLNAYTEFQNANSGFLQSYGLSNEDCVTKMRLLSLVDLASDESGKIPYTSIKDTLQVNEQDVELWIVKAITAKLIECKMDQMNQVLIVSRSSEREFGTKQWQSLRTKLATWKDNISSIITTIESNKVTEEGSQASSSSAAAIQGLSVR

SEQ ID NO: 26389 - protein, 370 aa, Arabidopsis thaliana
  peptide (1)..(370): Ceres Seq. ID no. 12394699
MVAEKWLELSSLMVTSAELVSSKISEKDLECTYTIICSIVKNAKSPEQVLEMVKAIASKVAQQPSDKASLRLKILFNLYNLVDHPYARFQVYMKALTLAVDGKVTEYIVSSFKKIDNFLKEWNIDIKDQRELFLAIANVLKENKSLVNESLKFLTKYLATFSNEDAQVLDEAKEEAVRAVIEFVKASSIFQCDLLDLPAVAQLEKDAKYAPVYQLLKIFLTQRLNAYTEFQNANSGFLQSYGLSNEDCVTKMRLLSLVDLASDESGKIPYTSIKDTLQVNEQDVELWIVKAITAKLIECKMDQMNQVLIVSRSSEREFGTKQWQSLRTKLATWKDNISSIITTIESNKVTEEGSQASSSSAAAIQGLSVR

SEQ ID NO: 26390 - protein, 358 aa, Arabidopsis thaliana
  peptide (1)..(358): Ceres Seq. ID no. 12394700
MVTSAELVSSKISEKDLECTYTIICSIVKNAKSPEQVLEMVKAIASKVAQQPSDKASLRLKILFNLYNLVDHPYARFQVYMKALTLAVDGKVTEYIVSSFKKIDNFLKEWNIDIKDQRELFLAIANVLKENKSLVNESLKFLTKYLATFSNEDAQVLDEAKEEAVRAVIEFVKASSIFQCDLLDLPAVAQLEKDAKYAPVYQLLKIFLTQRLNAYTEFQNANSGFLQSYGLSNEDCVTKMRLLSLVDLASDESGKIPYTSIKDTLQVNEQDVELWIVKAITAKLIECKMDQMNQVLIVSRSSEREFGTKQWQSLRTKLATWKDNISSIITTIESNKVTEEGSQASSSSAAAIQGLSVR

SEQ ID NO: 26391 - DNA, 961 bp, Arabidopsis thaliana
  misc_feature (1)..(961): Ceres Seq. ID no. 12422216
  misc_feature (1)..(961): Ortholog of  Ceres SEQ ID NO 13598313 as cited in SEQ ID NO 68293
atcattcatcaacatcatctctctttctctatctcgctgtccctccttctttttctcattcattgcaatgggcagaagatgctcacactgtggaaacgtaggacataactcaagaacatgttcttcttaccaaacaagagtagttaggctctttggtgttcatctagacaccacaagctcttctccgccgcctcctcctcctccctcgattttggccgctgcaataaagaaaagtttcagcatggattgcttgccggcatgttcctcctcttcctcttcctttgctggttatctctccgatggtctcgcccataaaacacctgaccgcaaaaaaggggttccatggacggcggaagagcaccggacgtttctaattggattagaaaagcttggaaaaggagattggagaggaatctctagaaacttcgtcgtcacaaaatccccgacacaagtggcaagtcatgctcaaaagtactttctccggcaaactaccactctccatcacaagagacgccgcaccagcctctttgatatggtttcggccggcaatggctgaagaaaatagtactactaagaggatatgtaatgatcatattgggtcgagctcaaaggttgtttggaaacaaggattactcaatcctcgtcttggatatccagatccgaaagtatcagtatccggctcgggtaactccggtggactcgatcttgagctgaagcttgcgtccattcaatctcctgaatcgaatattagacctattagcgttacgtgaatctatataacacgttatgatcagtttcattagtataattcaaatgtttacatatataatatcttatcgatcctatctaatttgattttgatttaacgttagttactttgataatttcgtcgatattgtttttttggttttttcattgtgagattttttgtcttggaagttggatccatacatatttctgg

SEQ ID NO: 26392 - protein, 184 aa, Arabidopsis thaliana
  peptide (1)..(184): Ceres Seq. ID no. 12422217
SFINIISLSLSRCPSFFFSFIAMGRRCSHCGNVGHNSRTCSSYQTRVVRLFGVHLDTTSSSPPPPPPPSILAAAIKKSFSMDCLPACSSSSSSFAGYLSDGLAHKTPDRKKGVPWTAEEHRTFLIGLEKLGKGDWRGISRNFVVTKSPTQVASHAQKYFLRQTTTLHHKRRRTSLFDMVSAGNG

SEQ ID NO: 26393 - protein, 162 aa, Arabidopsis thaliana
  peptide (1)..(162): Ceres Seq. ID no. 12422218
MGRRCSHCGNVGHNSRTCSSYQTRVVRLFGVHLDTTSSSPPPPPPPSILAAAIKKSFSMDCLPACSSSSSSFAGYLSDGLAHKTPDRKKGVPWTAEEHRTFLIGLEKLGKGDWRGISRNFVVTKSPTQVASHAQKYFLRQTTTLHHKRRRTSLFDMVSAGNG

SEQ ID NO: 26394 - protein, 104 aa, Arabidopsis thaliana
  peptide (1)..(104): Ceres Seq. ID no. 12422219
MDCLPACSSSSSSFAGYLSDGLAHKTPDRKKGVPWTAEEHRTFLIGLEKLGKGDWRGISRNFVVTKSPTQVASHAQKYFLRQTTTLHHKRRRTSLFDMVSAGNG

SEQ ID NO: 26395 - DNA, 1124 bp, Arabidopsis thaliana
  misc_feature (1)..(1124): Ceres Seq. ID no. 12335713
  misc_feature (1)..(1124): Ortholog of  Ceres SEQ ID NO 14311044 as cited in SEQ ID NO 53643
aacttagctcataagcatatctaatcggagctcggagaaatttcggttgtgaagagaagaaagatggggaatttgttttgttgtgtgcaagtggatcaatcaacggtagcgataaaggaaacattcgggaaattcgaagatgttcttgagcctggttgccattttcttccatggtgtcttggtagtcaagttgctggttacctctctctaagggttcagcaattggacgttcgttgcgagacaaagactaaggacaatgtgtttgttaatgttgttgcatcgattcagtaccgtgctttagctaataaggcaaatgatgcgtactacaagctcagtaacacaaggggtcagattcaagcttatgtgtttgatgttattagagcgagtgtcccgaagttgcttcttgatgatgtctttgagcagaagaatgatattgcgaaagctgttgaagaggagctcgagaaggcaatgtcggcttacggttatgagattgtgcaaactctcattgttgatatcgagcctgatgaacatgtcaaacgggccatgaacgaaatcaacgctgctgcaaggatgagattggctgcaaacgaaaaggcagaggcagagaaaatcctacagattaagagagctgaaggtgaagctgagtccaagtacctctctggtcttggtatcgcccgtcagaggcaggcgattgtcgatggattacgcgacagtgttttgggtttcgctgtgaatgtccctgggacaactgctaaagatgtgatggacatggtgctagttacacagtactttgacacaatgaaggagattggtgctagctccaagtcgtctgccgtgttcatacctcatggaccaggagcggttcgtgatgtggcttctcagattagagatggccttcttcaaggctcgtccgcaaacctgtgaagtgaattcactgattatgtcctcttttcttttgactatggtgtgattatcatcttcttctttcttttggattatgttcgaactcttttgttttggttttcttatttctatttgtatagacttattgggggtttataattcatatagaatattaaaacgtgtttagtactaattattattgtacacgaattatggtggtg

SEQ ID NO: 26396 - protein, 286 aa, Arabidopsis thaliana
  peptide (1)..(286): Ceres Seq. ID no. 12335714
MGNLFCCVQVDQSTVAIKETFGKFEDVLEPGCHFLPWCLGSQVAGYLSLRVQQLDVRCETKTKDNVFVNVVASIQYRALANKANDAYYKLSNTRGQIQAYVFDVIRASVPKLLLDDVFEQKNDIAKAVEEELEKAMSAYGYEIVQTLIVDIEPDEHVKRAMNEINAAARMRLAANEKAEAEKILQIKRAEGEAESKYLSGLGIARQRQAIVDGLRDSVLGFAVNVPGTTAKDVMDMVLVTQYFDTMKEIGASSKSSAVFIPHGPGAVRDVASQIRDGLLQGSSANL

SEQ ID NO: 26397 - protein, 151 aa, Arabidopsis thaliana
  peptide (1)..(151): Ceres Seq. ID no. 12335715
MSAYGYEIVQTLIVDIEPDEHVKRAMNEINAAARMRLAANEKAEAEKILQIKRAEGEAESKYLSGLGIARQRQAIVDGLRDSVLGFAVNVPGTTAKDVMDMVLVTQYFDTMKEIGASSKSSAVFIPHGPGAVRDVASQIRDGLLQGSSANL

SEQ ID NO: 26398 - DNA, 1430 bp, Arabidopsis thaliana
  misc_feature (1)..(1430): Ceres Seq. ID no. 13493929
  misc_feature (1)..(1430): Ortholog of  Ceres SEQ ID NO 14310524 as cited in SEQ ID NO 58840
  misc_feature (1)..(1430): Ortholog of  Ceres SEQ ID NO 15169541 as cited in SEQ ID NO 67500
gatcatctcattaacaaaaataaaacacacaatctcaagattttctacttcttattacaaagattcaatcttcttgtttcttcttgcaaccatgagtcttcttgcagatcttgttaaccttgacatctcagacaacagtgaaaagatcatcgctgaatacatatgggttggtggttctggtatggacatgagaagcaaagccaggactctccctggacctgtgaccgatccatcaaaacttccaaagtggaactatgatggttcaagcactggtcaagctcctggtcaagacagtgaagtgatcttataccctcaagcaattttcaaagatccattccgtagaggcaacaacatccttgttatgtgtgatgcttacactccagcgggagagccaatccctactaacaagcgacatgctgcggctgagatctttgctaaccctgatgttattgctgaagtgccatggtatggaatcgaacaagaatacactttgttgcagaaggatgtgaactggcctcttggatggcccattggtggcttccctggccctcagggaccatactactgcagtattggagctgacaaatcttttggaagagacattgttgatgctcactacaaagcctctttgtatgctggaatcaacatcagtgggatcaatggagaagtcatgccgggacaatgggagttccaagtcggcccatcggtcggtatctcagctgctgatgaaatatggatcgctcgttacattttggagaggatcacagagattgctggtgtggttgtatcttttgacccaaaacctattcctggtgactggaatggagctggtgctcacaccaattacagtactaaatcaatgagggaagaaggaggatacgagataatcaagaaggcgatcgagaagcttggcttgagacacaaggaacacatttccgcttacggtgaaggaaacgagcgtcgtctcacgggacaccatgaaactgctgacatcaacactttcctttggggtgttgcgaaccgtggtgcatcgatccgagtaggacgtgacaccgagaaagaagggaagggatactttgaggataggaggccagcttcaaacatggacccttacgttgttacttccatgattgcagagactacactcctctggaacccttgaaaggatgatccgtaactcttgaagttgcttctgattgggttttttggaagttccaagcttgtcttttctctacagtgtgtattaagcaattgtaccggttgacactgccggagtttgtgatttggggcctttctttctttttcttctttttataatcttttgggttctgtggttagagcaaattcggtttgctctgtttgtttgacctttattgaaacctttggtattggtactaataatacaatctgaaaaggcctcttcatgttcc

SEQ ID NO: 26399 - protein, 386 aa, Arabidopsis thaliana
  peptide (1)..(386): Ceres Seq. ID no. 13493930
IISLTKIKHTISRFSTSYYKDSIFLFLLATMSLLADLVNLDISDNSEKIIAEYIWVGGSGMDMRSKARTLPGPVTDPSKLPKWNYDGSSTGQAPGQDSEVILYPQAIFKDPFRRGNNILVMCDAYTPAGEPIPTNKRHAAAEIFANPDVIAEVPWYGIEQEYTLLQKDVNWPLGWPIGGFPGPQGPYYCSIGADKSFGRDIVDAHYKASLYAGINISGINGEVMPGQWEFQVGPSVGISAADEIWIARYILERITEIAGVVVSFDPKPIPGDWNGAGAHTNYSTKSMREEGGYEIIKKAIEKLGLRHKEHISAYGEGNERRLTGHHETADINTFLWGVANRGASIRVGRDTEKEGKGYFEDRRPASNMDPYVVTSMIAETTLLWNP

SEQ ID NO: 26400 - protein, 356 aa, Arabidopsis thaliana
  peptide (1)..(356): Ceres Seq. ID no. 13493931
MSLLADLVNLDISDNSEKIIAEYIWVGGSGMDMRSKARTLPGPVTDPSKLPKWNYDGSSTGQAPGQDSEVILYPQAIFKDPFRRGNNILVMCDAYTPAGEPIPTNKRHAAAEIFANPDVIAEVPWYGIEQEYTLLQKDVNWPLGWPIGGFPGPQGPYYCSIGADKSFGRDIVDAHYKASLYAGINISGINGEVMPGQWEFQVGPSVGISAADEIWIARYILERITEIAGVVVSFDPKPIPGDWNGAGAHTNYSTKSMREEGGYEIIKKAIEKLGLRHKEHISAYGEGNERRLTGHHETADINTFLWGVANRGASIRVGRDTEKEGKGYFEDRRPASNMDPYVVTSMIAETTLLWNP

SEQ ID NO: 26401 - protein, 326 aa, Arabidopsis thaliana
  peptide (1)..(326): Ceres Seq. ID no. 13493932
MDMRSKARTLPGPVTDPSKLPKWNYDGSSTGQAPGQDSEVILYPQAIFKDPFRRGNNILVMCDAYTPAGEPIPTNKRHAAAEIFANPDVIAEVPWYGIEQEYTLLQKDVNWPLGWPIGGFPGPQGPYYCSIGADKSFGRDIVDAHYKASLYAGINISGINGEVMPGQWEFQVGPSVGISAADEIWIARYILERITEIAGVVVSFDPKPIPGDWNGAGAHTNYSTKSMREEGGYEIIKKAIEKLGLRHKEHISAYGEGNERRLTGHHETADINTFLWGVANRGASIRVGRDTEKEGKGYFEDRRPASNMDPYVVTSMIAETTLLWNP

SEQ ID NO: 26402 - DNA, 860 bp, Arabidopsis thaliana
  misc_feature (1)..(860): Ceres Seq. ID no. 13505019
  misc_feature (1)..(860): Ortholog of  Ceres SEQ ID NO 13581889 as cited in SEQ ID NO 50900
aatatcaatagccgtacacgcgtgaagactgacaatattatctttttcgaattcggagctcaagtttgaaattcggagaagctagagagttttctgagatggctcgtactaagcaaacagctcgtaagtctactggaggaaaggctcctaggaagcagcttgctacaaaggctgcacgtaagtctgcaccaaccactggaggagtcaagaagccccatcgttaccgtccaggaactgttgcactacgtgaaattcgtaagtaccagaagagtaccgagttgctgatcaggaagctccctttccagaggctagttcgtgagattgcccaggatttcaagactgacttgcgtttccagagccatgctgtgcttgcactccaggaggctgctgaagcataccttgtgggtctctttgaggacactaacctctgcgccatccatgccaagcgtgtgaccataatgcccaaagacattcagctcgctcgcaggatcagaggagaacgtgcttaattgtgattgggaagtagttggattatgtgaatgtgggtggttttctaaatagatagttggaattagataatggcttaaaaagcttttgggtgtaggagacttggaaacaatggtgttttttttttcttttctttctgtttcttgtctagtcggtttatgatttgcttgtgttcttcttagctacgttttgtggtgtgtattgctttcttctttggcaatgttgaacaccttttgttgttgaattcatctctgaaacatatgaatatgttaaagtttctgactcttgtttcatctgtatctgttcgatattgtatgattgagttttattgtttatcaataagctttctgttt

SEQ ID NO: 26403 - protein, 136 aa, Arabidopsis thaliana
  peptide (1)..(136): Ceres Seq. ID no. 13505020
MARTKQTARKSTGGKAPRKQLATKAARKSAPTTGGVKKPHRYRPGTVALREIRKYQKSTELLIRKLPFQRLVREIAQDFKTDLRFQSHAVLALQEAAEAYLVGLFEDTNLCAIHAKRVTIMPKDIQLARRIRGERA

SEQ ID NO: 26404 - DNA, 624 bp, Arabidopsis thaliana
  misc_feature (1)..(624): Ceres Seq. ID no. 12331703
  misc_feature (1)..(624): Ortholog of  Ceres SEQ ID NO 14309653 as cited in SEQ ID NO 0
aaaggacagatttgtaaacattctcaaatccttcaaaaaccctaatttctttctgtgaggttattgagaacgaagaagatgacgggagaggtagtgaaccctaaggcgtacccgttagcagattctcagctttcgataacaataatggatcttgttcaacaagctactaactacaagcagcttaagaagggagctaatgaagctaccaaaacattgaaccgtggaatctctgagttcgttgttatggctgctgatgctgaaccacttgagattcttcttcatcttcctttgcttgccgaagataagaatgtgccatatgtgtttgtaccttcgaaacaagcattgggaagagcatgtggagtaacaagacctgttattgcttgttcagtgacatcgaatgaggcaagccagttgaaatcgcagattcagcatctcaaggatgcgattgagaagctcctgatctaaggatttctgctcagtatgaagagtctctgcaatgtggaatggctctgactgaagttagtttgtgtgatttacctatttgaagaatgtattgtgactggtgttaatgcttagtatgtggatcatcatcgctcatttgtgcaattgagtttcttagatttt

SEQ ID NO: 26405 - protein, 128 aa, Arabidopsis thaliana
  peptide (1)..(128): Ceres Seq. ID no. 12331704
MTGEVVNPKAYPLADSQLSITIMDLVQQATNYKQLKKGANEATKTLNRGISEFVVMAADAEPLEILLHLPLLAEDKNVPYVFVPSKQALGRACGVTRPVIACSVTSNEASQLKSQIQHLKDAIEKLLI

SEQ ID NO: 26406 - protein, 106 aa, Arabidopsis thaliana
  peptide (1)..(106): Ceres Seq. ID no. 12331705
MDLVQQATNYKQLKKGANEATKTLNRGISEFVVMAADAEPLEILLHLPLLAEDKNVPYVFVPSKQALGRACGVTRPVIACSVTSNEASQLKSQIQHLKDAIEKLLI

SEQ ID NO: 26407 - protein, 73 aa, Arabidopsis thaliana; identical to SEQ ID NO: 21543
  peptide (1)..(73): Ceres Seq. ID no. 12331706

SEQ ID NO: 26408 - DNA, 670 bp, Arabidopsis thaliana
  misc_feature (1)..(670): Ceres Seq. ID no. 12393732
  misc_feature (1)..(670): Ortholog of  Ceres SEQ ID NO 12589775 as cited in SEQ ID NO 0
ccaacactcgtaagtagtcctccttcatcattcatgcatatgtatatcagagtgaccattcacggctattaatgggtttcttaattgatcatatatgtgtgtatatatatatatatagttattgtagcaactactacggccagtttgcggagcctaccgagatttgcgactggtgccgcagcgacgaccggaagctgagcaacgttgctagacatggcggttcttcttcaaagaagccttcttcttcggttaaatatgaaaatgacttctcaaacagatcggaatattcgcccggccaccggatcaagcataacaataaccgtcacgatcaagtagccaagggcgttgctggagatggaggcggagttacgtcgcctaagacggccacacgaaggtacaagcttctcaaagatgtcatgtgttagttccacctaaacgagaggtattagaagacttactataatcatactactctttcgagactgtgtgattaaattatgtataattagccactacggagagagcaaattaaaaaagaaaacgtcgttgtttgttttcatcctttttctcctttttactttgtgtttatatatatgaaatgaatgtgtgtttggcgtgagcttgtgttttcttaatcaccatataagctattaataactgcaatttgcgc

SEQ ID NO: 26409 - protein, 117 aa, Arabidopsis thaliana
  peptide (1)..(117): Ceres Seq. ID no. 12393733
MGFLIDHICVYIYIYSYCSNYYGQFAEPTEICDWCRSDDRKLSNVARHGGSSSKKPSSSVKYENDFSNRSEYSPGHRIKHNNNRHDQVAKGVAGDGGGVTSPKTATRRYKLLKDVMC

SEQ ID NO: 26410 - DNA, 1373 bp, Arabidopsis thaliana
  misc_feature (1)..(1373): Ceres Seq. ID no. 12421682
  misc_feature (1)..(1373): Ortholog of  Ceres SEQ ID NO 13638160 as cited in SEQ ID NO 58847
gtttcttcttcacactctgattctcttactattttactctgttgttgttgttgtgatatcaagagagtgggtttgagatcatgccaaattctggaaaaagtttgagtttttaattccaatcgagaaaaaataaaaatgggttctttaggtgatgagcttagtttgggatcgatctttgggagaggagtttcgatgaatgttgtggcggtggagaaagttgatgaacatgttaagaagcttgaagaagagaagagaaagctcgaaagttgtcaacttgagcttcctctgtctttgcagattttaaacgatgcgattttgtatctgaaggataagagatgttcagagatggagactcaaccattgttgaaagatttcatttctgttaataaacctattcaaggagaaagaggaatagaattgctgaaaagagaggagctaatgagggagaagaagtttcagcaatggaaagctaatgatgatcacactagtaagatcaagagcaagcttgagattaagagaaatgaggagaaatctcctatgttgttgattccaaaggtggaaactggtttaggcctcggtttaagttcgagttcgataagaagaaaagggattgttgcctcatgtggctttacttctaactctatgccacaaccaccaacaccagcagtaccacaacaaccagcatttcttaagcagcaagctttacggaagcaaagaaggtgttggaatccagagttgcatcgccgatttgtcgatgcattgcaacagctaggtggaccgggagtggcaactcctaaacaaattagagaacatatgcaagaagaaggcttaaccaatgatgaagtcaagagtcatttacagaaatacaggttacacatcaggaagccaaattcgaatgcggagaaacaatcagcagttgttttagggtttaacttgtggaattcttcagcacaagatgaagaagagacatgtgaaggaggagaatcattgaagagacgcaatgcgcaatcagattctcctcaaggtcctttgcagttaccgtctacaacaacaacaactggtggagatagtagcatggaagatgttgaagatgctaagtctgagagctttcaactggagagattgagatcaccataaatctcaagaaaccaaactcttgatcacggttttgttattttggattcattactatatctattagtagtgaatgagaacaataattatagaaaggtttatagatatatatatagagaaaaagagagagtgaggatggttcaaattatttgcagagattatacttagccttgtttttgtaaacggctttttttggttgggtttttatttttcttgaggcattatccaatattcaagtg

SEQ ID NO: 26411 - protein, 333 aa, Arabidopsis thaliana
  peptide (1)..(333): Ceres Seq. ID no. 12421683
MGSLGDELSLGSIFGRGVSMNVVAVEKVDEHVKKLEEEKRKLESCQLELPLSLQILNDAILYLKDKRCSEMETQPLLKDFISVNKPIQGERGIELLKREELMREKKFQQWKANDDHTSKIKSKLEIKRNEEKSPMLLIPKVETGLGLGLSSSSIRRKGIVASCGFTSNSMPQPPTPAVPQQPAFLKQQALRKQRRCWNPELHRRFVDALQQLGGPGVATPKQIREHMQEEGLTNDEVKSHLQKYRLHIRKPNSNAEKQSAVVLGFNLWNSSAQDEEETCEGGESLKRRNAQSDSPQGPLQLPSTTTTTGGDSSMEDVEDAKSESFQLERLRSP

SEQ ID NO: 26412 - protein, 314 aa, Arabidopsis thaliana
  peptide (1)..(314): Ceres Seq. ID no. 12421684
MNVVAVEKVDEHVKKLEEEKRKLESCQLELPLSLQILNDAILYLKDKRCSEMETQPLLKDFISVNKPIQGERGIELLKREELMREKKFQQWKANDDHTSKIKSKLEIKRNEEKSPMLLIPKVETGLGLGLSSSSIRRKGIVASCGFTSNSMPQPPTPAVPQQPAFLKQQALRKQRRCWNPELHRRFVDALQQLGGPGVATPKQIREHMQEEGLTNDEVKSHLQKYRLHIRKPNSNAEKQSAVVLGFNLWNSSAQDEEETCEGGESLKRRNAQSDSPQGPLQLPSTTTTTGGDSSMEDVEDAKSESFQLERLRSP

SEQ ID NO: 26413 - protein, 263 aa, Arabidopsis thaliana
  peptide (1)..(263): Ceres Seq. ID no. 12421685
METQPLLKDFISVNKPIQGERGIELLKREELMREKKFQQWKANDDHTSKIKSKLEIKRNEEKSPMLLIPKVETGLGLGLSSSSIRRKGIVASCGFTSNSMPQPPTPAVPQQPAFLKQQALRKQRRCWNPELHRRFVDALQQLGGPGVATPKQIREHMQEEGLTNDEVKSHLQKYRLHIRKPNSNAEKQSAVVLGFNLWNSSAQDEEETCEGGESLKRRNAQSDSPQGPLQLPSTTTTTGGDSSMEDVEDAKSESFQLERLRSP

SEQ ID NO: 26414 - DNA, 1152 bp, Arabidopsis thaliana
  misc_feature (1)..(1152): Ceres Seq. ID no. 12333562
  misc_feature (1)..(1152): Ortholog of  Ceres SEQ ID NO 14311511 as cited in SEQ ID NO 51444
  misc_feature (1)..(1152): Ortholog of  Ceres SEQ ID NO 13654854 as cited in SEQ ID NO 62466
gattacgatcgccggcgattcaaagaagcagatagaaaaatggcggagatgaagagtgtcggagtagttggtgctggacaaatgggttcaggaatcgcgcaactcgccgccacgagtggcctcgacgtttggctcatggacgctgatcgagatgccctctctcgagccaccgcagctatctcctcctccgtcaaacgattcgtctccaaaggtctaatctccaaggaagttggtgatgatgctatgcatcgtctacgattaacatcgaatcttgaagatttgtgttctgctgatatcatcgttgaagccattgtggaatcagaagacattaagaagaagctgtttaaggatctagatggtatagctaagagttctgcgattttagcttctaacacaagttctatatccattactcgtcttgcatctgctacgagaagacccagccaggtcattggaatgcactttatgaaccctcctccaataatgaaactggttgaaatcattcgcggtgcagatacctcagaagagacgtttcttgctacaaaagttctggctgaaaggtttggcaagacaacagtctgctcacaagactatgcgggattcgtagtgaaccgaatcctcatgcctatgatcaatgaagcgttccacacactttacacaggggtagctacaaaggaagacattgacagcggaatgaaacacggcacaaaccacccgatgggtcctttggagttggcggacttaatcggtctagacgtgtgcttgtccgtaatgaaagtgttgcacgagggacttggggactcaaagtacgcaccttgccctcttcttgttcaatacgttgatgctgggagattaggaagaaaacgaggagtaggagtttatgattaccgtgaagctacacagaagctgtctccgcggctctgagaaagcaaataccaaagtaaaaaaacaaaaagaagaaacgtttagcactcaagacaagaacagtaaatgctgtgtggatcgtttctggattatttctttgttcctttgtttcttggtagatatgaagttactggtcatcattagcgaccttgtgttgtaatcttgatattgtactaaataaagtttagcttcaacaaatcaataaggtgttgttaccatgttgttatc

SEQ ID NO: 26415 - protein, 307 aa, Arabidopsis thaliana
  peptide (1)..(307): Ceres Seq. ID no. 12333563
DYDRRRFKEADRKMAEMKSVGVVGAGQMGSGIAQLAATSGLDVWLMDADRDALSRATAAISSSVKRFVSKGLISKEVGDDAMHRLRLTSNLEDLCSADIIVEAIVESEDIKKKLFKDLDGIAKSSAILASNTSSISITRLASATRRPSQVIGMHFMNPPPIMKLVEIIRGADTSEETFLATKVLAERFGKTTVCSQDYAGFVVNRILMPMINEAFHTLYTGVATKEDIDSGMKHGTNHPMGPLELADLIGLDVCLSVMKVLHEGLGDSKYAPCPLLVQYVDAGRLGRKRGVGVYDYREATQKLSPRL

SEQ ID NO: 26416 - protein, 294 aa, Arabidopsis thaliana
  peptide (1)..(294): Ceres Seq. ID no. 12333564
MAEMKSVGVVGAGQMGSGIAQLAATSGLDVWLMDADRDALSRATAAISSSVKRFVSKGLISKEVGDDAMHRLRLTSNLEDLCSADIIVEAIVESEDIKKKLFKDLDGIAKSSAILASNTSSISITRLASATRRPSQVIGMHFMNPPPIMKLVEIIRGADTSEETFLATKVLAERFGKTTVCSQDYAGFVVNRILMPMINEAFHTLYTGVATKEDIDSGMKHGTNHPMGPLELADLIGLDVCLSVMKVLHEGLGDSKYAPCPLLVQYVDAGRLGRKRGVGVYDYREATQKLSPRL

SEQ ID NO: 26417 - protein, 291 aa, Arabidopsis thaliana
  peptide (1)..(291): Ceres Seq. ID no. 12333565
MKSVGVVGAGQMGSGIAQLAATSGLDVWLMDADRDALSRATAAISSSVKRFVSKGLISKEVGDDAMHRLRLTSNLEDLCSADIIVEAIVESEDIKKKLFKDLDGIAKSSAILASNTSSISITRLASATRRPSQVIGMHFMNPPPIMKLVEIIRGADTSEETFLATKVLAERFGKTTVCSQDYAGFVVNRILMPMINEAFHTLYTGVATKEDIDSGMKHGTNHPMGPLELADLIGLDVCLSVMKVLHEGLGDSKYAPCPLLVQYVDAGRLGRKRGVGVYDYREATQKLSPRL

SEQ ID NO: 26418 - DNA, 1465 bp, Arabidopsis thaliana
  misc_feature (1)..(1465): Ceres Seq. ID no. 13494252
  misc_feature (1)..(1465): Ortholog of  Ceres SEQ ID NO 13495070 as cited in SEQ ID NO 53216
  misc_feature (1)..(1465): Ortholog of  Ceres SEQ ID NO 15176717 as cited in SEQ ID NO 0
agattaaaaactctttaaaaactttttgtcataaatcaggcaaagaagtaaaagaggcttaaaactctctctctctcttggtcttcctcactcttaacgaaaatggactctctaacactcttcttcaccggcgcactcgtcgccgtcggtatctactggttcctctgcgttctcggtccagcagagcgtaaaggcaaacgagccgtagatctctctggcggctcaatctccgccgagaaagtccaagacaactacaaacagtactggtctttcttccgccgtccaaaagaaatcgaaaccgccgagaaagttccagacttcgtcgacacattctacaatctcgtcaccgacatatacgagtggggatggggacaatccttccacttctcaccatcaatccccggaaaatctcacaaagacgccacgcgcctccacgaagagatggccgtagatctgatccaagtcaaacctggtcaaaagatcctagacgtcggatdcggcgtcggcggtbcgatgcgagcgattgcatctcactcgcgagctaacgtagtcgggattacgataaacgagtatcaggtgaacagagctcgtctccacaataagaaagctggtctcgacgcgctttgcgaggtcgtctgtggtaacttcctccagatgccgttcgatgacaacagtttcgacggtgcttattccatcgaagccacgtgtcacgcgccgaagctggaggaagtgtacgcagagatctacagggtgttgaaacccggatctatgtatgtgtcgtacgagtgggttacgacggagaaatttaaggcggaggatgacgaaacacgtggaggtaatccaagggattgagagaggtgatgcgttacctgggcttaggcttacgtggatattgctgagacggctaaaaaggttgggtttgagatagtgaaggagaaggatctggcgagtccaccggctgagccgtggtggactaggcttaagatgggtaggcttgcttattggaggaatcacattgtggttcagattttgtcagcggttggagttgctcctaaaggaactgttgatgttcatgagatgttgtttaagactgctgattatttgaccagaggaggtgaaaccggaatattctctccgatgcatatgattctctgcagaaaaccggagtcaccggaggagagttcttgagaaaggtagaaaggaaacatcaccggaaaaagtatggagaattttctcaatttgtttttatttttaagttaaatcaacttggttattgtactatttttgtgttttaatttggtttgtgtttcaagaattattagtttttttttgttttgttgcatatgagaatcttactcttgatttctccgccgtagtgccggcgagacataggggattattagtatttttaagtgtgtttaagattgattaacaagttagtaaaataaaatgtacttaggtgtcg

SEQ ID NO: 26419 - protein, 249 aa, Arabidopsis thaliana
  peptide (1)..(249): Ceres Seq. ID no. 15222920
  misc_feature (132)..(132): Xaa is any aa, unknown or other
  misc_feature (137)..(137): Xaa is any aa, unknown or other
MDSLTLFFTGALVAVGIYWFLCVLGPAERKGKRAVDLSGGSISAEKVQDNYKQYWSFFRRPKEIETAEKVPDFVDTFYNLVTDIYEWGWGQSFHFSPSIPGKSHKDATRLHEEMAVDLIQVKPGQKILDVGXGVGGXMRAIASHSRANVVGITINEYQVNRARLHNKKAGLDALCEVVCGNFLQMPFDDNSFDGAYSIEATCHAPKLEEVYAEIYRVLKPGSMYVSYEWVTTEKFKAEDDETRGGNPRD

SEQ ID NO: 26420 - protein, 136 aa, Arabidopsis thaliana
  peptide (1)..(136): Ceres Seq. ID no. 15222921
  misc_feature (19)..(19): Xaa is any aa, unknown or other
  misc_feature (24)..(24): Xaa is any aa, unknown or other
MAVDLIQVKPGQKILDVGXGVGGXMRAIASHSRANVVGITINEYQVNRARLHNKKAGLDALCEVVCGNFLQMPFDDNSFDGAYSIEATCHAPKLEEVYAEIYRVLKPGSMYVSYEWVTTEKFKAEDDETRGGNPRD

SEQ ID NO: 26421 - DNA, 879 bp, Arabidopsis thaliana
  misc_feature (1)..(879): Ceres Seq. ID no. 12325426
  misc_feature (1)..(879): Ortholog of  Ceres SEQ ID NO 15179942 as cited in SEQ ID NO 0
gtgtcttcgtcgtctctggtaaaacaataacagatcaagcgaagaagaaaagtgaagaagctcagcaacaatgtcgtggatgaaaggtgatttactttccaaaaccaggaggcttgttggtggcttagctacacgagagcctgtttggcttaaagccatggaagcatcaccacctcctgtgtttcctcgctccaatggaaaaatccagaagattgttctccctgaggatccttacgttcgtaaattcgctaataagcatcctggaaccaaaattgatgaccctgccaagatatcagcatttattccagatcaagcacgtgtgtatggttgccgggtacttgaattgaaggagcatggcatcagtgagggtgacgccatgtctgtagctaatatggaatatctttcagagagaaaggaaatgaagaaagcatacaaacgcttaaaggagcttgcggtaatgcaagataaggatccacctcctaaaccgtatcctagtgccaagaaagggttaataactcaatcgaagacatccgctaaggatcgcttccagactcctagcgtccgcaggctagttaaccagttgaaaaatgagaaagatgtgttgctgcaagacagaaccggaggaagtgctaatcaggataattggatcgacgaataaattactcaaaatcatcgttttctttttatgcacactactcatccaatttctttgtagaactggcttttttcatatatgacattctttgactacaaatgttttgcaacaaaacaagtgttatttccatttgaatgtctttgtaataatatcattggatgtttccttccatgaggcaaggaattacagaaaaccaaaatggttactctctctattgatcctac

SEQ ID NO: 26422 - protein, 195 aa, Arabidopsis thaliana
  peptide (1)..(195): Ceres Seq. ID no. 12325427
MSWMKGDLLSKTRRLVGGLATREPVWLKAMEASPPPVFPRSNGKIQKIVLPEDPYVRKFANKHPGTKIDDPAKISAFIPDQARVYGCRVLELKEHGISEGDAMSVANMEYLSERKEMKKAYKRLKELAVMQDKDPPPKPYPSAKKGLITQSKTSAKDRFQTPSVRRLVNQLKNEKDVLLQDRTGGSANQDNWIDE

SEQ ID NO: 26423 - protein, 192 aa, Arabidopsis thaliana
  peptide (1)..(192): Ceres Seq. ID no. 12325428
MKGDLLSKTRRLVGGLATREPVWLKAMEASPPPVFPRSNGKIQKIVLPEDPYVRKFANKHPGTKIDDPAKISAFIPDQARVYGCRVLELKEHGISEGDAMSVANMEYLSERKEMKKAYKRLKELAVMQDKDPPPKPYPSAKKGLITQSKTSAKDRFQTPSVRRLVNQLKNEKDVLLQDRTGGSANQDNWIDE

SEQ ID NO: 26424 - protein, 166 aa, Arabidopsis thaliana
  peptide (1)..(166): Ceres Seq. ID no. 12325429
MEASPPPVFPRSNGKIQKIVLPEDPYVRKFANKHPGTKIDDPAKISAFIPDQARVYGCRVLELKEHGISEGDAMSVANMEYLSERKEMKKAYKRLKELAVMQDKDPPPKPYPSAKKGLITQSKTSAKDRFQTPSVRRLVNQLKNEKDVLLQDRTGGSANQDNWIDE

SEQ ID NO: 26425 - DNA, 1496 bp, Arabidopsis thaliana
  misc_feature (1)..(1496): Ceres Seq. ID no. 13490187
  misc_feature (1)..(1496): Ortholog of  Ceres SEQ ID NO 15226540 as cited in SEQ ID NO 58479
  misc_feature (1)..(1496): Ortholog of  Ceres SEQ ID NO 13581611 as cited in SEQ ID NO 59028
  misc_feature (1)..(1496): Ortholog of  Ceres SEQ ID NO 13596689 as cited in SEQ ID NO 62728
atatagcaaatcctcttttgctttaaacccaccaaataactcagagcttttttgattttttcccattctctattttgttttgtacttttggtctcactttaaaagatcataagttgaaagatttctgcagagaacaatatgttggaaggtcttgtctctcaagaaagcttgtccttaaactctatggacatgtctgtacttgaaaggcttaaatgggtacaacagcaacaacagcaactgcaacaagttgtgtcccatagcagtaataattcacctgaacttcttcagatacttcagttccatggaagcaacaatgatgagttgttggagagtagtttcagccaatttcaaatgcttggatctggttttggaccaaactataacatgggttttggtcctccacatgaatccatttcaagaacaagtagctgccatatggaacctgtggatacaatggaggttttgttgaagaccggtgaagaaaccagagccgttgccttgaagaacaagagaaaaccagaggttaagacaagggaagagcaaaagacagagaagaagatcaaagtagaggctgagacagagtcaagcatgaaaggaaaatcaaacatgggaaacactgaagcatcttcagacacttcaaaggagacatcgaaaggagcttcagagaatcagaaattagattatatccacgtgagagctcgtcgaggccaagccactgacagacacagcttagcagaaagggcgagaagagaaaagatcagcaagaaaatgaaatatctgcaagatattgtgcctggatgcaataaggtcacaggaaaagctggtatgcttgatgagatcatcaattatgttcaatgtctccaaagacaagtcgagttcctgtcgatgaaacttgctgtcttgaacccggaactagagcttgccgtggaagatgtatccgtaaaacagtttcaggcttactttacaaatgtagttgcttcaaagcaatcaataatggttgatgtgccattgtttccgttagaccagcaaggatctttagattcgtttgcgataaacccgaaccaaacgacatctatcgaagctccatttggaagctgggaaactcaatcacagagtctttacaacacatctagcctcggttttcattactaagcaagattcattgaaacaacatggttgacatcaatcaatcatcaaaatcagaagcaaattctattacatttgctcatcaaagtagtaatttcgaaatttggttaatgcattatcctttgatccttgttttctgatatttaaaccagaagaactggagatagcaatccaatgatcttgtcaccatcaatctttgtgtatagattatatagagagatagataaatatgttttagaggagttatagatatatatcatatttgtagaagaaagagagaaaactcttgtggtaattacaattcttgtttgtttttttggatatataaatatctaagaaaattataaaac

SEQ ID NO: 26426 - protein, 337 aa, Arabidopsis thaliana
  peptide (1)..(337): Ceres Seq. ID no. 13490188
MLEGLVSQESLSLNSMDMSVLERLKWVQQQQQQLQQVVSHSSNNSPELLQILQFHGSNNDELLESSFSQFQMLGSGFGPNYNMGFGPPHESISRTSSCHMEPVDTMEVLLKTGEETRAVALKNKRKPEVKTREEQKTEKKIKVEAETESSMKGKSNMGNTEASSDTSKETSKGASENQKLDYIHVRARRGQATDRHSLAERARREKISKKMKYLQDIVPGCNKVTGKAGMLDEIINYVQCLQRQVEFLSMKLAVLNPELELAVEDVSVKQFQAYFTNVVASKQSIMVDVPLFPLDQQGSLDSFAINPNQTTSIEAPFGSWETQSQSLYNTSSLGFHY

SEQ ID NO: 26427 - protein, 322 aa, Arabidopsis thaliana
  peptide (1)..(322): Ceres Seq. ID no. 13490189
MDMSVLERLKWVQQQQQQLQQVVSHSSNNSPELLQILQFHGSNNDELLESSFSQFQMLGSGFGPNYNMGFGPPHESISRTSSCHMEPVDTMEVLLKTGEETRAVALKNKRKPEVKTREEQKTEKKIKVEAETESSMKGKSNMGNTEASSDTSKETSKGASENQKLDYIHVRARRGQATDRHSLAERARREKISKKMKYLQDIVPGCNKVTGKAGMLDEIINYVQCLQRQVEFLSMKLAVLNPELELAVEDVSVKQFQAYFTNVVASKQSIMVDVPLFPLDQQGSLDSFAINPNQTTSIEAPFGSWETQSQSLYNTSSLGFHY

SEQ ID NO: 26428 - protein, 320 aa, Arabidopsis thaliana
  peptide (1)..(320): Ceres Seq. ID no. 13490190
MSVLERLKWVQQQQQQLQQVVSHSSNNSPELLQILQFHGSNNDELLESSFSQFQMLGSGFGPNYNMGFGPPHESISRTSSCHMEPVDTMEVLLKTGEETRAVALKNKRKPEVKTREEQKTEKKIKVEAETESSMKGKSNMGNTEASSDTSKETSKGASENQKLDYIHVRARRGQATDRHSLAERARREKISKKMKYLQDIVPGCNKVTGKAGMLDEIINYVQCLQRQVEFLSMKLAVLNPELELAVEDVSVKQFQAYFTNVVASKQSIMVDVPLFPLDQQGSLDSFAINPNQTTSIEAPFGSWETQSQSLYNTSSLGFHY

SEQ ID NO: 26429 - DNA, 988 bp, Arabidopsis thaliana
  misc_feature (1)..(988): Ceres Seq. ID no. 12340511
  misc_feature (1)..(988): Ortholog of  Ceres SEQ ID NO 13661767 as cited in SEQ ID NO 61423
atttccctcgccgcacgccggcggatggaggttagtttagtcttttaacctttttctctgtttttgtcccaaaagataaaacgaaaatgacttcttttgaaaaggagagaaggcatatatcgcgtggatttgaagacgaagaggaatcataaaaagcctaacgaagaagacgaagaagaagaggaacaaacaaccatgggtgaagtggttaaggatggaagagaagaagtgatccaggcatggtatatggatgatagcgaagaggatcagagacttcctcaccacaaggatcctaaggagtttctatctttggacaaacttgcagagctgggagtacttagctggagacttgatgctgataactatgaaaccgatgaggatttgaaaaagatccgcgaatctcgtggttactcttacatggacttttgtgaggtatgcccggaaaagcttccaaactatgaagtgaaagtgaagagctttttcgaagaacatttgcacactgatgaagagatccgttactgcgttgcaggaagcggttactttgatgtgagggatcgcaatgaagcttggattagagtatgggtaaagaagggaggtatgatagtcttacctgctggaatatatcatcgcttcaccgtagactcagacaactatatcaaggcaatgcggcttttcgtgggtgaaccggtctggacaccatacaatcgcccacacgaccacctccctgcaaggaaagagtacatcgataatttcgtgaaggtgaatgaaggtggtgtcatagacgcgtcagcctagaggattctcagtcttatgcatcagatttctataaactaagcatacaataaagagagctttctgtctcatgttggatattatgtcatctacagatccacttgtgaagaaactttgattcgtgtggctttggcattatggttgtgttgtaactgtatttatagtttatactccagaaatcaaactgtgttacatt

SEQ ID NO: 26430 - protein, 199 aa, Arabidopsis thaliana
  peptide (1)..(199): Ceres Seq. ID no. 12340512
MGEVVKDGREEVIQAWYMDDSEEDQRLPHHKDPKEFLSLDKLAELGVLSWRLDADNYETDEDLKKIRESRGYSYMDFCEVCPEKLPNYEVKVKSFFEEHLHTDEEIRYCVAGSGYFDVRDRNEAWIRVWVKKGGMIVLPAGIYHRFTVDSDNYIKAMRLFVGEPVWTPYNRPHDHLPARKEYIDNFVKVNEGGVIDASA

SEQ ID NO: 26431 - protein, 182 aa, Arabidopsis thaliana
  peptide (1)..(182): Ceres Seq. ID no. 12340513
MDDSEEDQRLPHHKDPKEFLSLDKLAELGVLSWRLDADNYETDEDLKKIRESRGYSYMDFCEVCPEKLPNYEVKVKSFFEEHLHTDEEIRYCVAGSGYFDVRDRNEAWIRVWVKKGGMIVLPAGIYHRFTVDSDNYIKAMRLFVGEPVWTPYNRPHDHLPARKEYIDNFVKVNEGGVIDASA

SEQ ID NO: 26432 - protein, 125 aa, Arabidopsis thaliana; identical to SEQ ID NO: 25190
  peptide (1)..(125): Ceres Seq. ID no. 12340514

SEQ ID NO: 26433 - DNA, 771 bp, Arabidopsis thaliana
  misc_feature (1)..(771): Ceres Seq. ID no. 13489956
  misc_feature (1)..(771): Ortholog of  Ceres SEQ ID NO 13594766 as cited in SEQ ID NO 51913
  misc_feature (1)..(771): Ortholog of  Ceres SEQ ID NO 12609226 as cited in SEQ ID NO 59300
  misc_feature (1)..(771): Ortholog of  Ceres SEQ ID NO 13654942 as cited in SEQ ID NO 62533
  misc_feature (1)..(771): Ortholog of  Ceres SEQ ID NO 13599195 as cited in SEQ ID NO 0
gagccataaactttagaaaagagagagagagacaaagagagatctgatcctttgaagaaacaacaccaaaaaaaaaaaaaaaagaatggcatcagcggatgaaaaggtggtggaagagaaggcttcggtgatttcaagcttgttggacaaagccaaaggtttctttgcggagaagctggcgaatattccgacgccggaagcaaccgtggacgacgttgatttcaaaggcgtgacacgtgatggagtagattatcacgccaaggtctccgtcaagaatccttactctcaatccatccctatctgccagatctcttacatcctcaagagtgccacaaggacgatcgcgtcaggcacgataccggacccgggttcgttggttgggagcggcacgacggttctggacgtaccggttaaggtggcttatagcatagcggttagtctgatgaaggatatgtgtacggactgggacattgactatcaactagacattgggctaaccttcgacattcctgttgttggtgatatcaccattcctgtctctactcagggagagatcaagctcccttcccttcgcgacttcttttaattaccttagttcaaatatagttttcttaaatcataatctaattttcaataatgtacgatccataaacatagacgatcggagattaatacatttctggaatcctttttttattttgttgatttcaacaaggattttattggttattaattatgtatgtttttcaattgtgtgtgtgatttatcttt

SEQ ID NO: 26434 - protein, 166 aa, Arabidopsis thaliana
  peptide (1)..(166): Ceres Seq. ID no. 13489957
MASADEKVVEEKASVISSLLDKAKGFFAEKLANIPTPEATVDDVDFKGVTRDGVDYHAKVSVKNPYSQSIPICQISYILKSATRTIASGTIPDPGSLVGSGTTVLDVPVKVAYSIAVSLMKDMCTDWDIDYQLDIGLTFDIPVVGDITIPVSTQGEIKLPSLRDFF

SEQ ID NO: 26435 - DNA, 780 bp, Arabidopsis thaliana; identical to SEQ ID NO: 21927
  misc_feature (1)..(780): Ceres Seq. ID no. 12331618
  misc_feature (1)..(780): Ortholog of  Ceres SEQ ID NO 13595021 as cited in SEQ ID NO 55815

SEQ ID NO: 26436 - protein, 222 aa, Arabidopsis thaliana; identical to SEQ ID NO: 21928
  peptide (1)..(222): Ceres Seq. ID no. 12331619

SEQ ID NO: 26437 - protein, 204 aa, Arabidopsis thaliana; identical to SEQ ID NO: 21929
  peptide (1)..(204): Ceres Seq. ID no. 12331620

SEQ ID NO: 26438 - DNA, 794 bp, Arabidopsis thaliana
  misc_feature (1)..(794): Ceres Seq. ID no. 12333407
  misc_feature (1)..(794): Ortholog of  Ceres SEQ ID NO 13598227 as cited in SEQ ID NO 61591
  misc_feature (1)..(794): Ortholog of  Ceres SEQ ID NO 12584790 as cited in SEQ ID NO 62648
  misc_feature (1)..(794): Ortholog of  Ceres SEQ ID NO 13545965 as cited in SEQ ID NO 67378
aaaaggatcaaaggggcacgaaactagagacgacgaagcgtactcgattattatcagcctttggtagcttcgttctctctcaaaaaccctaacttctctgtgacgatcgaatccgatagcgtgcgataatggccaatagtaatcttccccgacgaatcatcaaggaaactcaacgtctgcttagtgaacctgctcctgggataagtgcgtctccatcagaggaaaatatgagatatttcaatgttatgattcttggtcctactcaatctccttatgaaggaggagttttcaagttggagctctttttgcctgaagaatatcctatggcagctcccaaggttaggtttctcaccaagatttaccatcctaacatcgacaagcttggaagaatctgccttgacatactgaaagacaagtggagtcctgcactacaaatacgaactgtgctcttgagtatccaagctcttttaagtgcaccaaacccagatgatcctctgtctgagaacatagctaagcattggaagagcaatgaggcagaagctgtggaaacagctaaggaatggactcgtctttacgcaagtggtgcttaaagaagactgcaaatggagaaagatcattgtcatttaaataacattatatatggtgaaactctatctcaaggttttatctgaatcctttttctgaaaacagaggaaaaagatttgtactctctgaatttgtataactagggggatctaagactcgtttacccatatctggaatctaactttcttcaattgtgcttgcttttgatc

SEQ ID NO: 26439 - protein, 153 aa, Arabidopsis thaliana
  peptide (1)..(153): Ceres Seq. ID no. 12333408
MANSNLPRRIIKETQRLLSEPAPGISASPSEENMRYFNVMILGPTQSPYEGGVFKLELFLPEEYPMAAPKVRFLTKIYHPNIDKLGRICLDILKDKWSPALQIRTVLLSIQALLSAPNPDDPLSENIAKHWKSNEAEAVETAKEWTRLYASGA

SEQ ID NO: 26440 - protein, 120 aa, Arabidopsis thaliana
  peptide (1)..(120): Ceres Seq. ID no. 12333409
MRYFNVMILGPTQSPYEGGVFKLELFLPEEYPMAAPKVRFLTKIYHPNIDKLGRICLDILKDKWSPALQIRTVLLSIQALLSAPNPDDPLSENIAKHWKSNEAEAVETAKEWTRLYASGA

SEQ ID NO: 26441 - protein, 114 aa, Arabidopsis thaliana
  peptide (1)..(114): Ceres Seq. ID no. 12333410
MILGPTQSPYEGGVFKLELFLPEEYPMAAPKVRFLTKIYHPNIDKLGRICLDILKDKWSPALQIRTVLLSIQALLSAPNPDDPLSENIAKHWKSNEAEAVETAKEWTRLYASGA

SEQ ID NO: 26442 - DNA, 602 bp, Arabidopsis thaliana
  misc_feature (1)..(602): Ceres Seq. ID no. 12337761
  misc_feature (1)..(602): Ortholog of  Ceres SEQ ID NO 15224286 as cited in SEQ ID NO 62627
atcgagcgatggatttggcagaactgtgggcgattttcggacccggattctccggcgccgttttcggaaccgggtggtggggtcgacgccgtcgtttgcagttccatccaagttcccttcgtccattaccttcccggcatattcgcttctctcggagctttgatgttcaattgcgtcagaaaagaagacattgattactctccttacgacgaaggcgagtggagattgaagctgtggcttttcatagcgtatgtcgtagcatttgtttccttagctgcttctgttggcttgctgattcaagattcggttgtgaagactgggccttcaacttggactggtgtggctggtgtctttcaatgtgtatttgtattgataagtgggctaatgtattggacatcgcactcagagtagcgcacaggcacatacttcatctccgactcagattcatactgtgacaacttacaagttcctctcgtttctctactatgtaaattcctgtgtcttgtcttgtcaccttggcattgtgtgcgagattcctctgttgcatcagtgtgtgtttctgttaaaactttgtgtgaatgttattgaaaatactccaaacc

SEQ ID NO: 26443 - protein, 136 aa, Arabidopsis thaliana
  peptide (1)..(136): Ceres Seq. ID no. 12337762
IERWIWQNCGRFSDPDSPAPFSEPGGGVDAVVCSSIQVPFVHYLPGIFASLGALMFNCVRKEDIDYSPYDEGEWRLKLWLFIAYVVAFVSLAASVGLLIQDSVVKTGPSTWTGVAGVFQCVFVLISGLMYWTSHSE

SEQ ID NO: 26444 - protein, 82 aa, Arabidopsis thaliana
  peptide (1)..(82): Ceres Seq. ID no. 12337763
MFNCVRKEDIDYSPYDEGEWRLKLWLFIAYVVAFVSLAASVGLLIQDSVVKTGPSTWTGVAGVFQCVFVLISGLMYWTSHSE

SEQ ID NO: 26445 - DNA, 1123 bp, Arabidopsis thaliana
  misc_feature (1)..(1123): Ceres Seq. ID no. 13489747
  misc_feature (1)..(1123): Ortholog of  Ceres SEQ ID NO 13655193 as cited in SEQ ID NO 62745
gcttactgattacagtttcagttccaaagatgagaactttgagctcccaattatactccaatggtggtctcacttggttccagaagaagaatcagagctctctgttcatcaagcatctcagagtctctaaaccatcgagggttcagctcatatctgctgttcaattccgtccgtgcatcgatattcataagggaaaagtgaaacagatagttggatccacacttcgtgacttgaaagaggatggttcagttctcgttacgaattttgaatcggataagtctgcggaagagtatgcaaagatgtacaaagaagatgggcttacgggtggtcatgtgataatgcttggagcagaccctttaagccaagctgcagctattggagcattacatgcttatcctggcggtttgcaagttggaggtggaatcaattctgagaattgcatgagttatattgaggagggagcaagccatgtcattgtcacttcgtatgtatttaacaatggaaagattgatcttgaaagactcaaagatattgtgagcattgttgggaaacaaagactgatattggaccttagctgcagaaagaaggatggaagatacgcaattgttactgatagatggcagaagttcagcgacgtcatccttgacgagaaatcattggagtttcttggaggattttcagatgagtttctggtgcatggcgtagacgttgaaggaaagaagctagggatcgatgaagagcttgtagcattgcttggcaactactctccgattccagtaacttatgcgggaggtgtgacggtaatggatgatgtagagaggatcaaggacgcaggaaagggacgtgtagatgtaacagtgggaagtgccttagacattttcgggggaaatcttccatacaaagacgtcgtcgcttggcatcacaagcagcactcactccattgatatcgccattttcacctttgctcatcttttttatttgcattaccccaaaccttaagcttcaatatttgcaacattaatcttcagctttaaacttttgtgcttctttctaaactcttcaagaatttgtcaattttgaatattttttcgattaatcaagtttatggtttggtttgactacc

SEQ ID NO: 26446 - protein, 313 aa, Arabidopsis thaliana
  peptide (1)..(313): Ceres Seq. ID no. 13489748
LLITVSVPKMRTLSSQLYSNGGLTWFQKKNQSSLFIKHLRVSKPSRVQLISAVQFRPCIDIHKGKVKQIVGSTLRDLKEDGSVLVTNFESDKSAEEYAKMYKEDGLTGGHVIMLGADPLSQAAAIGALHAYPGGLQVGGGINSENCMSYIEEGASHVIVTSYVFNNGKIDLERLKDIVSIVGKQRLILDLSCRKKDGRYAIVTDRWQKFSDVILDEKSLEFLGGFSDEFLVHGVDVEGKKLGIDEELVALLGNYSPIPVTYAGGVTVMDDVERIKDAGKGRVDVTVGSALDIFGGNLPYKDVVAWHHKQHSLH

SEQ ID NO: 26447 - protein, 304 aa, Arabidopsis thaliana
  peptide (1)..(304): Ceres Seq. ID no. 13489749
MRTLSSQLYSNGGLTWFQKKNQSSLFIKHLRVSKPSRVQLISAVQFRPCIDIHKGKVKQIVGSTLRDLKEDGSVLVTNFESDKSAEEYAKMYKEDGLTGGHVIMLGADPLSQAAAIGALHAYPGGLQVGGGINSENCMSYIEEGASHVIVTSYVFNNGKIDLERLKDIVSIVGKQRLILDLSCRKKDGRYAIVTDRWQKFSDVILDEKSLEFLGGFSDEFLVHGVDVEGKKLGIDEELVALLGNYSPIPVTYAGGVTVMDDVERIKDAGKGRVDVTVGSALDIFGGNLPYKDVVAWHHKQHSLH

SEQ ID NO: 26448 - protein, 214 aa, Arabidopsis thaliana
  peptide (1)..(214): Ceres Seq. ID no. 13489750
MYKEDGLTGGHVIMLGADPLSQAAAIGALHAYPGGLQVGGGINSENCMSYIEEGASHVIVTSYVFNNGKIDLERLKDIVSIVGKQRLILDLSCRKKDGRYAIVTDRWQKFSDVILDEKSLEFLGGFSDEFLVHGVDVEGKKLGIDEELVALLGNYSPIPVTYAGGVTVMDDVERIKDAGKGRVDVTVGSALDIFGGNLPYKDVVAWHHKQHSLH

SEQ ID NO: 26449 - DNA, 824 bp, Arabidopsis thaliana
  misc_feature (1)..(824): Ceres Seq. ID no. 12393741
  misc_feature (1)..(824): Ortholog of  Ceres SEQ ID NO 12474478 as cited in SEQ ID NO 96
actagaaaacatatcattatcacactttcataaagctcataacatacataaaaaatgggtgaatcttttagattattcaatcatcatcatttcctcacaacttttctcataatcatagccatgctcaaattggttcatacaacaacaacaacaacaacaacaacaacaacaacaacaacaacaacaaacaccgagttcgtaaaatcatcatgcactttcacaacgtacccaagactctgtttctcttcactctcaactcatgctagtctcatccaaacaagccccaagctcatggctcatgcggctctcaacatcacattagcctcggctaaagtaacttcagcaatgatggtgcgtctctcgaatagtcggctcaagcctaaagaagtctcggccatgagagactgcgtcgaggagttaggtgacacgttggaggagcttaggaaatcgattggtgagatgtgtcagctaagtggctcgaactatgaagtttacataagcgatatacagacttgggtcagtgcggctttgacagatgtgaacacatgtactgacggatttgaaggagaagatatggacgggaaggttaaggttttggttagagggaggattttggttattgctcatttaacaagtaatgctttagctttgattaatcactttgcttctattcatggctaaagagagttatgataagtactgttagtttgttttttattgatttttctagtgattttgtgtgtataatgataatataatgtatgtgtctttatgattccagaatcaatatgtaacaaatgaagtgtttcatgaaaattgatttt

SEQ ID NO: 26450 - protein, 208 aa, Arabidopsis thaliana
  peptide (1)..(208): Ceres Seq. ID no. 12393742
MGESFRLFNHHHFLTTFLIIIAMLKLVHTTTTTTTTTTTTTTTTNTEFVKSSCTFTTYPRLCFSSLSTHASLIQTSPKLMAHAALNITLASAKVTSAMMVRLSNSRLKPKEVSAMRDCVEELGDTLEELRKSIGEMCQLSGSNYEVYISDIQTWVSAALTDVNTCTDGFEGEDMDGKVKVLVRGRILVIAHLTSNALALINHFASIHG

SEQ ID NO: 26451 - protein, 186 aa, Arabidopsis thaliana
  peptide (1)..(186): Ceres Seq. ID no. 12393743
MLKLVHTTTTTTTTTTTTTTTTNTEFVKSSCTFTTYPRLCFSSLSTHASLIQTSPKLMAHAALNITLASAKVTSAMMVRLSNSRLKPKEVSAMRDCVEELGDTLEELRKSIGEMCQLSGSNYEVYISDIQTWVSAALTDVNTCTDGFEGEDMDGKVKVLVRGRILVIAHLTSNALALINHFASIHG

SEQ ID NO: 26452 - protein, 129 aa, Arabidopsis thaliana
  peptide (1)..(129): Ceres Seq. ID no. 12393744
MAHAALNITLASAKVTSAMMVRLSNSRLKPKEVSAMRDCVEELGDTLEELRKSIGEMCQLSGSNYEVYISDIQTWVSAALTDVNTCTDGFEGEDMDGKVKVLVRGRILVIAHLTSNALALINHFASIHG

SEQ ID NO: 26453 - DNA, 1226 bp, Arabidopsis thaliana
  misc_feature (1)..(1226): Ceres Seq. ID no. 13491506
  misc_feature (1)..(1226): Ortholog of  Ceres SEQ ID NO 14305461 as cited in SEQ ID NO 57996
  misc_feature (1)..(1226): Ortholog of  Ceres SEQ ID NO 15174376 as cited in SEQ ID NO 0
  misc_feature (1)..(1226): Ortholog of  Ceres SEQ ID NO 15178108 as cited in SEQ ID NO 0
tttctttcgtttggcctttgatcctatcataagctttttttcgtttatcaatcttctcgattcagccacaattcttgtttctcagataattcatctcctttctttgattcgtttccttctcttctgtcactcagatctagatctagatctaggtttttttctttctcatcggaaatttggcttagaggcttgttttgatctagggtttggtttttgggaattttgaaaaaaaaaaaaacaaaattaggaatgaatctatgagctactcaatcctgtttcgtcggattcgaattctacactctttctccgtcgtttacctctactacacctacgttttctcatgaagtaatcgttctcgatctcagttttcgtttttgatctaacttattctttgatagatttagaaatcggggattttcagattgtgtttttgagaggtttttataggaaaatatctctagaagaagaagaataatattatattgattttaattttggtgagaagaagtcaaaaagtcaacgagaaatggggtcgttgcaaatgcaaacaagtcctgaatccgataatgatccgaggtacgccacggtgacggatgagaggaagaggaagagaatgatctctaacagagaatctgctcggaggtcaaggatgaggaaacagaagcaacttggtgatttgatcaacgaagtcactcttctcaagaatgataacgctaaaatcactgagcaggttgatgaagcttcaaagaaatacattgaaatggagtctaagaacaatgtcttgagggcacaggcttcggagttgacggataggttgagatcattgaactctgtgcttgagatggttgaagaaattagtggtcaggctttggatattcctgagattcctgaatctatgcagaacccttggcagatgccttgtccaatgcaaccaatcagagcttctgctgatatgtttgattgctgaagatggatgattcatatctgaaggatcaaaaatgaagcattgagttcgagtctttggtctgttttacttactgtccttgttgtaacaattagtgtgtcattggtgaattgagtcttgtgttgtcaatggacaacgcaatctttatgcaatttcaatttgttcgtgtctttgtatggttttgtagcctcagtcctctagtcttgtgtctcatgtaattggtgtctaatgtgtttcttattgaattcaagctttcttattg

SEQ ID NO: 26454 - protein, 146 aa, Arabidopsis thaliana; identical to SEQ ID NO: 21432
  peptide (1)..(146): Ceres Seq. ID no. 13491507

SEQ ID NO: 26455 - protein, 141 aa, Arabidopsis thaliana; identical to SEQ ID NO: 21433
  peptide (1)..(141): Ceres Seq. ID no. 13491508

SEQ ID NO: 26456 - protein, 117 aa, Arabidopsis thaliana; identical to SEQ ID NO: 21434
  peptide (1)..(117): Ceres Seq. ID no. 13491509

SEQ ID NO: 26457 - DNA, 638 bp, Arabidopsis thaliana
  misc_feature (1)..(638): Ceres Seq. ID no. 12420535
  misc_feature (1)..(638): Ortholog of  Ceres SEQ ID NO 14302329 as cited in SEQ ID NO 61494
aacaccgaatctctcaacacaaacaaaatcacacatctctcttcatctttttgtttcctgcaagaatctgaatctgctttactattgtgtcatcatgatgaacatcgacgatacgacgtctccaatggcccacccgatcggtccatctcagcctccttccgaccaaaccaaacaagatccgccaagtttgccccaagaagcagcttcttctgtttcggccgacaagaaagatctagctttgcttgaagagaaaccgaagcagagtcaagaagaagatagagtggacactgggagagagaggttaaagaagcatcggagagagatcgctggtagggtttggataccggagatatggggacaagaagagcttcttaaggattggatcgattgttcaacgtttgacacgtgtctagtccctgccggaatctcgtctgcacgtactgctctcgtagaggaagctaggcgagctgcttcagcttctggtgggttacataatcgttgcttgatcttacgttgaatttaatataataagataacatacttataaatgtggttcttgttcctcaataatataaggcactattgttacattgttgataatattctaactcattttactcgtaactttatgaaacatt

SEQ ID NO: 26458 - protein, 171 aa, Arabidopsis thaliana
  peptide (1)..(171): Ceres Seq. ID no. 12420536
TPNLSTQTKSHISLHLFVSCKNLNLLYYCVIMMNIDDTTSPMAHPIGPSQPPSDQTKQDPPSLPQEAASSVSADKKDLALLEEKPKQSQEEDRVDTGRERLKKHRREIAGRVWIPEIWGQEELLKDWIDCSTFDTCLVPAGISSARTALVEEARRAASASGGLHNRCLILR

SEQ ID NO: 26459 - protein, 140 aa, Arabidopsis thaliana
  peptide (1)..(140): Ceres Seq. ID no. 12420537
MMNIDDTTSPMAHPIGPSQPPSDQTKQDPPSLPQEAASSVSADKKDLALLEEKPKQSQEEDRVDTGRERLKKHRREIAGRVWIPEIWGQEELLKDWIDCSTFDTCLVPAGISSARTALVEEARRAASASGGLHNRCLILR

SEQ ID NO: 26460 - protein, 139 aa, Arabidopsis thaliana
  peptide (1)..(139): Ceres Seq. ID no. 12420538
MNIDDTTSPMAHPIGPSQPPSDQTKQDPPSLPQEAASSVSADKKDLALLEEKPKQSQEEDRVDTGRERLKKHRREIAGRVWIPEIWGQEELLKDWIDCSTFDTCLVPAGISSARTALVEEARRAASASGGLHNRCLILR

SEQ ID NO: 26461 - DNA, 786 bp, Arabidopsis thaliana
  misc_feature (1)..(786): Ceres Seq. ID no. 12338746
  misc_feature (1)..(786): Ortholog of  Ceres SEQ ID NO 14304183 as cited in SEQ ID NO 53725
  misc_feature (1)..(786): Ortholog of  Ceres SEQ ID NO 14305778 as cited in SEQ ID NO 57220
  misc_feature (1)..(786): Ortholog of  Ceres SEQ ID NO 14309452 as cited in SEQ ID NO 0
accaaaactctctttttctgtgcaaacactttggaggattcttctaggcttctttctaccacaaacacaagagcgcgttttcttcacgccggcgaacaacgtcagagtcatggccaccggagatgggaaatcggtgatggtcgtcggagttgacgacagcgagcagagcacttacgccttggagtggacgctcgatcgtttcttcgctccttacgctcccaattatccttttaagctcttcatcgtccacgccaaacctaacgccgtctccgccgttggtctcgctggtcccggaactgcggaggttgtaccttatgttgatgctgatctgaagcataccgctgctaaggttgtcgagaaagccaaagcaatttgtcagagcagatcggttcatggcgcggtgatcgaagttttcgaaggtgatgcaaggaatatcctatgtgaagttgtagataagcatcatgcttctattcttgttgtgggaagccatggatatggagctatcaagagggcggttctcgggagtacgagtgactactgcgctcatcatgctcattgctcggtgatgatcgtgaagaagcctaagatcaaggtctgaaacctaagggaaggctactcggtcaaagcaaagtctctgcatagtcttctaattcagaagaataaagtgaaataatattagcttgatgtgaaacaacgattcaagacaatatacatttgcatctatatgtgtaattgtttactacatacaatgttttggtatccttagacaatcaatattcgtgtgtt

SEQ ID NO: 26462 - protein, 198 aa, Arabidopsis thaliana
  peptide (1)..(198): Ceres Seq. ID no. 12338747
PKLSFSVQTLWRILLGFFLPQTQERVFFTPANNVRVMATGDGKSVMVVGVDDSEQSTYALEWTLDRFFAPYAPNYPFKLFIVHAKPNAVSAVGLAGPGTAEVVPYVDADLKHTAAKVVEKAKAICQSRSVHGAVIEVFEGDARNILCEVVDKHHASILVVGSHGYGAIKRAVLGSTSDYCAHHAHCSVMIVKKPKIKV

SEQ ID NO: 26463 - protein, 162 aa, Arabidopsis thaliana
  peptide (1)..(162): Ceres Seq. ID no. 12338748
MATGDGKSVMVVGVDDSEQSTYALEWTLDRFFAPYAPNYPFKLFIVHAKPNAVSAVGLAGPGTAEVVPYVDADLKHTAAKVVEKAKAICQSRSVHGAVIEVFEGDARNILCEVVDKHHASILVVGSHGYGAIKRAVLGSTSDYCAHHAHCSVMIVKKPKIKV

SEQ ID NO: 26464 - protein, 153 aa, Arabidopsis thaliana
  peptide (1)..(153): Ceres Seq. ID no. 12338749
MVVGVDDSEQSTYALEWTLDRFFAPYAPNYPFKLFIVHAKPNAVSAVGLAGPGTAEVVPYVDADLKHTAAKVVEKAKAICQSRSVHGAVIEVFEGDARNILCEVVDKHHASILVVGSHGYGAIKRAVLGSTSDYCAHHAHCSVMIVKKPKIKV

SEQ ID NO: 26465 - DNA, 967 bp, Arabidopsis thaliana
  misc_feature (1)..(967): Ceres Seq. ID no. 13490298
  misc_feature (1)..(967): Ortholog of  Ceres SEQ ID NO 14305743 as cited in SEQ ID NO 52462
  misc_feature (1)..(967): Ortholog of  Ceres SEQ ID NO 13623029 as cited in SEQ ID NO 0
atcttcaatttcgaatcgataaccctaatttctcacagacgagcaagagaaagagccaaagccgtttcttcaggtaacttgaggatgtcgcgtgtgtatgttggtaatttggatccgcgagttactgaacgtgaactcgaggatgagtttcgttcctttggtgtgatcaggagtgtctgggttgctagaagacctcctggttacgcttttcttgattttgaagattcaagagatgcccgtgacgccatccgtgaagtagatggcaagaatggatggagggtagagcagtctcataaccgtggtggtggtggaggtcgtggtggtggtcgtggaggaggtgatggtggtcgtggacgtggtggttctgatttgaagtgctatgagtgtggtgagtctggtcactttgcacgtgaatgtcgttctcgtggtggttctggtggtaggcgtcgtagccgcagccgtagtcgcagtcctcctagatacagaaagagtcctacctatggaggacgaagaagttacagccctcgtgctagatctcctcctcctccaagacgtcgtagtccttctcctcgtggtcgcaactacagtaggtcaccaccaccttatagagcacgtgacgaggtgccatatgctaatggaaatggtctgaaagatgtgcgcagaagccggagctgagtgttacttgtctagatagcaaattatgggatcaggagacaactatttgcttgtgacgtcaagaggagaggaaattagtatctgtgaatttcactaagagaatatgttttagctgtgtggtggattggatatgcttgctgcttttgaattgctggaaagcttcttattgcgtttggattatgaagccatagttgtatctgccgttaggtaaagtacttttaaatatctacccatgttcttaaaagacataaacaaaagctctgctaaaaacctatgcattttctttgttttt

SEQ ID NO: 26466 - protein, 224 aa, Arabidopsis thaliana
  peptide (1)..(224): Ceres Seq. ID no. 13490299
IFNFESITLISHRRARERAKAVSSGNLRMSRVYVGNLDPRVTERELEDEFRSFGVIRSVWVARRPPGYAFLDFEDSRDARDAIREVDGKNGWRVEQSHNRGGGGGRGGGRGGGDGGRGRGGSDLKCYECGESGHFARECRSRGGSGGRRRSRSRSRSPPRYRKSPTYGGRRSYSPRARSPPPPRRRSPSPRGRNYSRSPPPYRARDEVPYANGNGLKDVRRSRS

SEQ ID NO: 26467 - protein, 196 aa, Arabidopsis thaliana
  peptide (1)..(196): Ceres Seq. ID no. 13490300
MSRVYVGNLDPRVTERELEDEFRSFGVIRSVWVARRPPGYAFLDFEDSRDARDAIREVDGKNGWRVEQSHNRGGGGGRGGGRGGGDGGRGRGGSDLKCYECGESGHFARECRSRGGSGGRRRSRSRSRSPPRYRKSPTYGGRRSYSPRARSPPPPRRRSPSPRGRNYSRSPPPYRARDEVPYANGNGLKDVRRSRS

SEQ ID NO: 26468 - DNA, 1999 bp, Arabidopsis thaliana
  misc_feature (1)..(1999): Ceres Seq. ID no. 12327028
  misc_feature (1)..(1999): Ortholog of  Ceres SEQ ID NO 14314404 as cited in SEQ ID NO 57421
  misc_feature (1)..(1999): Ortholog of  Ceres SEQ ID NO 13493536 as cited in SEQ ID NO 58515
  misc_feature (1)..(1999): Ortholog of  Ceres SEQ ID NO 12618461 as cited in SEQ ID NO 64349
acatatcactctttctccttcacgagggatttttgttccgatctacttctccggcttatcaccgatttagatctaagcctgaggtttccttttgcattttagagattccgagaatgagacaacggcaactattttccgtgtttttgcttctcttagctttcgtttcgttccagaagctttgctactgtgacgatcaaacggttctgtatgaatcgttcgatgagccttttgatggccgctggatcgtttcgaagaatagtgattacgaaggtgtatggaagcatgcaaagagtgaaggacatgaggattatggacttctcgtgagtgagaaggctaggaagtatggaattgtgaaagagcttgacgagcctctaaacctcaaggaaggaactgttgttcttcagtacgaggttcgtttccaggaaggacttgagtgtggtggtgcttacttgaagtacctccgtcctcaggaagctggatggacacctcagggattcgatagtgaatccccttactctatcatgtttgggcctgacaagtgtggaggtacgaacaaagtgcatttcatcttgaagcacaagaatcccaagagtggcgagtacgttgaacaccatctgaagttccctccctctgttccttatgacaagctttcccatgtctacaccgccatcttgaaacccgacaacgaggttagaattttggttgatggagaggagaagaaaaaggccaatttactctctggtgaagactttgagcctgcattgatccctgccaagaccatccctgaccctgaagacaagaaaccagaggattgggacgaaagagccaagattcctgatccaaatgccgtgaagcctgaggactgggatgaggatgcacctatggagattgaagatgaggaagctgagaaacccgaaggatggttagatgatgagcctgaggaggtcgacgaccccgaagcgaccaagcctgaagattgggatgatgaggaagatggtatgtgggaggctcctaaaattgacaaccccaagtgtgaagcagcacctggttgtggtgaatggaagagaccaatgaagaggaatcctgcttacaagggcaaatggagctcacctcttattgataacccggcttacaagggaatctggaaacccagagatatccctaaccctgactactttgagctagacagacccgattacgaacccattgcagccatcggtattgagatctggacaatgcaagatggtatcttgtttgacaacatcttgatagcgaaagacgagaaggtcgctgagacttacagacagaccacttggaagcccaaattcgatgttgagaaagagaaacaaaaggcagaagaggaagctgctggctctgcagatggtctcaagagctaccagaaggttgtattcgacctcttgaacaaggttgcagatttatctttcctaagtgcctacaagtctaagatcacggaactgattgagaaagccgagcaacaaccaaacttaaccattggtgtcctcgtcgccattgtggttgtattcttctcgctcttcctcaagcttatctttggtggcaaaaaggcggcggcacctgtggaaaagaagaaaccagaagtagcggagagttcaaagagtggggatgaggcggagaagaaggaagaaaccgcggcaccacgcaaaaggcaaccgagacgtgataattagaacaagattttaaagtagttttcgaagatgtgaaagaaaagttcagatttatttttctgtttttggttttgggttgaatgttgttttctgctgtagcctataatggtgtaacaccaagtttgagaaatttttgtctttgggcgaagaaaagaaaggaggaatatgtatgtgaagacggtttgttgacagccaaattgtagcttctatttctttttcatccccttcagtagtaacaactggttgcttgaaacattagagttttcttatttgaatcaaaagagtttttataacca

SEQ ID NO: 26469 - protein, 567 aa, Arabidopsis thaliana
  peptide (1)..(567): Ceres Seq. ID no. 12327029
ISLFLLHEGFLFRSTSPAYHRFRSKPEVSFCILEIPRMRQRQLFSVFLLLLAFVSFQKLCYCDDQTVLYESFDEPFDGRWIVSKNSDYEGVWKHAKSEGHEDYGLLVSEKARKYGIVKELDEPLNLKEGTVVLQYEVRFQEGLECGGAYLKYLRPQEAGWTPQGFDSESPYSIMFGPDKCGGTNKVHFILKHKNPKSGEYVEHHLKFPPSVPYDKLSHVYTAILKPDNEVRILVDGEEKKKANLLSGEDFEPALIPAKTIPDPEDKKPEDWDERAKIPDPNAVKPEDWDEDAPMEIEDEEAEKPEGWLDDEPEEVDDPEATKPEDWDDEEDGMWEAPKIDNPKCEAAPGCGEWKRPMKRNPAYKGKWSSPLIDNPAYKGIWKPRDIPNPDYFELDRPDYEPIAAIGIEIWTMQDGILFDNILIAKDEKVAETYRQTTWKPKFDVEKEKQKAEEEAAGSADGLKSYQKVVFDLLNKVADLSFLSAYKSKITELIEKAEQQPNLTIGVLVAIVVVFFSLFLKLIFGGKKAAAPVEKKKPEVAESSKSGDEAEKKEETAAPRKRQPRRDN

SEQ ID NO: 26470 - protein, 530 aa, Arabidopsis thaliana
  peptide (1)..(530): Ceres Seq. ID no. 12327030
MRQRQLFSVFLLLLAFVSFQKLCYCDDQTVLYESFDEPFDGRWIVSKNSDYEGVWKHAKSEGHEDYGLLVSEKARKYGIVKELDEPLNLKEGTVVLQYEVRFQEGLECGGAYLKYLRPQEAGWTPQGFDSESPYSIMFGPDKCGGTNKVHFILKHKNPKSGEYVEHHLKFPPSVPYDKLSHVYTAILKPDNEVRILVDGEEKKKANLLSGEDFEPALIPAKTIPDPEDKKPEDWDERAKIPDPNAVKPEDWDEDAPMEIEDEEAEKPEGWLDDEPEEVDDPEATKPEDWDDEEDGMWEAPKIDNPKCEAAPGCGEWKRPMKRNPAYKGKWSSPLIDNPAYKGIWKPRDIPNPDYFELDRPDYEPIAAIGIEIWTMQDGILFDNILIAKDEKVAETYRQTTWKPKFDVEKEKQKAEEEAAGSADGLKSYQKVVFDLLNKVADLSFLSAYKSKITELIEKAEQQPNLTIGVLVAIVVVFFSLFLKLIFGGKKAAAPVEKKKPEVAESSKSGDEAEKKEETAAPRKRQPRRDN

SEQ ID NO: 26471 - protein, 394 aa, Arabidopsis thaliana
  peptide (1)..(394): Ceres Seq. ID no. 12327031
MFGPDKCGGTNKVHFILKHKNPKSGEYVEHHLKFPPSVPYDKLSHVYTAILKPDNEVRILVDGEEKKKANLLSGEDFEPALIPAKTIPDPEDKKPEDWDERAKIPDPNAVKPEDWDEDAPMEIEDEEAEKPEGWLDDEPEEVDDPEATKPEDWDDEEDGMWEAPKIDNPKCEAAPGCGEWKRPMKRNPAYKGKWSSPLIDNPAYKGIWKPRDIPNPDYFELDRPDYEPIAAIGIEIWTMQDGILFDNILIAKDEKVAETYRQTTWKPKFDVEKEKQKAEEEAAGSADGLKSYQKVVFDLLNKVADLSFLSAYKSKITELIEKAEQQPNLTIGVLVAIVVVFFSLFLKLIFGGKKAAAPVEKKKPEVAESSKSGDEAEKKEETAAPRKRQPRRDN

SEQ ID NO: 26472 - DNA, 1246 bp, Arabidopsis thaliana
  misc_feature (1)..(1246): Ceres Seq. ID no. 13591822
  misc_feature (1)..(1246): Ortholog of  Ceres SEQ ID NO 12614942 as cited in SEQ ID NO 68635
acttcaccatcagcatcactaaactcgaaccctaaagaaaaacaaaaatggctgccatagcttctactctctctctttcttcaaccaaacctcagagacttttcgattcttccttccatggctcagccatctccgcagctcctatctccatcggtctcaaaccacgatctttctccgttcgcgccacaaccgctggttacgacttgaacgctttcacgttcgacccgatcaaggaatcgatcgtgtcacgtgagatgacgagaaggtacatgacggatatgatcacttacgctgagactgatgttgtcgtcgttggtgctggatctgctggtttatctgctgcttatgagatcagtaagaaccctgatgttcaagttgccattattgagcaatctgttagtcctggtggtggtgcttggctcggtggtcagcttttctccgccatgattgttcgcaaaccagctcacttgttccttgacgagattggtgtggcttacgatgagcaagacacctacgttgtcgttaagcacgctgtctgttcacatcaaccatcatgagcaagcttttgggctcgtcctaatgtgaactcttcaacgcttgttgcagcttaaggatttgattgtgaaaggaaacagagttggtggtgtggggactaactgggctcttgtggctcagaaccatgacacacaatcgtgtatggaccctaatgttatgnaggcgaagattgtggttagctcttgtggtcatgatggtccttttggagcgactggtgttaagaggttgaagagcattgggatgattgatcatgttcctgggatgaaagctttggacatgaacacttgctgaagatgctattgtgaggttgaccagagaggttgttcctggtatgattgttaccggtatggaagttgctgagatcgatggtgcaccgagaatgggaccaacgtttggagctatgatgatatcgggacaaaaggcgggacaacttgctcttaaggctttggggctaccgaatgctattgatggaactctcgtcggaaacctaagcccggagctggtcttagctgcagcagattcagctgaaaccgtagatgcttaaaatcaaaaggttttaacttttaagaaaatgtcccttcatccttcggatgttgaaggagtgcaataaaaggagtttaggtgttttatatgtcttgaacttttctggtgtctttgtttctctcttctcaatgaaatgtttcttctgtgg

SEQ ID NO: 26473 - protein, 169 aa, Arabidopsis thaliana
  peptide (1)..(169): Ceres Seq. ID no. 13591823
MAAIASTLSLSSTKPQRLFDSSFHGSAISAAPISIGLKPRSFSVRATTAGYDLNAFTFDPIKESIVSREMTRRYMTDMITYAETDVVVVGAGSAGLSAAYEISKNPDVQVAIIEQSVSPGGGAWLGGQLFSAMIVRKPAHLFLDEIGVAYDEQDTYVVVKHAVCSHQPS

SEQ ID NO: 26474 - protein, 100 aa, Arabidopsis thaliana
  peptide (1)..(100): Ceres Seq. ID no. 13591824
MTRRYMTDMITYAETDVVVVGAGSAGLSAAYEISKNPDVQVAIIEQSVSPGGGAWLGGQLFSAMIVRKPAHLFLDEIGVAYDEQDTYVVVKHAVCSHQPS

SEQ ID NO: 26475 - protein, 95 aa, Arabidopsis thaliana
  peptide (1)..(95): Ceres Seq. ID no. 13591825
MTDMITYAETDVVVVGAGSAGLSAAYEISKNPDVQVAIIEQSVSPGGGAWLGGQLFSAMIVRKPAHLFLDEIGVAYDEQDTYVVVKHAVCSHQPS

SEQ ID NO: 26476 - DNA, 1759 bp, Arabidopsis thaliana
  misc_feature (1)..(1759): Ceres Seq. ID no. 12329065
  misc_feature (1)..(1759): Ortholog of  Ceres SEQ ID NO 15226449 as cited in SEQ ID NO 58879
atcctctgttttgtaaccaatctcagctctccctctcaaacaatccaggattcttcagattcctctcctttgatcctctctttaacaatctctctctctctgttttcttcgatccgttgtaggagaaaatggtcgttatcaacagtctccgacgcttggcgcgtaccactcaggttcatttgcacagtaagtatgccacttgcatgtctgggaactccacttccaggaggattttcactactgaggcagcacctgagaagaaaaacactgttgggtctaaagggcatgatatgcttgcaccttttactgctggatggcagagtgctgatttagatcccttggtcattgcaaagtctgagggaagttatgtgtatgatgatactgggaaaaaatatcttgactctctcgctggtttatggtgtactgccttaggaggaaatgagccaaggcttgtttctgccgctgttgaacagttgaacaccttgccgttttatcactccttttggaaccgtactactaaaccttctctggatcttgctaaggttcttttagagatgttcacggccaacaaaatggccaaagcattttttacaagcggtggatcagatgccaacgatacccaggtcaagctggtttggtattacaataacgcacttggaaggcccgagaagaaaaagtttatcgcgagaaagaaatcgtaccatggctccactctaatatcagcaagtttgtccggccttcccccgctacaccaaaattttgatttacctgcaccatttgtgttgcacacagattgccctcattattggcgttttcatcttccaggcgaaacggaagaggagttctcaaccagattagccaagaatttagaggatctaatcatcaaagaaggaccagaaactattggtgcttttatagctgaaccagtcatgggtgctgggggtgtgatacctccacctgctacctactttgaaaaggttcaagctgttgttaagaaatatgatatcttgttcattgctgatgaggtgatatgtgcatttggaaggctcgggacaatgtttggctgtgacaaatacaacattaagccagatcttgtgaccttagctaaggcactgtcttcagcatatatgccgattggagccattcttatgagccaagaagtggcagatgtcataaattctcatagcagcaagctaggcgttttctcccatggatttacttattctggtcatccagtttcgtgtgctgtagcaattgaagcgttaaagatatacaaggagaggaacataccagagtatgtcgcaaaagttgccccaaggtttcaagatggagttaaagcgtttgcctctggtagtcctattattggagagacaagaggaacaggtttgattcttgggactgagtttgtagacaataaatctccgaacgaaccatttccaccagaatggggtgttggcgcattctttggagccgagtgccagaagcacgggatgttagtccgtgttgcaggtgatggcattttgatgtctccaccgctcattatctcacctgaagagattgatgagttgatttctatctatgggaaagcattgaaggcaacggaagagaaggtaaaagaactcaaggctcagcacaagaagtgaaaagcagagtcaaaatgatgttgatgaaaaatgttttttagattctcaaagtttggatcctttgttttttttttttaacacacaacaagtctttaaataagtacattttaatgagg

SEQ ID NO: 26477 - protein, 504 aa, Arabidopsis thaliana
  peptide (1)..(504): Ceres Seq. ID no. 12329066
MVVINSLRRLARTTQVHLHSKYATCMSGNSTSRRIFTTEAAPEKKNTVGSKGHDMLAPFTAGWQSADLDPLVIAKSEGSYVYDDTGKKYLDSLAGLWCTALGGNEPRLVSAAVEQLNTLPFYHSFWNRTTKPSLDLAKVLLEMFTANKMAKAFFTSGGSDANDTQVKLVWYYNNALGRPEKKKFIARKKSYHGSTLISASLSGLPPLHQNFDLPAPFVLHTDCPHYWRFHLPGETEEEFSTRLAKNLEDLIIKEGPETIGAFIAEPVMGAGGVIPPPATYFEKVQAVVKKYDILFIADEVICAFGRLGTMFGCDKYNIKPDLVTLAKALSSAYMPIGAILMSQEVADVINSHSSKLGVFSHGFTYSGHPVSCAVAIEALKIYKERNIPEYVAKVAPRFQDGVKAFASGSPIIGETRGTGLILGTEFVDNKSPNEPFPPEWGVGAFFGAECQKHGMLVRVAGDGILMSPPLIISPEEIDELISIYGKALKATEEKVKELKAQHKK

SEQ ID NO: 26478 - protein, 479 aa, Arabidopsis thaliana
  peptide (1)..(479): Ceres Seq. ID no. 12329067
MSGNSTSRRIFTTEAAPEKKNTVGSKGHDMLAPFTAGWQSADLDPLVIAKSEGSYVYDDTGKKYLDSLAGLWCTALGGNEPRLVSAAVEQLNTLPFYHSFWNRTTKPSLDLAKVLLEMFTANKMAKAFFTSGGSDANDTQVKLVWYYNNALGRPEKKKFIARKKSYHGSTLISASLSGLPPLHQNFDLPAPFVLHTDCPHYWRFHLPGETEEEFSTRLAKNLEDLIIKEGPETIGAFIAEPVMGAGGVIPPPATYFEKVQAVVKKYDILFIADEVICAFGRLGTMFGCDKYNIKPDLVTLAKALSSAYMPIGAILMSQEVADVINSHSSKLGVFSHGFTYSGHPVSCAVAIEALKIYKERNIPEYVAKVAPRFQDGVKAFASGSPIIGETRGTGLILGTEFVDNKSPNEPFPPEWGVGAFFGAECQKHGMLVRVAGDGILMSPPLIISPEEIDELISIYGKALKATEEKVKELKAQHKK

SEQ ID NO: 26479 - protein, 450 aa, Arabidopsis thaliana
  peptide (1)..(450): Ceres Seq. ID no. 12329068
MLAPFTAGWQSADLDPLVIAKSEGSYVYDDTGKKYLDSLAGLWCTALGGNEPRLVSAAVEQLNTLPFYHSFWNRTTKPSLDLAKVLLEMFTANKMAKAFFTSGGSDANDTQVKLVWYYNNALGRPEKKKFIARKKSYHGSTLISASLSGLPPLHQNFDLPAPFVLHTDCPHYWRFHLPGETEEEFSTRLAKNLEDLIIKEGPETIGAFIAEPVMGAGGVIPPPATYFEKVQAVVKKYDILFIADEVICAFGRLGTMFGCDKYNIKPDLVTLAKALSSAYMPIGAILMSQEVADVINSHSSKLGVFSHGFTYSGHPVSCAVAIEALKIYKERNIPEYVAKVAPRFQDGVKAFASGSPIIGETRGTGLILGTEFVDNKSPNEPFPPEWGVGAFFGAECQKHGMLVRVAGDGILMSPPLIISPEEIDELISIYGKALKATEEKVKELKAQHKK

SEQ ID NO: 26480 - DNA, 1355 bp, Arabidopsis thaliana
  misc_feature (1)..(1355): Ceres Seq. ID no. 13490365
  misc_feature (1)..(1355): Ortholog of  Ceres SEQ ID NO 13596519 as cited in SEQ ID NO 62572
  misc_feature (1)..(1355): Ortholog of  Ceres SEQ ID NO 12625108 as cited in SEQ ID NO 68102
cactcccatcaaagcaaaactatctttctccttctcattcctttttctctcactctcctccattaaagctctgcactttctcaaagagaatgttcatgggtaagatgggtcttttgggaattgctctgttttgttttgctgcaatggtgtgctctgttcatggctatgacgctggatgggtcaatgctcatgctaccttctatggtggaagtgatgcttcaggaacaatgggtggagcttgtggctacgggaacctctacagtcaaggttacgggaccaacacggcggcgttgagcactgctctgttcaacaacggtcttagctgcggggcttgttttgagatcaagtgtcagagcgacggcgcgtggtgtttacctggtgctatcattgtcacagccaccaatttctgtcctcctaacaacgctcttcccaataacgctggtggttggtgtaaccctccgcttcatcatttcgatctctctcagcctgtttttcaacgcattgctcagtacaaagctggtgttgtccctgtttcctacagaagggttccgtgtatgagaagaggaggtataagattcacaatcaacggtcactcttacttcaaccttgtcttggtgaccaatgttggtggtgctggagatgttcattcggttgcggttaaaggttctagaacaaggtggcaacaaatgtcaagaaactggggacagaactggcaaagcaacaatctcttaaacggtcaagcattgtcatttaaggtgactgctagtgatggtcgtaccgtcgtctctaacaacattgctccagctagttggtcctttggacaaaccttcaccggccgtcaattccgttaaaattgagtcaagttcggttttatatagttttagggtttgtgtagtagttggttgaggaaagagtagagaaagagagagggtttaaggctttttagggtttttaagtggagagccttgaaacttcttctttgactcttgagggttaaaatggagaaaagagcttgttttataagggctcttttagtcatgttaaggattagggttttagtaagtgggtgttgagtagtagagtggtgtgtcttaagggacctctatgtttcaccaatgggttcctttgttttatcacttttttattttgttttatcttcttttttcaagcttctgtcttgtggtttaaaaagcagaagtgggtaggggcagaggaggaatttcaccacccgcctatgtgtttttctttttgggtcgttttggtttatgttatgaagttgtaattgtaatgtagatcaaccaatgggtttgataagtgttttgttaccatactatgaattttatctgttttgtgtg

SEQ ID NO: 26481 - protein, 282 aa, Arabidopsis thaliana
  peptide (1)..(282): Ceres Seq. ID no. 13490366
LPSKQNYLSPSHSFFSHSPPLKLCTFSKRMFMGKMGLLGIALFCFAAMVCSVHGYDAGWVNAHATFYGGSDASGTMGGACGYGNLYSQGYGTNTAALSTALFNNGLSCGACFEIKCQSDGAWCLPGAIIVTATNFCPPNNALPNNAGGWCNPPLHHFDLSQPVFQRIAQYKAGVVPVSYRRVPCMRRGGIRFTINGHSYFNLVLVTNVGGAGDVHSVAVKGSRTRWQQMSRNWGQNWQSNNLLNGQALSFKVTASDGRTVVSNNIAPASWSFGQTFTGRQFR

SEQ ID NO: 26482 - protein, 253 aa, Arabidopsis thaliana
  peptide (1)..(253): Ceres Seq. ID no. 13490367
MFMGKMGLLGIALFCFAAMVCSVHGYDAGWVNAHATFYGGSDASGTMGGACGYGNLYSQGYGTNTAALSTALFNNGLSCGACFEIKCQSDGAWCLPGAIIVTATNFCPPNNALPNNAGGWCNPPLHHFDLSQPVFQRIAQYKAGVVPVSYRRVPCMRRGGIRFTINGHSYFNLVLVTNVGGAGDVHSVAVKGSRTRWQQMSRNWGQNWQSNNLLNGQALSFKVTASDGRTVVSNNIAPASWSFGQTFTGRQFR

SEQ ID NO: 26483 - protein, 251 aa, Arabidopsis thaliana
  peptide (1)..(251): Ceres Seq. ID no. 13490368
MGKMGLLGIALFCFAAMVCSVHGYDAGWVNAHATFYGGSDASGTMGGACGYGNLYSQGYGTNTAALSTALFNNGLSCGACFEIKCQSDGAWCLPGAIIVTATNFCPPNNALPNNAGGWCNPPLHHFDLSQPVFQRIAQYKAGVVPVSYRRVPCMRRGGIRFTINGHSYFNLVLVTNVGGAGDVHSVAVKGSRTRWQQMSRNWGQNWQSNNLLNGQALSFKVTASDGRTVVSNNIAPASWSFGQTFTGRQFR

SEQ ID NO: 26484 - DNA, 1270 bp, Arabidopsis thaliana
  misc_feature (1)..(1270): Ceres Seq. ID no. 12334188
  misc_feature (1)..(1270): Ortholog of  Ceres SEQ ID NO 14306059 as cited in SEQ ID NO 52249
  misc_feature (1)..(1270): Ortholog of  Ceres SEQ ID NO 15170479 as cited in SEQ ID NO 52835
  misc_feature (1)..(1270): Ortholog of  Ceres SEQ ID NO 13596087 as cited in SEQ ID NO 68336
aaaaaacgaaaaaaaaactcacctttctcaaaatcacacaaatcttctttatttgttattctcaatccttccttcatctccaggtttctttcgattcgttgagtcattcaatttttccatcactgggttttcctctctgaatccgatcggagaatccagtcgattagtaatctagcgctctctctttttctattcgatgacttatcacgaagaagacgatacagtttctgaatttcgagttagagttgaagaagatggagttgataaattaggtcattatgttaaacttagtgaagatttcgaagaacatcgacaagaaacagaacaagatgatgaagaatcatcatcatcaccgtcctcttcttcttcttcttcttcatgtggacagaaacgatctgtttggttttggatcaagcttggtcttttcttcacttttctaactgctttgggtctcgctggttacaaatggctatatcctttaatcatggataaggagctaatcccactcataaaatgggagatggagacatttacacaccctgtgtgcggtattcttgtgtttgcatcagtctctttattccctttgatacttattccaactacgccgtcaatgtgggtggctgggattacatttggttatttctatggccttctccttactcttccagctgtagctattggtgtttcacttccttacttcatcagctatctcttcctcaaccaaattcaaggttggttagaaagatatccagatcaagctgcaatgttgagagctgctggtggaggcagttggtttcatcagtttcgtgcagttaccttaatccggatttctccatttccttttgctgtatataactactgcgctgttgcaactcgtgtgaagttcggtccttacatggctggttctctcgtaggcatggcgccagagatttttgtcgcaatttatacagggattcttataaggacattggcagatgcatccactgcggaacaaaagggtctctcgattcttcaaattgttctcaacatttttggttttgtagcaactgttgtgacaactgttctcatcactaagtatgcgaaaagacagcttgaagttatgaagaaggagaaggaagctttgttgttacagtaatggagacaacaaccttagaagttatgtctctgcttattcccaaattaagtacagggtttcgtccatgatgtgaaaaaaaaactcttgatttttggtctctgttttggtttgtttatagccgagaaatgaaagggt

SEQ ID NO: 26485 - protein, 312 aa, Arabidopsis thaliana
  peptide (1)..(312): Ceres Seq. ID no. 12334189
MTYHEEDDTVSEFRVRVEEDGVDKLGHYVKLSEDFEEHRQETEQDDEESSSSPSSSSSSSSCGQKRSVWFWIKLGLFFTFLTALGLAGYKWLYPLIMDKELIPLIKWEMETFTHPVCGILVFASVSLFPLILIPTTPSMWVAGITFGYFYGLLLTLPAVAIGVSLPYFISYLFLNQIQGWLERYPDQAAMLRAAGGGSWFHQFRAVTLIRISPFPFAVYNYCAVATRVKFGPYMAGSLVGMAPEIFVAIYTGILIRTLADASTAEQKGLSILQIVLNIFGFVATVVTTVLITKYAKRQLEVMKKEKEALLLQ

SEQ ID NO: 26486 - protein, 216 aa, Arabidopsis thaliana
  peptide (1)..(216): Ceres Seq. ID no. 12334190
MDKELIPLIKWEMETFTHPVCGILVFASVSLFPLILIPTTPSMWVAGITFGYFYGLLLTLPAVAIGVSLPYFISYLFLNQIQGWLERYPDQAAMLRAAGGGSWFHQFRAVTLIRISPFPFAVYNYCAVATRVKFGPYMAGSLVGMAPEIFVAIYTGILIRTLADASTAEQKGLSILQIVLNIFGFVATVVTTVLITKYAKRQLEVMKKEKEALLLQ

SEQ ID NO: 26487 - protein, 204 aa, Arabidopsis thaliana
  peptide (1)..(204): Ceres Seq. ID no. 12334191
METFTHPVCGILVFASVSLFPLILIPTTPSMWVAGITFGYFYGLLLTLPAVAIGVSLPYFISYLFLNQIQGWLERYPDQAAMLRAAGGGSWFHQFRAVTLIRISPFPFAVYNYCAVATRVKFGPYMAGSLVGMAPEIFVAIYTGILIRTLADASTAEQKGLSILQIVLNIFGFVATVVTTVLITKYAKRQLEVMKKEKEALLLQ

SEQ ID NO: 26488 - DNA, 834 bp, Arabidopsis thaliana
  misc_feature (1)..(834): Ceres Seq. ID no. 13504835
  misc_feature (1)..(834): Ortholog of  Ceres SEQ ID NO 12611293 as cited in SEQ ID NO 56191
  misc_feature (1)..(834): Ortholog of  Ceres SEQ ID NO 12583682 as cited in SEQ ID NO 56297
  misc_feature (1)..(834): Ortholog of  Ceres SEQ ID NO 15179225 as cited in SEQ ID NO 0
agtgaaaacttaaatcagaacaaacaaaatggagtcacggaagattaaagtaatggcgacagcaatagctttaataatggtggctatggtggtggatgccgccggagctgataaagggaaagacaaggaagagtgtacggcgcagctggtcggtatggccacatgtcttccttacgtgcaaggaaaggcaaaatctccgacgccagactgttgctccggcctcaaacaagttattaattccgacatgaagtgtctttgtatgatcatccaagagaggaatgatcctgatttgggtctccaggtcaacgtctctctcgctctcgctcttccttctgtttgccacgccactgctgacatcactaagtgccctgctttgcttcatttggacccaaattctccggatgcccaagtgttctatcagctagctaaaggtctgaacgaaacagtctcagcctctgctcccactggctcggcctctgagcccactagtatgtcttcgaccccaggatccagtgctggtaacaacagtggtcggacgacctctgtgccaggcacgaaccacgctcaaagcttctccaaacaatggctagggctcgaagttgttgcccatttcttcgtaattttttatattttcatcctcgtttagataagtgaaaaggatgtgacgttggttttgtgcaactgtggacatttgcggtgacgttgattttgagttttgagtcttttgactgatgaatgtagtttcacttcgtgacaactcttctcagctttttattttttgtatggcgcaacataagacacgagcaatagttattctatggctcgtttgctttt

SEQ ID NO: 26489 - protein, 205 aa, Arabidopsis thaliana
  peptide (1)..(205): Ceres Seq. ID no. 13504836
MESRKIKVMATAIALIMVAMVVDAAGADKGKDKEECTAQLVGMATCLPYVQGKAKSPTPDCCSGLKQVINSDMKCLCMIIQERNDPDLGLQVNVSLALALPSVCHATADITKCPALLHLDPNSPDAQVFYQLAKGLNETVSASAPTGSASEPTSMSSTPGSSAGNNSGRTTSVPGTNHAQSFSKQWLGLEVVAHFFVIFYIFILV

SEQ ID NO: 26490 - protein, 197 aa, Arabidopsis thaliana
  peptide (1)..(197): Ceres Seq. ID no. 13504837
MATAIALIMVAMVVDAAGADKGKDKEECTAQLVGMATCLPYVQGKAKSPTPDCCSGLKQVINSDMKCLCMIIQERNDPDLGLQVNVSLALALPSVCHATADITKCPALLHLDPNSPDAQVFYQLAKGLNETVSASAPTGSASEPTSMSSTPGSSAGNNSGRTTSVPGTNHAQSFSKQWLGLEVVAHFFVIFYIFILV

SEQ ID NO: 26491 - protein, 189 aa, Arabidopsis thaliana
  peptide (1)..(189): Ceres Seq. ID no. 13504838
MVAMVVDAAGADKGKDKEECTAQLVGMATCLPYVQGKAKSPTPDCCSGLKQVINSDMKCLCMIIQERNDPDLGLQVNVSLALALPSVCHATADITKCPALLHLDPNSPDAQVFYQLAKGLNETVSASAPTGSASEPTSMSSTPGSSAGNNSGRTTSVPGTNHAQSFSKQWLGLEVVAHFFVIFYIFILV

SEQ ID NO: 26492 - DNA, 884 bp, Arabidopsis thaliana
  misc_feature (1)..(884): Ceres Seq. ID no. 12738885
  misc_feature (1)..(884): Ortholog of  Ceres SEQ ID NO 12619999 as cited in SEQ ID NO 66123
  misc_feature (1)..(884): Ortholog of  Ceres SEQ ID NO 13656436 as cited in SEQ ID NO 69154
aaaaacgagttttttcttcggctttccactttttcctctgttcgtgtcattcttctcgtagatctcgagagagagccttaaggaaattaaaaaaggttggattttgatcgatgggttcttcgtcaggacaacccgaatttgattacttgtttaaggttttattgatcggagattctggtgttggaaagagctctcttttgttgagtttcacatctaatacctttgatgatctttctccaacgattggtgtggattttaaggttaagtatctgacaattggagaaaagaaactcaagcttgcgatttgggatacagctgggcaagagagatttaggacgctaacaagttcgtattacagaggagctcagggtataattatggtatatgatgtgacacgaagagacacgttcacaaacctatcagacatatgggctaaggaaatcgacctctattcgactaatcaggattgcattaagatgcttgtcgggaataaagttgataaggagagtgaaagagctgtttctaaaaaagaaggcatagactttgctcgggagtacggatgtttgtttctggagtgtagtgcaaagactcgagtcaacgttgagcaatgttttgaagagcttgttcttaagatattggaaacgccgagtcttactgctgaaggttcgtctggcggaaagaagaacatcttcaaacaaaaccccgcacagaccaccagtacctcgtcgagctactgctgctcgtcttagacatggttttacagtttatgacaaattacactcttgctcatcatcttgttcttgattgtctctttgttttcctaaaccgcagcatcttggatgtaaatctcaaccctgatttaaaagttgtgttcactagtttcg

SEQ ID NO: 26493 - protein, 212 aa, Arabidopsis thaliana [sequence omitted]

SEQ ID NO: 26494 - protein, 123 aa, Arabidopsis thaliana
  peptide (1)..(123): Ceres Seq. ID no. 12738887
MVYDVTRRDTFTNLSDIWAKEIDLYSTNQDCIKMLVGNKVDKESERAVSKKEGIDFAREYGCLFLECSAKTRVNVEQCFEELVLKILETPSLTAEGSSGGKKNIFKQNPAQTTSTSSSYCCSS

SEQ ID NO: 26495 - DNA, 884 bp, Arabidopsis thaliana
  misc_feature (1)..(884): Ceres Seq. ID no. 12422963
  misc_feature (1)..(884): Ortholog of  Ceres SEQ ID NO 12627129 as cited in SEQ ID NO 68657
  misc_feature (1)..(884): Ortholog of  Ceres SEQ ID NO 15179538 as cited in SEQ ID NO 0
aggttgcttcaaaagaaatcaattcattcgtacgggcctttaatccacgcgccttcttcgcatccccacgcgcagtcgtgtgtgatgatggctaatcctccaacgttaccgatctcagaccattccggtggtggttcccaatctcagcaacccgtatcaacaccggcgtttcgcacgttcctctctcgcctctcgtcgtcaatccgccaaagcctatcgcagcggcgtccatggttagaactcgtagatcgaagcgcaatttcacgtccagagtctctcaccgatgcgtattctcggatccggaggaatctcccttacttcaaggtaaactacgtgacgatcgtctccttggtgctcgcgctctcgctcctctcccatcctttctctcttctcgttctcctatgcctcttctgcgcttggatcttcctctaccttttccgtccgtcagatcaacctctggtcgtcctcggccgtacgttttcagatcgtgagacgcttggtgttttggtaattttgacaatcgtcgtcgtctttttaaccagcgttgggtctttattgacctctgctttgatgattggtttcggaatcgtatgcttacacggcgcgtttagagtcccggaggatcttttcttggatgatcaagaacctgctaacaccggcttattgtctttccttagcggagccgccacttccgccgcagttgccgccgcatcaactcctgcgtcaggtcgtgtttgaaggactctcttctctgtagacaacaaactcaattactatgattcttttattgtatttctgaatgcgattatgtaaggggaaatgtagaattgatcttcttggttttaagctgagaaattcttatgattcaaacattaaatggattc

SEQ ID NO: 26496 - protein, 245 aa, Arabidopsis thaliana
  peptide (1)..(245): Ceres Seq. ID no. 12422964
RLLQKKSIHSYGPLIHAPSSHPHAQSCVMMANPPTLPISDHSGGGSQSQQPVSTPAFRTFLSRLSSSIRQSLSQRRPWLELVDRSAISRPESLTDAYSRIRRNLPYFKVNYVTIVSLVLALSLLSHPFSLLVLLCLFCAWIFLYLFRPSDQPLVVLGRTFSDRETLGVLVILTIVVVFLTSVGSLLTSALMIGFGIVCLHGAFRVPEDLFLDDQEPANTGLLSFLSGAATSAAVAAASTPASGRV

SEQ ID NO: 26497 - protein, 217 aa, Arabidopsis thaliana
  peptide (1)..(217): Ceres Seq. ID no. 12422965
MMANPPTLPISDHSGGGSQSQQPVSTPAFRTFLSRLSSSIRQSLSQRRPWLELVDRSAISRPESLTDAYSRIRRNLPYFKVNYVTIVSLVLALSLLSHPFSLLVLLCLFCAWIFLYLFRPSDQPLVVLGRTFSDRETLGVLVILTIVVVFLTSVGSLLTSALMIGFGIVCLHGAFRVPEDLFLDDQEPANTGLLSFLSGAATSAAVAAASTPASGRV

SEQ ID NO: 26498 - protein, 216 aa, Arabidopsis thaliana
  peptide (1)..(216): Ceres Seq. ID no. 12422966
MANPPTLPISDHSGGGSQSQQPVSTPAFRTFLSRLSSSIRQSLSQRRPWLELVDRSAISRPESLTDAYSRIRRNLPYFKVNYVTIVSLVLALSLLSHPFSLLVLLCLFCAWIFLYLFRPSDQPLVVLGRTFSDRETLGVLVILTIVVVFLTSVGSLLTSALMIGFGIVCLHGAFRVPEDLFLDDQEPANTGLLSFLSGAATSAAVAAASTPASGRV

SEQ ID NO: 26499 - DNA, 895 bp, Arabidopsis thaliana
  misc_feature (1)..(895): Ceres Seq. ID no. 12371905
  misc_feature (1)..(895): Ortholog of  Ceres SEQ ID NO 12558659 as cited in SEQ ID NO 20727
  misc_feature (1)..(895): Ortholog of  Ceres SEQ ID NO 14308640 as cited in SEQ ID NO 60489
  misc_feature (1)..(895): Ortholog of  Ceres SEQ ID NO 12619999 as cited in SEQ ID NO 66123
  misc_feature (1)..(895): Ortholog of  Ceres SEQ ID NO 13656436 as cited in SEQ ID NO 69154
aaaatctcagtttacaccttcacactgctgcgtctctctctctctctctctttctttctcagattaatcgctgagaagaagcaaccacctggagacggcggagatggcagggtacagagtggaagatgactacgattacctcttcaaagttgttcttataggcgattctggagttggcaaatccaatctcctttccagattcactaaaaacgagttcaatctagagtctaaatccaccattggcgtcgaattcgccactcgtaccttaaaagtcgatggcaaagtcgttaaagctcagatttgggacactgctggtcaggagaggtaccgtgccatcactagtgcatattaccgtggagccgtgggtgcactcctagtatatgatgtaactcgccgtgcaacatttgagaacgtagatcggtggttaaaggagctcaagaaccacacagatccaaacattgtagtgatgctggttggtaacaaatctgatctccgccacttgctagctgttcctacagaagacgggaagtcctatgcggaacaagaatcgctctgcttcatggaaacatctgcccttgaagctaccaatgtggaggacgcatttgcagaggtgttgacacaaatttatcgcatcacaagcaagaagcaagtggaagctggtgaagatgggaacgcctctgtcccgaaaggtgagaaaatcgaagttaaaaacgatgtctctgcgctgaagaaactcgggtgctgctcaaattgaagcctttttttgttttcactgttgagagagaattataacccccatggtccattgtttgattatgtccttgttttgtaacactatcgacatttgtatgagttttagaccatacactacataatgtttatttaactttatttc

SEQ ID NO: 26500 - protein, 216 aa, Arabidopsis thaliana
  peptide (1)..(216): Ceres Seq. ID no. 12371906
MAGYRVEDDYDYLFKVVLIGDSGVGKSNLLSRFTKNEFNLESKSTIGVEFATRTLKVDGKVVKAQIWDTAGQERYRAITSAYYRGAVGALLVYDVTRRATFENVDRWLKELKNHTDPNIVVMLVGNKSDLRHLLAVPTEDGKSYAEQESLCFMETSALEATNVEDAFAEVLTQIYRITSKKQVEAGEDGNASVPKGEKIEVKNDVSALKKLGCCSN

SEQ ID NO: 26501 - DNA, 897 bp, Arabidopsis thaliana
  misc_feature (1)..(897): Ceres Seq. ID no. 12603175
  misc_feature (1)..(897): Ortholog of  Ceres SEQ ID NO 15177927 as cited in SEQ ID NO 1170
  misc_feature (1)..(897): Ortholog of  Ceres SEQ ID NO 13596295 as cited in SEQ ID NO 68019
agttctccgccacaccaatctccagaaaaggggagaagcaaaaatggtttctctgaagctccagaagcggctcgccgcatcagtgatgaagtgcgggaagggcaaagtttggctcgatcccaacgaaagctccgacatctccatggccaattcccgccaaaacatcaggaagcttgtgaaggatggtttcatcatcaggaagccaaccaagattcactctcgttccagagctcgcaaaatgaagattgccaagatgaagggtcgtcactctggatacggtaagaggaagggtacccgtgaagctaggttgccaacaaaggtactgtggatgcgtaggatgcgtgttcttaggcgtctgttgaagaaatacagagagacgaagaagattgacaagcacatgtaccatgacatgtacatgcgtgttaagggtaatgtgttcaagaacaagcgtgtcttgatggagagtatccacaagtcaaaggctgagaaggctagggagaagactctgtctgatcagtttgaggctaagagggcgaagaacaaggctagccgagaaaggaagcatgctaggagagaggagcgtttagctaagggtcccggtggagatgttgcgcctgtagctgctccagcacctgctgctacacctgctccaactgcagctgtaccgaagaagaagtctaagaagtgaagaggatatatagtgtgaagctatatcgatcatcagttcacggattagactctgaagaaggttttgaatgttttatcgaatgcgtttgtggaataacttttattttcgcaaagaacataacttatgtcagttaatctttatgctttcagatttttagcttacagtgtttcaacagacctactttgcaagttgttctttttttggtttcg

SEQ ID NO: 26502 - protein, 228 aa, Arabidopsis thaliana
  peptide (1)..(228): Ceres Seq. ID no. 12603176
VLRHTNLQKRGEAKMVSLKLQKRLAASVMKCGKGKVWLDPNESSDISMANSRQNIRKLVKDGFIIRKPTKIHSRSRARKMKIAKMKGRHSGYGKRKGTREARLPTKVLWMRRMRVLRRLLKKYRETKKIDKHMYHDMYMRVKGNVFKNKRVLMESIHKSKAEKAREKTLSDQFEAKRAKNKASRERKHARREERLAKGPGGDVAPVAAPAPAATPAPTAAVPKKKSKK

SEQ ID NO: 26503 - protein, 214 aa, Arabidopsis thaliana [sequence omitted]

SEQ ID NO: 26504 - protein, 200 aa, Arabidopsis thaliana
  peptide (1)..(200): Ceres Seq. ID no. 12603178
MKCGKGKVWLDPNESSDISMANSRQNIRKLVKDGFIIRKPTKIHSRSRARKMKIAKMKGRHSGYGKRKGTREARLPTKVLWMRRMRVLRRLLKKYRETKKIDKHMYHDMYMRVKGNVFKNKRVLMESIHKSKAEKAREKTLSDQFEAKRAKNKASRERKHARREERLAKGPGGDVAPVAAPAPAATPAPTAAVPKKKSKK

SEQ ID NO: 26505 - DNA, 1396 bp, Arabidopsis thaliana
  misc_feature (1)..(1396): Ceres Seq. ID no. 12332543
  misc_feature (1)..(1396): Ortholog of  Ceres SEQ ID NO 14305026 as cited in SEQ ID NO 52980
  misc_feature (1)..(1396): Ortholog of  Ceres SEQ ID NO 13595598 as cited in SEQ ID NO 56822
  misc_feature (1)..(1396): Ortholog of  Ceres SEQ ID NO 15171777 as cited in SEQ ID NO 57417
  misc_feature (1)..(1396): Ortholog of  Ceres SEQ ID NO 13655712 as cited in SEQ ID NO 63394
  misc_feature (1)..(1396): Ortholog of  Ceres SEQ ID NO 15179075 as cited in SEQ ID NO 0
accagaagtggtatagtctaggccgatacatttcactatctctctctcttttgtttttcctcttcttctttttttccatttgatttcaaactctcacacaaagagcttcagatttataagaccatgataatggctttaagacaaagattggcaagaagaaaaaactaaagagaaacgaccaaaatctcaagcaaacagtactaacttctgttgcaaaacagaagaagatgtcttgtaataatggaatgtcttttttcccttcaaatttcatgatccaaacctcttacgaagatgatcatcctcatcaatctccatctcttgctcctcttcttccttcttgctctctacctcaagatctccatggatttgcttcgtttctaggtaagagatctccaatggaagggtgttgtgatttagaaacagggaacaatatgaatggagaagaggattattcagatgatgggtcacaaatgggagagaagaagaggagattgaacatggaacaagtgaagacactagagaagaactttgagcttggaaacaaacttgaaccagagaggaaaatgcagctagctcgtgccttaggtttgcaaccaagacagatcgcgatttggtttcaaaatcgaagagctcgttggaaaacaaagcagctagagaaagattatgatactcttaaacgacagtttgatacacttaaagctgaaaatgatcttcttcaaactcataatcagaaactccaagctgagataatgggattaaaaaacagagaacaaacagaatcaataaatctaaacaaagaaactgaaggatcttgcagtaacagaagtgataacagttcagataatctcagactagatatctcaactgcgccgccatcaaacgacagtacattaaccggtggccacccaccgccaccacagacagttggtcgacacttcttcccaccgtcgccagccaccgcaacgacaactactacaacaatgcagttctttcaaaactcatcttcaggacagagtatggttaaagaagagaatagtatcagtaacatgttctgtgcaatggatgaccattctggtttttggccatggcttgatcagcaacagtacaattgaaattggtctacctgttttttttgtttttgtttttaaaaaaatttatatttttttttttttgtatttggaattttgatcagaagaacccatgcatgttttcaaaaactggaatctatatcattagctcactttgaaatctgcaaccaaacaccactgaggttttttgtttactttttgagtaaatgagatgtaaaaaaatgggtaatatccattatattatataaaaaataatatcattatggcccaacatttttctgtatggagaaaaataaaataaattgtat

SEQ ID NO: 26506 - protein, 294 aa, Arabidopsis thaliana
  peptide (1)..(294): Ceres Seq. ID no. 12332544
MSCNNGMSFFPSNFMIQTSYEDDHPHQSPSLAPLLPSCSLPQDLHGFASFLGKRSPMEGCCDLETGNNMNGEEDYSDDGSQMGEKKRRLNMEQVKTLEKNFELGNKLEPERKMQLARALGLQPRQIAIWFQNRRARWKTKQLEKDYDTLKRQFDTLKAENDLLQTHNQKLQAEIMGLKNREQTESINLNKETEGSCSNRSDNSSDNLRLDISTAPPSNDSTLTGGHPPPPQTVGRHFFPPSPATATTTTTTMQFFQNSSSGQSMVKEENSISNMFCAMDDHSGFWPWLDQQQYN

SEQ ID NO: 26507 - protein, 288 aa, Arabidopsis thaliana
  peptide (1)..(288): Ceres Seq. ID no. 12332545
MSFFPSNFMIQTSYEDDHPHQSPSLAPLLPSCSLPQDLHGFASFLGKRSPMEGCCDLETGNNMNGEEDYSDDGSQMGEKKRRLNMEQVKTLEKNFELGNKLEPERKMQLARALGLQPRQIAIWFQNRRARWKTKQLEKDYDTLKRQFDTLKAENDLLQTHNQKLQAEIMGLKNREQTESINLNKETEGSCSNRSDNSSDNLRLDISTAPPSNDSTLTGGHPPPPQTVGRHFFPPSPATATTTTTTMQFFQNSSSGQSMVKEENSISNMFCAMDDHSGFWPWLDQQQYN

SEQ ID NO: 26508 - protein, 280 aa, Arabidopsis thaliana
  peptide (1)..(280): Ceres Seq. ID no. 12332546
MIQTSYEDDHPHQSPSLAPLLPSCSLPQDLHGFASFLGKRSPMEGCCDLETGNNMNGEEDYSDDGSQMGEKKRRLNMEQVKTLEKNFELGNKLEPERKMQLARALGLQPRQIAIWFQNRRARWKTKQLEKDYDTLKRQFDTLKAENDLLQTHNQKLQAEIMGLKNREQTESINLNKETEGSCSNRSDNSSDNLRLDISTAPPSNDSTLTGGHPPPPQTVGRHFFPPSPATATTTTTTMQFFQNSSSGQSMVKEENSISNMFCAMDDHSGFWPWLDQQQYN

SEQ ID NO: 26509 - DNA, 1110 bp, Arabidopsis thaliana
  misc_feature (1)..(1110): Ceres Seq. ID no. 12338399
  misc_feature (1)..(1110): Ortholog of  Ceres SEQ ID NO 13638643 as cited in SEQ ID NO 52149
aagttattataaattaattatcttctgaaaaatataaatacttgaattaactttttagccattttcagatttctccgaggaaaaaaatggcgtctggtttgatcggaagattggttggaacgaaaccgtcgaaattagccacggtggcgaggttaattccggtgagatggacctctacaggagcggaggcggaaacaaaagcttcctctggcggcggaagaggatcgaacttgaagacttttcagatctatcgatggaatccagataatccagggaagccagagcttcaaaattaccagatcgatctcaaagattgtggtccaatggtattagatgctttgattaagatcaaaaacgaaatggatccatctcttactttccgtagatcatgccgtgaagggatctgtggttcatgtgctatgaacattgatggatgtaacggacttgcttgtttgacaaagattcaagatgaagcatcggagacgacgattacaccgttgcctcatatgtttgtgattaaggatttggttgttgatatgactaatttttataatcagtataagagtattgagccgtggttgaagaggaagactccagcgtctgttcctgctaaggagattttgcagagtaagaaggatagagctaagcttgatgggatgtatgaatgtattctttgtgcttgttttagcacatcttgtcctagttactggtggaatcctgagtcttaccttggtccagctgctttgctacacgctaataggtggataagcgacagtcgtgatgagtacactaaggaaagacttgaggctattgacgacgagttcaagctttaccgttgccatacaatcttgaattgtgctcgtgcctgtccaaagggtttgaacccaggaaaacagatcactcacatcaagcaacttcagcgttgaaacagctaagtttgtgtgcgggatccgttgggaaactcatcagtcttaacgtttgaagctaataatcttcacaaaacctcttcggattttcaattcattcttgtattgttgttgccaaatattagcgccttaaaaaaactcgtttgcaagtcttcccaagtagatgagctttgtggttgtatcc

SEQ ID NO: 26510 - protein, 279 aa, Arabidopsis thaliana
  peptide (1)..(279): Ceres Seq. ID no. 12338400
MASGLIGRLVGTKPSKLATVARLIPVRWTSTGAEAETKASSGGGRGSNLKTFQIYRWNPDNPGKPELQNYQIDLKDCGPMVLDALIKIKNEMDPSLTFRRSCREGICGSCAMNIDGCNGLACLTKIQDEASETTITPLPHMFVIKDLVVDMTNFYNQYKSIEPWLKRKTPASVPAKEILQSKKDRAKLDGMYECILCACFSTSCPSYWWNPESYLGPAALLHANRWISDSRDEYTKERLEAIDDEFKLYRCHTILNCARACPKGLNPGKQITHIKQLQR

SEQ ID NO: 26511 - protein, 200 aa, Arabidopsis thaliana
  peptide (1)..(200): Ceres Seq. ID no. 12338401
MVLDALIKIKNEMDPSLTFRRSCREGICGSCAMNIDGCNGLACLTKIQDEASETTITPLPHMFVIKDLVVDMTNFYNQYKSIEPWLKRKTPASVPAKEILQSKKDRAKLDGMYECILCACFSTSCPSYWWNPESYLGPAALLHANRWISDSRDEYTKERLEAIDDEFKLYRCHTILNCARACPKGLNPGKQITHIKQLQR

SEQ ID NO: 26512 - protein, 188 aa, Arabidopsis thaliana
  peptide (1)..(188): Ceres Seq. ID no. 12338403
MDPSLTFRRSCREGICGSCAMNIDGCNGLACLTKIQDEASETTITPLPHMFVIKDLVVDMTNFYNQYKSIEPWLKRKTPASVPAKEILQSKKDRAKLDGMYECILCACFSTSCPSYWWNPESYLGPAALLHANRWISDSRDEYTKERLEAIDDEFKLYRCHTILNCARACPKGLNPGKQITHIKQLQR

SEQ ID NO: 26513 - DNA, 1179 bp, Arabidopsis thaliana
  misc_feature (1)..(1179): Ceres Seq. ID no. 12325357
  misc_feature (1)..(1179): Ortholog of  Ceres SEQ ID NO 14310920 as cited in SEQ ID NO 54622
aacacacctacacaaaaatcaatcacagtctctgtctcactcgccggagtttcggtcactgcgccatctccggggtcgagttcgtcgtacttcatcgaactatgaactctcatgatatcgatgatcagttagaagcagatgtatacagtaacttgccttctcgaaatgattcttcaacagggaggagaaatcgaaactcgtgtagatcgaaacactcagagactgagcaacgaagaagaagcaaaatcaatgaaagatttcagagtttaatggatattatacctcagaatcagaatgatcagaaacgagataaagcttctttcttgttggaggttatagagtatattcactttcttcaagaaaaagttcacatgtatgaagattctcaccaaatgtggtatcaatccccaaccaaattgattccttggagaaatagtcatgggtctgttgcggaggaaaatgaccatcctcaaatcgttaaaagcttttcaagtaatgataaagttgctgcttcttcgggttttctcttggatacgtacaattcagtaaatcctgatattgactcagcagttagcaccaagattcctgaacacagtcctgtttcagcagtttcatcgtatctacgtaccgagccttcgctgcagtttgttcagcatgacttttggcaaccaaaaacaagttgtggaacaattaactgttttacaaatgaattgttaacatctgacgaaaaaacatcagccagcttgtccactgtctgctcacaaagggtacttaacactctaactgaagcacttaagtcatcgggtgttaacatgtcagagaccatgatatctgtgcagttaagcccttcggaaaagagaagatcgcgagtattctgttgctgcgtttgcttctgaggataatggtaatagcatcgctgatgaagaaggggactctcctactgaaactagaagcttctgcaatgatattgatcattcccagaagagaataagacgataagatctggttttctattttctatgttatgacaactgtttgataattttgttactttcggtgagtcaggatcagtaggtgtagatactacttttatcgtgctgcaactatttttcatgatatagtaaaaactaagtagaatgatgtaacaagtttcgcaaatctataacaagagtttgcttc

SEQ ID NO: 26514 - protein, 297 aa, Arabidopsis thaliana
  peptide (1)..(297): Ceres Seq. ID no. 12325358
HTYTKINHSLCLTRRSFGHCAISGVEFVVLHRTMNSHDIDDQLEADVYSNLPSRNDSSTGRRNRNSCRSKHSETEQRRRSKINERFQSLMDIIPQNQNDQKRDKASFLLEVIEYIHFLQEKVHMYEDSHQMWYQSPTKLIPWRNSHGSVAEENDHPQIVKSFSSNDKVAASSGFLLDTYNSVNPDIDSAVSTKIPEHSPVSAVSSYLRTEPSLQFVQHDFWQPKTSCGTINCFTNELLTSDEKTSASLSTVCSQRVLNTLTEALKSSGVNMSETMISVQLSPSEKRRSRVFCCCVCF

SEQ ID NO: 26515 - protein, 264 aa, Arabidopsis thaliana
  peptide (1)..(264): Ceres Seq. ID no. 12325359
MNSHDIDDQLEADVYSNLPSRNDSSTGRRNRNSCRSKHSETEQRRRSKINERFQSLMDIIPQNQNDQKRDKASFLLEVIEYIHFLQEKVHMYEDSHQMWYQSPTKLIPWRNSHGSVAEENDHPQIVKSFSSNDKVAASSGFLLDTYNSVNPDIDSAVSTKIPEHSPVSAVSSYLRTEPSLQFVQHDFWQPKTSCGTINCFTNELLTSDEKTSASLSTVCSQRVLNTLTEALKSSGVNMSETMISVQLSPSEKRRSRVFCCCVCF

SEQ ID NO: 26516 - protein, 208 aa, Arabidopsis thaliana
  peptide (1)..(208): Ceres Seq. ID no. 12325360
MDIIPQNQNDQKRDKASFLLEVIEYIHFLQEKVHMYEDSHQMWYQSPTKLIPWRNSHGSVAEENDHPQIVKSFSSNDKVAASSGFLLDTYNSVNPDIDSAVSTKIPEHSPVSAVSSYLRTEPSLQFVQHDFWQPKTSCGTINCFTNELLTSDEKTSASLSTVCSQRVLNTLTEALKSSGVNMSETMISVQLSPSEKRRSRVFCCCVCF

SEQ ID NO: 26517 - DNA, 347 bp, Arabidopsis thaliana
  misc_feature (1)..(347): Ceres Seq. ID no. 12384965
  misc_feature (1)..(347): Ortholog of  Ceres SEQ ID NO 15224896 as cited in SEQ ID NO 0
aaaagaatttcttcgctctaccgccgccgtctctcttctctcagcaaggttgaatcatcagagaagaaagggttttacactgcggcgtaaaggatgaagcttgacgtgaatgtgttgagatatttatccaaagatgattttcgagttctcactgctgtcgagatgggaatgcgaaaccatgagattgttccttctgagcttgtggagcgcattgcttgtctaaaacatggaggcacctacaaagtcctaaagaacttgctcaagtataagcttttgcaccacgactcctctaaatatgatggattccgactcacctatctgggttatgactttcttgccattaaagc

SEQ ID NO: 26518 - protein, 84 aa, Arabidopsis thaliana
  peptide (1)..(84): Ceres Seq. ID no. 12384966
MKLDVNVLRYLSKDDFRVLTAVEMGMRNHEIVPSELVERIACLKHGGTYKVLKNLLKYKLLHHDSSKYDGFRLTYLGYDFLAIK

SEQ ID NO: 26519 - protein, 61 aa, Arabidopsis thaliana
  peptide (1)..(61): Ceres Seq. ID no. 12384967
MGMRNHEIVPSELVERIACLKHGGTYKVLKNLLKYKLLHHDSSKYDGFRLTYLGYDFLAIK

SEQ ID NO: 26520 - protein, 59 aa, Arabidopsis thaliana
  peptide (1)..(59): Ceres Seq. ID no. 12384968
MRNHEIVPSELVERIACLKHGGTYKVLKNLLKYKLLHHDSSKYDGFRLTYLGYDFLAIK

SEQ ID NO: 26521 - DNA, 1510 bp, Arabidopsis thaliana
  misc_feature (1)..(1510): Ceres Seq. ID no. 12371757
  misc_feature (1)..(1510): Ortholog of  Ceres SEQ ID NO 15169244 as cited in SEQ ID NO 58988
aattatttttcccattctcttcactatctctctccctagaaaattgccagaagaagaaggttctccaattcaaaaaaatagaaactcgctaccattcatttcaaaaaatttcttgttaagttacgtttttttctttttttttgcttctttcgttcttattgtcttagaagacaaaagagactagagaggatagaaaaatggaagcttcaagcacaagaagcgagaagaagaagaagaagaagacgatacagagagaaaacaccgatactcaaaagaaaaaaaagctacccagtgtttggttttcacttaagaaatctctcccctgcaaatctgatgtctccgatgtccacattccgagatccaaaaaagagctagctcccatatccactaagagaacaacaacctcctccggcggcggggtcggcggcaggtccggttgttcaagatccatagccaatcttaaagacgtaatccatggaaaccaacggcatttagagaagccgctttgctctagccctcgttctataggaagcagcgagtttctcaatcccattactcacgatgtaatctttagcaactccacctgcgagctcaagatcaccgccgccggagcaacagaattcgtcgggaatcttagaccagggacgccggtcaattactcttcttcacgccgtagccaaacttcgagaaaggcttcttctttagatagagaaggattagggtttcaccagagcagaagagagaatgatagagaagccgccattaacggagacaattcctctgtttcttgccataaatgcggcgagaaatttagcaaactcgaagctgcagaagctcatcatctaaccaaacacgccgtgactgagctaatggaaggagactcgtcgaggagaatagtggagataatctgcagaacaagctggttaaagacagagaatcaaggagggagaatcgatcggattttgaaagtacacaacatgcaaaaaaccttagcgagattcgaagaatacagagatacagtgaagatcagagcaagcaagttacaaaagaaacatccgagatgtatcgccgacggaaacgagcttctcaggtttcacggcaccactgtggcttgcgctttggggataaacgggtcgacgagtctgtgttcgtcggaaaagtgttgcgtttgtcggattatacgaaatgggttctcggcgaaacgggagatgaataacggaattggggtttttactgcgtcgacgagtgagagggcgtttgagtctattgtgattggagatggtggtggtggtgatcggaaggcgttgattgtgtgtcgagtgattgccgggagggttcatcggccggtggagaatgtagaggagatgggtgggttgttgagtgggtttgattcattggctggtaaagttgggttgtacacaaatgttgaggagctctatttgctcaattctcgagctttgcttcctgttttgtgctaatctgcaaaccttaaatcaaacttttgaggtcg

SEQ ID NO: 26522 - protein, 426 aa, Arabidopsis thaliana
  peptide (1)..(426): Ceres Seq. ID no. 12371758
MEASSTRSEKKKKKKTIQRENTDTQKKKKLPSVWFSLKKSLPCKSDVSDVHIPRSKKELAPISTKRTTTSSGGGVGGRSGCSRSIANLKDVIHGNQRHLEKPLCSSPRSIGSSEFLNPITHDVIFSNSTCELKITAAGATEFVGNLRPGTPVNYSSSRRSQTSRKASSLDREGLGFHQSRRENDREAAINGDNSSVSCHKCGEKFSKLEAAEAHHLTKHAVTELMEGDSSRRIVEIICRTSWLKTENQGGRIDRILKVHNMQKTLARFEEYRDTVKIRASKLQKKHPRCIADGNELLRFHGTTVACALGINGSTSLCSSEKCCVCRIIRNGFSAKREMNNGIGVFTASTSERAFESIVIGDGGGGDRKALIVCRVIAGRVHRPVENVEEMGGLLSGFDSLAGKVGLYTNVEELYLLNSRALLPVLC

SEQ ID NO: 26523 - DNA, 505 bp, Arabidopsis thaliana
  misc_feature (1)..(505): Ceres Seq. ID no. 12384714
  misc_feature (1)..(505): Ortholog of  Ceres SEQ ID NO 15171805 as cited in SEQ ID NO 57433
  misc_feature (1)..(505): Ortholog of  Ceres SEQ ID NO 13596743 as cited in SEQ ID NO 62731
atcaatcggattatctgcacttgtttcaatggtgcatctaatatctctcaagctggtgctcttgcttgccttacacccgaaggacttgaggcaatgcataaggtgattggattctataaagaaaacacaaacataatcattgacacattcacatctctcgggtatgatgtatatggaggaaatgcgccttacgtatgggttcacttcccgaaccaaagctcatgggatgtgtttgctgagattctggagaagactcatgtggttacaactccaggaagtgggtttggaccagggggtgaagggttcgttcgtgtcagtgcctttggtcacagagagaacatcttagaggcatgtcgaagattcaagcagctttacaaatgaagaaccttgtttgtaatcgttcctcatcatcatcaccctctttaatgacatgatttgagttaaaataatgtcgtttccattgttttctggaatttgtagaagacacttttgacaccagtgtttc

SEQ ID NO: 26524 - protein, 126 aa, Arabidopsis thaliana
  peptide (1)..(126): Ceres Seq. ID no. 12384715
INRIICTCFNGASNISQAGALACLTPEGLEAMHKVIGFYKENTNIIIDTFTSLGYDVYGGNAPYVWVHFPNQSSWDVFAEILEKTHVVTTPGSGFGPGGEGFVRVSAFGHRENILEACRRFKQLYK

SEQ ID NO: 26525 - protein, 95 aa, Arabidopsis thaliana
  peptide (1)..(95): Ceres Seq. ID no. 12384716
MHKVIGFYKENTNIIIDTFTSLGYDVYGGNAPYVWVHFPNQSSWDVFAEILEKTHVVTTPGSGFGPGGEGFVRVSAFGHRENILEACRRFKQLYK

SEQ ID NO: 26526 - DNA, 861 bp, Arabidopsis thaliana
  misc_feature (1)..(861): Ceres Seq. ID no. 13496999
  misc_feature (1)..(861): Ortholog of  Ceres SEQ ID NO 14302000 as cited in SEQ ID NO 52175
  misc_feature (1)..(861): Ortholog of  Ceres SEQ ID NO 14316371 as cited in SEQ ID NO 60113
tgattctagggttttagagtttccgcacgaatcacgaatctctctctctttcacacacttcacactttcaatatacactctcattatgactaccgaagagaaagagatcctcgccgccaaattggaagaacagaagatcgatctcgataagcccgaagttgaggacgatgatgataacgaagacgatgactctgatgacgatgataaggatgatgacgaggctgatggactagatggagaggcaggaggtaagtcaaaacaaagcagaagtgagaagaagagtcgcaaagccatgctcaagcttggcatgaaacccatcactggtgttagccgagtcaccgtcaaaaagagcaagaatatcttgtttgtcatatcaaagcctgatgtgttcaagagtccagcatcagacacatatgtgatctttggagaggcgaagatcgaggatttgagctctcagatccagtcgcaagcagcagagcaattcaaggcaccagatctcagcaatgtgatctcaaagggtgagtcatcgagcgctgcagtggttcaggatgatgaggaggttgacgaggaaggtgttgagccaaaggacattgagttggtgatgactcaagcaggagtgtctaggccaaatgctgtgaaggctctcaaggctgcagatggagatattgtctctgccatcatggagcttaccacctaaaccaaagtcttttctacttagatgtggtttaacctgagttatgtgccagagattgtctaaagaattcggaaatttttggtttcaatgtttttcatgaagtgattttcgatgttgtatcagtataaacctcataagtttttgattttcagtttgattttatattg

SEQ ID NO: 26527 - protein, 231 aa, Arabidopsis thaliana
  peptide (1)..(231): Ceres Seq. ID no. 13497000
DSRVLEFPHESRISLSFTHFTLSIYTLIMTTEEKEILAAKLEEQKIDLDKPEVEDDDDNEDDDSDDDDKDDDEADGLDGEAGGKSKQSRSEKKSRKAMLKLGMKPITGVSRVTVKKSKNILFVISKPDVFKSPASDTYVIFGEAKIEDLSSQIQSQAAEQFKAPDLSNVISKGESSSAAVVQDDEEVDEEGVEPKDIELVMTQAGVSRPNAVKALKAADGDIVSAIMELTT

SEQ ID NO: 26528 - protein, 203 aa, Arabidopsis thaliana
  peptide (1)..(203): Ceres Seq. ID no. 13497001
MTTEEKEILAAKLEEQKIDLDKPEVEDDDDNEDDDSDDDDKDDDEADGLDGEAGGKSKQSRSEKKSRKAMLKLGMKPITGVSRVTVKKSKNILFVISKPDVFKSPASDTYVIFGEAKIEDLSSQIQSQAAEQFKAPDLSNVISKGESSSAAVVQDDEEVDEEGVEPKDIELVMTQAGVSRPNAVKALKAADGDIVSAIMELTT

SEQ ID NO: 26529 - protein, 134 aa, Arabidopsis thaliana
  peptide (1)..(134): Ceres Seq. ID no. 13497002
MLKLGMKPITGVSRVTVKKSKNILFVISKPDVFKSPASDTYVIFGEAKIEDLSSQIQSQAAEQFKAPDLSNVISKGESSSAAVVQDDEEVDEEGVEPKDIELVMTQAGVSRPNAVKALKAADGDIVSAIMELTT

SEQ ID NO: 26530 - DNA, 1135 bp, Arabidopsis thaliana
  misc_feature (1)..(1135): Ceres Seq. ID no. 12385295
  misc_feature (1)..(1135): Ortholog of  Ceres SEQ ID NO 13599900 as cited in SEQ ID NO 531
  misc_feature (1)..(1135): Ortholog of  Ceres SEQ ID NO 14310498 as cited in SEQ ID NO 55066
  misc_feature (1)..(1135): Ortholog of  Ceres SEQ ID NO 15176759 as cited in SEQ ID NO 59678
  misc_feature (1)..(1135): Ortholog of  Ceres SEQ ID NO 15172875 as cited in SEQ ID NO 60423
  misc_feature (1)..(1135): Ortholog of  Ceres SEQ ID NO 13596509 as cited in SEQ ID NO 62004
  misc_feature (1)..(1135): Ortholog of  Ceres SEQ ID NO 13659971 as cited in SEQ ID NO 67565
  misc_feature (1)..(1135): Ortholog of  Ceres SEQ ID NO 13500385 as cited in SEQ ID NO 67583
acctttaattttttcaccaattggatttggatctgtcaaaaatattggcctctttctctctttctctcttgctctctttctttgttgggttgatctcttcttccatggcgatccctacggagacacaacaccaggagaaggaggcttcagatgcttctgcagcagctgcacaaaagagatggactttaagcgatttcgacatcggtaagcctcttggcagaggcaaattcggtcacgtctatctcgccagagaaaaacggagcaatcacgttgtcgctctaaaggttcttttcaagagccagcttcaacaatcccaagttgaacatcagctcagaagagaagttgagattcagtctcatcttcgtcaccccaacatactccggctttatggctatttctatgatcaaaaaagagtttatttgatacttgagtatgctgctagaggcgaactttacaaggatcttcagaaatgcaaatacttcagcgaaagacgagctgctacttatgttgcctcattggcgagggctctcatctattgccatggcaagcatgtgatacacagagatattaaaccagagaatctgctaattggtgctcagggtgagctcaagattgcagactttggttggtcggtacacacatttaaccgaagaaggaccatgtgtggcacactagattaccttcctcctgagatggtcgaaagcgtagaacatgatgctagtgtagatatctggagccttgggattctctgttacgagtttctttatggtgtacctccttttgaagccatggagcactcagacacatacagaaggattgtgcaagtggatctcaagttccctcccaaaccaataatctctgcatctgcaaaggatcttattagccagatgcttgtcaaggagtcttcgcaacgtctgccattgcacaagcttctggagcatccgtggatcgtgcaaaacgctgatccttctggaatctacagagtttaaaaacaaaacgcttactgttctcgccaatctcgaccaaaactgttatctagaaacccaaaactgtattctttcttactattatttttcgctaattcatgttccaaataatgtgtattatgtagtatgtactaatactatatggcatt

SEQ ID NO: 26531 - protein, 294 aa, Arabidopsis thaliana
  peptide (1)..(294): Ceres Seq. ID no. 12385296
MAIPTETQHQEKEASDASAAAAQKRWTLSDFDIGKPLGRGKFGHVYLAREKRSNHVVALKVLFKSQLQQSQVEHQLRREVEIQSHLRHPNILRLYGYFYDQKRVYLILEYAARGELYKDLQKCKYFSERRAATYVASLARALIYCHGKHVIHRDIKPENLLIGAQGELKIADFGWSVHTFNRRRTMCGTLDYLPPEMVESVEHDASVDIWSLGILCYEFLYGVPPFEAMEHSDTYRRIVQVDLKFPPKPIISASAKDLISQMLVKESSQRLPLHKLLEHPWIVQNADPSGIYRV

SEQ ID NO: 26532 - DNA, 903 bp, Arabidopsis thaliana
  misc_feature (1)..(903): Ceres Seq. ID no. 13489704
  misc_feature (1)..(903): Ortholog of  Ceres SEQ ID NO 12609093 as cited in SEQ ID NO 52008
  misc_feature (1)..(903): Ortholog of  Ceres SEQ ID NO 12609839 as cited in SEQ ID NO 52022
  misc_feature (1)..(903): Ortholog of  Ceres SEQ ID NO 13638885 as cited in SEQ ID NO 55803
  misc_feature (1)..(903): Ortholog of  Ceres SEQ ID NO 12615635 as cited in SEQ ID NO 63133
  misc_feature (1)..(903): Ortholog of  Ceres SEQ ID NO 12586351 as cited in SEQ ID NO 64028
  misc_feature (1)..(903): Ortholog of  Ceres SEQ ID NO 15173174 as cited in SEQ ID NO 64046
  misc_feature (1)..(903): Ortholog of  Ceres SEQ ID NO 13584899 as cited in SEQ ID NO 64830
  misc_feature (1)..(903): Ortholog of  Ceres SEQ ID NO 13654441 as cited in SEQ ID NO 67814
  misc_feature (1)..(903): Ortholog of  Ceres SEQ ID NO 13596128 as cited in SEQ ID NO 67831
  misc_feature (1)..(903): Ortholog of  Ceres SEQ ID NO 12585194 as cited in SEQ ID NO 68878
  misc_feature (1)..(903): Ortholog of  Ceres SEQ ID NO 12589186 as cited in SEQ ID NO 0
  misc_feature (1)..(903): Ortholog of  Ceres SEQ ID NO 12635608 as cited in SEQ ID NO 0
aaaaaaacaaacaactctttaactatcatcagatcaataaaaaaccagaagaagacatggctcagaaagatacagtgaagctgataggttcttggtctagcccttattcccttagggcacgtgtggctctgcacttgaaatctgtcaagtacgagtacttagacgaacctgatgttcttaaagaaaagagtgaactccttctcaaatctaaccccatccacaagaaagtccctgtcctcctccatggtgacctctccatctgtgagtccctcaacgttgttcaatacgtcgacgaggcttggccatccgttccttcaatccttccttctgatgcctatgatcgcgcatctgctcggttctgggctcagtacatcgatgacaagtgttttgcggcggtggatgcggtggtcggagcaaaagacgacgaagggaaaatggcggcggcgggaaagctgatggagtgtttggcgatactagaagacacgtttcagaagaccagcaaaggattagggttcttcggaggagagaccatcggctaccttgacattgcatgttcggctcttttaggtccgatctctgtgatcgaggcgttttccggcgtcaagtttctccggctagagacaacacctgggttgatcaaatgggccgagagttttagggcccatgaagctgttaagccttacatgcctagcgtcgaagaggtcgttgcattcgcaaagcaaaagttcaatgttcagtgatgcgttttttgcttttaaaagcaaaagcaatgtgttgaaataaaatgatgtttgttgtctttgagaaactttaaatttgtctgtgttttgtgccaaaacttctgattaattagtttttggtctttgtgcgttactattatcaattttattcttattatttgct

SEQ ID NO: 26533 - protein, 245 aa, Arabidopsis thaliana
  peptide (1)..(245): Ceres Seq. ID no. 15220493
KNKQLFNYHQINKKPEEDMAQKDTVKLIGSWSSPYSLRARVALHLKSVKYEYLDEPDVLKEKSELLLKSNPIHKKVPVLLHGDLSICESLNVVQYVDEAWPSVPSILPSDAYDRASARFWAQYIDDKCFAAVDAVVGAKDDEGKMAAAGKLMECLAILEDTFQKTSKGLGFFGGETIGYLDIACSALLGPISVIEAFSGVKFLRLETTPGLIKWAESFRAHEAVKPYMPSVEEVVAFAKQKFNVQ

SEQ ID NO: 26534 - protein, 227 aa, Arabidopsis thaliana
  peptide (1)..(227): Ceres Seq. ID no. 15220494
MAQKDTVKLIGSWSSPYSLRARVALHLKSVKYEYLDEPDVLKEKSELLLKSNPIHKKVPVLLHGDLSICESLNVVQYVDEAWPSVPSILPSDAYDRASARFWAQYIDDKCFAAVDAVVGAKDDEGKMAAAGKLMECLAILEDTFQKTSKGLGFFGGETIGYLDIACSALLGPISVIEAFSGVKFLRLETTPGLIKWAESFRAHEAVKPYMPSVEEVVAFAKQKFNVQ

SEQ ID NO: 26535 - DNA, 1382 bp, Arabidopsis thaliana
  misc_feature (1)..(1382): Ceres Seq. ID no. 13499797
  misc_feature (1)..(1382): Ortholog of  Ceres SEQ ID NO 13596039 as cited in SEQ ID NO 62117
acaattcagattccaattttctcgaactcttaaatcaatctctcaaatctctcaaccgtgatcaagatgcagatcttcgttaagactctcaccggaaagactatcaccctcgaggtggaaagctctgacaccatcgacaacgttaaggccaagatccaggataaggaaggcattcctccggatcagcagagattgatcttcgccggaaaacagctagaggatggccgtacgttggctgattacaatatccagaaggaatccaccctccatttggttctcaggctccgtggtggtatgcagattttcgttaaaaccctaacgggaaagacgattactcttgaggtggagagttctgacaccatcgacaacgtcaaggccaagatccaagataaggagggtattcctccggaccagcagaggttgatcttcgccggaaagcagttggaggatggcagaactcttgctgactacaacatccagaaagagtccacacttcacttggtcttgcgtctgcgtggaggtatgcagatcttcgtgaagactctcaccggaaagactatcactttggaggtagagagctctgacaccatcgacaacgttaaggccaagatccaggataaggaaggcattcctccggatcagcagaggttgatcttcgccggaaagcagttngaggatggcagnactnnngctgattacaacatccagaaagagtccaccctncanttggtnntgagnctgcgtggaggtatgcagatcttcgttaagactctcaccggaaagactatcactttggaggtagagagctctgacaccattgacaacgtcaaggccaagatccaggataaggaaggtatccctccggaccagcagaggttgatcttcgccggtaaacagttggaggatggtcgtaccttggctgattacaacattcagaaggagtcgacccttcacttggttttgcgtctgcgtggaggtatgcagatcttcgttaagactttgaccggcaagactatcactcttgaagtggagagctccgacaccattgacaacgtgaaggccaagatccaggacaaggaaggtatccctccggaccagcagcgtctcatcttcgctggaaagcagcttgaggatggacgtactttggccgactacaacatccagaaggagtctactcttcacttggtcctccgtctccgtggtggtttctaaaccttgtctctctcttatggttactgaaccaagttcatgtctcgtttcatctagtactttggtggtttatgttttggggccatgtaagcctctgataaataattgatcgactatgtttccgtttctttcatctctcttttctttcaaacaacaaatcgaacttattctct

SEQ ID NO: 26536 - protein, 381 aa, Arabidopsis thaliana
  peptide (1)..(381): Ceres Seq. ID no. 13499798
  misc_feature (202)..(202): Xaa is any aa, unknown or other
  misc_feature (206)..(206): Xaa is any aa, unknown or other
  misc_feature (208)..(208): Xaa is any aa, unknown or other
  misc_feature (219)..(219): Xaa is any aa, unknown or other
  misc_feature (220)..(220): Xaa is any aa, unknown or other
  misc_feature (222)..(222): Xaa is any aa, unknown or other
  misc_feature (223)..(223): Xaa is any aa, unknown or other
  misc_feature (224)..(224): Xaa is any aa, unknown or other
MQIFVKTLTGKTITLEVESSDTIDNVKAKIQDKEGIPPDQQRLIFAGKQLEDGRTLADYNIQKESTLHLVLRLRGGMQIFVKTLTGKTITLEVESSDTIDNVKAKIQDKEGIPPDQQRLIFAGKQLEDGRTLADYNIQKESTLHLVLRLRGGMQIFVKTLTGKTITLEVESSDTIDNVKAKIQDKEGIPPDQQRLIFAGKQXEDGXTXADYNIQKESTXXLXXXLRGGMQIFVKTLTGKTITLEVESSDTIDNVKAKIQDKEGIPPDQQRLIFAGKQLEDGRTLADYNIQKESTLHLVLRLRGGMQIFVKTLTGKTITLEVESSDTIDNVKAKIQDKEGIPPDQQRLIFAGKQLEDGRTLADYNIQKESTLHLVLRLRGGF

SEQ ID NO: 26537 - protein, 305 aa, Arabidopsis thaliana
  peptide (1)..(305): Ceres Seq. ID no. 13499799
  misc_feature (126)..(126): Xaa is any aa, unknown or other
  misc_feature (130)..(130): Xaa is any aa, unknown or other
  misc_feature (132)..(132): Xaa is any aa, unknown or other
  misc_feature (143)..(143): Xaa is any aa, unknown or other
  misc_feature (144)..(144): Xaa is any aa, unknown or other
  misc_feature (146)..(146): Xaa is any aa, unknown or other
  misc_feature (147)..(147): Xaa is any aa, unknown or other
  misc_feature (148)..(148): Xaa is any aa, unknown or other
MQIFVKTLTGKTITLEVESSDTIDNVKAKIQDKEGIPPDQQRLIFAGKQLEDGRTLADYNIQKESTLHLVLRLRGGMQIFVKTLTGKTITLEVESSDTIDNVKAKIQDKEGIPPDQQRLIFAGKQXEDGXTXADYNIQKESTXXLXXXLRGGMQIFVKTLTGKTITLEVESSDTIDNVKAKIQDKEGIPPDQQRLIFAGKQLEDGRTLADYNIQKESTLHLVLRLRGGMQIFVKTLTGKTITLEVESSDTIDNVKAKIQDKEGIPPDQQRLIFAGKQLEDGRTLADYNIQKESTLHLVLRLRGGF

SEQ ID NO: 26538 - protein, 229 aa, Arabidopsis thaliana
  peptide (1)..(229): Ceres Seq. ID no. 13499800
  misc_feature (50)..(50): Xaa is any aa, unknown or other
  misc_feature (54)..(54): Xaa is any aa, unknown or other
  misc_feature (56)..(56): Xaa is any aa, unknown or other
  misc_feature (67)..(67): Xaa is any aa, unknown or other
  misc_feature (68)..(68): Xaa is any aa, unknown or other
  misc_feature (70)..(70): Xaa is any aa, unknown or other
  misc_feature (71)..(71): Xaa is any aa, unknown or other
  misc_feature (72)..(72): Xaa is any aa, unknown or other
MQIFVKTLTGKTITLEVESSDTIDNVKAKIQDKEGIPPDQQRLIFAGKQXEDGXTXADYNIQKESTXXLXXXLRGGMQIFVKTLTGKTITLEVESSDTIDNVKAKIQDKEGIPPDQQRLIFAGKQLEDGRTLADYNIQKESTLHLVLRLRGGMQIFVKTLTGKTITLEVESSDTIDNVKAKIQDKEGIPPDQQRLIFAGKQLEDGRTLADYNIQKESTLHLVLRLRGGF

SEQ ID NO: 26539 - DNA, 963 bp, Arabidopsis thaliana
  misc_feature (1)..(963): Ceres Seq. ID no. 12439674
  misc_feature (1)..(963): Ortholog of  Ceres SEQ ID NO 14302764 as cited in SEQ ID NO 67753
  misc_feature (1)..(963): Ortholog of  Ceres SEQ ID NO 14302291 as cited in SEQ ID NO 68180
aaaaaagttcagatatttgataaatcaatcaacaaaacaaaaaaaactctatagttagtttctctgaaaatgtacggacagtgcaatatagaatccgactacgctttgttggagtcgataacacgtcacttgctaggaggaggaggagagaacgagctgcgactcaatgagtcaacaccgagttcgtgtttcacagagagttggggaggtttgccattgaaagagaatgattcagaggacatgttggtgtacggactcctcaaagatgccttccattttgacacgtcatcatcggacttgagctgtctttttgattttccggcggttaaagtcgagccaactgagaactttacggcgatggaggagaaaccaaagaaagcgataccggttacggagacggcagtgaaggcgaagcattacagaggagtgaggcagagaccgtgggggaaattcgcggcggagatacgtgatccggcgaagaatggagctagggtttggttagggacgtttgagacggcggaagatgcggctttagcttacgatatagctgcttttaggatgcgtggttcccgcgctttattgaattttccgttgagggttaattccggtgaacctgacccggttcggatcacgtctaagagatcttcttcgtcgtcgtcgtcgtcgtcctcttctacgtcgtcgtctgaaaacgggaagttgaaacgaaggagaaaagcagagaatctgacgtcggaggtggtgcaggtgaagtgtgaggttggtgatgagacacgtgttgatgagttattggtttcataagtttgatcttgtgtgttttgtagttgaatagttttgctataaatgttgaggcaccaagtaaaagtgttcccgtgatgtaaattagttactaaacagagccatatatcttcaatccataaacaaaatagacactttaataaagccgtgagtgttaatttttcc

SEQ ID NO: 26540 - protein, 243 aa, Arabidopsis thaliana
  peptide (1)..(243): Ceres Seq. ID no. 12439675
MYGQCNIESDYALLESITRHLLGGGGENELRLNESTPSSCFTESWGGLPLKENDSEDMLVYGLLKDAFHFDTSSSDLSCLFDFPAVKVEPTENFTAMEEKPKKAIPVTETAVKAKHYRGVRQRPWGKFAAEIRDPAKNGARVWLGTFETAEDAALAYDIAAFRMRGSRALLNFPLRVNSGEPDPVRITSKRSSSSSSSSSSSTSSSENGKLKRRRKAENLTSEVVQVKCEVGDETRVDELLVS

SEQ ID NO: 26541 - protein, 186 aa, Arabidopsis thaliana
  peptide (1)..(186): Ceres Seq. ID no. 12439676
MLVYGLLKDAFHFDTSSSDLSCLFDFPAVKVEPTENFTAMEEKPKKAIPVTETAVKAKHYRGVRQRPWGKFAAEIRDPAKNGARVWLGTFETAEDAALAYDIAAFRMRGSRALLNFPLRVNSGEPDPVRITSKRSSSSSSSSSSSTSSSENGKLKRRRKAENLTSEVVQVKCEVGDETRVDELLVS

SEQ ID NO: 26542 - protein, 147 aa, Arabidopsis thaliana
  peptide (1)..(147): Ceres Seq. ID no. 12439677
MEEKPKKAIPVTETAVKAKHYRGVRQRPWGKFAAEIRDPAKNGARVWLGTFETAEDAALAYDIAAFRMRGSRALLNFPLRVNSGEPDPVRITSKRSSSSSSSSSSSTSSSENGKLKRRRKAENLTSEVVQVKCEVGDETRVDELLVS

SEQ ID NO: 26543 - DNA, 1561 bp, Arabidopsis thaliana
  misc_feature (1)..(1561): Ceres Seq. ID no. 13487736
  misc_feature (1)..(1561): Ortholog of  Ceres SEQ ID NO 14308209 as cited in SEQ ID NO 58800
tgtttgggctcaatttgggctctgtctgttatccacaaattaagagacgcaaacctaaaacgacgccgttccatagttttcctttgaagaagagagagacgtcacaaaggaaagcactcaatcgtcatttcctcggtatctcctcctcgaaagaagaatgcctggaattagaggtccttcggaatactcgcaggaaccacctcgtcacccttctctcaaggtcaacgccaaggaacctttcaacgccgagcctccccgctcggccttagtctcatcttatgtcactcccgtcgaccttttctacaagcgaaatcatggtcccatccccattgttgatcaccttcaaagctactccgtcacccttactggattgatccagaacccgagaaagctctttatcaaagacatcaggtccctcccaaagtacaatgttactgctactcttcagtgtgccggtaacagaaggactgccatgagcaaagttaggaatgttagaggtgttggatgggatgtttctgctattggcaacgctgtctggggtggggcgaaactggccgatgttcttgagcttgtggggataccaaagctgactgcttctaccaatttaggagccagacatgttgagttcgttagtgttgatcgctgtaaggaggaaaatgggggcccttataaggcgtcaatcactctaagtcaagccacaaatcctgaagcggatgttctactcgcttatgagatgaatggagagaccctgaacagggatcacggatttccgttaagggtggttgtccctggtgtgattggtgctcgttcggtcaaatggcttgattccatcaatgtcatcgctgaagaaagccagggattcttcatgcaaaaagattacaaaatgtttccaccctctgtcaattgggataatatcaactggtcctctaggagaccgcaaatggatttccctgttcagagtgcaatctgctctgtggaggatgtgcaaatggtgaagcctggaaaggtaagtatcaaaggatatgcggtttcaggaggtggacgcgggatagaaagagtggacatatccctggatggaggcaaaaactgggtggaagcttctagaacgcaggaaccaggaaagcagtacatctcagaacacagctccagtgacaaatgggcatgggtgttgtttgaagccaccattgatgtttcacagactacagaggtcatcgccaaagcggttgattcggcggcgaatgttcaaccggaaaatgtggagtcggtgtggaacctaagaggagttctcaacacttcgtggcaccgtgtccttctccggcttggccactctaacttgtagaccaagttaccactatgcgtctggtctctctttatcttttctttaagaactaaaacatccttgaatatgcttgtccttgtggatctgtgagagcaaaatactgtttatagttaaataaaatgggaaaacccatctgttgtcatgtggtggattataaattatttatttatatgatagaactgttattcactattatatattaatgaaatcatatggttgagc

SEQ ID NO: 26544 - protein, 393 aa, Arabidopsis thaliana
  peptide (1)..(393): Ceres Seq. ID no. 13487737
MPGIRGPSEYSQEPPRHPSLKVNAKEPFNAEPPRSALVSSYVTPVDLFYKRNHGPIPIVDHLQSYSVTLTGLIQNPRKLFIKDIRSLPKYNVTATLQCAGNRRTAMSKVRNVRGVGWDVSAIGNAVWGGAKLADVLELVGIPKLTASTNLGARHVEFVSVDRCKEENGGPYKASITLSQATNPEADVLLAYEMNGETLNRDHGFPLRVVVPGVIGARSVKWLDSINVIAEESQGFFMQKDYKMFPPSVNWDNINWSSRRPQMDFPVQSAICSVEDVQMVKPGKVSIKGYAVSGGGRGIERVDISLDGGKNWVEASRTQEPGKQYISEHSSSDKWAWVLFEATIDVSQTTEVIAKAVDSAANVQPENVESVWNLRGVLNTSWHRVLLRLGHSNL

SEQ ID NO: 26545 - protein, 288 aa, Arabidopsis thaliana
  peptide (1)..(288): Ceres Seq. ID no. 13487738
MSKVRNVRGVGWDVSAIGNAVWGGAKLADVLELVGIPKLTASTNLGARHVEFVSVDRCKEENGGPYKASITLSQATNPEADVLLAYEMNGETLNRDHGFPLRVVVPGVIGARSVKWLDSINVIAEESQGFFMQKDYKMFPPSVNWDNINWSSRRPQMDFPVQSAICSVEDVQMVKPGKVSIKGYAVSGGGRGIERVDISLDGGKNWVEASRTQEPGKQYISEHSSSDKWAWVLFEATIDVSQTTEVIAKAVDSAANVQPENVESVWNLRGVLNTSWHRVLLRLGHSNL

SEQ ID NO: 26546 - protein, 201 aa, Arabidopsis thaliana
  peptide (1)..(201): Ceres Seq. ID no. 13487739
MNGETLNRDHGFPLRVVVPGVIGARSVKWLDSINVIAEESQGFFMQKDYKMFPPSVNWDNINWSSRRPQMDFPVQSAICSVEDVQMVKPGKVSIKGYAVSGGGRGIERVDISLDGGKNWVEASRTQEPGKQYISEHSSSDKWAWVLFEATIDVSQTTEVIAKAVDSAANVQPENVESVWNLRGVLNTSWHRVLLRLGHSNL

SEQ ID NO: 26547 - DNA, 1224 bp, Arabidopsis thaliana
  misc_feature (1)..(1224): Ceres Seq. ID no. 12333229
  misc_feature (1)..(1224): Ortholog of  Ceres SEQ ID NO 15171080 as cited in SEQ ID NO 54266
aaaacgcacttggcagagaaagataaacaagaaccctaagtttttttataagattcgagaaaattcaacaactcaggaaggaagatccttttgctccaatttctcaatcgaaacgatttcaatttcggtttcaacgatgtcgagtttttctgccgagtgttgggacttctctggtcgtaaaccgagcttttcacaaacatgtactcgattgagtcgttacctgaaggagaagggtagttttggagatctgagcttagggatgacatgcaagcccgacgttaatggaggttcacgtcagcctacaatgatgaatctgttcccttgtgaagcttcaggaatggattcttctgctggtcaagaagacattaaaccgaagactatgtttccgagacaatcaagcttttcttcttcctcttcctctgggaccaaagaagatgtacagatgatcaaagagactactaaatctgtgaagccagagtctcaatctgctccgttgactatattctacggtggtcgagttatggtgtttgatgatttttctgctgagaaagctaaagaagtcattgatttggctaacaaaggaagtgccaaaagcttcacatgtttcacagctgaagtaaacaataaccatagtgcttattctcaaaaagagattgcttctagcccaaatcctgtttgtagtcctgcaaaaaccgcagcacaagagccaattcagcctaacccggcctctttagcctgcgaactcccgattgcaagaagagcttcacttcatcggttccttgagaagaggaaggataggatcacatcaaaggcaccataccaaatagacggttcagctgaagcgtcttccaagcctactaacccagcttggctcagttcacggtaaacttcgagcctgtccgacccagaaggcacaacttgagagaccttcttgtaagattcttctgatgctccatcgttacaaatatcaagctgctcctctgttcattttttctatagattaatttcacccctagtagttttgtttgtttaactcccccgaaaactcattatatttgtatgaaatcaatatcaatagtgttcaatgtttgcttctggggtttaagttttagccagtgtgtataaccctttcctctgccgatctcaacattagcttgcaacttttgtaagaaacatcacttgtgtttttgtgttgatggccattaatataatccaagtttattt

SEQ ID NO: 26548 - protein, 294 aa, Arabidopsis thaliana
  peptide (1)..(294): Ceres Seq. ID no. 12333230
KRTWQRKINKNPKFFYKIRENSTTQEGRSFCSNFSIETISISVSTMSSFSAECWDFSGRKPSFSQTCTRLSRYLKEKGSFGDLSLGMTCKPDVNGGSRQPTMMNLFPCEASGMDSSAGQEDIKPKTMFPRQSSFSSSSSSGTKEDVQMIKETTKSVKPESQSAPLTIFYGGRVMVFDDFSAEKAKEVIDLANKGSAKSFTCFTAEVNNNHSAYSQKEIASSPNPVCSPAKTAAQEPIQPNPASLACELPIARRASLHRFLEKRKDRITSKAPYQIDGSAEASSKPTNPAWLSSR

SEQ ID NO: 26549 - protein, 249 aa, Arabidopsis thaliana
  peptide (1)..(249): Ceres Seq. ID no. 12333231
MSSFSAECWDFSGRKPSFSQTCTRLSRYLKEKGSFGDLSLGMTCKPDVNGGSRQPTMMNLFPCEASGMDSSAGQEDIKPKTMFPRQSSFSSSSSSGTKEDVQMIKETTKSVKPESQSAPLTIFYGGRVMVFDDFSAEKAKEVIDLANKGSAKSFTCFTAEVNNNHSAYSQKEIASSPNPVCSPAKTAAQEPIQPNPASLACELPIARRASLHRFLEKRKDRITSKAPYQIDGSAEASSKPTNPAWLSSR

SEQ ID NO: 26550 - protein, 208 aa, Arabidopsis thaliana
  peptide (1)..(208): Ceres Seq. ID no. 12333232
MTCKPDVNGGSRQPTMMNLFPCEASGMDSSAGQEDIKPKTMFPRQSSFSSSSSSGTKEDVQMIKETTKSVKPESQSAPLTIFYGGRVMVFDDFSAEKAKEVIDLANKGSAKSFTCFTAEVNNNHSAYSQKEIASSPNPVCSPAKTAAQEPIQPNPASLACELPIARRASLHRFLEKRKDRITSKAPYQIDGSAEASSKPTNPAWLSSR

SEQ ID NO: 26551 - DNA, 1476 bp, Arabidopsis thaliana
  misc_feature (1)..(1476): Ceres Seq. ID no. 12384697
  misc_feature (1)..(1476): Ortholog of  Ceres SEQ ID NO 15169655 as cited in SEQ ID NO 64922
  misc_feature (1)..(1476): Ortholog of  Ceres SEQ ID NO 13596004 as cited in SEQ ID NO 68212
aattgaaatcatttcgttgtgttttagaacaacaacaaaaaaacagtgccctttcgctcacgctttgagtcgtatctgctctcttcttaatccgccgtctctcactttttcgccggcgtggttagatcgtacaaagctcagagagaatgttgggaatcttgaggcaaagagccatcgatggagcttcgactcttaggaggacgcgattcgcattggtttctgctaggagctatgcagctggtgcaaaagagatgacagtcagagatgctctaaattctgcaattgatgaggaaatgtctgctgatcctaaagtatttgtcatgggtgaagaggttggccaatatcaaggtgcctacaagatcactaaaggccttttggagaaatatggtcctgagagagtttacgatacccctattactgaggctggatttactggaattggagttggtgctgcctatgctggcttaaagcccgttgtagaatttatgacgtttaacttctctatgcaggcaattgatcatatcatcaattccgctgcaaagtcaaattacatgtctgctggacagataaatgtacccatcgtctttagaggacccaatggtgctgctgctggtgttggagctcaacattctcagtgctatgcagcgtggtatgcctcagttcctggtttgaaagtccttgctccgtattcagctgaagatgctcgtggtcttcttaaagctgccattagagaccctgaccctgttgtcttccttgaaaacgagttactatatggtgaatcattccctatttcagaagaagcccttgattcaagtttctgtcttcccataggcaaagccaagattgaacgagaaggaaaggacgtaacgatagtaactttctcgaagatggtcggtttcgccctcaaggcagctgagaagctcgcagaagagggaataagtgctgaggtaataaatcttcgatcaatccgtccgcttgaccgagccaccatcaatgcttcagtgaggaaaacgagtagattggtaacagttgaagaaggtttcccacaacatggagtctgtgcagaaatttgtgcgtcggttgtagaagagagcttttcgtacttggatgcaccggtcgagaggattgcaggagctgatgttccaatgccgtatgcagctaacctagagagattggctcttcctcagatagaggacatcgttcgtgcatcaaagagagcttgttacagatcgaaataaaatcgtcaacatcaacacatttcttctttgatctttaaagggaaaggaaaataagaaaaaaggagaaaaatgatctctctgtctctcacttttgctataagaaaccaccattcctcgtgatttatttcatcttttgctattattctttactgcagcggttttcgtttttctttttgtcccttcccaaattgataattctaatctttggggttaattgataaaaattgatcgagaatgc

SEQ ID NO: 26552 - protein, 363 aa, Arabidopsis thaliana
  peptide (1)..(363): Ceres Seq. ID no. 12384698
MLGILRQRAIDGASTLRRTRFALVSARSYAAGAKEMTVRDALNSAIDEEMSADPKVFVMGEEVGQYQGAYKITKGLLEKYGPERVYDTPITEAGFTGIGVGAAYAGLKPVVEFMTFNFSMQAIDHIINSAAKSNYMSAGQINVPIVFRGPNGAAAGVGAQHSQCYAAWYASVPGLKVLAPYSAEDARGLLKAAIRDPDPVVFLENELLYGESFPISEEALDSSFCLPIGKAKIEREGKDVTIVTFSKMVGFALKAAEKLAEEGISAEVINLRSIRPLDRATINASVRKTSRLVTVEEGFPQHGVCAEICASVVEESFSYLDAPVERIAGADVPMPYAANLERLALPQIEDIVRASKRACYRSK

SEQ ID NO: 26553 - protein, 328 aa, Arabidopsis thaliana
  peptide (1)..(328): Ceres Seq. ID no. 12384699
MTVRDALNSAIDEEMSADPKVFVMGEEVGQYQGAYKITKGLLEKYGPERVYDTPITEAGFTGIGVGAAYAGLKPVVEFMTFNFSMQAIDHIINSAAKSNYMSAGQINVPIVFRGPNGAAAGVGAQHSQCYAAWYASVPGLKVLAPYSAEDARGLLKAAIRDPDPVVFLENELLYGESFPISEEALDSSFCLPIGKAKIEREGKDVTIVTFSKMVGFALKAAEKLAEEGISAEVINLRSIRPLDRATINASVRKTSRLVTVEEGFPQHGVCAEICASVVEESFSYLDAPVERIAGADVPMPYAANLERLALPQIEDIVRASKRACYRSK

SEQ ID NO: 26554 - protein, 314 aa, Arabidopsis thaliana
  peptide (1)..(314): Ceres Seq. ID no. 12384700
MSADPKVFVMGEEVGQYQGAYKITKGLLEKYGPERVYDTPITEAGFTGIGVGAAYAGLKPVVEFMTFNFSMQAIDHIINSAAKSNYMSAGQINVPIVFRGPNGAAAGVGAQHSQCYAAWYASVPGLKVLAPYSAEDARGLLKAAIRDPDPVVFLENELLYGESFPISEEALDSSFCLPIGKAKIEREGKDVTIVTFSKMVGFALKAAEKLAEEGISAEVINLRSIRPLDRATINASVRKTSRLVTVEEGFPQHGVCAEICASVVEESFSYLDAPVERIAGADVPMPYAANLERLALPQIEDIVRASKRACYRSK

SEQ ID NO: 26555 - DNA, 1430 bp, Arabidopsis thaliana
  misc_feature (1)..(1430): Ceres Seq. ID no. 13499596
  misc_feature (1)..(1430): Ortholog of  Ceres SEQ ID NO 15224513 as cited in SEQ ID NO 63921
agggttttcgattgtcaccaccaccaccacttctggtaacgcagtgtctctgattttcacttggttaaagacctctagcttcacggtcaaacatcataaaccttttgccgccgtcactaataggaattaactgatctcgtcaatggcggaggtggaggagattgcgcacgaggagcagaatatcgagaagagggagaagaagaaaggtaaacacgagaagccgaagccatgggatgatgacccaaacatcgaccgttggacaatcgagaagtttgatccggcatggaaccccactggtatgactgaaaccagcacgttctcaacactctttcctcaatacagagagaagtatcttcaggagtgttggcctagagttgaatctgctcttaaggagtacggtgtcgcctgcaagctcaacttggttgaaggttctatgactgtttcgacgacgaggaagacaagagatccatacatcattgtcaaagctagggatttgattaagcttctttccagaagtgtccctgctcctcaggcaattaagattctcgaagatgaggtgcaatgtgatatcatcaagatcggtaacttggttagaaataaggaaagatttgttaaaagaaggcagcggcttgtgggtcctaattcttctaccttgaaggcgctggaaatattaaccaactgttacattctagttcagggaagtactgtagccgctatgggtccatttaaaggtctcaaacagctcagaaggattgtggaagactgcgtacagaatataatgcatcctgtataccatataaagactctcatgatgaaaaaagaactggagaaggatccagctcttgcaaatgaaagctgggataggtttcttcccacattcaggaagaaaaatgttaagcaaaagaaacccaaaagcaaggagaagaagccatacacacctttcccacctcctcaaccacctagcaagattgatatgcagttggagtctggagaatacttcatgagtgataaaaagaagtcagagaaaaaatggcaggagaagcaagagaaacagtcagagaagagcacagagaacaaaagaaagagagatgcctcattcctcccacctgaggagcctatgaacaacaatagcaacgcaaacaaatcagaggatggaaagaatgatataaccgagttaacaaattccttgaagagcaagacgaaggagttgaaaaagcagaaaaagacacacgagagagtgaatgcggaggagtatattgctggtccatcttcttctgctgataaatcttccaagaagtccaaaaagattagagattaattctaaatcctgtttttttttaaaaaaaaaaaagagagaaaagattgaaacttatctatgctcaaaactgtaaaaacaagttaaatctttatttcagccgtcaagttacttc

SEQ ID NO: 26556 - protein, 391 aa, Arabidopsis thaliana
  peptide (1)..(391): Ceres Seq. ID no. 13499597
MAEVEEIAHEEQNIEKREKKKGKHEKPKPWDDDPNIDRWTIEKFDPAWNPTGMTETSTFSTLFPQYREKYLQECWPRVESALKEYGVACKLNLVEGSMTVSTTRKTRDPYIIVKARDLIKLLSRSVPAPQAIKILEDEVQCDIIKIGNLVRNKERFVKRRQRLVGPNSSTLKALEILTNCYILVQGSTVAAMGPFKGLKQLRRIVEDCVQNIMHPVYHIKTLMMKKELEKDPALANESWDRFLPTFRKKNVKQKKPKSKEKKPYTPFPPPQPPSKIDMQLESGEYFMSDKKKSEKKWQEKQEKQSEKSTENKRKRDASFLPPEEPMNNNSNANKSEDGKNDITELTNSLKSKTKELKKQKKTHERVNAEEYIAGPSSSADKSSKKSKKIRD

SEQ ID NO: 26557 - protein, 339 aa, Arabidopsis thaliana
  peptide (1)..(339): Ceres Seq. ID no. 13499598
MTETSTFSTLFPQYREKYLQECWPRVESALKEYGVACKLNLVEGSMTVSTTRKTRDPYIIVKARDLIKLLSRSVPAPQAIKILEDEVQCDIIKIGNLVRNKERFVKRRQRLVGPNSSTLKALEILTNCYILVQGSTVAAMGPFKGLKQLRRIVEDCVQNIMHPVYHIKTLMMKKELEKDPALANESWDRFLPTFRKKNVKQKKPKSKEKKPYTPFPPPQPPSKIDMQLESGEYFMSDKKKSEKKWQEKQEKQSEKSTENKRKRDASFLPPEEPMNNNSNANKSEDGKNDITELTNSLKSKTKELKKQKKTHERVNAEEYIAGPSSSADKSSKKSKKIRD

SEQ ID NO: 26558 - protein, 294 aa, Arabidopsis thaliana
  peptide (1)..(294): Ceres Seq. ID no. 13499599
MTVSTTRKTRDPYIIVKARDLIKLLSRSVPAPQAIKILEDEVQCDIIKIGNLVRNKERFVKRRQRLVGPNSSTLKALEILTNCYILVQGSTVAAMGPFKGLKQLRRIVEDCVQNIMHPVYHIKTLMMKKELEKDPALANESWDRFLPTFRKKNVKQKKPKSKEKKPYTPFPPPQPPSKIDMQLESGEYFMSDKKKSEKKWQEKQEKQSEKSTENKRKRDASFLPPEEPMNNNSNANKSEDGKNDITELTNSLKSKTKELKKQKKTHERVNAEEYIAGPSSSADKSSKKSKKIRD

SEQ ID NO: 26559 - DNA, 1426 bp, Arabidopsis thaliana
  misc_feature (1)..(1426): Ceres Seq. ID no. 12337791
  misc_feature (1)..(1426): Ortholog of  Ceres SEQ ID NO 13581327 as cited in SEQ ID NO 51165
  misc_feature (1)..(1426): Ortholog of  Ceres SEQ ID NO 12610002 as cited in SEQ ID NO 55823
  misc_feature (1)..(1426): Ortholog of  Ceres SEQ ID NO 14308310 as cited in SEQ ID NO 58573
  misc_feature (1)..(1426): Ortholog of  Ceres SEQ ID NO 14308795 as cited in SEQ ID NO 59140
  misc_feature (1)..(1426): Ortholog of  Ceres SEQ ID NO 14313354 as cited in SEQ ID NO 61520
  misc_feature (1)..(1426): Ortholog of  Ceres SEQ ID NO 13596744 as cited in SEQ ID NO 62765
atttcttctctctcattctctcttctgacgtgtttcccttcttcggtttctcatcctcacgtccgccggatttcgaggaaacgaagaagaagaagaacaacaacaaaagccttttgagatatggacagcttctggcaattaggtgatgagctacgaggtcagacgagagcatcagaggatcacaaatggtctactgttgcaacgaagctagctgagcaaactaggatgaaaggggagaggatgaacaatcttgatctctccaaaggttacactgagtttagaccaagtgagaaattcagtttccaggagaacaatcttaacttcaacatgttgaatttagatggtaaatttggtgaaagcatcatggggaagacttcgatgcagagcaatgtttataatatgaatactgttttccagaagaatgactttaagagtggaggcaacatgaaagttaacaagtataatggtaatattgttgctaacaaggagatgagcaacaacaaacataacaacaactgcaatgataatgggaatatgaatttggctgttgacaagaggtttaaaaccttgcctgcttcggagactcttccgaggaatgaagttcttggtggttacatctttgtttgcaacaatgatactatgcaggaggatatgaaacgtcacctctttggtttacctccaagatacagagactctgttcgagctataacacctggattgcctctgtttctttacaactacaccactcaccagcttcatggtatctttgaggcaacaacttttggaggtactaatattgatgctactgcttgggaagacaaaaagtgcaaaggagagtcaaggtttccggctcaggtaaggatcagagtgaggaaaatctgcaaagccttggaagaggactccttcaggccagtacttcaccactatgatggtccaaaattccgccttgagctctctgttcctgagacattggatctgctagatctttgcgaacaagctggttctgcataagccgaaacgatcaaccttgcaatgccacgttgcaaagagggggatgttttgtatgaaatctatctatatatgtaagacctaccgtaagagcgtaagcttttgggatttagttaagagtcggattcaaatgtatgtttactaagaagggatgagagtatgtgtggtcttaaggcaagcaaaagagcgaagaggctctgccgaataagcgactactcttgttctgtgtcgtgtctgatgtgtgagtgtgtgtctgtgtttgtgagagattcgatactctttgaaacaaagatttatgtagaagaatatagagaaagaaagactactataaacagagccaaaaaatgatgtgagctactgtttgtgcttgcttgtgtaaggataaaacaaattgtcctaaatgacaagtttaacttct

SEQ ID NO: 26560 - protein, 296 aa, Arabidopsis thaliana
  peptide (1)..(296): Ceres Seq. ID no. 12337792
MDSFWQLGDELRGQTRASEDHKWSTVATKLAEQTRMKGERMNNLDLSKGYTEFRPSEKFSFQENNLNFNMLNLDGKFGESIMGKTSMQSNVYNMNTVFQKNDFKSGGNMKVNKYNGNIVANKEMSNNKHNNNCNDNGNMNLAVDKRFKTLPASETLPRNEVLGGYIFVCNNDTMQEDMKRHLFGLPPRYRDSVRAITPGLPLFLYNYTTHQLHGIFEATTFGGTNIDATAWEDKKCKGESRFPAQVRIRVRKICKALEEDSFRPVLHHYDGPKFRLELSVPETLDLLDLCEQAGSA

SEQ ID NO: 26561 - protein, 261 aa, Arabidopsis thaliana
  peptide (1)..(261): Ceres Seq. ID no. 12337793
MKGERMNNLDLSKGYTEFRPSEKFSFQENNLNFNMLNLDGKFGESIMGKTSMQSNVYNMNTVFQKNDFKSGGNMKVNKYNGNIVANKEMSNNKHNNNCNDNGNMNLAVDKRFKTLPASETLPRNEVLGGYIFVCNNDTMQEDMKRHLFGLPPRYRDSVRAITPGLPLFLYNYTTHQLHGIFEATTFGGTNIDATAWEDKKCKGESRFPAQVRIRVRKICKALEEDSFRPVLHHYDGPKFRLELSVPETLDLLDLCEQAGSA

SEQ ID NO: 26562 - protein, 256 aa, Arabidopsis thaliana
  peptide (1)..(256): Ceres Seq. ID no. 12337794
MNNLDLSKGYTEFRPSEKFSFQENNLNFNMLNLDGKFGESIMGKTSMQSNVYNMNTVFQKNDFKSGGNMKVNKYNGNIVANKEMSNNKHNNNCNDNGNMNLAVDKRFKTLPASETLPRNEVLGGYIFVCNNDTMQEDMKRHLFGLPPRYRDSVRAITPGLPLFLYNYTTHQLHGIFEATTFGGTNIDATAWEDKKCKGESRFPAQVRIRVRKICKALEEDSFRPVLHHYDGPKFRLELSVPETLDLLDLCEQAGSA

SEQ ID NO: 26563 - DNA, 1074 bp, Arabidopsis thaliana
  misc_feature (1)..(1074): Ceres Seq. ID no. 12327678
  misc_feature (1)..(1074): Ortholog of  Ceres SEQ ID NO 14312769 as cited in SEQ ID NO 55493
  misc_feature (1)..(1074): Ortholog of  Ceres SEQ ID NO 13639300 as cited in SEQ ID NO 56701
acagatatcaatgttgcatcaggtgaagaacgagagatagagaacgatgagtgtgattggaagcaagagctgtattttctctgtggctagatacacccgagaaaatgagaaatcttcttgcttcacttctatcaacaagaaatcttcgcttgatctgagtcttcccagaaatctggcgggagtttcctgcaaattctctggagaaaatccaggaacaaatggggtttctcttagctccaagaacaaaatggaggattacaatacagctatgaagagattgatgagaagcccttatgaatatcatcatgatctaggtatgaactatacattgataagagatgaacttatagttgggtcacagccacagaaacctgaggacatagatcacttgaagcaggaacagaatgttgcttacatacttaacttgcagcaggataaggacattgagtattggggaatcgatttggattccattgttagaagatgtaaggagcttggaatccgtcacatgagaaggcctgctaaagattttgatccactttcgttgagaagccaacttccaaaagctgtttcttctttggaatgggcggtttcagaaggtaaaggaagagtctatgtgcattgctcagccggattgggaagagctccaggggtttccattgcttatatgtattggttctgtgacatgaatcttaacacggcttatgacactttggtatcaaagcgtccatgtgggcctaacaaaggagccatccgtggtgcaacatatgatctggctaagaatgatccctggaaagagccctttgagagtctccctgagaacgcattcgaggacattgcagattgggaaaggaagttgattcaagaacgtgttcgggccctccgtggaacctgaaaatcagtagttctgagaatatgtataatttcgaataaaatgtagacttctgtatattttaaagctacggattacaaaacctcttctgcgaattaatcgaccttgttgtcaggaactctgtggttcttcttgtctagttctacaaagatgaagtctatataatttatacatacacttag

SEQ ID NO: 26564 - protein, 282 aa, Arabidopsis thaliana
  peptide (1)..(282): Ceres Seq. ID no. 12327679
MSVIGSKSCIFSVARYTRENEKSSCFTSINKKSSLDLSLPRNLAGVSCKFSGENPGTNGVSLSSKNKMEDYNTAMKRLMRSPYEYHHDLGMNYTLIRDELIVGSQPQKPEDIDHLKQEQNVAYILNLQQDKDIEYWGIDLDSIVRRCKELGIRHMRRPAKDFDPLSLRSQLPKAVSSLEWAVSEGKGRVYVHCSAGLGRAPGVSIAYMYWFCDMNLNTAYDTLVSKRPCGPNKGAIRGATYDLAKNDPWKEPFESLPENAFEDIADWERKLIQERVRALRGT

SEQ ID NO: 26565 - protein, 215 aa, Arabidopsis thaliana
  peptide (1)..(215): Ceres Seq. ID no. 12327680
MEDYNTAMKRLMRSPYEYHHDLGMNYTLIRDELIVGSQPQKPEDIDHLKQEQNVAYILNLQQDKDIEYWGIDLDSIVRRCKELGIRHMRRPAKDFDPLSLRSQLPKAVSSLEWAVSEGKGRVYVHCSAGLGRAPGVSIAYMYWFCDMNLNTAYDTLVSKRPCGPNKGAIRGATYDLAKNDPWKEPFESLPENAFEDIADWERKLIQERVRALRGT

SEQ ID NO: 26566 - protein, 208 aa, Arabidopsis thaliana
  peptide (1)..(208): Ceres Seq. ID no. 12327681
MKRLMRSPYEYHHDLGMNYTLIRDELIVGSQPQKPEDIDHLKQEQNVAYILNLQQDKDIEYWGIDLDSIVRRCKELGIRHMRRPAKDFDPLSLRSQLPKAVSSLEWAVSEGKGRVYVHCSAGLGRAPGVSIAYMYWFCDMNLNTAYDTLVSKRPCGPNKGAIRGATYDLAKNDPWKEPFESLPENAFEDIADWERKLIQERVRALRGT

SEQ ID NO: 26567 - DNA, 1432 bp, Arabidopsis thaliana
  misc_feature (1)..(1432): Ceres Seq. ID no. 13489717
  misc_feature (1)..(1432): Ortholog of  Ceres SEQ ID NO 15168965 as cited in SEQ ID NO 20607
  misc_feature (1)..(1432): Ortholog of  Ceres SEQ ID NO 13597454 as cited in SEQ ID NO 64121
  misc_feature (1)..(1432): Ortholog of  Ceres SEQ ID NO 13623385 as cited in SEQ ID NO 0
aaaccattcacaatcagacaatgacatctctccatacgttactcttctcttctcttcttttcttcatcgtctttccaaccttcacgttttcctccaccttattgtttcagagtttcaattgggagtcatggaagaaagaaggaggattctacaattctctccacaactccattgacgacatagccaacgctggaatcactcatctttggcttcctcctccttctcaatccgttgctcctgaaggttacttaccgggaaagctatacgatctaaacagctccaaatacggttcagaggcggaactgaaatcgttaatcaaagcgttgaatcaaaaaggaataaaagctttggctgatatagtgattaaccacagaacagctgagaggaaagacgataaatgtggatactgttatttcgaaggtgggacttccgatgatcgtcttgattgggatccttcctttgtctgccgcaatgaccctaaatttcccggtaccggaaacctcgacaccggaggagattttgatggagcgcccgacatcgaccaccttaaccctagagttcagaaagagttgtccgaatggatgaattggcttaaaactgaaatcggattccatggttggagatttgattatgttcgaggttatgcatcttccatcaccaaattatacgttcagaatacatcaccggattttgcggtgggtgagaaatgggacgatatgaagtacggaggagacgggaaactagactatgatcagaacgagcatcggtcgggtctcaaacagtggatcgaggaagcgggtggtggtgtgttgacagcttttgatttcaccaccaaagggatcttacagtctgctgtcaaaggtgagctttggagactaaaggactcgcagggaaaaccgcctggtatgataggaatcatgcccggaaacgctgtcacattcatagataaccatgatacattcagaacgtgggttttcccttctgataaagtcttgcttggatacgtttatatacttactcatccaggaactccttgcattttttataatcattacatagaatggggactaaaagagagcatctcaaagctggtggctatcaggaacaaaaatgggattggtagcacaagctctgtaacgataaaagcggcagaggcggatctctacttggctatgattgatgataaagttatcatgaagattggaccaaagcaagatgtgggaacacttgttccttctaattttgctttagcttattcaggccttgactttgctgtctgggagaagaagtaacgcataactcgaatcataagaaaagtaatcgaatgtatcttcttcctttttaataaaacattttggcagtatctaaagatatgtataatgaaatataaaatgataaagaatacctaaataaaaagagcactagtggtgct

SEQ ID NO: 26568 - protein, 429 aa, Arabidopsis thaliana
  peptide (1)..(429): Ceres Seq. ID no. 13489718
TIHNQTMTSLHTLLFSSLLFFIVFPTFTFSSTLLFQSFNWESWKKEGGFYNSLHNSIDDIANAGITHLWLPPPSQSVAPEGYLPGKLYDLNSSKYGSEAELKSLIKALNQKGIKALADIVINHRTAERKDDKCGYCYFEGGTSDDRLDWDPSFVCRNDPKFPGTGNLDTGGDFDGAPDIDHLNPRVQKELSEWMNWLKTEIGFHGWRFDYVRGYASSITKLYVQNTSPDFAVGEKWDDMKYGGDGKLDYDQNEHRSGLKQWIEEAGGGVLTAFDFTTKGILQSAVKGELWRLKDSQGKPPGMIGIMPGNAVTFIDNHDTFRTWVFPSDKVLLGYVYILTHPGTPCIFYNHYIEWGLKESISKLVAIRNKNGIGSTSSVTIKAAEADLYLAMIDDKVIMKIGPKQDVGTLVPSNFALAYSGLDFAVWEKK

SEQ ID NO: 26569 - protein, 423 aa, Arabidopsis thaliana
  peptide (1)..(423): Ceres Seq. ID no. 13489719
MTSLHTLLFSSLLFFIVFPTFTFSSTLLFQSFNWESWKKEGGFYNSLHNSIDDIANAGITHLWLPPPSQSVAPEGYLPGKLYDLNSSKYGSEAELKSLIKALNQKGIKALADIVINHRTAERKDDKCGYCYFEGGTSDDRLDWDPSFVCRNDPKFPGTGNLDTGGDFDGAPDIDHLNPRVQKELSEWMNWLKTEIGFHGWRFDYVRGYASSITKLYVQNTSPDFAVGEKWDDMKYGGDGKLDYDQNEHRSGLKQWIEEAGGGVLTAFDFTTKGILQSAVKGELWRLKDSQGKPPGMIGIMPGNAVTFIDNHDTFRTWVFPSDKVLLGYVYILTHPGTPCIFYNHYIEWGLKESISKLVAIRNKNGIGSTSSVTIKAAEADLYLAMIDDKVIMKIGPKQDVGTLVPSNFALAYSGLDFAVWEKK

SEQ ID NO: 26570 - protein, 236 aa, Arabidopsis thaliana
  peptide (1)..(236): Ceres Seq. ID no. 13489720
MNWLKTEIGFHGWRFDYVRGYASSITKLYVQNTSPDFAVGEKWDDMKYGGDGKLDYDQNEHRSGLKQWIEEAGGGVLTAFDFTTKGILQSAVKGELWRLKDSQGKPPGMIGIMPGNAVTFIDNHDTFRTWVFPSDKVLLGYVYILTHPGTPCIFYNHYIEWGLKESISKLVAIRNKNGIGSTSSVTIKAAEADLYLAMIDDKVIMKIGPKQDVGTLVPSNFALAYSGLDFAVWEKK

SEQ ID NO: 26571 - DNA, 1253 bp, Arabidopsis thaliana
  misc_feature (1)..(1253): Ceres Seq. ID no. 13488238
  misc_feature (1)..(1253): Ortholog of  Ceres SEQ ID NO 14311922 as cited in SEQ ID NO 51539
agagagagaggctttcgattaattttactttgtggccgccgtgacctttttcttagcgtcgctctctgtcaccttcaagttcactatctccgacttatcttctgtcaagtactgaacaagaatcatggaggagatcaccaaaccggtccttgttggaatagttaagaaagaagctccacagctagcatccgtgttgagagaaatgaagaatgttctagatgtggttaggagcaaagtggaagctctgactgcattggtaaaagcaaacagttttccgacagcgggtgggataagttatcttgaggccaagcatctgttacttctaagttattgccaggatcttgtatattatattctaaggaaagcaaaaggactctctattgatggtcatcctcttgtaaggagccttgtagagatacgtatgtttctggaaaagattcgtcccatagacaaaaaacttcagtaccagattcagaagctcaccacagccggtgggcctgtgacagagctagctcattccgagggaaaggggtcgtgtgaagcccaaaaatctgaagatctttcaaattataagcctaaacctgacttacttgctgacaaagaggatgaccaagaggatgatggtgtttatcgacccccgaaatttgcccctatgtctatggaagataagacttcaaaacaagaaagagatgctgccagaaaagagaaacacttttttagacaagccactgaaaatacatacatgaaagatgtgttggacgatctggaggacaggcctgaagagattagagactattatggggttgagagcaatgagcagaagaggtttatggcacagtatgaaaggcaacaaaaggcagaagaagagctctttacccgggcacctcgcactaaagaggataagaagagagagaagcgcttgaaatcaagcagcgggttgcatgaactaaccgagaacttttacgatgatatcaagttcttggataaggatggtgaaaagccaagaagcttcggccgtaataaaaggggagggccattcaagaaaagaaagacaaggcactgatatggatacaccagtggttcctttagctgcttcagtgcaccaattttgttgccatgaaaaagatacaaattttcgatttgcttttatgattaaatgttgaaagtggtgaatgtgagaacttgttatcagttttagtattggttcatggtcatgctcttgcagtaaaattaggaagagaccttttctcttt

SEQ ID NO: 26572 - protein, 312 aa, Arabidopsis thaliana
  peptide (1)..(312): Ceres Seq. ID no. 13488239
MEEITKPVLVGIVKKEAPQLASVLREMKNVLDVVRSKVEALTALVKANSFPTAGGISYLEAKHLLLLSYCQDLVYYILRKAKGLSIDGHPLVRSLVEIRMFLEKIRPIDKKLQYQIQKLTTAGGPVTELAHSEGKGSCEAQKSEDLSNYKPKPDLLADKEDDQEDDGVYRPPKFAPMSMEDKTSKQERDAARKEKHFFRQATENTYMKDVLDDLEDRPEEIRDYYGVESNEQKRFMAQYERQQKAEEELFTRAPRTKEDKKREKRLKSSSGLHELTENFYDDIKFLDKDGEKPRSFGRNKRGGPFKKRKTRH

SEQ ID NO: 26573 - protein, 286 aa, Arabidopsis thaliana
  peptide (1)..(286): Ceres Seq. ID no. 13488240
MKNVLDVVRSKVEALTALVKANSFPTAGGISYLEAKHLLLLSYCQDLVYYILRKAKGLSIDGHPLVRSLVEIRMFLEKIRPIDKKLQYQIQKLTTAGGPVTELAHSEGKGSCEAQKSEDLSNYKPKPDLLADKEDDQEDDGVYRPPKFAPMSMEDKTSKQERDAARKEKHFFRQATENTYMKDVLDDLEDRPEEIRDYYGVESNEQKRFMAQYERQQKAEEELFTRAPRTKEDKKREKRLKSSSGLHELTENFYDDIKFLDKDGEKPRSFGRNKRGGPFKKRKTRH

SEQ ID NO: 26574 - protein, 213 aa, Arabidopsis thaliana
  peptide (1)..(213): Ceres Seq. ID no. 13488241
MFLEKIRPIDKKLQYQIQKLTTAGGPVTELAHSEGKGSCEAQKSEDLSNYKPKPDLLADKEDDQEDDGVYRPPKFAPMSMEDKTSKQERDAARKEKHFFRQATENTYMKDVLDDLEDRPEEIRDYYGVESNEQKRFMAQYERQQKAEEELFTRAPRTKEDKKREKRLKSSSGLHELTENFYDDIKFLDKDGEKPRSFGRNKRGGPFKKRKTRH

SEQ ID NO: 26575 - DNA, 921 bp, Arabidopsis thaliana
  misc_feature (1)..(921): Ceres Seq. ID no. 13487316
  misc_feature (1)..(921): Ortholog of  Ceres SEQ ID NO 13594248 as cited in SEQ ID NO 57340
aaaaaaaattagggtcgccttcttcttcttcttctctgacatcggaagaatcttcagtgccgagaaagataaacaaaatggcggcaatcagaacgatgacgaacatgattctacgcgagttcatccatcatccacttctccttcactcttcatcgaaatcgtgtcaatctcttttaccatgtctccgtctcactcccctaatttctccaattcactctaattcccggctcgtatccgtccgatgtgcggcatcgacctccggtggaagcggtggtgatcggaaagtctcttcacggttgtcgcaggtgcaacagatgcttcatgaagccgaagagagagctagttccgctggcaatgagcctactcctcaaatcactctagacaatgttacacttaactttgctagaagtggtggtcctggaggccagaatgtgaacaaattgaataccaaagtagatatgcgcttcaatgttaagaacgcgtattggctgagtgacaggatcagagagaaaatcttactgacggagaagaatcggatcaacaaggatggtgaacttgtgatatcttctaccaaaaccagaacgcagaaaggtaacatcgacgatgcacttgaaaaactacaggcgataattgatgcggcttcatatgttccacctccaccatcagaagaacaaaagaagaaaatagtaaagctcgctgcgaaagctgacaataaacgacttaaaagcaaaaaagttctgtcagacaagaaatctgcgagaagaagccgcggtagttacgatgattaaacttaaaaccatacaatggagtccaggttgattctaaagcttttaacttaaaatgattgttattttcttggaatttaatgtaacacaacaatcaaatcatccaataaaaattgcagtatattggattttatgc

SEQ ID NO: 26576 - protein, 261 aa, Arabidopsis thaliana
  peptide (1)..(261): Ceres Seq. ID no. 13487317
KKLGSPSSSSSLTSEESSVPRKINKMAAIRTMTNMILREFIHHPLLLHSSSKSCQSLLPCLRLTPLISPIHSNSRLVSVRCAASTSGGSGGDRKVSSRLSQVQQMLHEAEERASSAGNEPTPQITLDNVTLNFARSGGPGGQNVNKLNTKVDMRFNVKNAYWLSDRIREKILLTEKNRINKDGELVISSTKTRTQKGNIDDALEKLQAIIDAASYVPPPPSEEQKKKIVKLAAKADNKRLKSKKVLSDKKSARRSRGSYDD

SEQ ID NO: 26577 - protein, 236 aa, Arabidopsis thaliana
  peptide (1)..(236): Ceres Seq. ID no. 13487318
MAAIRTMTNMILREFIHHPLLLHSSSKSCQSLLPCLRLTPLISPIHSNSRLVSVRCAASTSGGSGGDRKVSSRLSQVQQMLHEAEERASSAGNEPTPQITLDNVTLNFARSGGPGGQNVNKLNTKVDMRFNVKNAYWLSDRIREKILLTEKNRINKDGELVISSTKTRTQKGNIDDALEKLQAIIDAASYVPPPPSEEQKKKIVKLAAKADNKRLKSKKVLSDKKSARRSRGSYDD

SEQ ID NO: 26578 - protein, 230 aa, Arabidopsis thaliana
  peptide (1)..(230): Ceres Seq. ID no. 13487319
MTNMILREFIHHPLLLHSSSKSCQSLLPCLRLTPLISPIHSNSRLVSVRCAASTSGGSGGDRKVSSRLSQVQQMLHEAEERASSAGNEPTPQITLDNVTLNFARSGGPGGQNVNKLNTKVDMRFNVKNAYWLSDRIREKILLTEKNRINKDGELVISSTKTRTQKGNIDDALEKLQAIIDAASYVPPPPSEEQKKKIVKLAAKADNKRLKSKKVLSDKKSARRSRGSYDD

SEQ ID NO: 26579 - DNA, 830 bp, Arabidopsis thaliana
  misc_feature (1)..(830): Ceres Seq. ID no. 13486615
  misc_feature (1)..(830): Ortholog of  Ceres SEQ ID NO 13656871 as cited in SEQ ID NO 65884
attgagatcgaaattctcttcattttctcaggctccaatgtcgctggacttagctcgttgatcatcgtacaaaaagcttgctcgtagctatcagctccccggagaagaagatggtgcggaaacagtttcaacaggctaaaactggaatagaggcattgaagtcaatggatgctaacaactacttgaagaaggttggattagggcgtgacgatatgttcttttggaaacaagtgggaaaagcattgctatgcacttacacaatctttggtatggcttggatttacaatgaaacgtctcctttaggttggtggacgctgaagccaagaccaaaggaagagagagaattggctcatttgtatgagcggcgtgagtttccttatcctggtgatacagaggctatggaggattttgttgcaaaggggggaatgattggtactgcaattggaccgaaaggaattgttgagtccgaaggtgaggctgataattaccagaaggaaatggagaagaagaagtttgataaagaggctcagaaactgtggttgagaatgaggaatgaggttattactgaacttcaagagaaagggcataatcttgaataaggaagtgcaatagggttttgataaataaaaaagctgtgtgtaatttagggtgtgtatcagttagactaaggattcaaccactcgtacaagtgtttctgtctacgtatagctgaaagtactatactggttgatgttcttgctcttggggaagtagctcttgtcctttattggtggcttgattcatgttttggcttaaaccctttggaatataacttgatgcgttttgctccc

SEQ ID NO: 26580 - protein, 162 aa, Arabidopsis thaliana
  peptide (1)..(162): Ceres Seq. ID no. 13486616
MVRKQFQQAKTGIEALKSMDANNYLKKVGLGRDDMFFWKQVGKALLCTYTIFGMAWIYNETSPLGWWTLKPRPKEERELAHLYERREFPYPGDTEAMEDFVAKGGMIGTAIGPKGIVESEGEADNYQKEMEKKKFDKEAQKLWLRMRNEVITELQEKGHNLE

SEQ ID NO: 26581 - protein, 144 aa, Arabidopsis thaliana
  peptide (1)..(144): Ceres Seq. ID no. 13486617
MDANNYLKKVGLGRDDMFFWKQVGKALLCTYTIFGMAWIYNETSPLGWWTLKPRPKEERELAHLYERREFPYPGDTEAMEDFVAKGGMIGTAIGPKGIVESEGEADNYQKEMEKKKFDKEAQKLWLRMRNEVITELQEKGHNLE

SEQ ID NO: 26582 - protein, 128 aa, Arabidopsis thaliana
  peptide (1)..(128): Ceres Seq. ID no. 13486618
MFFWKQVGKALLCTYTIFGMAWIYNETSPLGWWTLKPRPKEERELAHLYERREFPYPGDTEAMEDFVAKGGMIGTAIGPKGIVESEGEADNYQKEMEKKKFDKEAQKLWLRMRNEVITELQEKGHNLE

SEQ ID NO: 26583 - DNA, 1357 bp, Arabidopsis thaliana
  misc_feature (1)..(1357): Ceres Seq. ID no. 12372055
  misc_feature (1)..(1357): Ortholog of  Ceres SEQ ID NO 14315193 as cited in SEQ ID NO 57743
atcctctatctctcttttgttttttctctctctcacagagaaaaagaacacaatgccagtttctgcagagccttcttcatcttcttcaacaacaatcggtcaacacatgagactccaacgacctaggaatcatcgaaatctcccacccatttccaccgccgacgaacctctaatccccaaacctagccgcgtctctaaatccgccatgtcttccttcttcctcttgccagaaaccactaagaagaaacccaacggaacgacgtcgtttcgtgggctaggctgcacaacctccgcatctcagcaagtttcggtcccggcggtgattcgctcctccgctgattgggacgcgagtaatttcaaaattaagaagtcgaagaagaagaacaagaacaagggtagtagtagctacaatggtggttcgattaagatcttgagcgaggctagtagtagtagtagtagcgtcgcttgcgctgcgattcctgatgtttggtgtggacctggagttgggttttcgacggatgctgtcgttggagcctccaataacaccgtcgagtcagatcctccgcgaaggaatattccggtgagacgcaaaatcgatggagataaaaccaatagtaacagtaataataatcagcgagggggttcttcttctcttcttcctagacgatctctcaatcaagagtctaatccttattttgattctgattcgagttttttgacatcgcgggctgaacagactgatagatatcatcgtcatctaagactgccttaccctgatggactcgctgagatgatgatgatgcagaatggttttgtgatgggaggagtattaagctcattcgatcaattccgtgacatgaggcttaatgtcgataacatgacatacgagcaacttttggagcttggtgaaagaattgggcatgtgaacactggacttaatgaaaaacagatcaaaagttgtcttcggaaagtcaaaccactccggcaagatacaccagttgctgatagaaagtgcatcatctgtcaagacgagtatgaggcgaaggacgaggtaggggagttacgatgtggacacaggttccatatcgactgtgtgaaacaatggctagtgaggaagaactcttgtccggtctgtaaaacgatggcgtacaataagtcttagttagatattatctcttcctgtgatgtgattcttgatttcgggattgaaaccaaatcactattttatgttaagattcctttttggctttttattcatgattgctatttttctgaggaaaaactgttgagacctttgtattacctatggaaaagtctcggagacattgtgaaccccacattgcgtgtgggtttgttc

SEQ ID NO: 26584 - protein, 386 aa, Arabidopsis thaliana
  peptide (1)..(386): Ceres Seq. ID no. 12372056
SSISLLFFLSLTEKKNTMPVSAEPSSSSSTTIGQHMRLQRPRNHRNLPPISTADEPLIPKPSRVSKSAMSSFFLLPETTKKKPNGTTSFRGLGCTTSASQQVSVPAVIRSSADWDASNFKIKKSKKKNKNKGSSSYNGGSIKILSEASSSSSSVACAAIPDVWCGPGVGFSTDAVVGASNNTVESDPPRRNIPVRRKIDGDKTNSNSNNNQRGGSSSLLPRRSLNQESNPYFDSDSSFLTSRAEQTDRYHRHLRLPYPDGLAEMMMMQNGFVMGGVLSSFDQFRDMRLNVDNMTYEQLLELGERIGHVNTGLNEKQIKSCLRKVKPLRQDTPVADRKCIICQDEYEAKDEVGELRCGHRFHIDCVKQWLVRKNSCPVCKTMAYNKS

SEQ ID NO: 26585 - protein, 369 aa, Arabidopsis thaliana
  peptide (1)..(369): Ceres Seq. ID no. 12372057
MPVSAEPSSSSSTTIGQHMRLQRPRNHRNLPPISTADEPLIPKPSRVSKSAMSSFFLLPETTKKKPNGTTSFRGLGCTTSASQQVSVPAVIRSSADWDASNFKIKKSKKKNKNKGSSSYNGGSIKILSEASSSSSSVACAAIPDVWCGPGVGFSTDAVVGASNNTVESDPPRRNIPVRRKIDGDKTNSNSNNNQRGGSSSLLPRRSLNQESNPYFDSDSSFLTSRAEQTDRYHRHLRLPYPDGLAEMMMMQNGFVMGGVLSSFDQFRDMRLNVDNMTYEQLLELGERIGHVNTGLNEKQIKSCLRKVKPLRQDTPVADRKCIICQDEYEAKDEVGELRCGHRFHIDCVKQWLVRKNSCPVCKTMAYNKS

SEQ ID NO: 26586 - protein, 351 aa, Arabidopsis thaliana
  peptide (1)..(351): Ceres Seq. ID no. 12372058
MRLQRPRNHRNLPPISTADEPLIPKPSRVSKSAMSSFFLLPETTKKKPNGTTSFRGLGCTTSASQQVSVPAVIRSSADWDASNFKIKKSKKKNKNKGSSSYNGGSIKILSEASSSSSSVACAAIPDVWCGPGVGFSTDAVVGASNNTVESDPPRRNIPVRRKIDGDKTNSNSNNNQRGGSSSLLPRRSLNQESNPYFDSDSSFLTSRAEQTDRYHRHLRLPYPDGLAEMMMMQNGFVMGGVLSSFDQFRDMRLNVDNMTYEQLLELGERIGHVNTGLNEKQIKSCLRKVKPLRQDTPVADRKCIICQDEYEAKDEVGELRCGHRFHIDCVKQWLVRKNSCPVCKTMAYNKS

SEQ ID NO: 26587 - DNA, 2331 bp, Arabidopsis thaliana
  misc_feature (1)..(2331): Ceres Seq. ID no. 12372162
  misc_feature (1)..(2331): Ortholog of  Ceres SEQ ID NO 14306279 as cited in SEQ ID NO 56860
acataaagattcctagtcttatactctgtctctctctctctctctctttttcacactcacacacaaactaaaccggaatggccaccgccgacgaattctccgacgaagatacatcaccgattgaagaagtccgtttaacggtaacaaacaccgacgatccaacactaccggtttggacattcaggatgtggttcttgggtctaatctcatgttctctcctctctttccttaaccaattcttctcgtaccgaaccgaaccgctcgtaatcactcaaatcacggttcaggtggctacactacctatcggtcatttcttggccaaggtgcttcccaaaacccggtttgggttacccggttgtggatcggcccggttctcgctgaacccgggtccgtttaacatgaaagagcatgttttgatatcgatatttgcgaatgcgggtagtgctttcggatccgggtcggcttatgcggttggtatcatcacaattattaaagctttttatggccggagtatctcttttattgccggctggctcctcatcatcactacacaggtattgggatatggctgggccggtttactgaggaaatatgtggtcgaaccggctcatatgtggtggcctagcactctggttcaagtgtcactgtttagggcattgcatgagaaggacgaccaaaggatgacgagagcaaaattctttgtgatagcattagtctgtagttttggatggtacatagtccctggctatctcttcacaacactcacaagcatctcatgggtttgttgggcatttccaagatcagtcactgctcaacagattggttctggaatgagaggtcttggtcttggagcctttacactagactggaccgcggttgcctctttcttgtttagtccacttatcagccccttcttcgccatcgctaatgttttcatcggttatgttcttttgatctacttcgtcttgcctttagcctattggggatttgattcttataacgctacgaggtttcctatattttcgtcgcatcttttcacatcggttggtaatacatatgatattcctgcgatcgtgaatgataactttgagctcgatttagctaagtatgagcaacaaggaaggattaacttgagcatgttctttgctcttacctatgggcttggtttcgccaccattgcttctacgctcactcatgtagctctcttctatggcaaggaaatttctgagaggtttcgagtttcatacaaaggcaaggaagatatacacactaggttaatgaagagatataaagacataccttcatggtggttttactcaatgttggctgcgacactacttatctctcttgcattatgtgttttcttgaacgatgaggttcaaatgccttggtggggacttgtgttcgcaagcgcgatggctttcgtcttcacactcccgataagcatcataaccgcaacaactaaccaaacaccgggattgaatataataacagagtacgcaatgggactcatttacccgggacgacctatcgcaaacgtatgcttcaaagtctatggatacatgagtatggcacaagcagtctctttcttaaatgacttcaaacttggtcattacatgaagatcccacctagatccatgttcttggttcaattcatcggtacaattcttgccggaacaatcaacataacggtcgcatggtggcagttaaactctatcaaaaacatatgtcaagaggaacttctacctcccaacagtccatggacatgtccgggtgaccgtgttttcttcgatgcatcggtcatttggggattggtcggaccaaaacggatttttggttctcagggaaactatgcggccatgaactggtttttcctcggaggtgcattaggaccagtcatagtgtggtcattgcacaaagcgttcccaaaacgttcttggattccacttgtaaatctccctgttcttctaggagcaaccgcaatgatgccacctgcgaccgcggtgaactacaactcgtggatattggtggggacgatattcaacttgtttgtgttccggtacaggaaaagttggtggcagaggtataactacgttctctcagccgctatggatgccggtgtagctttcatggcggttttgttgtacttctcggtggggatggaggaaaagagtttggactggtggggaacaagaggtgaacattgtgatctagctaaatgtccaaccgctagaggagtaattgttgatggttgtccggttaaataatcttaaaggatccattggtgtgtttcaacaatgtatgatacacaaagtaactaattaagaattt

SEQ ID NO: 26588 - protein, 729 aa, Arabidopsis thaliana
  peptide (1)..(729): Ceres Seq. ID no. 12372163
MATADEFSDEDTSPIEEVRLTVTNTDDPTLPVWTFRMWFLGLISCSLLSFLNQFFSYRTEPLVITQITVQVATLPIGHFLAKVLPKTRFGLPGCGSARFSLNPGPFNMKEHVLISIFANAGSAFGSGSAYAVGIITIIKAFYGRSISFIAGWLLIITTQVLGYGWAGLLRKYVVEPAHMWWPSTLVQVSLFRALHEKDDQRMTRAKFFVIALVCSFGWYIVPGYLFTTLTSISWVCWAFPRSVTAQQIGSGMRGLGLGAFTLDWTAVASFLFSPLISPFFAIANVFIGYVLLIYFVLPLAYWGFDSYNATRFPIFSSHLFTSVGNTYDIPAIVNDNFELDLAKYEQQGRINLSMFFALTYGLGFATIASTLTHVALFYGKEISERFRVSYKGKEDIHTRLMKRYKDIPSWWFYSMLAATLLISLALCVFLNDEVQMPWWGLVFASAMAFVFTLPISIITATTNQTPGLNIITEYAMGLIYPGRPIANVCFKVYGYMSMAQAVSFLNDFKLGHYMKIPPRSMFLVQFIGTILAGTINITVAWWQLNSIKNICQEELLPPNSPWTCPGDRVFFDASVIWGLVGPKRIFGSQGNYAAMNWFFLGGALGPVIVWSLHKAFPKRSWIPLVNLPVLLGATAMMPPATAVNYNSWILVGTIFNLFVFRYRKSWWQRYNYVLSAAMDAGVAFMAVLLYFSVGMEEKSLDWWGTRGEHCDLAKCPTARGVIVDGCPVK

SEQ ID NO: 26589 - protein, 693 aa, Arabidopsis thaliana
  peptide (1)..(693): Ceres Seq. ID no. 12372164
MWFLGLISCSLLSFLNQFFSYRTEPLVITQITVQVATLPIGHFLAKVLPKTRFGLPGCGSARFSLNPGPFNMKEHVLISIFANAGSAFGSGSAYAVGIITIIKAFYGRSISFIAGWLLIITTQVLGYGWAGLLRKYVVEPAHMWWPSTLVQVSLFRALHEKDDQRMTRAKFFVIALVCSFGWYIVPGYLFTTLTSISWVCWAFPRSVTAQQIGSGMRGLGLGAFTLDWTAVASFLFSPLISPFFAIANVFIGYVLLIYFVLPLAYWGFDSYNATRFPIFSSHLFTSVGNTYDIPAIVNDNFELDLAKYEQQGRINLSMFFALTYGLGFATIASTLTHVALFYGKEISERFRVSYKGKEDIHTRLMKRYKDIPSWWFYSMLAATLLISLALCVFLNDEVQMPWWGLVFASAMAFVFTLPISIITATTNQTPGLNIITEYAMGLIYPGRPIANVCFKVYGYMSMAQAVSFLNDFKLGHYMKIPPRSMFLVQFIGTILAGTINITVAWWQLNSIKNICQEELLPPNSPWTCPGDRVFFDASVIWGLVGPKRIFGSQGNYAAMNWFFLGGALGPVIVWSLHKAFPKRSWIPLVNLPVLLGATAMMPPATAVNYNSWILVGTIFNLFVFRYRKSWWQRYNYVLSAAMDAGVAFMAVLLYFSVGMEEKSLDWWGTRGEHCDLAKCPTARGVIVDGCPVK

SEQ ID NO: 26590 - protein, 622 aa, Arabidopsis thaliana
  peptide (1)..(622): Ceres Seq. ID no. 12372165
MKEHVLISIFANAGSAFGSGSAYAVGIITIIKAFYGRSISFIAGWLLIITTQVLGYGWAGLLRKYVVEPAHMWWPSTLVQVSLFRALHEKDDQRMTRAKFFVIALVCSFGWYIVPGYLFTTLTSISWVCWAFPRSVTAQQIGSGMRGLGLGAFTLDWTAVASFLFSPLISPFFAIANVFIGYVLLIYFVLPLAYWGFDSYNATRFPIFSSHLFTSVGNTYDIPAIVNDNFELDLAKYEQQGRINLSMFFALTYGLGFATIASTLTHVALFYGKEISERFRVSYKGKEDIHTRLMKRYKDIPSWWFYSMLAATLLISLALCVFLNDEVQMPWWGLVFASAMAFVFTLPISIITATTNQTPGLNIITEYAMGLIYPGRPIANVCFKVYGYMSMAQAVSFLNDFKLGHYMKIPPRSMFLVQFIGTILAGTINITVAWWQLNSIKNICQEELLPPNSPWTCPGDRVFFDASVIWGLVGPKRIFGSQGNYAAMNWFFLGGALGPVIVWSLHKAFPKRSWIPLVNLPVLLGATAMMPPATAVNYNSWILVGTIFNLFVFRYRKSWWQRYNYVLSAAMDAGVAFMAVLLYFSVGMEEKSLDWWGTRGEHCDLAKCPTARGVIVDGCPVK

SEQ ID NO: 26591 - DNA, 1101 bp, Arabidopsis thaliana
  misc_feature (1)..(1101): Ceres Seq. ID no. 12423040
  misc_feature (1)..(1101): Ortholog of  Ceres SEQ ID NO 13656436 as cited in SEQ ID NO 69154
aacttgttttcttcagcgagcgacattttggaaggaagcattccattagcttttttgctgtctccagaaaataaattttcaatctttcgtcggaaaaaagaagaagaagaagcagagctgggtttagttttttcacgagaagcaaagagatcaataagtcagtgagcttttttctcgtttctgacgatggcggttgcgccggcaagagctcgttcagactatgattacctcatcaagcttcttctcatcggcgatagcggtgtggggaagagttgtttgttacttcgattctcagatgatactttcactacaagtttcattactaccattggtattgacttcaagataagaactgttgaacttgatgggaagcgtatcaaattgcagatttgggacactgctggtcaagaacgtttcagaactatcactacagcgtattacaggggagcgatgggtatattgcttgtctacgatgtaacggatgagtcatcttttaacaatattaggaactggatgaagaacattgagcaacatgcctcagataatgtcaacaaaatattggttggtaacaaagctgatatggatgaaagcaaaagggctgttccaacagcaaagggccaagctttggctgatgagtatggaatcaaattctttgagacgagtgcaaaaacaaacctcaatgtcgaaaatgttttcatgtcaatcgcaaaagacataaaacaaagattgacagaaaccgacacgaaggcagagccccaaggcatcaagatcactaaacaagatactgccgcatcgtcttctacagccgagaagtcagcttgctgtagttacgtttaggagtatgattgctctttttcgcctgcaccgggttttttaaatatctggccatctttttcatctcttacgtctcaaatcagagataattctcatgttgttacctagaacgagtaggaaatctcattgatggttgtgatctttatgtctaatttgttatctccataattcctgtacaatgatcttcctgatatggaagactatgttggtcaaaaaactatgtgaaaaagactttgaatttataaaaatgaaactgttgtagtgtgc

SEQ ID NO: 26592 - protein, 216 aa, Arabidopsis thaliana
  peptide (1)..(216): Ceres Seq. ID no. 12423041
MAVAPARARSDYDYLIKLLLIGDSGVGKSCLLLRFSDDTFTTSFITTIGIDFKIRTVELDGKRIKLQIWDTAGQERFRTITTAYYRGAMGILLVYDVTDESSFNNIRNWMKNIEQHASDNVNKILVGNKADMDESKRAVPTAKGQALADEYGIKFFETSAKTNLNVENVFMSIAKDIKQRLTETDTKAEPQGIKITKQDTAASSSTAEKSACCSYV

SEQ ID NO: 26593 - protein, 128 aa, Arabidopsis thaliana
  peptide (1)..(128): Ceres Seq. ID no. 12423042
MGILLVYDVTDESSFNNIRNWMKNIEQHASDNVNKILVGNKADMDESKRAVPTAKGQALADEYGIKFFETSAKTNLNVENVFMSIAKDIKQRLTETDTKAEPQGIKITKQDTAASSSTAEKSACCSYV

SEQ ID NO: 26594 - DNA, 943 bp, Arabidopsis thaliana
  misc_feature (1)..(943): Ceres Seq. ID no. 13500307
  misc_feature (1)..(943): Ortholog of  Ceres SEQ ID NO 14301423 as cited in SEQ ID NO 52204
  misc_feature (1)..(943): Ortholog of  Ceres SEQ ID NO 12621037 as cited in SEQ ID NO 66448
  misc_feature (1)..(943): Ortholog of  Ceres SEQ ID NO 12635639 as cited in SEQ ID NO 0
  misc_feature (1)..(943): Ortholog of  Ceres SEQ ID NO 14305144 as cited in SEQ ID NO 0
gaaaatcacaaagcaagtcgcgtacaatgggttctgcattcgatccccttgtcacggccactgaggatctcgccgccgtcaactcggcgccgccactctcaaacctcacgcaagaagaactcaagaaaatcgccgcttataaagccgtcgaattcgtcgaatctggaatggttatcggtctcggcactggctccaccgcgaaacacgccgtggctcgtatcagcgagcttctccgagaaggaaaactcaaggatataatcggaatccctacttcaaccacaacgcatgagcaagcggtgtctctagggataccattatccgatctagattcgcatccggtggtggatctatcaatcgatggcgccgacgaagtcgatccggctcttaatctggtgaaaggacgcggcggatcgttattgagagagaagatgattgaaggagcatctaagaagttcgttgtgattgttgatgaatcgaagcttgtcaagtatatcggaggaagcggactcgctgttccggtggaggttgttccgttctgctgcgatttcacaagggggaaactggaagagctatttagagattcgggatgtgttgcgaagctgaggatgaaaatcggatctaacggcgaagaggcggcgccggctgtgacggataataggaattatgtggtggatttgtatttggagagagatattggagatttagaggtggcgagtgaggcgatattgaggtttcctggagtagtggagcatgggatgtttctgggaatggcgactacgttgatcgtcgccggcaaatttggtgttaccgtcaaggataggtttggataaaagtgtcatttgaaaaccattagggtttatggtttgattttgattttcgatggattctctctggttctgtaaaccctttcctcctattggtttaaaactttgacttatttttc

SEQ ID NO: 26595 - protein, 275 aa, Arabidopsis thaliana
  peptide (1)..(275): Ceres Seq. ID no. 13500308
KSQSKSRTMGSAFDPLVTATEDLAAVNSAPPLSNLTQEELKKIAAYKAVEFVESGMVIGLGTGSTAKHAVARISELLREGKLKDIIGIPTSTTTHEQAVSLGIPLSDLDSHPVVDLSIDGADEVDPALNLVKGRGGSLLREKMIEGASKKFVVIVDESKLVKYIGGSGLAVPVEVVPFCCDFTRGKLEELFRDSGCVAKLRMKIGSNGEEAAPAVTDNRNYVVDLYLERDIGDLEVASEAILRFPGVVEHGMFLGMATTLIVAGKFGVTVKDRFG

SEQ ID NO: 26596 - protein, 267 aa, Arabidopsis thaliana
  peptide (1)..(267): Ceres Seq. ID no. 13500309
MGSAFDPLVTATEDLAAVNSAPPLSNLTQEELKKIAAYKAVEFVESGMVIGLGTGSTAKHAVARISELLREGKLKDIIGIPTSTTTHEQAVSLGIPLSDLDSHPVVDLSIDGADEVDPALNLVKGRGGSLLREKMIEGASKKFVVIVDESKLVKYIGGSGLAVPVEVVPFCCDFTRGKLEELFRDSGCVAKLRMKIGSNGEEAAPAVTDNRNYVVDLYLERDIGDLEVASEAILRFPGVVEHGMFLGMATTLIVAGKFGVTVKDRFG

SEQ ID NO: 26597 - protein, 220 aa, Arabidopsis thaliana
  peptide (1)..(220): Ceres Seq. ID no. 13500310
MVIGLGTGSTAKHAVARISELLREGKLKDIIGIPTSTTTHEQAVSLGIPLSDLDSHPVVDLSIDGADEVDPALNLVKGRGGSLLREKMIEGASKKFVVIVDESKLVKYIGGSGLAVPVEVVPFCCDFTRGKLEELFRDSGCVAKLRMKIGSNGEEAAPAVTDNRNYVVDLYLERDIGDLEVASEAILRFPGVVEHGMFLGMATTLIVAGKFGVTVKDRFG

SEQ ID NO: 26598 - DNA, 2668 bp, Arabidopsis thaliana
  misc_feature (1)..(2668): Ceres Seq. ID no. 13500222
  misc_feature (1)..(2668): Ortholog of  Ceres SEQ ID NO 15177561 as cited in SEQ ID NO 53065
  misc_feature (1)..(2668): Ortholog of  Ceres SEQ ID NO 13595521 as cited in SEQ ID NO 59840
atccttttagattactttcctcttttttttttttttttttttctttcgcgtgtgattattaactcgaggtaatttctctaatcccagttaatatcacacgcggaatatcaaagatctgattttttgtaaacattgtaccaaaatcatcagaagattataagtggagtctttcgaagaagaacaaatttgtaacacgcgtctccatcaatcttctagctggcaatgagatccattctttagcttctttcttctctgttttttcttttttgaagaaaaaaaaaatggcaccaaagtttgaatggtgggctaaaggaaacaacaacaacactcgtaaaggaacaccagtcgttgtcaaaatggaaaaccctaataactggtcaatggtggaacttgaatcaccttctcatgacgatttcctcgtaagaactcatgagaaatctcgtaacaagaacgcaagacagctcacttgggttctacttctcaaagctcatcgtgccgcaggttgtctcacttctctcggttctgcattattcgctctcggcaccgccgtgcgccgccgtatcgccgccggccgtacagacattgaaatctcctcctcgggagtgggttcattacagaagcaaaaccatacgaagaaatcgaaacttttctactcttgcttaaaggtgtttctatggctttctttaatccttttgggttttgagattgctgcttatttcaaaggttggagctttggaacttctaagcttcagcttcagtttatcttcaataaagggttctttgattgggtttacacgagatgggttttgcttcgtgttgagtatcttgctcctcctcttcagtttcttgctaatggctgcattgttctgtttcttgttcagagtcttgatagactcattctttgtcttggttgtttttggatccggtttaagaagattaaaccggttcctaaaccggattctatctctgatcttgaatctggtgataatggtgctttcctccctatggttcttgttcaaatccctatgtgtaatgagaaagaggtttatcagcaatctattgcagctgtgtgtaacttagactggcctaaagggaagattttgattcaaattctcgatgattcggatgatccgataacgcagagtttgattaaagaagaggttcataaatggcagaagctaggtgcacgcattgtgtatcgtcaccgtgttaatagagaaggttacaaagctggtaatcttaagtctgctatgaactgtagttatgttaaagactacgaattcgttgcgattttcgacgcagattttcaacctctacctgatttcctcaagaagaccattcctcattttaaggacaatgaggaaataggattggttcaagctaggtggtcttttgtgaataaggaagagaacttgttgacaagattacagaatattaacttggcttttcactttgaggttgagcaacaagtgaatagtgtcttcttgaatttcttcgggtttaacgggacagccggtgtgtggaggatcaaagctttggaagattccggtggttggctcgagagaactaccgtcgaggatatggacattgcggttcgtgctcaccttcacggatggaaattcgttttcctaaatgacgttgagtgccaatgtgaattaccggaatcgtatgaagcttatagaaaacagcaacatagatggcattcaggtcctatgcaactatttcgtctttgtttgcccgcggtcattaaatcaaagataagcataggaaagaaattcaatttgatattcctcttctttctcctgaggaagctaatcttgccattctactcattcactctcttttgtattatcctgccaatgactatgtttgtacccgaagctgagcttcccgcttgggttgtttgctacatacctgccacaatgtctttcctcaacatccttcccgccccgaagtcgtttccgtttatcgtcccgtaccttctctttgagaacacaatgtctgtgactaagttcaacgcaatggtctcgggtttgtttcagctaggaagtgcttatgaatgggttgttacaaaaaaatcaggacggtcatcagaaggagatcttgctgcgttagtcgaaaaagacgaaaagacaactaaacatcagagaggtgtgtctgcacccgaaaccgaagccgagaaaaaggcggaaaagactaagaggaagaagaagaagcacaataggatttatatgaaggagctatctctagcgtttctgttactgaccgcggcaactcgaagtcttttatcggcgcaaggaatccatttctacttccttttgtttcaaggaatatctttcttacttgtgggtctagatcttattggagaacaagttgaatgacactcaaagagattgaagtagtgcttgtagaagagacgttgtagaagacgggaaacatgaagagaaaaaggaagagggtctggacccaaaaaaatacaatacaacattgaacatagatcggtttcattgaggaaggacatggattaactctgttggtagtgaatgtgtaaggttttaacttttctctcttttgggtttgcccacagttgtttattctttcgattaaatggggacaactcttttgtaagaaagttttgttcaattatgaaagcaaattgttttagctc

SEQ ID NO: 26599 - protein, 699 aa, Arabidopsis thaliana
  peptide (1)..(699): Ceres Seq. ID no. 13500223
MAPKFEWWAKGNNNNTRKGTPVVVKMENPNNWSMVELESPSHDDFLVRTHEKSRNKNARQLTWVLLLKAHRAAGCLTSLGSALFALGTAVRRRIAAGRTDIEISSSGVGSLQKQNHTKKSKLFYSCLKVFLWLSLILLGFEIAAYFKGWSFGTSKLQLQFIFNKGFFDWVYTRWVLLRVEYLAPPLQFLANGCIVLFLVQSLDRLILCLGCFWIRFKKIKPVPKPDSISDLESGDNGAFLPMVLVQIPMCNEKEVYQQSIAAVCNLDWPKGKILIQILDDSDDPITQSLIKEEVHKWQKLGARIVYRHRVNREGYKAGNLKSAMNCSYVKDYEFVAIFDADFQPLPDFLKKTIPHFKDNEEIGLVQARWSFVNKEENLLTRLQNINLAFHFEVEQQVNSVFLNFFGFNGTAGVWRIKALEDSGGWLERTTVEDMDIAVRAHLHGWKFVFLNDVECQCELPESYEAYRKQQHRWHSGPMQLFRLCLPAVIKSKISIGKKFNLIFLFFLLRKLILPFYSFTLFCIILPMTMFVPEAELPAWVVCYIPATMSFLNILPAPKSFPFIVPYLLFENTMSVTKFNAMVSGLFQLGSAYEWVVTKKSGRSSEGDLAALVEKDEKTTKHQRGVSAPETEAEKKAEKTKRKKKKHNRIYMKELSLAFLLLTAATRSLLSAQGIHFYFLLFQGISFLLVGLDLIGEQVE

SEQ ID NO: 26600 - protein, 674 aa, Arabidopsis thaliana
  peptide (1)..(674): Ceres Seq. ID no. 13500224
MENPNNWSMVELESPSHDDFLVRTHEKSRNKNARQLTWVLLLKAHRAAGCLTSLGSALFALGTAVRRRIAAGRTDIEISSSGVGSLQKQNHTKKSKLFYSCLKVFLWLSLILLGFEIAAYFKGWSFGTSKLQLQFIFNKGFFDWVYTRWVLLRVEYLAPPLQFLANGCIVLFLVQSLDRLILCLGCFWIRFKKIKPVPKPDSISDLESGDNGAFLPMVLVQIPMCNEKEVYQQSIAAVCNLDWPKGKILIQILDDSDDPITQSLIKEEVHKWQKLGARIVYRHRVNREGYKAGNLKSAMNCSYVKDYEFVAIFDADFQPLPDFLKKTIPHFKDNEEIGLVQARWSFVNKEENLLTRLQNINLAFHFEVEQQVNSVFLNFFGFNGTAGVWRIKALEDSGGWLERTTVEDMDIAVRAHLHGWKFVFLNDVECQCELPESYEAYRKQQHRWHSGPMQLFRLCLPAVIKSKISIGKKFNLIFLFFLLRKLILPFYSFTLFCIILPMTMFVPEAELPAWVVCYIPATMSFLNILPAPKSFPFIVPYLLFENTMSVTKFNAMVSGLFQLGSAYEWVVTKKSGRSSEGDLAALVEKDEKTTKHQRGVSAPETEAEKKAEKTKRKKKKHNRIYMKELSLAFLLLTAATRSLLSAQGIHFYFLLFQGISFLLVGLDLIGEQVE

SEQ ID NO: 26601 - protein, 666 aa, Arabidopsis thaliana
  peptide (1)..(666): Ceres Seq. ID no. 13500225
MVELESPSHDDFLVRTHEKSRNKNARQLTWVLLLKAHRAAGCLTSLGSALFALGTAVRRRIAAGRTDIEISSSGVGSLQKQNHTKKSKLFYSCLKVFLWLSLILLGFEIAAYFKGWSFGTSKLQLQFIFNKGFFDWVYTRWVLLRVEYLAPPLQFLANGCIVLFLVQSLDRLILCLGCFWIRFKKIKPVPKPDSISDLESGDNGAFLPMVLVQIPMCNEKEVYQQSIAAVCNLDWPKGKILIQILDDSDDPITQSLIKEEVHKWQKLGARIVYRHRVNREGYKAGNLKSAMNCSYVKDYEFVAIFDADFQPLPDFLKKTIPHFKDNEEIGLVQARWSFVNKEENLLTRLQNINLAFHFEVEQQVNSVFLNFFGFNGTAGVWRIKALEDSGGWLERTTVEDMDIAVRAHLHGWKFVFLNDVECQCELPESYEAYRKQQHRWHSGPMQLFRLCLPAVIKSKISIGKKFNLIFLFFLLRKLILPFYSFTLFCIILPMTMFVPEAELPAWVVCYIPATMSFLNILPAPKSFPFIVPYLLFENTMSVTKFNAMVSGLFQLGSAYEWVVTKKSGRSSEGDLAALVEKDEKTTKHQRGVSAPETEAEKKAEKTKRKKKKHNRIYMKELSLAFLLLTAATRSLLSAQGIHFYFLLFQGISFLLVGLDLIGEQVE

SEQ ID NO: 26602 - DNA, 750 bp, Arabidopsis thaliana
  misc_feature (1)..(750): Ceres Seq. ID no. 12321126
  misc_feature (1)..(750): Ortholog of  Ceres SEQ ID NO 12624284 as cited in SEQ ID NO 61595
  misc_feature (1)..(750): Ortholog of  Ceres SEQ ID NO 15225557 as cited in SEQ ID NO 0
ctcccacttcttctcctctctctctactccaagttttcagaatgacattcttcatcgaagacactagtctcatcatcagccacgttctctacaaaacggcacttatcatcaccgttttacgatggatctttgcatggatcctccgttaccgctcaagatcatcatcatcatcatcatcatcatctcaatcgtcctcttctccttctatttcatcacaaaccatcaaagaaagcctagccgtgttcgctttccgcgacgcggtggagagatctcccgcggcgataaacgacatgtgtgccgtgtgtctaggagatcttgaagacgaggacgaaatcagagagcttaggaactgtactcacgtgtttcatcgtgattgtattgaccgatggctagattatgaatgttgcggcggtgatgatgataaccaccgtacttgtccgctatgtcgaacgccgttgcttccatctttcactgattattcaaccgttactcaaactagttgggctgttgaacgacttctttacctcttcggcgacgatcttcttccctgacttttatttttcttttagaaaacatttgatttcatattttttttatgaatattgtaattggtagaggggtagaataggaaatataagagtgattgatcgcaattatacgaaatcgaatcaatttgatttgattgtatatacaaatgttaaactgtattaattctcctcttcagataaatgtctaacattttttattatt

SEQ ID NO: 26603 - protein, 182 aa, Arabidopsis thaliana
  peptide (1)..(182): Ceres Seq. ID no. 12321127
PTSSPLSLLQVFRMTFFIEDTSLIISHVLYKTALIITVLRWIFAWILRYRSRSSSSSSSSSQSSSSPSISSQTIKESLAVFAFRDAVERSPAAINDMCAVCLGDLEDEDEIRELRNCTHVFHRDCIDRWLDYECCGGDDDNHRTCPLCRTPLLPSFTDYSTVTQTSWAVERLLYLFGDDLLP

SEQ ID NO: 26604 - protein, 169 aa, Arabidopsis thaliana
  peptide (1)..(169): Ceres Seq. ID no. 12321128
MTFFIEDTSLIISHVLYKTALIITVLRWIFAWILRYRSRSSSSSSSSSQSSSSPSISSQTIKESLAVFAFRDAVERSPAAINDMCAVCLGDLEDEDEIRELRNCTHVFHRDCIDRWLDYECCGGDDDNHRTCPLCRTPLLPSFTDYSTVTQTSWAVERLLYLFGDDLLP

SEQ ID NO: 26605 - DNA, 1204 bp, Arabidopsis thaliana
  misc_feature (1)..(1204): Ceres Seq. ID no. 12371447
  misc_feature (1)..(1204): Ortholog of  Ceres SEQ ID NO 12613953 as cited in SEQ ID NO 68388
atttttgccctctcccatttttgtcgccgaaaccctaaatctcgacctcaaaccctgaaccatggctgaaggactcgtgttgaaaggcacaatgtgtgcccacactgatatggtcaccgccattgctacaccggtcgataactccgacgtgattgtaacttcgtcgcgtgacaaatcaatcatcctctggaaactcacaaaggaagacaagtcatacggtgttgctcagcggaggatgactggtcactctcacttcgttcaagacgttgttctctcctccgatggacaattcgctctctccggatcttgggacggtgagcttcgtctctgggatctcgctaccggagaatctactcgtcgtttcgttggtcacacgaaagatgttctctctgttgctttctctaccgataaccgtcagatcgtctctgcttctcgtgatcgtacgattaagctttggaacacgcttggtgagtgtaagtataccatctctgaagctgatggtcacaaggaatgggttagttgtgttaggtttagtcctaatactcttgtgccaactattgtatctgcttcttgggataaaactgtgaaggtctggaatcttcagaattgtaagcttaggaacactcttgctggtcactctggttacttgaacactgtggctgtgtcacctgatggttcgttgtgtgccagtggtggcaaagatggtgtgatcttgctttgggatttggctgaagggaagaagttgtattctcttgaagctggctctattattcattcactttgcttcagtcccaataggtactggttgtgtgcagcaacagagaatagcattaggatttgggatctcgagagtaagtctgttgttgaggatttgaaggttgatcttaaggctgaggctgaaaagactgatggttctactggaatcggaaacaagaccaaggtgatctactgcacaagcttgaactggagtgcagatggaaacactttgttcagtggatacactgatggagttatcagggtttggggtattggtcgttactagagagacaagaagtttctttattctctccaaatttttccatcgactctaaagtcttctcttctgaattagtgttttgaggatttattttttgttcttttctattttcagaatccacaaatgtgatattttgatacattgattttgtttcatatttgttttctt

SEQ ID NO: 26606 - protein, 326 aa, Arabidopsis thaliana [sequence omitted]

SEQ ID NO: 26607 - protein, 316 aa, Arabidopsis thaliana
  peptide (1)..(316): Ceres Seq. ID no. 12371449
MCAHTDMVTAIATPVDNSDVIVTSSRDKSIILWKLTKEDKSYGVAQRRMTGHSHFVQDVVLSSDGQFALSGSWDGELRLWDLATGESTRRFVGHTKDVLSVAFSTDNRQIVSASRDRTIKLWNTLGECKYTISEADGHKEWVSCVRFSPNTLVPTIVSASWDKTVKVWNLQNCKLRNTLAGHSGYLNTVAVSPDGSLCASGGKDGVILLWDLAEGKKLYSLEAGSIIHSLCFSPNRYWLCAATENSIRIWDLESKSVVEDLKVDLKAEAEKTDGSTGIGNKTKVIYCTSLNWSADGNTLFSGYTDGVIRVWGIGRY

SEQ ID NO: 26608 - protein, 310 aa, Arabidopsis thaliana
  peptide (1)..(310): Ceres Seq. ID no. 12371450
MVTAIATPVDNSDVIVTSSRDKSIILWKLTKEDKSYGVAQRRMTGHSHFVQDVVLSSDGQFALSGSWDGELRLWDLATGESTRRFVGHTKDVLSVAFSTDNRQIVSASRDRTIKLWNTLGECKYTISEADGHKEWVSCVRFSPNTLVPTIVSASWDKTVKVWNLQNCKLRNTLAGHSGYLNTVAVSPDGSLCASGGKDGVILLWDLAEGKKLYSLEAGSIIHSLCFSPNRYWLCAATENSIRIWDLESKSVVEDLKVDLKAEAEKTDGSTGIGNKTKVIYCTSLNWSADGNTLFSGYTDGVIRVWGIGRY

SEQ ID NO: 26609 - DNA, 2145 bp, Arabidopsis thaliana
  misc_feature (1)..(2145): Ceres Seq. ID no. 13491465
  misc_feature (1)..(2145): Ortholog of  Ceres SEQ ID NO 14313943 as cited in SEQ ID NO 54725
gagccgctgagaatttggtccccttggcacgtataaaccctagcagagacattaaaccctgaaagtaattagggatcactgttctccggctccggcgaaaaaatccctcgaaatcgatcctaacctcaattgattgaaggaagttatgtattcgctttcgaggattctccaaaggagtcaaagatataactttgcaccttcttcgtttggtgcggtcagtaaattagaagtatcaagtggtggtgataaagaacgggtctttaaatcatttggattgatttatagcaaacctcaaggtttagtcagactttattccgcaagagatgtgttttcacggttctttggcatccacaagctttcttctatagctgatgctaaagataaaggagatgaggtagttagggaagaggagctgtctgaatcagaggaggcggttcctgtttctggggatgtaccagagggagttgttgatgatgattctttgttcgagcctgaacttggtagtgacaatgatgatcttgaaattgaagagaagcattcgaaagatggtgggaaaccaactaagaaaagaggtcaatctgagctgtacgaatccattgttgcttataaatcagtgaaacatgttcttgaaaaatgggtcaaagaaggaaaagatttgagtcaagctgaggttactcttgctatacacaatctgcgtaaacgcaaatcctatgctatgtgtttgcagttgtgggagtggttgggagctaatacgcagtttgagttcacagaggcaaattatgcttctcagttggatttggtggccaaggtacatagtttacaaaaagctgaaatctttttgaaagatattccagaatcttctaggggagaagtagtatacagaaccctgctggcaaattgtgtacttaagcatcatgtaaataaagctgaagacattttcaacaaaatgaaagagctaaaatttccaacaagtgtgtttgcttgcaaccagctgcttctcctctacagtatgcatgatagaaagaagataagtgatgttttgttgctaatggagagagaaaacatcaagccgagtcgtgctacctatcattttttaatcaatagtaaaggtttagccggagacataactggaatggagaagatcgtggagacaattaaggaagaaggcatcgaactagatcctgaactgcagtctattctggctaagtactacataagagcggggcttaaagaaagagcacaagaccttatgaaggagatagaagggaaaggtttgcaacaaactccatgggtgtgccggtcattactcccactttatgcagacataggagacagtgacaatgtgagaagactgagtaggtttgttgatcaaaatccgagatacgataattgcatttctgccattaaagcatggggaaagctgaaggaagtcgaagaagcagaggcagtgtttgagagacttgtggagaaatacaaaattttccctatgatgccatattttgccctcatggagatatacacagagaacaagatgctagcaaaaggcagagatctggttaaaagaatgggaaatgcagggattgcgattgggccgtcgacatggcacgcgcttgtgaagctatacatcaaagcaggagaagttggaaaagctgagttgatattgaacagagctacaaaggataataagatgagacctatgttcactacttacatggcgattcttgaagaatatgcaaaaagaggcgatgttcataacacagagaaggtattcatgaaaatgaaaagggcaagctatgcagctcagcttatgcagtatgaaaccgtgctcctggcttatatcaacgccaaaactcctgcttacgggatgattgagaggatgaaggcagacaatgtgttcccgaacaagagtctagctgcgaaactggctcaggttaatccgtttaaaaagtgtccagtgtctgttttacttgacatataacgataatcatcttatgtattgagctgttaagtgtttgttctggttgcttccaagctaggaaataataaacagaggattcgtttttcttccaaagtttctcatttttgagtttgtgttcctgtggttttttgtaagtgacataaactggaataaaattgaactggatt

SEQ ID NO: 26610 - protein, 610 aa, Arabidopsis thaliana
  peptide (1)..(610): Ceres Seq. ID no. 13491466
MYSLSRILQRSQRYNFAPSSFGAVSKLEVSSGGDKERVFKSFGLIYSKPQGLVRLYSARDVFSRFFGIHKLSSIADAKDKGDEVVREEELSESEEAVPVSGDVPEGVVDDDSLFEPELGSDNDDLEIEEKHSKDGGKPTKKRGQSELYESIVAYKSVKHVLEKWVKEGKDLSQAEVTLAIHNLRKRKSYAMCLQLWEWLGANTQFEFTEANYASQLDLVAKVHSLQKAEIFLKDIPESSRGEVVYRTLLANCVLKHHVNKAEDIFNKMKELKFPTSVFACNQLLLLYSMHDRKKISDVLLLMERENIKPSRATYHFLINSKGLAGDITGMEKIVETIKEEGIELDPELQSILAKYYIRAGLKERAQDLMKEIEGKGLQQTPWVCRSLLPLYADIGDSDNVRRLSRFVDQNPRYDNCISAIKAWGKLKEVEEAEAVFERLVEKYKIFPMMPYFALMEIYTENKMLAKGRDLVKRMGNAGIAIGPSTWHALVKLYIKAGEVGKAELILNRATKDNKMRPMFTTYMAILEEYAKRGDVHNTEKVFMKMKRASYAAQLMQYETVLLAYINAKTPAYGMIERMKADNVFPNKSLAAKLAQVNPFKKCPVSVLLDI

SEQ ID NO: 26611 - protein, 420 aa, Arabidopsis thaliana
  peptide (1)..(420): Ceres Seq. ID no. 13491467
MCLQLWEWLGANTQFEFTEANYASQLDLVAKVHSLQKAEIFLKDIPESSRGEVVYRTLLANCVLKHHVNKAEDIFNKMKELKFPTSVFACNQLLLLYSMHDRKKISDVLLLMERENIKPSRATYHFLINSKGLAGDITGMEKIVETIKEEGIELDPELQSILAKYYIRAGLKERAQDLMKEIEGKGLQQTPWVCRSLLPLYADIGDSDNVRRLSRFVDQNPRYDNCISAIKAWGKLKEVEEAEAVFERLVEKYKIFPMMPYFALMEIYTENKMLAKGRDLVKRMGNAGIAIGPSTWHALVKLYIKAGEVGKAELILNRATKDNKMRPMFTTYMAILEEYAKRGDVHNTEKVFMKMKRASYAAQLMQYETVLLAYINAKTPAYGMIERMKADNVFPNKSLAAKLAQVNPFKKCPVSVLLDI

SEQ ID NO: 26612 - protein, 343 aa, Arabidopsis thaliana
  peptide (1)..(343): Ceres Seq. ID no. 13491468
MKELKFPTSVFACNQLLLLYSMHDRKKISDVLLLMERENIKPSRATYHFLINSKGLAGDITGMEKIVETIKEEGIELDPELQSILAKYYIRAGLKERAQDLMKEIEGKGLQQTPWVCRSLLPLYADIGDSDNVRRLSRFVDQNPRYDNCISAIKAWGKLKEVEEAEAVFERLVEKYKIFPMMPYFALMEIYTENKMLAKGRDLVKRMGNAGIAIGPSTWHALVKLYIKAGEVGKAELILNRATKDNKMRPMFTTYMAILEEYAKRGDVHNTEKVFMKMKRASYAAQLMQYETVLLAYINAKTPAYGMIERMKADNVFPNKSLAAKLAQVNPFKKCPVSVLLDI

SEQ ID NO: 26613 - DNA, 1228 bp, Arabidopsis thaliana
  misc_feature (1)..(1228): Ceres Seq. ID no. 12370721
  misc_feature (1)..(1228): Ortholog of  Ceres SEQ ID NO 15168496 as cited in SEQ ID NO 60266
  misc_feature (1)..(1228): Ortholog of  Ceres SEQ ID NO 14303528 as cited in SEQ ID NO 69188
aggagagaaaggtcttcttcggaagcaagctaagtcatggcaacgatttcgtcaactctactcttaaattcttctagatcagctttaccactaagattcccaaaattctcgggattttcttcttcctctccattcgctagatcttacagatttggacgacgtaatctggaaccactttccaacggaatgctttcgtcgggaagtagagccgacggtgctacggcggcggctgcatcgatggaaggagtgatgacggaggcgatgaaactgattcaatcggcgtcaccaacttggaaatcagctgtggctaacaatttattgatttttgttctcggttcaccgcttcttgttaccggattgtccgcttctgggatcgccgccgcgtttttgcttggtactttaacttggagagcttatggctctgctggtttcctcttagtcgctgcttacttcgtcataggaacagcggcaacgaaggttaaaatgacgcaaaaggaagcacaaggtgtggccgaaaagagaaagggtagaagaggaccacgcagtgtgattggttcaagtgctgctggttgtgtctgtgcttttctttcaatatatcaagtgggaggagcagctttttcccagcttttccggcttggttttgtttccagtttctgcactaaagtatctgacactgtctcgagcgagataggcaaagcttatggaaaaacaacgtatttagctacgacatttaagattgtaccaagaggaacagagggagctatgagtcttgaaggaacattggctggacttttagcatcattttttcttgcatctgttggctgcttcctgggtcagataactcctccagaagcagctgtatgtgtactagcttcccagattgccaatcttggagagagcataataggtgcttcttttcaagacaaagaaggattcaaatggctaaacaatgatgtagtcaacgtgatcaacataagcttgggaagcattgtggcgattttgatgcaacagtttatactccagaactgggtcaagtaaaacctgccacgaaggtcatgtattctcagtgaggttagattctttttttatattgttaaacacagccttacgtattcagtggtgttataaattatactctgttgtgtacaactagtagtccaacatcaatgaggggaaaaaacttctgggaccattgtctagcaattattggatgatatttatgtgaatt

SEQ ID NO: 26614 - protein, 333 aa, Arabidopsis thaliana
  peptide (1)..(333): Ceres Seq. ID no. 12370722
MATISSTLLLNSSRSALPLRFPKFSGFSSSSPFARSYRFGRRNLEPLSNGMLSSGSRADGATAAAASMEGVMTEAMKLIQSASPTWKSAVANNLLIFVLGSPLLVTGLSASGIAAAFLLGTLTWRAYGSAGFLLVAAYFVIGTAATKVKMTQKEAQGVAEKRKGRRGPRSVIGSSAAGCVCAFLSIYQVGGAAFSQLFRLGFVSSFCTKVSDTVSSEIGKAYGKTTYLATTFKIVPRGTEGAMSLEGTLAGLLASFFLASVGCFLGQITPPEAAVCVLASQIANLGESIIGASFQDKEGFKWLNNDVVNVINISLGSIVAILMQQFILQNWVK

SEQ ID NO: 26615 - protein, 283 aa, Arabidopsis thaliana
  peptide (1)..(283): Ceres Seq. ID no. 12370723
MLSSGSRADGATAAAASMEGVMTEAMKLIQSASPTWKSAVANNLLIFVLGSPLLVTGLSASGIAAAFLLGTLTWRAYGSAGFLLVAAYFVIGTAATKVKMTQKEAQGVAEKRKGRRGPRSVIGSSAAGCVCAFLSIYQVGGAAFSQLFRLGFVSSFCTKVSDTVSSEIGKAYGKTTYLATTFKIVPRGTEGAMSLEGTLAGLLASFFLASVGCFLGQITPPEAAVCVLASQIANLGESIIGASFQDKEGFKWLNNDVVNVINISLGSIVAILMQQFILQNWVK

SEQ ID NO: 26616 - protein, 266 aa, Arabidopsis thaliana
  peptide (1)..(266): Ceres Seq. ID no. 12370724
MEGVMTEAMKLIQSASPTWKSAVANNLLIFVLGSPLLVTGLSASGIAAAFLLGTLTWRAYGSAGFLLVAAYFVIGTAATKVKMTQKEAQGVAEKRKGRRGPRSVIGSSAAGCVCAFLSIYQVGGAAFSQLFRLGFVSSFCTKVSDTVSSEIGKAYGKTTYLATTFKIVPRGTEGAMSLEGTLAGLLASFFLASVGCFLGQITPPEAAVCVLASQIANLGESIIGASFQDKEGFKWLNNDVVNVINISLGSIVAILMQQFILQNWVK

SEQ ID NO: 26617 - DNA, 1230 bp, Arabidopsis thaliana
  misc_feature (1)..(1230): Ceres Seq. ID no. 13495647
  misc_feature (1)..(1230): Ortholog of  Ceres SEQ ID NO 15171279 as cited in SEQ ID NO 51378
  misc_feature (1)..(1230): Ortholog of  Ceres SEQ ID NO 13596816 as cited in SEQ ID NO 62287
acatatcaatgttaatttgtatataaggagctaagaacaaacccaattaggcaactagcaattgctaaaacacgtaagatctcaaatatgaccacgttattcctccttattgctctattcatcacaaccatcctcaacccaacaagtggagaatcagtaggtgtatgctatggaatgatggggaacaaccttccttctcaatcagacacaatcgctctctttagacaaaacaacatccgacgtgttagactctacgatccaaaccaagccgctttaaacgctcttagaaacacgggtatcgaagtcatcatcggcgttccaaacaccgatcttcgttcactcactaacccttcttccgctagatcatggctccaaaacaacgtcctcaactattaccccgccgttagcttcaagtacatcgccgtaggtaacgaagtatctccgtcgaacggcggtgatgttgtgctccctgccatgcgtaacgtttacgatgctctaagaggtgcaaatcttcaagatcgtattaaagtttctaccgccattgatatgactttgattggaaactctttccctccttcctccggagagtttcgtggtgacgttagatggtatatcgatcccgtcatcgggtttcttacgagtacgaactcagcgttactagccaacatctatccttacttcagctacgttgacaatccacgtgacatatctctctcttacgctctcttcacttctccttccgtcgtcgtatgggacggctctcgtggctaccaaaacctctttgacgctttacttgacgttgtttactctgccgttgaacgctcaggcggtggatctctcccagtggttgtttccgagagcggatggccttctaacggtggaaacgccgcgagtttcgataacgcgcgagctttttacacgaatcttgcgtcgcgtgtgagagagaacagaggaacaccgaagagacctggaagaggagtggaaacgtatttgttcgctatgtttgatgagaatcaaaagagtcctgagatcgagaagaattttggtttgttttttcctaataaacaaccaaaatttccgatcacattctctgccgcgagagacggtacggcggttgagtgatgattttatatgctgagatttatgtgaataattgggagattatcccataaaaggttccaaataaagacaaatttcaaataaaacctgttagtccaagttaaattaagt

SEQ ID NO: 26618 - protein, 344 aa, Arabidopsis thaliana
  peptide (1)..(344): Ceres Seq. ID no. 13495648
MTTLFLLIALFITTILNPTSGESVGVCYGMMGNNLPSQSDTIALFRQNNIRRVRLYDPNQAALNALRNTGIEVIIGVPNTDLRSLTNPSSARSWLQNNVLNYYPAVSFKYIAVGNEVSPSNGGDVVLPAMRNVYDALRGANLQDRIKVSTAIDMTLIGNSFPPSSGEFRGDVRWYIDPVIGFLTSTNSALLANIYPYFSYVDNPRDISLSYALFTSPSVVVWDGSRGYQNLFDALLDVVYSAVERSGGGSLPVVVSESGWPSNGGNAASFDNARAFYTNLASRVRENRGTPKRPGRGVETYLFAMFDENQKSPEIEKNFGLFFPNKQPKFPITFSAARDGTAVE

SEQ ID NO: 26619 - protein, 315 aa, Arabidopsis thaliana
  peptide (1)..(315): Ceres Seq. ID no. 13495649
MMGNNLPSQSDTIALFRQNNIRRVRLYDPNQAALNALRNTGIEVIIGVPNTDLRSLTNPSSARSWLQNNVLNYYPAVSFKYIAVGNEVSPSNGGDVVLPAMRNVYDALRGANLQDRIKVSTAIDMTLIGNSFPPSSGEFRGDVRWYIDPVIGFLTSTNSALLANIYPYFSYVDNPRDISLSYALFTSPSVVVWDGSRGYQNLFDALLDVVYSAVERSGGGSLPVVVSESGWPSNGGNAASFDNARAFYTNLASRVRENRGTPKRPGRGVETYLFAMFDENQKSPEIEKNFGLFFPNKQPKFPITFSAARDGTAVE

SEQ ID NO: 26620 - protein, 314 aa, Arabidopsis thaliana
  peptide (1)..(314): Ceres Seq. ID no. 13495650
MGNNLPSQSDTIALFRQNNIRRVRLYDPNQAALNALRNTGIEVIIGVPNTDLRSLTNPSSARSWLQNNVLNYYPAVSFKYIAVGNEVSPSNGGDVVLPAMRNVYDALRGANLQDRIKVSTAIDMTLIGNSFPPSSGEFRGDVRWYIDPVIGFLTSTNSALLANIYPYFSYVDNPRDISLSYALFTSPSVVVWDGSRGYQNLFDALLDVVYSAVERSGGGSLPVVVSESGWPSNGGNAASFDNARAFYTNLASRVRENRGTPKRPGRGVETYLFAMFDENQKSPEIEKNFGLFFPNKQPKFPITFSAARDGTAVE

SEQ ID NO: 26621 - DNA, 1634 bp, Arabidopsis thaliana
  misc_feature (1)..(1634): Ceres Seq. ID no. 13495783
  misc_feature (1)..(1634): Ortholog of  Ceres SEQ ID NO 13663419 as cited in SEQ ID NO 66561
acccatcttatcattattttataaagatcctatgtctatccgtaaatggactaatctttagacacacagagaatataatgagtttgaaaataaagtttctgcttctgcttgtcttgtatcatcatgttgattctgcctctatcgtcaagtttcttcctggttttgaaggccctcttcctttcgaacttgaaaccgggtacattggtattggtgaggacgagaatgtgcaatttttctactatttcatcaaatctgaaaacaatccaaaagaagatcctcttcttatatggttaaatggaggacctggatgttcttgtcttggtggtattatttttgagaacggaccggtgggtttgaagtttgaggtgttcaacggaagtgctccttctttgttctctactacatattcatggacaaagatggcaaacattatattcttggatcagccagtaggatctggcttctcctactcaaaaactccaattgataaaactggtgacataagtgaagtaaagaggacccatgagtttcttcaaaagtggctaagcaggcatccacaatatttctccaaccctttatatgtagttggagattcttattccggtatgattgtcccggccctcgttcaagaaatctcacaaggaaattatatatgttgcgaacctcctataaatctacagggttatatgcttggaaaccctgtaacatatatggactttgaacaaaacttccgcattccatatgcttatggtatgggattaatctccgacgaaatctatgagccaatgaagagaatctgcaacggaaattattacaatgtggatccatctaacacacaatgtttgaaacttactgaagaatatcataagtgcactgccaaaataaatatccatcacatattaacaccagattgcgatgtaaccaatgtaacatctcctgattgttattattatccatatcatctcattgaatgttgggctaacgacgagagcgttcgcgaagctcttcatattgaaaagggtagtaaaggaaaatgggcgcgatgtaatcggactattccatacaatcacgacattgtaagcagcataccatatcacatgaataacagcatcagtggataccgatctcttatttacagtggtgatcacgacatcgcggtcccttttcttgcaactcaagcctggataagatctctcaattactcccccattcataactggaggccatggatgataaacaatcaaatcgctggatacacgagagcttattccaataagatgacatttgctactatcaaagcaagtggacacacggcagagtatagaccaaacgagacctttatcatgttccaaaggtggatcagtggccaacccctgtaacaaaaggcttatgaccttcacctataattatctaccaactaatatccacgttaagcgcagttgtttgtgttgaaatgtttttgttgtttgctttgttgcattcttttgtgctttatgttacaattttatgtgttttatgtactacagttcattattgtgcgttgtgcaattccttttacatttaactagggactaacccgggctagccccggtatatttcctaactatacgtgcaagaaaatgatgttctatttc

SEQ ID NO: 26622 - protein, 458 aa, Arabidopsis thaliana
  peptide (1)..(458): Ceres Seq. ID no. 13495784
PSYHYFIKILCLSVNGLIFRHTENIMSLKIKFLLLLVLYHHVDSASIVKFLPGFEGPLPFELETGYIGIGEDENVQFFYYFIKSENNPKEDPLLIWLNGGPGCSCLGGIIFENGPVGLKFEVFNGSAPSLFSTTYSWTKMANIIFLDQPVGSGFSYSKTPIDKTGDISEVKRTHEFLQKWLSRHPQYFSNPLYVVGDSYSGMIVPALVQEISQGNYICCEPPINLQGYMLGNPVTYMDFEQNFRIPYAYGMGLISDEIYEPMKRICNGNYYNVDPSNTQCLKLTEEYHKCTAKINIHHILTPDCDVTNVTSPDCYYYPYHLIECWANDESVREALHIEKGSKGKWARCNRTIPYNHDIVSSIPYHMNNSISGYRSLIYSGDHDIAVPFLATQAWIRSLNYSPIHNWRPWMINNQIAGYTRAYSNKMTFATIKASGHTAEYRPNETFIMFQRWISGQPL

SEQ ID NO: 26623 - protein, 433 aa, Arabidopsis thaliana
  peptide (1)..(433): Ceres Seq. ID no. 13495785
MSLKIKFLLLLVLYHHVDSASIVKFLPGFEGPLPFELETGYIGIGEDENVQFFYYFIKSENNPKEDPLLIWLNGGPGCSCLGGIIFENGPVGLKFEVFNGSAPSLFSTTYSWTKMANIIFLDQPVGSGFSYSKTPIDKTGDISEVKRTHEFLQKWLSRHPQYFSNPLYVVGDSYSGMIVPALVQEISQGNYICCEPPINLQGYMLGNPVTYMDFEQNFRIPYAYGMGLISDEIYEPMKRICNGNYYNVDPSNTQCLKLTEEYHKCTAKINIHHILTPDCDVTNVTSPDCYYYPYHLIECWANDESVREALHIEKGSKGKWARCNRTIPYNHDIVSSIPYHMNNSISGYRSLIYSGDHDIAVPFLATQAWIRSLNYSPIHNWRPWMINNQIAGYTRAYSNKMTFATIKASGHTAEYRPNETFIMFQRWISGQPL

SEQ ID NO: 26624 - protein, 319 aa, Arabidopsis thaliana
  peptide (1)..(319): Ceres Seq. ID no. 13495786
MANIIFLDQPVGSGFSYSKTPIDKTGDISEVKRTHEFLQKWLSRHPQYFSNPLYVVGDSYSGMIVPALVQEISQGNYICCEPPINLQGYMLGNPVTYMDFEQNFRIPYAYGMGLISDEIYEPMKRICNGNYYNVDPSNTQCLKLTEEYHKCTAKINIHHILTPDCDVTNVTSPDCYYYPYHLIECWANDESVREALHIEKGSKGKWARCNRTIPYNHDIVSSIPYHMNNSISGYRSLIYSGDHDIAVPFLATQAWIRSLNYSPIHNWRPWMINNQIAGYTRAYSNKMTFATIKASGHTAEYRPNETFIMFQRWISGQPL

SEQ ID NO: 26625 - DNA, 1867 bp, Arabidopsis thaliana
  misc_feature (1)..(1867): Ceres Seq. ID no. 12331510
  misc_feature (1)..(1867): Ortholog of  Ceres SEQ ID NO 15168366 as cited in SEQ ID NO 60199
acaaccttcgtcttctcttgaaactctcctcatctctctcaagaaagattcaagttcgagtcttagctatgtctggaaactcagaaggactgttagagagctcaggcggcggcgtgggaggttccgtcgaggaggaaaaagatatgaagatggaggaaaccggtgaaggagccggcagcggaggaaaccggtggccaagaccagagactttagctctattgagaatacgttcagagatggataaagcttttcgtgactctactctcaaagctcccttatgggaagaaatttccaggaaaatgatggagcttggttacaagagaagttcaaagaaatgcaaggagaagttcgagaacgtgtacaagtaccacaaacgtaccaaagaaggtcgtaccgggaaatccgaaggcaaaacttaccggtttttcgaagagttagaagctttcgagactctcagttcctatcaacctgaacctgagtcgcaacccgcgaaatcttctgcagtgatcacgaacgcgcccgcaacctcttccttgataccatggattagctctagcaatccatcaaccgaaaaaagttcttcaccgttgaaacatcatcatcaggttagtgtacaacccatcaccacaaaccctaccttcctcgccaagcaaccatcttccacgacgccttttcctttttatagcagcaacaatactactactgttagccagccgccaatttcaaatgacttgatgaacaatgtttcatcgctgaatcttttctcgagctcaacttcttcatctactgcatctgacgaggaagaagatcatcatcaggttaagagctcgagaaagaagaggaagtattggaaagggttgtttacgaagttgacaaaagagttaatggagaaacaagagaagatgcaaaaaaggttcttggaaacactggagtatcgtgagaaagagagaatctcaagagaagaagcttggagggtccaagagatagggagaatcaacagagaacacgaaacattaatccatgagaggtccaatgctgcagctaaagacgctgcaatcatatccttcttacacaaaatctcaggaggacaaccacaacaaccgcaacaacataatcataaaccatcacaaaggaaacaatatcaaagcgatcattcaataacgtttgagagtaaagagccgagggcggttctattggatacaacaataaagatggggaattacgataacaatcattcggtgtctcctagttcttcaagatggcctaaaaccgaggtcgaggccttgataaggataagaaagaatcttgaagctaactatcaagaaaacggtactaagggaccattatgggaagagatctctgcagggatgagaagattgggatacaatagaagcgcgaaacgatgcaaagagaagtgggaaaacatcaacaagtactttaagaaagtcaaagaaagcaacaagaaacgtccccttgattccaagacttgcccttattttcaccagctcgaagctttgtacaacgagaggaacaaaagtggggcaatgccattgccattgcctctaatggtgactccacagagacagttgcttctctcgcaagaaacccagaccgagtttgagactgatcagagggaaaaagttggtgataaagaagatgaagaagaaggagagagtgaagaagatgaatacgatgaagaagaagagggagaaggagacaatgagacaagtgagttcgagattgtgttgaacaaaacatcttcacctatggacattaacaataatcttttcacctaagtggttttataatcattttattatatacactttcctgtaaaatgaggttgaaggaaaaaaaaaaagcatat

SEQ ID NO: 26626 - protein, 597 aa, Arabidopsis thaliana
  peptide (1)..(597): Ceres Seq. ID no. 12331511
NLRLLLKLSSSLSRKIQVRVLAMSGNSEGLLESSGGGVGGSVEEEKDMKMEETGEGAGSGGNRWPRPETLALLRIRSEMDKAFRDSTLKAPLWEEISRKMMELGYKRSSKKCKEKFENVYKYHKRTKEGRTGKSEGKTYRFFEELEAFETLSSYQPEPESQPAKSSAVITNAPATSSLIPWISSSNPSTEKSSSPLKHHHQVSVQPITTNPTFLAKQPSSTTPFPFYSSNNTTTVSQPPISNDLMNNVSSLNLFSSSTSSSTASDEEEDHHQVKSSRKKRKYWKGLFTKLTKELMEKQEKMQKRFLETLEYREKERISREEAWRVQEIGRINREHETLIHERSNAAAKDAAIISFLHKISGGQPQQPQQHNHKPSQRKQYQSDHSITFESKEPRAVLLDTTIKMGNYDNNHSVSPSSSRWPKTEVEALIRIRKNLEANYQENGTKGPLWEEISAGMRRLGYNRSAKRCKEKWENINKYFKKVKESNKKRPLDSKTCPYFHQLEALYNERNKSGAMPLPLPLMVTPQRQLLLSQETQTEFETDQREKVGDKEDEEEGESEEDEYDEEEEGEGDNETSEFEIVLNKTSSPMDINNNLFT

SEQ ID NO: 26627 - protein, 575 aa, Arabidopsis thaliana
  peptide (1)..(575): Ceres Seq. ID no. 12331512
MSGNSEGLLESSGGGVGGSVEEEKDMKMEETGEGAGSGGNRWPRPETLALLRIRSEMDKAFRDSTLKAPLWEEISRKMMELGYKRSSKKCKEKFENVYKYHKRTKEGRTGKSEGKTYRFFEELEAFETLSSYQPEPESQPAKSSAVITNAPATSSLIPWISSSNPSTEKSSSPLKHHHQVSVQPITTNPTFLAKQPSSTTPFPFYSSNNTTTVSQPPISNDLMNNVSSLNLFSSSTSSSTASDEEEDHHQVKSSRKKRKYWKGLFTKLTKELMEKQEKMQKRFLETLEYREKERISREEAWRVQEIGRINREHETLIHERSNAAAKDAAIISFLHKISGGQPQQPQQHNHKPSQRKQYQSDHSITFESKEPRAVLLDTTIKMGNYDNNHSVSPSSSRWPKTEVEALIRIRKNLEANYQENGTKGPLWEEISAGMRRLGYNRSAKRCKEKWENINKYFKKVKESNKKRPLDSKTCPYFHQLEALYNERNKSGAMPLPLPLMVTPQRQLLLSQETQTEFETDQREKVGDKEDEEEGESEEDEYDEEEEGEGDNETSEFEIVLNKTSSPMDINNNLFT

SEQ ID NO: 26628 - protein, 550 aa, Arabidopsis thaliana
  peptide (1)..(550): Ceres Seq. ID no. 12331513
MKMEETGEGAGSGGNRWPRPETLALLRIRSEMDKAFRDSTLKAPLWEEISRKMMELGYKRSSKKCKEKFENVYKYHKRTKEGRTGKSEGKTYRFFEELEAFETLSSYQPEPESQPAKSSAVITNAPATSSLIPWISSSNPSTEKSSSPLKHHHQVSVQPITTNPTFLAKQPSSTTPFPFYSSNNTTTVSQPPISNDLMNNVSSLNLFSSSTSSSTASDEEEDHHQVKSSRKKRKYWKGLFTKLTKELMEKQEKMQKRFLETLEYREKERISREEAWRVQEIGRINREHETLIHERSNAAAKDAAIISFLHKISGGQPQQPQQHNHKPSQRKQYQSDHSITFESKEPRAVLLDTTIKMGNYDNNHSVSPSSSRWPKTEVEALIRIRKNLEANYQENGTKGPLWEEISAGMRRLGYNRSAKRCKEKWENINKYFKKVKESNKKRPLDSKTCPYFHQLEALYNERNKSGAMPLPLPLMVTPQRQLLLSQETQTEFETDQREKVGDKEDEEEGESEEDEYDEEEEGEGDNETSEFEIVLNKTSSPMDINNNLFT

SEQ ID NO: 26629 - DNA, 796 bp, Arabidopsis thaliana
  misc_feature (1)..(796): Ceres Seq. ID no. 12721008
  misc_feature (1)..(796): Ortholog of  Ceres SEQ ID NO 14305944 as cited in SEQ ID NO 52294
  misc_feature (1)..(796): Ortholog of  Ceres SEQ ID NO 13596338 as cited in SEQ ID NO 68005
agtcctcgcctcctctacaaaggtgtaagtaagtagctgctgcgttaatctcaaagaagacgaatacaagtctttctgttttgctcaattcatcacaaccacaagaagacgattttttattcttgtttccaaactgaatctgagatgggcgagccactaggactgctccaggtgactgttattcaaggaaagaaactggtgatccgagatttcaagtcaagtgatccttatgtgattgtcaaattaggaaatgagtcagcgaagaccaaagtgatcaacaattgcctgaatccagtgtggaatgaggaactgaactttactctgaaagatcctgcagcagttctcgcattggaagtgtttgataaagataggttcaaggcagatgacaagatgggccatgcctctctcagccttcaaccgcttatctcagttgccagactaagacacgtagtccgcgtgtcctctggtgagacaacgcttaggaaagtattaccggatccagagaactgcgtatctcgagagagcacaatcagttgcatagacggagaggtggtgcagagtgtgtggctgaggctgtgtgctgttgaatcgggtgagattgagttgaagataaagttgattgatcctcctggaacaaacaagtagcaatagggtattttatgttagtttgtaacacgagacccgtttgtgactagtataattgcaacatcagtatggtcttgtcttgtttccaagtgtgcctttgtgactactcaccaatttattaggaatctttgagatacattgttctgctctc

SEQ ID NO: 26630 - protein, 166 aa, Arabidopsis thaliana
  peptide (1)..(166): Ceres Seq. ID no. 12721009
MGEPLGLLQVTVIQGKKLVIRDFKSSDPYVIVKLGNESAKTKVINNCLNPVWNEELNFTLKDPAAVLALEVFDKDRFKADDKMGHASLSLQPLISVARLRHVVRVSSGETTLRKVLPDPENCVSRESTISCIDGEVVQSVWLRLCAVESGEIELKIKLIDPPGTNK

SEQ ID NO: 26631 - protein, 84 aa, Arabidopsis thaliana
  peptide (1)..(84): Ceres Seq. ID no. 12721010
MGHASLSLQPLISVARLRHVVRVSSGETTLRKVLPDPENCVSRESTISCIDGEVVQSVWLRLCAVESGEIELKIKLIDPPGTNK

SEQ ID NO: 26632 - DNA, 560 bp, Arabidopsis thaliana
  misc_feature (1)..(560): Ceres Seq. ID no. 12339185
  misc_feature (1)..(560): Ortholog of  Ceres SEQ ID NO 15172828 as cited in SEQ ID NO 60174
tcattcaccaaaaaaaactcatcaatcaaacaaaactcttaaaagcttaagaacaaataataaaaatggccggtgaaggagaagtgattgcttgccataccctcgaagtttggaacgagaaggtcaaagacgccaatgaatccaagaaactgattgtgatagacttcacagcatcatggtgtccaccttgccgtttcattgcaccagtgtttgcagagatggctaagaagttcactaatgttgtcttcttcaagatcgatgttgatgaattgcaagctgttgctcaggaattcaaagttgaggcaatgcctacttttgttttcatgaaagaaggcaacatcattgatcgtgttgtcggtgctgcgaaagatgagatcaatgagaagctgatgaagcatggtggtcttgtagcttctgcttgattgatttcagtttctaactctttgcatcataataaagtttttatctttcgtatgaaataaaagtgatgcattgctactgcacatttgtattataactatgttgatttttcgattactggtttgttatctcttggcttc

SEQ ID NO: 26633 - protein, 118 aa, Arabidopsis thaliana
  peptide (1)..(118): Ceres Seq. ID no. 12339186
MAGEGEVIACHTLEVWNEKVKDANESKKLIVIDFTASWCPPCRFIAPVFAEMAKKFTNVVFFKIDVDELQAVAQEFKVEAMPTFVFMKEGNIIDRVVGAAKDEINEKLMKHGGLVASA

SEQ ID NO: 26634 - protein, 67 aa, Arabidopsis thaliana
  peptide (1)..(67): Ceres Seq. ID no. 12339187
MAKKFTNVVFFKIDVDELQAVAQEFKVEAMPTFVFMKEGNIIDRVVGAAKDEINEKLMKHGGLVASA

SEQ ID NO: 26635 - DNA, 1799 bp, Arabidopsis thaliana
  misc_feature (1)..(1799): Ceres Seq. ID no. 12326657
  misc_feature (1)..(1799): Ortholog of  Ceres SEQ ID NO 13597407 as cited in SEQ ID NO 64106
acatctatctctttctctctctttccttgcaaattttcagctctcaaagagttaagagttagagagagagaggatggccattagggaaatcaaagatgtagagaggggtgaaatagtgaataaggtagaagatcttgggaaaccatttttgactcatgaagatgatgaaaaagagagtgagaataatgaatcatatttgatggttctcttcagtacttttgttgctgtctgtggctcctttgagtttggctcttgtgttggatactcagcgcctactcagtcatctataagacaagatctcaatctctcccttgcagagttctccatgtttggatccatcttaactatcggtgcaatgcttggtgctgttatgagtgggaaaatttcagatttctccggccgaaaaggggcaatgaggacatcagcttgcttctgcattacaggttggctcgctgtcttcttcaccaagggggcattgttacttgatgtaggaaggttctttacaggatatggaattggagttttttcttatgtggtccctgtgtacattgctgagatatctcccaagaatctccgaggtggactcacaacactgaaccaactcatgattgtgatcggctcatcggtttctttcttgatcggatctctcatttcttggaaaactcttgccctaaccggacttgctccctgcattgttttgctctttggcttgtgcttcatacccgaatctcctcgatggctggcaaaagcaggccatgagaaagagtttcgcgtagccctgcaaaagctgcgaggaaaagatgcagatatcacaaatgaagcagacggtattcaagtctcgattcaagctctagagattcttccaaaagcaagaatccaagaccttgtgtccaagaaatatggtcgatctgtcatcattggtgtttccctgatggtattccaacagtttgttggaatcaatgggatcggattctacgcaagtgaaacgtttgtaaaagccggatttacctctgggaaactaggaacaatcgctatcgcttgtgttcaggtgccaataactgttcttggaacaatcttgatagataaatctggacgaaggccactaattatgatttcagctggtggtatcttcttgggatgcatactcacaggcacatctttcttactcaagggacagagcttgttgcttgaatgggtcccttccttagccgttggaggtgtacttatctatgtagctgctttctccatcggaatgggacctgttccttgggtgataatgtctgagatatttccgataaacgtaaagggaatcgcaggaagcttagtggtactagtgaattggtctggtgcttgggctgtttcttacactttcaacttcctcatgagctggagctctccaggtacattctatttgtactcggcttttgcagctgcgacgataatatttgtggcgaagatggtgccagagacgaaagggaagacactggaagagatccaagcttgtattcgaagagaaacataagaagaaagatacaatcaatgttatgggaatgttatcaaatgaaaagactcgaactattcccgttggtgagctcaaagtggagtagagtaaaaattatcgccgggagataacgttgaaagtccgatgatgaggcataagggttttgcatgaatgttatgagaataggtttacttttatgtatttgttcacgttttaagttttcatcaaataggtttttgattggtatacagtatgtggaatattaatagaatggagtggcagatttcatattcaatca

SEQ ID NO: 26636 - protein, 482 aa, Arabidopsis thaliana
  peptide (1)..(482): Ceres Seq. ID no. 12326658
MAIREIKDVERGEIVNKVEDLGKPFLTHEDDEKESENNESYLMVLFSTFVAVCGSFEFGSCVGYSAPTQSSIRQDLNLSLAEFSMFGSILTIGAMLGAVMSGKISDFSGRKGAMRTSACFCITGWLAVFFTKGALLLDVGRFFTGYGIGVFSYVVPVYIAEISPKNLRGGLTTLNQLMIVIGSSVSFLIGSLISWKTLALTGLAPCIVLLFGLCFIPESPRWLAKAGHEKEFRVALQKLRGKDADITNEADGIQVSIQALEILPKARIQDLVSKKYGRSVIIGVSLMVFQQFVGINGIGFYASETFVKAGFTSGKLGTIAIACVQVPITVLGTILIDKSGRRPLIMISAGGIFLGCILTGTSFLLKGQSLLLEWVPSLAVGGVLIYVAAFSIGMGPVPWVIMSEIFPINVKGIAGSLVVLVNWSGAWAVSYTFNFLMSWSSPGTFYLYSAFAAATIIFVAKMVPETKGKTLEEIQACIRRET

SEQ ID NO: 26637 - protein, 440 aa, Arabidopsis thaliana
  peptide (1)..(440): Ceres Seq. ID no. 12326659
MVLFSTFVAVCGSFEFGSCVGYSAPTQSSIRQDLNLSLAEFSMFGSILTIGAMLGAVMSGKISDFSGRKGAMRTSACFCITGWLAVFFTKGALLLDVGRFFTGYGIGVFSYVVPVYIAEISPKNLRGGLTTLNQLMIVIGSSVSFLIGSLISWKTLALTGLAPCIVLLFGLCFIPESPRWLAKAGHEKEFRVALQKLRGKDADITNEADGIQVSIQALEILPKARIQDLVSKKYGRSVIIGVSLMVFQQFVGINGIGFYASETFVKAGFTSGKLGTIAIACVQVPITVLGTILIDKSGRRPLIMISAGGIFLGCILTGTSFLLKGQSLLLEWVPSLAVGGVLIYVAAFSIGMGPVPWVIMSEIFPINVKGIAGSLVVLVNWSGAWAVSYTFNFLMSWSSPGTFYLYSAFAAATIIFVAKMVPETKGKTLEEIQACIRRET

SEQ ID NO: 26638 - protein, 398 aa, Arabidopsis thaliana
  peptide (1)..(398): Ceres Seq. ID no. 12326660
MFGSILTIGAMLGAVMSGKISDFSGRKGAMRTSACFCITGWLAVFFTKGALLLDVGRFFTGYGIGVFSYVVPVYIAEISPKNLRGGLTTLNQLMIVIGSSVSFLIGSLISWKTLALTGLAPCIVLLFGLCFIPESPRWLAKAGHEKEFRVALQKLRGKDADITNEADGIQVSIQALEILPKARIQDLVSKKYGRSVIIGVSLMVFQQFVGINGIGFYASETFVKAGFTSGKLGTIAIACVQVPITVLGTILIDKSGRRPLIMISAGGIFLGCILTGTSFLLKGQSLLLEWVPSLAVGGVLIYVAAFSIGMGPVPWVIMSEIFPINVKGIAGSLVVLVNWSGAWAVSYTFNFLMSWSSPGTFYLYSAFAAATIIFVAKMVPETKGKTLEEIQACIRRET

SEQ ID NO: 26639 - DNA, 959 bp, Arabidopsis thaliana
  misc_feature (1)..(959): Ceres Seq. ID no. 12335926
  misc_feature (1)..(959): Ortholog of  Ceres SEQ ID NO 12619999 as cited in SEQ ID NO 66123
  misc_feature (1)..(959): Ortholog of  Ceres SEQ ID NO 13656436 as cited in SEQ ID NO 69154
ttttctcatttcttaaccacgtcgtcgacacaacaaaccgatcgtgttacgtctctctctctctcagtctctcatcaccgacgaagatcacggctcttttctctgtttaatcggcggaatctctcgtctttttttttttttttttcttccggtagatcgatccagctccgagatcaacaaccatgaatcctgaatatgactatttgttcaagcttttgctcattggtgattctggtgttggaaagtcgtgcttgcttctaaggtttgctgatgattcttacctggatagctacatcagcaccattggtgtcgactttaaaatccgaacagtcgaacaagatggaaagaccatcaaactccagatttgggatacggcaggccaggaacgtttcagaacgattactagcagttactacagaggagctcatggaattattgtgacttatgatgtaacagatctagaaagcttcaacaacgtcaagcaatggctaaatgaaatcgaccgctatgcaagtgagaatgttaacaagctactggttgggaacaagtgtgatctcacatcacagaaagttgtatccactgagacagctaaggctttcgctgatgaacttgggatcccattcttggaaacaagtgctaagaatgctaccaatgtcgaagaagctttcatggccatgactcctgcaatcaagaccagaatggcgagccaacctgcaggaggatctaagccaccaacggtccagatccgaggacaacccgttaaccagcaatcaggctgctgctcctcttaattcgctttggtaacacttaaccatattatgtcattcgtttgcatgtaagaaatctgaacaacgttgcttcttaaatcttttgtatttggtttttcaatttttcacttgtgtccaaaagcttttaaattctttgtaatggtacttggattattaataaacttctttagc

SEQ ID NO: 26640 - protein, 202 aa, Arabidopsis thaliana
  peptide (1)..(202): Ceres Seq. ID no. 12335927
MNPEYDYLFKLLLIGDSGVGKSCLLLRFADDSYLDSYISTIGVDFKIRTVEQDGKTIKLQIWDTAGQERFRTITSSYYRGAHGIIVTYDVTDLESFNNVKQWLNEIDRYASENVNKLLVGNKCDLTSQKVVSTETAKAFADELGIPFLETSAKNATNVEEAFMAMTPAIKTRMASQPAGGSKPPTVQIRGQPVNQQSGCCSS

SEQ ID NO: 26641 - DNA, 1336 bp, Arabidopsis thaliana
  misc_feature (1)..(1336): Ceres Seq. ID no. 12422528
  misc_feature (1)..(1336): Ortholog of  Ceres SEQ ID NO 13596189 as cited in SEQ ID NO 68452
aattaggttaggtggtcacgtttgttcatctctctcttatatatttgtttaaaggcttcgtctttgttcatttgcttttgttgatctcattacttgttcatcaatggcaagtctttgtttccaatctccttccaaacccatttcctatttccaacccaaatccaatccatcgccaccgttattcgccaaagtctccgtctttcgatgcagagcttccgtacaaaccctcgtcgccgttgagccggagccagttttcgtctccgtcaagacttttgcgccagccaccgtcgctaatttgggaccagggtttgatttcttaggatgtgccgtcgatggtctcggagaccatgtgactctccgtgtagatccctctgtacgagccggtgaggtctcaatctcggagatcaccggaaccacaacaaaactcagcacgaaccctctccggaactgcgccggaatcgctgctattgctacgatgaagatgttagggatcagatcggttggtttatcattagatttgcataaaggtcttcctttaggtagcggtttaggttctagtgcagctagtgccgccgcagctgctgtggcggttaatgagatctttggccggaaattagggagtgatcaattggtattagccggtttagaatcggaagcgaaagtctccggttatcacgctgataatatcgcaccagcgatcatgggtggattcgttttgattagaaactacgaaccacttgatttgaaaccattgaggttcccatctgataaagatctcttctttgttctagtaagccctgactttgaagctccaactaagaaaatgagagctgcattgcctacagagattccaatggttcatcatgtttggaacagtagccaagcagctgctttagtcgctgctgtgttagaaggtgacgcagtgatgcttgggaaggcattgtcgtcggataagattgtggagccgactagagcgccgttgattccgggaatggaagctgtgaagaaggcggctttagaagctggagcatttggatgtactattagcggagctggaccaacagcggttgcggtgattgattcggaggagaagggtcaagtcattggagagaagatggtggaagcgttttggaaagttggtcatttgaaatctgttgcttctgtgaagaagcttgataatgttggtgctaggcttgtcaacagcgtctccagatgatctttgtgtgctgtttgattatgttaagattggaactgtttgattatgttaagattggaaccaatcttgctctgtactgtaatttctagatgataataaagttctttgttttctacacct

SEQ ID NO: 26642 - protein, 370 aa, Arabidopsis thaliana
  peptide (1)..(370): Ceres Seq. ID no. 12422529
MASLCFQSPSKPISYFQPKSNPSPPLFAKVSVFRCRASVQTLVAVEPEPVFVSVKTFAPATVANLGPGFDFLGCAVDGLGDHVTLRVDPSVRAGEVSISEITGTTTKLSTNPLRNCAGIAAIATMKMLGIRSVGLSLDLHKGLPLGSGLGSSAASAAAAAVAVNEIFGRKLGSDQLVLAGLESEAKVSGYHADNIAPAIMGGFVLIRNYEPLDLKPLRFPSDKDLFFVLVSPDFEAPTKKMRAALPTEIPMVHHVWNSSQAAALVAAVLEGDAVMLGKALSSDKIVEPTRAPLIPGMEAVKKAALEAGAFGCTISGAGPTAVAVIDSEEKGQVIGEKMVEAFWKVGHLKSVASVKKLDNVGARLVNSVSR

SEQ ID NO: 26643 - protein, 246 aa, Arabidopsis thaliana
  peptide (1)..(246): Ceres Seq. ID no. 12422530
MKMLGIRSVGLSLDLHKGLPLGSGLGSSAASAAAAAVAVNEIFGRKLGSDQLVLAGLESEAKVSGYHADNIAPAIMGGFVLIRNYEPLDLKPLRFPSDKDLFFVLVSPDFEAPTKKMRAALPTEIPMVHHVWNSSQAAALVAAVLEGDAVMLGKALSSDKIVEPTRAPLIPGMEAVKKAALEAGAFGCTISGAGPTAVAVIDSEEKGQVIGEKMVEAFWKVGHLKSVASVKKLDNVGARLVNSVSR

SEQ ID NO: 26644 - protein, 244 aa, Arabidopsis thaliana
  peptide (1)..(244): Ceres Seq. ID no. 12422531
MLGIRSVGLSLDLHKGLPLGSGLGSSAASAAAAAVAVNEIFGRKLGSDQLVLAGLESEAKVSGYHADNIAPAIMGGFVLIRNYEPLDLKPLRFPSDKDLFFVLVSPDFEAPTKKMRAALPTEIPMVHHVWNSSQAAALVAAVLEGDAVMLGKALSSDKIVEPTRAPLIPGMEAVKKAALEAGAFGCTISGAGPTAVAVIDSEEKGQVIGEKMVEAFWKVGHLKSVASVKKLDNVGARLVNSVSR

SEQ ID NO: 26645 - DNA, 925 bp, Arabidopsis thaliana
  misc_feature (1)..(925): Ceres Seq. ID no. 12577207
  misc_feature (1)..(925): Ortholog of  Ceres SEQ ID NO 14316367 as cited in SEQ ID NO 57626
  misc_feature (1)..(925): Ortholog of  Ceres SEQ ID NO 14315039 as cited in SEQ ID NO 57668
  misc_feature (1)..(925): Ortholog of  Ceres SEQ ID NO 13664189 as cited in SEQ ID NO 66834
  misc_feature (1)..(925): Ortholog of  Ceres SEQ ID NO 13654321 as cited in SEQ ID NO 67850
ctattgagtctttagggtctctctgtgtttgcaaatctgacgccgagtattttgctaaagcagcagccagtcgggacagtgaaatggcgactgaagatgtgcaagatcccagaatcgctaagattgcctcttccattagagtcatccccgacttccctaaaccaggaatcatgtttcaggacataacgacgcttcttctcgacactgaggcctttaaggatactattgctttgtttgttgatagatacaaagataaaggcatatctgttgttgcaggtgttgaagctagaggtttcatttttggccctcctattgcgttggctattggtgccaaatttgttcccatgaggaagcccaagaagctacctgggaaggttatttcggaggagtattcgttggagtatggaacagatacgattgagatgcacgtaggtgcagtagagcctggtgagcgtgctattattattgatgacctcattgccacgggtgggactctcgctgctgcaatccgactacttgaacgagtaggagtgaagattgttgaatgtgcttgcgtaattgagttaccagagcttaagggaaaggagaaactaggagagacgtcgctatttgttcttgtaaagtcggctgcttaacaagaaactggaagagaaggttattggatcgagtgttgatgctatttttcatgtatggtgagacattttgcgtgggatttgatccttgttgtttcaacttatcataattggttcagactagaaaatggcatttgaatgtcaggattcgattgcagtttcctattgttccacttaaaatccccgattaataaggtgttatgggttttatttatagaatcaagttgtaatagtagactccaacaggggctaaagtcttggtaacgcaattcttcttttaagtttcgcagccc

SEQ ID NO: 26646 - protein, 210 aa, Arabidopsis thaliana
  peptide (1)..(210): Ceres Seq. ID no. 12577208
IESLGSLCVCKSDAEYFAKAAASRDSEMATEDVQDPRIAKIASSIRVIPDFPKPGIMFQDITTLLLDTEAFKDTIALFVDRYKDKGISVVAGVEARGFIFGPPIALAIGAKFVPMRKPKKLPGKVISEEYSLEYGTDTIEMHVGAVEPGERAIIIDDLIATGGTLAAAIRLLERVGVKIVECACVIELPELKGKEKLGETSLFVLVKSAA

SEQ ID NO: 26647 - protein, 183 aa, Arabidopsis thaliana
  peptide (1)..(183): Ceres Seq. ID no. 12577209
MATEDVQDPRIAKIASSIRVIPDFPKPGIMFQDITTLLLDTEAFKDTIALFVDRYKDKGISVVAGVEARGFIFGPPIALAIGAKFVPMRKPKKLPGKVISEEYSLEYGTDTIEMHVGAVEPGERAIIIDDLIATGGTLAAAIRLLERVGVKIVECACVIELPELKGKEKLGETSLFVLVKSAA

SEQ ID NO: 26648 - protein, 154 aa, Arabidopsis thaliana
  peptide (1)..(154): Ceres Seq. ID no. 12577210
MFQDITTLLLDTEAFKDTIALFVDRYKDKGISVVAGVEARGFIFGPPIALAIGAKFVPMRKPKKLPGKVISEEYSLEYGTDTIEMHVGAVEPGERAIIIDDLIATGGTLAAAIRLLERVGVKIVECACVIELPELKGKEKLGETSLFVLVKSAA

SEQ ID NO: 26649 - DNA, 1294 bp, Arabidopsis thaliana
  misc_feature (1)..(1294): Ceres Seq. ID no. 13653831
  misc_feature (1)..(1294): Ortholog of  Ceres SEQ ID NO 13495070 as cited in SEQ ID NO 53216
  misc_feature (1)..(1294): Ortholog of  Ceres SEQ ID NO 13656228 as cited in SEQ ID NO 65648
  misc_feature (1)..(1294): Ortholog of  Ceres SEQ ID NO 15176717 as cited in SEQ ID NO 0
  misc_feature (1)..(1294): Ortholog of  Ceres SEQ ID NO 15179618 as cited in SEQ ID NO 0
cttcttccccaccactccgattcatctttatcctctctctcatctcgtccgttgttgcataagtgctatggatctcgcgtcgaatcttggtgggaagatcgataaatccgatgttctcaccgccgtcgaaaagtatgagcaatatcatgtcttccatggaggaaacgaggaagagagaaaagccaattatactgacatggttaataagtactatgaccttgctactagcttttatgagtacggatggggagaatccttccattttgcacaaagatggaaaggagaatcgcttcgagagagtattaagcgacacgagcactttcttgctcttcagcttggcatccaaccaggacaaaaggtactggatgtaggatgtggaattggtggaccgttgagggaaattgcaagattcagcaattcagttgttaccgggctcaacaataacgaataccagatcaccagaggcaaggaactaaaccgacttgcaggtgtcgacaagacatgtaactttgtcaaggctgacttcatgaagatgccattcccggaaaacagtttcgatgcagtttatgcaatagaagcaacttgccatgcacctgatgcgtatggatgctacaaagagatctacagagtgctaaagcctgggcaatgttttgctgcctatgagtggtgtatgactgatgcatttgaccctgataacgccgaacatcagaaaataaagggagagatagagattggagatggtcttcctgacattaggctgactacaaaatgcctcgaagctctgaagcaggccggttttgaagtgatatgggaaaaggatctggccaaggactcgccggtcccatggtacttacctcttgacaaaaatcatttctcactcagtagcttccgccttacagctgttggacgattcataaccaaaaacatggtcaagatccttgaatacataagacttgcacctcaaggaagccaaagggtctcaaatttcctggagcaggctgcggaaggattagtcgacggtggaaggagagagattttcacgccaatgtatttcttcttggcccggaagccagagtaagcggatgagagatggcgatggtcatcgtaggtcgaatgaagtgacaaaatttctcaatttgcagtcttattttctatgtttatcggatttgttgcagagtttcttattcaccaactatattttggatgttcgtaacatgtcacgtgttgttcatgtgcactctgcctgaaatctgaatcatgtgcacatgcccaaaatatcttggaatctttcttt

SEQ ID NO: 26650 - protein, 358 aa, Arabidopsis thaliana
  peptide (1)..(358): Ceres Seq. ID no. 13653832
FFPTTPIHLYPLSHLVRCCISAMDLASNLGGKIDKSDVLTAVEKYEQYHVFHGGNEEERKANYTDMVNKYYDLATSFYEYGWGESFHFAQRWKGESLRESIKRHEHFLALQLGIQPGQKVLDVGCGIGGPLREIARFSNSVVTGLNNNEYQITRGKELNRLAGVDKTCNFVKADFMKMPFPENSFDAVYAIEATCHAPDAYGCYKEIYRVLKPGQCFAAYEWCMTDAFDPDNAEHQKIKGEIEIGDGLPDIRLTTKCLEALKQAGFEVIWEKDLAKDSPVPWYLPLDKNHFSLSSFRLTAVGRFITKNMVKILEYIRLAPQGSQRVSNFLEQAAEGLVDGGRREIFTPMYFFLARKPE

SEQ ID NO: 26651 - protein, 336 aa, Arabidopsis thaliana
  peptide (1)..(336): Ceres Seq. ID no. 13653833
MDLASNLGGKIDKSDVLTAVEKYEQYHVFHGGNEEERKANYTDMVNKYYDLATSFYEYGWGESFHFAQRWKGESLRESIKRHEHFLALQLGIQPGQKVLDVGCGIGGPLREIARFSNSVVTGLNNNEYQITRGKELNRLAGVDKTCNFVKADFMKMPFPENSFDAVYAIEATCHAPDAYGCYKEIYRVLKPGQCFAAYEWCMTDAFDPDNAEHQKIKGEIEIGDGLPDIRLTTKCLEALKQAGFEVIWEKDLAKDSPVPWYLPLDKNHFSLSSFRLTAVGRFITKNMVKILEYIRLAPQGSQRVSNFLEQAAEGLVDGGRREIFTPMYFFLARKPE

SEQ ID NO: 26652 - protein, 293 aa, Arabidopsis thaliana
  peptide (1)..(293): Ceres Seq. ID no. 13653834
MVNKYYDLATSFYEYGWGESFHFAQRWKGESLRESIKRHEHFLALQLGIQPGQKVLDVGCGIGGPLREIARFSNSVVTGLNNNEYQITRGKELNRLAGVDKTCNFVKADFMKMPFPENSFDAVYAIEATCHAPDAYGCYKEIYRVLKPGQCFAAYEWCMTDAFDPDNAEHQKIKGEIEIGDGLPDIRLTTKCLEALKQAGFEVIWEKDLAKDSPVPWYLPLDKNHFSLSSFRLTAVGRFITKNMVKILEYIRLAPQGSQRVSNFLEQAAEGLVDGGRREIFTPMYFFLARKPE

SEQ ID NO: 26653 - DNA, 1215 bp, Arabidopsis thaliana
  misc_feature (1)..(1215): Ceres Seq. ID no. 12394462
  misc_feature (1)..(1215): Ortholog of  Ceres SEQ ID NO 12484482 as cited in SEQ ID NO 53324
aaaacggctctaaattgaaaacaaaagaagagagagagagagagacgaagaaacagagagattctctcgaaaatggccaccattagagtaccaaacgaagttccttctccagctcaggattctgaaactctcaaacaagctattcgcggatggggaacagatgagaaggcgattatacgagttttagggcaaagagaccagagccagagaaggaagattagagaaagttttagagagatttatggcaaagatcttatcgatgttctatcctccgaactgtctggtgatttcatgaaagctgtggtttcgtggacgtatgatccagcagagagagacgcaaggcttgtgaacaagattttgaacaaggagaagaagaagaaaagcttagagaatttgaaggttatagtagagatctcttgcacgacttccccaaaccatttgattgctgtgaggaaagcttattgttcactctttgactcttctcttgaagaacacattgcttcttctctgccttttcctcttgcaaagttactggtgacattggcaagtacattcagatatgacaaagataggactgatgcagaagtagctactattgaggcggctatgctacgtgaagccatagagaagaaacaattagatcatgaccatgtcctgtacatattaggaacgcgtagtatctatcagctcagagaaacttttgttgcttacaagaagaattatggggtcacaattgataaggatgttgatggatgtccaggagatgctgatctgagaagtctattgaaggtggcaatcttttgtattgatactcctgagaaacactttgcaaaggtggtaagagattcgattgagggttttggaacagatgaggattcgttgacgagggcgattgtgacgcgtgcagagatcgatttgatgaaagtaagaggagagtatttcaacatgtataatacaagcatggacaatgctattactggtgatatttctggagactacaaggacttcattatcaccttacttggatccaaaatctgatcgttctttcgtttctttgtcagttgttatattcttggctttgcttgtgacttgtataatcaatcaatacattgtattccaactccagtttgaattgtttaaaaaataatcaaatttctcttgattcttgcatttttgaatcaaagcaaatctatgtttaattttgttttcaaaatt

SEQ ID NO: 26654 - protein, 321 aa, Arabidopsis thaliana
  peptide (1)..(321): Ceres Seq. ID no. 12394463
MATIRVPNEVPSPAQDSETLKQAIRGWGTDEKAIIRVLGQRDQSQRRKIRESFREIYGKDLIDVLSSELSGDFMKAVVSWTYDPAERDARLVNKILNKEKKKKSLENLKVIVEISCTTSPNHLIAVRKAYCSLFDSSLEEHIASSLPFPLAKLLVTLASTFRYDKDRTDAEVATIEAAMLREAIEKKQLDHDHVLYILGTRSIYQLRETFVAYKKNYGVTIDKDVDGCPGDADLRSLLKVAIFCIDTPEKHFAKVVRDSIEGFGTDEDSLTRAIVTRAEIDLMKVRGEYFNMYNTSMDNAITGDISGDYKDFIITLLGSKI

SEQ ID NO: 26655 - protein, 248 aa, Arabidopsis thaliana
  peptide (1)..(248): Ceres Seq. ID no. 12394464
MKAVVSWTYDPAERDARLVNKILNKEKKKKSLENLKVIVEISCTTSPNHLIAVRKAYCSLFDSSLEEHIASSLPFPLAKLLVTLASTFRYDKDRTDAEVATIEAAMLREAIEKKQLDHDHVLYILGTRSIYQLRETFVAYKKNYGVTIDKDVDGCPGDADLRSLLKVAIFCIDTPEKHFAKVVRDSIEGFGTDEDSLTRAIVTRAEIDLMKVRGEYFNMYNTSMDNAITGDISGDYKDFIITLLGSKI

SEQ ID NO: 26656 - DNA, 1124 bp, Arabidopsis thaliana
  misc_feature (1)..(1124): Ceres Seq. ID no. 12370210
  misc_feature (1)..(1124): Ortholog of  Ceres SEQ ID NO 13655656 as cited in SEQ ID NO 63731
atatcacaagttctctctacttttctccgaattttaccacccaatcaaaacgcttctctcttcttctacttcttcacttctctctccttcaacaaaattttctacctttgtttcttctctcagatttcataaagaaaagatttaatctttcattggaatctgtgagtaacagaggataagcgaatatgggttcaatctctttatccaattctatgcccataactcgacttccactacttacatcactctatcatcaaagcttccttccgatttcttcttcatctttctctcttcttcctctctctaatcgtcgtcgctcctccactttttcaccgtcaatcaccgtctctgccttcttcgctgctcctgccagcgttaataataataactctgttccggcaaaaaatggaggttacacagttggggatttcatgactccgagacagaatttgcacgttgttaagccctctacgtcggtcgatgatgcgttggaacttctggttgagaagaaagtcacgggattgcctgtaattgacgataattggacactggttggtgttgtttctgattacgatttgcttgcattggactccatctctggtcgcagtcaaaatgatacaaacttgttccctgatgtcgacagtacctggaaaacgtttaacgaactacagaaactgatcagtaagacatatggaaaagttgttggagacttgatgacaccgtctcctctcgttgtccgtgattctaccaatttagaagatgcagccaggttgcttctggaaacaaagttccgaagattacccgttgttgatgctgatggaaaactgattgggatccttacaaggggaaacgttgtaagggctgcgctgcagatcaaacgggaaaccgagaactctacatagctaggaagcagcagtgatggagcagatctgaatctgccatagttaatagcgaaatctatttattccattgatataagtatatatgtaaccattctctgtcaattttcggttttcagaagcaatttttgttactttaggagtaacatttctcagactcggaactgaagacaaatggtatatttgatacatatatgtttattgtagcacaggtctactcttatc

SEQ ID NO: 26657 - protein, 238 aa, Arabidopsis thaliana
  peptide (1)..(238): Ceres Seq. ID no. 12370211
MGSISLSNSMPITRLPLLTSLYHQSFLPISSSSFSLLPLSNRRRSSTFSPSITVSAFFAAPASVNNNNSVPAKNGGYTVGDFMTPRQNLHVVKPSTSVDDALELLVEKKVTGLPVIDDNWTLVGVVSDYDLLALDSISGRSQNDTNLFPDVDSTWKTFNELQKLISKTYGKVVGDLMTPSPLVVRDSTNLEDAARLLLETKFRRLPVVDADGKLIGILTRGNVVRAALQIKRETENST

SEQ ID NO: 26658 - protein, 229 aa, Arabidopsis thaliana
  peptide (1)..(229): Ceres Seq. ID no. 12370212
MPITRLPLLTSLYHQSFLPISSSSFSLLPLSNRRRSSTFSPSITVSAFFAAPASVNNNNSVPAKNGGYTVGDFMTPRQNLHVVKPSTSVDDALELLVEKKVTGLPVIDDNWTLVGVVSDYDLLALDSISGRSQNDTNLFPDVDSTWKTFNELQKLISKTYGKVVGDLMTPSPLVVRDSTNLEDAARLLLETKFRRLPVVDADGKLIGILTRGNVVRAALQIKRETENST

SEQ ID NO: 26659 - protein, 156 aa, Arabidopsis thaliana
  peptide (1)..(156): Ceres Seq. ID no. 12370213
MTPRQNLHVVKPSTSVDDALELLVEKKVTGLPVIDDNWTLVGVVSDYDLLALDSISGRSQNDTNLFPDVDSTWKTFNELQKLISKTYGKVVGDLMTPSPLVVRDSTNLEDAARLLLETKFRRLPVVDADGKLIGILTRGNVVRAALQIKRETENST

SEQ ID NO: 26660 - DNA, 653 bp, Arabidopsis thaliana
  misc_feature (1)..(653): Ceres Seq. ID no. 12394324
  misc_feature (1)..(653): Ortholog of  Ceres SEQ ID NO 14309011 as cited in SEQ ID NO 0
accgagccatttcttctgtaagcggatttcatcagcattcagcagccagacgaaacttttaacgatctaccatcgaaccaggatacttcttcattaccatggcaacaagaaatgctttgagaattgtgtctcgtaggttctctagtggcaaagttcttagcgaagaggagagagccgctgagaatgttttcattaagaaaatggagcaggagaagcttcagaagttagctcgacagggtcctggagaacaagcagcagggtcagcaagcgaagcaaaggttgctggtgcaacagcatctgcatcagctgagtcgggcccaaaggtgtcagaagacaagaacagaaactatgcggttgtggcaggtgtggttgctattgtcggttcgattggttggtacttgaaagcaggtggaaagaagcagccagaggtccaagagtaaagagatagattgattgatggacttgtgatgagtgaataaaacagggagtagcattactcattcctcccttgtgagacactttggaatcaaatcttacgttgctgctactctctttgagtcttttcttttgtttttgttacttgacacagtttttttttgtttccggtttgttgacatttagtttctcaatctaaactccagagacttatttcc

SEQ ID NO: 26661 - protein, 113 aa, Arabidopsis thaliana
  peptide (1)..(113): Ceres Seq. ID no. 12394325
MATRNALRIVSRRFSSGKVLSEEERAAENVFIKKMEQEKLQKLARQGPGEQAAGSASEAKVAGATASASAESGPKVSEDKNRNYAVVAGVVAIVGSIGWYLKAGGKKQPEVQE

SEQ ID NO: 26662 - protein, 79 aa, Arabidopsis thaliana
  peptide (1)..(79): Ceres Seq. ID no. 12394326
MEQEKLQKLARQGPGEQAAGSASEAKVAGATASASAESGPKVSEDKNRNYAVVAGVVAIVGSIGWYLKAGGKKQPEVQE

SEQ ID NO: 26663 - DNA, 631 bp, Arabidopsis thaliana
  misc_feature (1)..(631): Ceres Seq. ID no. 12323401
  misc_feature (1)..(631): Ortholog of  Ceres SEQ ID NO 15174264 as cited in SEQ ID NO 61877
aaacagtatcaaatcaaaaccatcacagcaaaaataactcactccctagaaaagtttgaaaatggcgaaggcagataagaaaccagcggagaagaaaccggcagagaaaactccggcagccgaaccagcagcagcggcagagaagaaaccaaaagccggaaagaaactccccaaggaaccagccgtcgccggagacaagaagaagaagagatcaaagaagaacgttgagacatacaagatctacatcttcaaggtgttgaagcaagttcatccagacatcggaatctcaagcaaagccatgggaatcatgaacagtttcatcaacgatatctttgagaagcttgctggtgagtcttcgaagcttgcaaggtacaacaagaagccgacgattacttccagggagattcagactgcggttagacttgtgttgcccggtgagttggcgaaacatgctgtgtctgaagggactaaggcggttacgaagtttacaagttcttagatttggaatgtggttttgtaatggtggagaagtagtagtaaaatgtgaaatagggtttatgcttttgggtatctttgaaggttatgtaatttgggaattagggtttttatttatggcacggctatgaaatcc

SEQ ID NO: 26664 - protein, 145 aa, Arabidopsis thaliana
  peptide (1)..(145): Ceres Seq. ID no. 12323402
MAKADKKPAEKKPAEKTPAAEPAAAAEKKPKAGKKLPKEPAVAGDKKKKRSKKNVETYKIYIFKVLKQVHPDIGISSKAMGIMNSFINDIFEKLAGESSKLARYNKKPTITSREIQTAVRLVLPGELAKHAVSEGTKAVTKFTSS

SEQ ID NO: 26665 - DNA, 617 bp, Arabidopsis thaliana
  misc_feature (1)..(617): Ceres Seq. ID no. 12394321
  misc_feature (1)..(617): Ortholog of  Ceres SEQ ID NO 15180055 as cited in SEQ ID NO 1186
tttacgcattctccgtcattcggttaatttgcatcgatcgttagggttttatcgagagagcgatttctcaaatcgacttcaatggctgacgacgattacaacgaagtcgatgacttgggatatgaagatgagccagcagagcctgagatcgaagaaggagtagaggaagatgctgatatcaaggagaacgatgatgttaatgttgaccctttggaaacagaagataaggttgaaacagaacctgtgcaacgcccacgtaaaacctctaagtttatgactaagtatgaacgtgcacgtatcctcggcactcgtgctttgcagattagcatgaatgctcctgttatggttgagctggagggtgagactgatccacttgagattgcgatgaaagagcttaggcaaaggaagattccatttaccattagacgttatctacctgatatgagttacgaggaatggggagttgatgaactgatcgtcgaagactcgtggaaacgtcaagtcggtggtgattgataaaatctggcctatgtgttttgcaaagctttctgctcttgtatggattatgaacttacgatatagtcgcatgtagaacttcttcatttgtcctattctcc

SEQ ID NO: 26666 - protein, 144 aa, Arabidopsis thaliana
  peptide (1)..(144): Ceres Seq. ID no. 12394322
MADDDYNEVDDLGYEDEPAEPEIEEGVEEDADIKENDDVNVDPLETEDKVETEPVQRPRKTSKFMTKYERARILGTRALQISMNAPVMVELEGETDPLEIAMKELRQRKIPFTIRRYLPDMSYEEWGVDELIVEDSWKRQVGGD

SEQ ID NO: 26667 - protein, 80 aa, Arabidopsis thaliana
  peptide (1)..(80): Ceres Seq. ID no. 12394323
MTKYERARILGTRALQISMNAPVMVELEGETDPLEIAMKELRQRKIPFTIRRYLPDMSYEEWGVDELIVEDSWKRQVGGD

SEQ ID NO: 26668 - DNA, 614 bp, Arabidopsis thaliana
  misc_feature (1)..(614): Ceres Seq. ID no. 12322193
  misc_feature (1)..(614): Ortholog of  Ceres SEQ ID NO 13600689 as cited in SEQ ID NO 0
  misc_feature (1)..(614): Ortholog of  Ceres SEQ ID NO 15178120 as cited in SEQ ID NO 0
attctttggagttacccaatttcgacgttgaacacaaacccttgcttctctcttctctgtttctctctcgcagcgaaaaatcatggcgattagctccttcaagcatgaacatcctcttgaaaagagacaagctgaagcagcacgtatcagggagaagtatccagacagaataccagtcattgtcgaaagagccgagaagagtgatgtcccggatattgataggaaaaagtacttggtcccagctgatttgactgttggccagtttgtttatgttgtacggaagcggatcaagctcagtcccgagaaagccatcttcatttttgtcaagaacattctaccaccaactgcggcaataatgtctgcaatttatgaagagcacaaagacgaagacgggtttctatacatgagttacagtggtgagaacacgttcgggatcttcttctaatgcgcttggaatatgtggatgcatcagattatcaatgtacagtctgtctatttctctgcttgtctctagttttcatgacattggacgaagcttttgaaacttgcatgctatgttattaacatgataaggtcttccgttcatggtgttaatttggctttatgctacactc

SEQ ID NO: 26669 - protein, 120 aa, Arabidopsis thaliana
  peptide (1)..(120): Ceres Seq. ID no. 12322194
MAISSFKHEHPLEKRQAEAARIREKYPDRIPVIVERAEKSDVPDIDRKKYLVPADLTVGQFVYVVRKRIKLSPEKAIFIFVKNILPPTAAIMSAIYEEHKDEDGFLYMSYSGENTFGIFF

SEQ ID NO: 26670 - protein, 82 aa, Arabidopsis thaliana
  peptide (1)..(82): Ceres Seq. ID no. 12322195
SLELPNFDVEHKPLLLSSLFLSRSEKSWRLAPSSMNILLKRDKLKQHVSGRSIQTEYQSLSKEPRRVMSRILIGKSTWSQLI

SEQ ID NO: 26671 - DNA, 985 bp, Arabidopsis thaliana
  misc_feature (1)..(985): Ceres Seq. ID no. 12489648
  misc_feature (1)..(985): Ortholog of  Ceres SEQ ID NO 15173873 as cited in SEQ ID NO 62620
  misc_feature (1)..(985): Ortholog of  Ceres SEQ ID NO 13655610 as cited in SEQ ID NO 64148
  misc_feature (1)..(985): Ortholog of  Ceres SEQ ID NO 14302675 as cited in SEQ ID NO 0
aagaaagccctaaaatttaattagggtttcagtgtcttcaaattcacctatcctcagcctcaactctctcctctatccactctcagccggaaaatttttccttgattcattacgacagagagaaccatgccggcgaaacagaggaccccgaaggtcaacagaaaccctgatctgatcaggggtgttggtaaatactcgagatcccagatgtaccataagagaggtttgtgggctatcaaggccaaaaatggaggcgttttcccacgtcacgacgctaaatctaaggttgatgctccggtggagaagccaccgaagttctatccagctgaagatgttaagaaacctctccccaacaggcgcacggcaaaaccaaccaagctcagagctagcattactccaggtacagtgttgattatccttgctggtaggttcaagggaaagagagttgtcttccttaagcagcttgcctctggtttgcttcttgtgactggaccattcaagatcaatggtgttcctttgagacgtgttaaccaggcctatgtgattggcacttccacaaaggttgacatttctggagtcaccctcgataaattcgatgataagtactttggcaaggttgctgagaagaaaaagaagaagacagaaggagagttctttgaggctgagaaagaggagaagaaggagatcccacaggtgaagaaagatgaccagaaagctgtggatgcagctttgatcaaagccattgaagcagttccagagttgaagacttaccttggcgcaaggttttcattgaaacaaggaatgaagccccatgagcttgttttctagatttcattactttttttctgaggtctctagagtatctgtctcctgaagtgttttaccttctaaatggttgttttgttcttgttcactgaacacatacaatttttggcttatacattctctgttcttacgtatggataaactatcgatcctgtttttg

SEQ ID NO: 26672 - protein, 233 aa, Arabidopsis thaliana; identical to SEQ ID NO: 22783
  peptide (1)..(233): Ceres Seq. ID no. 12489649

SEQ ID NO: 26673 - protein, 206 aa, Arabidopsis thaliana; identical to SEQ ID NO: 22784
  peptide (1)..(206): Ceres Seq. ID no. 12489650

SEQ ID NO: 26674 - DNA, 1401 bp, Arabidopsis thaliana
  misc_feature (1)..(1401): Ceres Seq. ID no. 12422631
  misc_feature (1)..(1401): Ortholog of  Ceres SEQ ID NO 15176246 as cited in SEQ ID NO 55282
  misc_feature (1)..(1401): Ortholog of  Ceres SEQ ID NO 14301514 as cited in SEQ ID NO 65663
  misc_feature (1)..(1401): Ortholog of  Ceres SEQ ID NO 13596315 as cited in SEQ ID NO 67929
  misc_feature (1)..(1401): Ortholog of  Ceres SEQ ID NO 13596167 as cited in SEQ ID NO 68704
  misc_feature (1)..(1401): Ortholog of  Ceres SEQ ID NO 13655131 as cited in SEQ ID NO 68906
ctcgataagaagacattagggtgagaattgagttttatcgaacaagatggatttcgtgaacaatcttgataccgacacgttgctatcaattctctcttgtctagatgatccatcagatattgtccgtgccagtgctgtctcacgctcctggcgacaatttgtggttaagtatagtctctccaagaatctatgcttgaagttgttccatcagctatctaatgtggatcatataattgaaacaagtaatgatagaaatggagagtcatctgaagctgggtcaagcagtctcatggatacaaggctacttgaaaaagagcaccgggcttttgccttgttggctagagggtgcatgtcttcacctattgaaagctgtatagctgatgccattagagcttccagtactgataattacccagtagaaagcatcttaaacacactcgagaagagagatcggattggtcgaaccccttcttattggtcgagtactgggcaacacaaaactacggtgcccgaatcacttctttacaagttgattggtgatttgtgtctcattactgaagtcagcatccatcctttccaagcttattttcagcgcggtcatccgatatactcttcacattatgttcgtttccggttgggtcacgaaaaggacaattcacctcactacaacaattcacaggataaaaaaggtgagccaggaaagagttcaattgaaagcaactatgtatggacttacacttcacaagagttttcgatggctcaggaaaatcgattgcagagctttcagcttccagaacctgttctttgcattggtgggtatctgctagtcgagtttctaggtcgagttcagacacaagaaatggatggccaatactatatatgcgtgtcacatgtcaaagtggagggaagatctctagcaaaatcatttcgagttgagaatgtggatgacaatggaaagtttggattgaaggtgttgagttacaatgatccgaaaaaaatggaggagatggatgcagaggccgggcaggacatggatgcagaggcgggccaaagtcagctgagaaaccttgaacagctcttgaatttgttgcacaggcatcctctcgatgttgtcgactatgtttggcctgatgagtcagacgacgagtatgctgaatcagaagatgaggctgagccttagtcactgaattactactattcccagttatttcttctttttggttttaattttaaagaatctttaggtgttttttgtcatcttttgtgagcgtttttaaaagcttgtactccagccatcgttgttaaacattgtgtgtgttacagaccttaacagaaagttaacagccattttgggctctctcttatctgtcggtgattccagagaatcaaagcagtctttcg

SEQ ID NO: 26675 - protein, 377 aa, Arabidopsis thaliana
  peptide (1)..(377): Ceres Seq. ID no. 12422632
MDFVNNLDTDTLLSILSCLDDPSDIVRASAVSRSWRQFVVKYSLSKNLCLKLFHQLSNVDHIIETSNDRNGESSEAGSSSLMDTRLLEKEHRAFALLARGCMSSPIESCIADAIRASSTDNYPVESILNTLEKRDRIGRTPSYWSSTGQHKTTVPESLLYKLIGDLCLITEVSIHPFQAYFQRGHPIYSSHYVRFRLGHEKDNSPHYNNSQDKKGEPGKSSIESNYVWTYTSQEFSMAQENRLQSFQLPEPVLCIGGYLLVEFLGRVQTQEMDGQYYICVSHVKVEGRSLAKSFRVENVDDNGKFGLKVLSYNDPKKMEEMDAEAGQDMDAEAGQSQLRNLEQLLNLLHRHPLDVVDYVWPDESDDEYAESEDEAEP

SEQ ID NO: 26676 - protein, 296 aa, Arabidopsis thaliana
  peptide (1)..(296): Ceres Seq. ID no. 12422633
MDTRLLEKEHRAFALLARGCMSSPIESCIADAIRASSTDNYPVESILNTLEKRDRIGRTPSYWSSTGQHKTTVPESLLYKLIGDLCLITEVSIHPFQAYFQRGHPIYSSHYVRFRLGHEKDNSPHYNNSQDKKGEPGKSSIESNYVWTYTSQEFSMAQENRLQSFQLPEPVLCIGGYLLVEFLGRVQTQEMDGQYYICVSHVKVEGRSLAKSFRVENVDDNGKFGLKVLSYNDPKKMEEMDAEAGQDMDAEAGQSQLRNLEQLLNLLHRHPLDVVDYVWPDESDDEYAESEDEAEP

SEQ ID NO: 26677 - protein, 276 aa, Arabidopsis thaliana
  peptide (1)..(276): Ceres Seq. ID no. 12422634
MSSPIESCIADAIRASSTDNYPVESILNTLEKRDRIGRTPSYWSSTGQHKTTVPESLLYKLIGDLCLITEVSIHPFQAYFQRGHPIYSSHYVRFRLGHEKDNSPHYNNSQDKKGEPGKSSIESNYVWTYTSQEFSMAQENRLQSFQLPEPVLCIGGYLLVEFLGRVQTQEMDGQYYICVSHVKVEGRSLAKSFRVENVDDNGKFGLKVLSYNDPKKMEEMDAEAGQDMDAEAGQSQLRNLEQLLNLLHRHPLDVVDYVWPDESDDEYAESEDEAEP

SEQ ID NO: 26678 - DNA, 1259 bp, Arabidopsis thaliana
  misc_feature (1)..(1259): Ceres Seq. ID no. 12324060
  misc_feature (1)..(1259): Ortholog of  Ceres SEQ ID NO 15175949 as cited in SEQ ID NO 58819
  misc_feature (1)..(1259): Ortholog of  Ceres SEQ ID NO 13596660 as cited in SEQ ID NO 63180
gtgtctcatctttcctctcctcttccatcgcttagtcgcctctctcttcgttgttgcagctctcttcctgctcacgatatggagacaaaaccaagtcaaggcctttacccacttcaccgttgcaaaaccatacatctggtgagacatgctcaagggattcacaatgttgaaggagagaagaaccataaggcttacttatctgaggatctctttgatgcacatcttacacctcttggatggcaacaagttgataatttacacaagcatgttaaggcaagtggtatttccaatagaattgagttggtagttgtatctcctctgctcaggtaatatacttaacttcttattgatatgatcttaacgctattgcttggattcttgcttgagaatagtcatcttgagttaaacgtccttattgatttgtgttatgccatttcgttctttgataagcagtatcaataacacatctcatctcttcacttttgtctttgttttaggactttgcaaacagcggtcggaacttttggtggggaaggttacaaagatggtgttaatacacctctgcttatgaccgcaggtgctggaaacagcgatcgtcctgctatatcaagcttaaattgtccaccattcattgcggttgaatcctgccgagaacatttggtatgtttactattctaccttttgcatgaatagcattttcttgagatgaaaacttttgcaatgttcttggttcagggtgttcatccttgtgacagaagaagcaatgtcaccaagtaccgcgaattattccctgcgattgatttttcattgatagaaactgataaagatgtcttgtggaagcctgacgttagagaggaggatcaagatattgcggccagaggcgtgaagttctttaactggttgagtacaaggaaagaaaaagagattgcggttgtaactcatagtgggttcttgtatcaaacattaaactcatttggaaacgattgtgatccatctgtgaaaaacgagatttctaaaaaatttgtcaactgtgaactccgttcatttgttcttgtagataaatgcatgagcagttcggatcctccaatgaccaactatcccggaacaatacttaccggagaagatgcttctagtgatattgctgatcagaagtagttatatgtattatgttaatcttatatgaatctcaaagctgtatatttctatacaatggaatagaaaatggagttagacgtaactattttatttaacgttaccgt

SEQ ID NO: 26679 - protein, 149 aa, Arabidopsis thaliana
  peptide (1)..(149): Ceres Seq. ID no. 12324061
MKTFAMFLVQGVHPCDRRSNVTKYRELFPAIDFSLIETDKDVLWKPDVREEDQDIAARGVKFFNWLSTRKEKEIAVVTHSGFLYQTLNSFGNDCDPSVKNEISKKFVNCELRSFVLVDKCMSSSDPPMTNYPGTILTGEDASSDIADQK

SEQ ID NO: 26680 - protein, 144 aa, Arabidopsis thaliana
  peptide (1)..(144): Ceres Seq. ID no. 12324062
MFLVQGVHPCDRRSNVTKYRELFPAIDFSLIETDKDVLWKPDVREEDQDIAARGVKFFNWLSTRKEKEIAVVTHSGFLYQTLNSFGNDCDPSVKNEISKKFVNCELRSFVLVDKCMSSSDPPMTNYPGTILTGEDASSDIADQK

SEQ ID NO: 26681 - protein, 109 aa, Arabidopsis thaliana
  peptide (1)..(109): Ceres Seq. ID no. 12324063
VSHLSSPLPSLSRLSLRCCSSLPAHDMETKPSQGLYPLHRCKTIHLVRHAQGIHNVEGEKNHKAYLSEDLFDAHLTPLGWQQVDNLHKHVKASGISNRIELVVVSPLLR

SEQ ID NO: 26682 - DNA, 949 bp, Arabidopsis thaliana
  misc_feature (1)..(949): Ceres Seq. ID no. 12331519
  misc_feature (1)..(949): Ortholog of  Ceres SEQ ID NO 15179139 as cited in SEQ ID NO 1093
  misc_feature (1)..(949): Ortholog of  Ceres SEQ ID NO 15226793 as cited in SEQ ID NO 58689
attaaaaccaaagatcaatctcttcttaatagtcaatcatatatcaaaaaatttaaactcttcttgatcaatggcttcttcttctgctgctatgtctcttgaatccatctctatgacaactctcaacaatctctctcgtaatcatcaatctcaccgcagttctcttcttggtttctcaagatctttccaaaaccttggaatctcatctaacggtccagatttctcctcccgatcaagatctactacttccaagaacctcaacgttactcgagctttcttctggaattggggcaagaagaccgaaaactccagaccaagtaagatccaagaactaaacgtgtatgagctcaacgaaggagatagaaacagtccagcagttcttaaactcggcaagaaaccaacagagctttgtctcggagatcttgttccatttaccaacaaactctacaccggcgatctcaagaaacgcgtgggaatcacggcaggtctctgcgttttgatccaacacgttcctgaaaagagcggtgacagattcgaagctagttacagcttctactttggtgactatggtcacttgtctgtacaaggacaatacttgacttatgaagacacgttcctcgctgtcactggtggctctggaatctttgaaggtgcgtacggacaggttaagcttcgtcagcttgtgtatccgacaaaactgttctacactttttaccttaaagggttagctaatgatttaccgctggagcttactggaacggcggttacgccgtcgaaggatgtgaaaccggcaccggaagctaaggcgatggagcctagtggagttataagtaactttactaattaagtaattagctgtttaatagttgttttgttttgtaatagaatattttgatgagttgtgtgaggttagttaatgatgtgttgagggaataaagtatttattttg

SEQ ID NO: 26683 - protein, 258 aa, Arabidopsis thaliana
  peptide (1)..(258): Ceres Seq. ID no. 12331520
MASSSAAMSLESISMTTLNNLSRNHQSHRSSLLGFSRSFQNLGISSNGPDFSSRSRSTTSKNLNVTRAFFWNWGKKTENSRPSKIQELNVYELNEGDRNSPAVLKLGKKPTELCLGDLVPFTNKLYTGDLKKRVGITAGLCVLIQHVPEKSGDRFEASYSFYFGDYGHLSVQGQYLTYEDTFLAVTGGSGIFEGAYGQVKLRQLVYPTKLFYTFYLKGLANDLPLELTGTAVTPSKDVKPAPEAKAMEPSGVISNFTN

SEQ ID NO: 26684 - protein, 251 aa, Arabidopsis thaliana
  peptide (1)..(251): Ceres Seq. ID no. 12331521
MSLESISMTTLNNLSRNHQSHRSSLLGFSRSFQNLGISSNGPDFSSRSRSTTSKNLNVTRAFFWNWGKKTENSRPSKIQELNVYELNEGDRNSPAVLKLGKKPTELCLGDLVPFTNKLYTGDLKKRVGITAGLCVLIQHVPEKSGDRFEASYSFYFGDYGHLSVQGQYLTYEDTFLAVTGGSGIFEGAYGQVKLRQLVYPTKLFYTFYLKGLANDLPLELTGTAVTPSKDVKPAPEAKAMEPSGVISNFTN

SEQ ID NO: 26685 - protein, 244 aa, Arabidopsis thaliana
  peptide (1)..(244): Ceres Seq. ID no. 12331522
MTTLNNLSRNHQSHRSSLLGFSRSFQNLGISSNGPDFSSRSRSTTSKNLNVTRAFFWNWGKKTENSRPSKIQELNVYELNEGDRNSPAVLKLGKKPTELCLGDLVPFTNKLYTGDLKKRVGITAGLCVLIQHVPEKSGDRFEASYSFYFGDYGHLSVQGQYLTYEDTFLAVTGGSGIFEGAYGQVKLRQLVYPTKLFYTFYLKGLANDLPLELTGTAVTPSKDVKPAPEAKAMEPSGVISNFTN

SEQ ID NO: 26686 - DNA, 1238 bp, Arabidopsis thaliana
  misc_feature (1)..(1238): Ceres Seq. ID no. 12421213
  misc_feature (1)..(1238): Ortholog of  Ceres SEQ ID NO 13598714 as cited in SEQ ID NO 62656
  misc_feature (1)..(1238): Ortholog of  Ceres SEQ ID NO 13597519 as cited in SEQ ID NO 64759
  misc_feature (1)..(1238): Ortholog of  Ceres SEQ ID NO 13597870 as cited in SEQ ID NO 64982
  misc_feature (1)..(1238): Ortholog of  Ceres SEQ ID NO 13656123 as cited in SEQ ID NO 65212
  misc_feature (1)..(1238): Ortholog of  Ceres SEQ ID NO 13595926 as cited in SEQ ID NO 67778
acaacaaacacaacttctacaagactcaaatagtttctatttaattactaaaaagaaaaatgggtcgtggttacaatttgctattcgttctagtaacgtttttagtattggttgcagctgtaaccgcacaagggaaccgtggctcaaacagcggtggtggtcgaagaccacatgttgggttttatgggaatagatgccgaaacgtagagtctattgtgagatctgtagttcagtctcatgtccggtctatcccggctaatgcacctggaattttgcgaatgcatttccacgattgctttgtccatggctgcgatggctcggttctcctcgctggtaacacctcagagagaaccgcagttccgaaccgttcattgagagggttcgaagttattgaagaagctaaggctcggcttgagaaggcttgtcctcgtaccgtttcttgtgctgatattctcacccttgcagcccgagacgccgtcgttttgaccggtggacaacgctgggaagtgcccttgggacgtctcgacggccgaatctcgcaagcctcagacgtgaacttgcccggaccaagcgactccgttgctaagcagaagcaagacttcgctgctaaaactctcaacacattagacctcgtgactcttgttggcggacacacaataggaactgctggctgcggtctagtaaggggaaggttcgttaacttcaacggcacaggacaacctgacccatcaatcgacccgagttttgtgccgctgattctggctcagtgccctcaaaatggaggcacccgagtggagttagacgagggaagtgttgacaagtttgacacatcgttcctaaggaaggtgacgtcaagtcgcgtggttctccaatccgatctagtcctatggaaggatcccgagacccgagccatcattgaacgtttattaggattacgccgaccatccttgaggttcggaaccgagttcgggaagtcgatggtcaaaatgagtctcatagaagttaagactggatcagatggggagattcgtcgggtttgttccgccatcaactaagatttaaaaaaacacaaatgtgagctttgtttttcatttatgaattcgttaattaataatcacttgttttaaataaaagcttgctacagcattttgtggtcgatggttacgttttgattttcaagtgtaagattgtacttgtaaacaaaaaatgtattatataaaagtgttatttgtttctcc

SEQ ID NO: 26687 - protein, 331 aa, Arabidopsis thaliana
  peptide (1)..(331): Ceres Seq. ID no. 12421214
MGRGYNLLFVLVTFLVLVAAVTAQGNRGSNSGGGRRPHVGFYGNRCRNVESIVRSVVQSHVRSIPANAPGILRMHFHDCFVHGCDGSVLLAGNTSERTAVPNRSLRGFEVIEEAKARLEKACPRTVSCADILTLAARDAVVLTGGQRWEVPLGRLDGRISQASDVNLPGPSDSVAKQKQDFAAKTLNTLDLVTLVGGHTIGTAGCGLVRGRFVNFNGTGQPDPSIDPSFVPLILAQCPQNGGTRVELDEGSVDKFDTSFLRKVTSSRVVLQSDLVLWKDPETRAIIERLLGLRRPSLRFGTEFGKSMVKMSLIEVKTGSDGEIRRVCSAIN

SEQ ID NO: 26688 - protein, 258 aa, Arabidopsis thaliana
  peptide (1)..(258): Ceres Seq. ID no. 12421215
MHFHDCFVHGCDGSVLLAGNTSERTAVPNRSLRGFEVIEEAKARLEKACPRTVSCADILTLAARDAVVLTGGQRWEVPLGRLDGRISQASDVNLPGPSDSVAKQKQDFAAKTLNTLDLVTLVGGHTIGTAGCGLVRGRFVNFNGTGQPDPSIDPSFVPLILAQCPQNGGTRVELDEGSVDKFDTSFLRKVTSSRVVLQSDLVLWKDPETRAIIERLLGLRRPSLRFGTEFGKSMVKMSLIEVKTGSDGEIRRVCSAIN

SEQ ID NO: 26689 - DNA, 1167 bp, Arabidopsis thaliana
  misc_feature (1)..(1167): Ceres Seq. ID no. 12324113
  misc_feature (1)..(1167): Ortholog of  Ceres SEQ ID NO 14308077 as cited in SEQ ID NO 58566
  misc_feature (1)..(1167): Ortholog of  Ceres SEQ ID NO 15226608 as cited in SEQ ID NO 64190
caattccgccgagtaagtagtaaccacatttttctcgctttgccgtcttctccggcgattttcagacactaattttctctccggttgttgcaatcatattttctgtcggaagatattgaaatcagaaaccgggaaaaatgacttcgtttcttagtttctccgccatttcagctcatccacctactttttccggcgcttcatttcgtcctcgctctttctctccccgattgttcaagtcttgtgttaagtgcacttatgctgaagctggattaagcagcgcttcatggtcagcccctattgacattgtggcagatgtcaaatccgaaagggttgtagttcttggtgggaatggtttcgttggctcagctatctgcaaagcagcaatctccaatggtattgaggttgtgagtgttagcaggtcaggtcgtcctaacttcgaagattcatggttggatcaggttacatgggttactggtgatgttttctatttgaattgggatgaagtacttcttggtgctactgctgtagtttcaaccattggtggttttggaaatgaagaacagatgaaaagaatcaatggtgaagctaacgttaccgctgtgaatgctgctaaggattttggggtccctaagttcgtcttgatcacggttcacgattacaatcttccgccatttattctctccaacggatatttcactggaaaacgtaacgcggaggcagaacttctttccaagtatcccacctcaggagttgtgctaagacccggtttcatatacgggaaacgaaaagtgaacggaatcgaggtcccgcttgatctagtcggggagccactagacaagatctatgattcagcagagaggttcattagaccattgaggtctctccctgcatctgatctcatcttggctccaccggttaacgtcgatgatttagcacttgctgtgatcaacgctgttaaagatgacgacttctttggcattttcactattgagcagatcaaagaagcagctgcaaaaatgagagcgtgaagagtctttagatagataccaaggagtggttattggtttgtataattgtatgcgaaaagtattaataattacatgaatagctctccctttgtcaaattgtaatgtatatcatttgtaaacgtatatattatttacttct

SEQ ID NO: 26690 - protein, 296 aa, Arabidopsis thaliana
  peptide (1)..(296): Ceres Seq. ID no. 12324114
MTSFLSFSAISAHPPTFSGASFRPRSFSPRLFKSCVKCTYAEAGLSSASWSAPIDIVADVKSERVVVLGGNGFVGSAICKAAISNGIEVVSVSRSGRPNFEDSWLDQVTWVTGDVFYLNWDEVLLGATAVVSTIGGFGNEEQMKRINGEANVTAVNAAKDFGVPKFVLITVHDYNLPPFILSNGYFTGKRNAEAELLSKYPTSGVVLRPGFIYGKRKVNGIEVPLDLVGEPLDKIYDSAERFIRPLRSLPASDLILAPPVNVDDLALAVINAVKDDDFFGIFTIEQIKEAAAKMRA

SEQ ID NO: 26691 - protein, 154 aa, Arabidopsis thaliana
  peptide (1)..(154): Ceres Seq. ID no. 12324115
MKRINGEANVTAVNAAKDFGVPKFVLITVHDYNLPPFILSNGYFTGKRNAEAELLSKYPTSGVVLRPGFIYGKRKVNGIEVPLDLVGEPLDKIYDSAERFIRPLRSLPASDLILAPPVNVDDLALAVINAVKDDDFFGIFTIEQIKEAAAKMRA

SEQ ID NO: 26692 - DNA, 1094 bp, Arabidopsis thaliana
  misc_feature (1)..(1094): Ceres Seq. ID no. 12324109
  misc_feature (1)..(1094): Ortholog of  Ceres SEQ ID NO 15169419 as cited in SEQ ID NO 58491
  misc_feature (1)..(1094): Ortholog of  Ceres SEQ ID NO 15179026 as cited in SEQ ID NO 0
aatccaacttttatctacggtccctgaaaccatctctttgtcttttggcatatttccctccttaagtcaactatctctttgtctctatatcatctttctctcggacactctctttggatcgtcattttctctctatcgactaaattttaagagtggaatgggtatatttcctggatttggtggcttgatcaaccagaacactcaagagcctcctaaggctgagaatgtgaaatctaagtcaaggtcagaaataaaaaatactgatcacgaagagagagatgagatgaaggagcaactaaaactttggagacatgcagagaagaaagaacaatgggaagatgtccctgctaaggtgaaggtggaaacagaagatggtctttgccatgtggacatggtatttacattaggattgcctcctcaagcagcctacgacgttttgactaatcccgacaaccaatcatactcaagaataattaaccaacgccacgaacttctggataacgtatcaagaaaagtgttgacggataatggatcgagccagacggtggaggcagagaaagctgtggcctagaagtttctttcatggtcgggaactatcccgataagtctagatttcgtcgaaaaccgtaaaaatctttctgcagtatatatgaaaaggaaaatgatgttcatgaaaagttttgagggtagttggaaagtggagccaatatacgtagattcaaaacgtttgtgcaagcaaatgaagccaaaaagtcgagaagaataccataaatgtagtggtggacaaggaaagattgcgtcgaaggtgaaaatgaaccagacctttcagccttcttttccttttaatctgccaccgctttcttggtacatccgtgatatcaccatcaagattactaaggctctgatacaagatcttcaagatatgggcgccaagctccgaggcgtttgaaatgccctcaaacattcgataggtttctaaatcactatagtataaatccgaagaggacaaatactaatctttataatcacttcattcatcttaacaagtgtattctttataccgaataaaaaaaatgagtatcgtgttaaatgtt

SEQ ID NO: 26693 - protein, 189 aa, Arabidopsis thaliana
  peptide (1)..(189): Ceres Seq. ID no. 12324110
IQLLSTVPETISLSFGIFPSLSQLSLCLYIIFLSDTLFGSSFSLYRLNFKSGMGIFPGFGGLINQNTQEPPKAENVKSKSRSEIKNTDHEERDEMKEQLKLWRHAEKKEQWEDVPAKVKVETEDGLCHVDMVFTLGLPPQAAYDVLTNPDNQSYSRIINQRHELLDNVSRKVLTDNGSSQTVEAEKAVA

SEQ ID NO: 26694 - protein, 137 aa, Arabidopsis thaliana
  peptide (1)..(137): Ceres Seq. ID no. 12324111
MGIFPGFGGLINQNTQEPPKAENVKSKSRSEIKNTDHEERDEMKEQLKLWRHAEKKEQWEDVPAKVKVETEDGLCHVDMVFTLGLPPQAAYDVLTNPDNQSYSRIINQRHELLDNVSRKVLTDNGSSQTVEAEKAVA

SEQ ID NO: 26695 - protein, 99 aa, Arabidopsis thaliana
  peptide (1)..(99): Ceres Seq. ID no. 12324112
MKRKMMFMKSFEGSWKVEPIYVDSKRLCKQMKPKSREEYHKCSGGQGKIASKVKMNQTFQPSFPFNLPPLSWYIRDITIKITKALIQDLQDMGAKLRGV

SEQ ID NO: 26696 - DNA, 1334 bp, Arabidopsis thaliana
  misc_feature (1)..(1334): Ceres Seq. ID no. 13487478
  misc_feature (1)..(1334): Ortholog of  Ceres SEQ ID NO 13598282 as cited in SEQ ID NO 68138
attctcatatttacttttgatctcgtggtgttagaatcaaagaaaccgcttcaaggatggtgagtgaaggagcaacaagaaaagaacttaacctctgtttcgagaatatgaagatggaaggagttttgatctctgagtggaaagatatccctgtggagcttctcatgaagattttaaaccttgttgatgatcggactgtgatcattgcttcttgtatttgtagtggctggagagatgctgtttcccttggcctcactcgcctctccctctcttggtgcaagaagaatatgaacagtttggttctatctcttgctcccaaattcgtaaagcttcagactttagtactgcgacaggacaaaccgcagcttgaggacaacgcggtggaagccatagcaaatcactgtcatgagctacaagatttggacttaagcaaaagctcgaaaatcactgaccattccctatattcacttgctcgtggttgtactaacctgactaaactcaaccttagcggctgcacttcgttcagcgacactgctcttgcgcatttgacaagattttgcaggaagctcaaaattctgaatctttgtggttgtgttgaagctgtatctgacaatacattgcaggctattggagaaaactgcaatcagttgcagtcactaaacttgggatggtgtgagaatataagtgatgatggagttatgagtttagcttatggttgtcctgatttaagaactcttgatctttgtagctgtgttctaatcacagatgagagtgttgtggctttggcgaatcggtgcattcacttgaggtcattggggttatactactgcagaaacattacagacagagcaatgtactctttagctcagagcggagtcaagaacaaacacgagatgtggcgagcggtaaagaaaggaaaattcgatgaagaaggactaagaagccttaacattagtcaatgcacttacctaacaccttcagctgttcaagctgtctgtgatacattccctgctctccacacttgttcaggcagacattcacttgtcatgagcggttgtttgaatctacaatctgttcattgtgcttgtatccttcaagctcaccgcactcacaccgtttaccctcacccggcgcattgaaacggtgtgtgagccagagggtctactactctctagtatgtgtgtacatacatataaccatatggtgttaataaagcttctttgagttccttctttgtctttgatgcaatcttaagattttaacattacctagtcttgaaaatcttgtaatgaatcgcgaaatacttatttcttctaacaatttgtttaagttgc

SEQ ID NO: 26697 - protein, 360 aa, Arabidopsis thaliana
  peptide (1)..(360): Ceres Seq. ID no. 13487479
MVSEGATRKELNLCFENMKMEGVLISEWKDIPVELLMKILNLVDDRTVIIASCICSGWRDAVSLGLTRLSLSWCKKNMNSLVLSLAPKFVKLQTLVLRQDKPQLEDNAVEAIANHCHELQDLDLSKSSKITDHSLYSLARGCTNLTKLNLSGCTSFSDTALAHLTRFCRKLKILNLCGCVEAVSDNTLQAIGENCNQLQSLNLGWCENISDDGVMSLAYGCPDLRTLDLCSCVLITDESVVALANRCIHLRSLGLYYCRNITDRAMYSLAQSGVKNKHEMWRAVKKGKFDEEGLRSLNISQCTYLTPSAVQAVCDTFPALHTCSGRHSLVMSGCLNLQSVHCACILQAHRTHTVYPHPAH

SEQ ID NO: 26698 - protein, 343 aa, Arabidopsis thaliana
  peptide (1)..(343): Ceres Seq. ID no. 13487480
MKMEGVLISEWKDIPVELLMKILNLVDDRTVIIASCICSGWRDAVSLGLTRLSLSWCKKNMNSLVLSLAPKFVKLQTLVLRQDKPQLEDNAVEAIANHCHELQDLDLSKSSKITDHSLYSLARGCTNLTKLNLSGCTSFSDTALAHLTRFCRKLKILNLCGCVEAVSDNTLQAIGENCNQLQSLNLGWCENISDDGVMSLAYGCPDLRTLDLCSCVLITDESVVALANRCIHLRSLGLYYCRNITDRAMYSLAQSGVKNKHEMWRAVKKGKFDEEGLRSLNISQCTYLTPSAVQAVCDTFPALHTCSGRHSLVMSGCLNLQSVHCACILQAHRTHTVYPHPAH

SEQ ID NO: 26699 - protein, 341 aa, Arabidopsis thaliana
  peptide (1)..(341): Ceres Seq. ID no. 13487481
MEGVLISEWKDIPVELLMKILNLVDDRTVIIASCICSGWRDAVSLGLTRLSLSWCKKNMNSLVLSLAPKFVKLQTLVLRQDKPQLEDNAVEAIANHCHELQDLDLSKSSKITDHSLYSLARGCTNLTKLNLSGCTSFSDTALAHLTRFCRKLKILNLCGCVEAVSDNTLQAIGENCNQLQSLNLGWCENISDDGVMSLAYGCPDLRTLDLCSCVLITDESVVALANRCIHLRSLGLYYCRNITDRAMYSLAQSGVKNKHEMWRAVKKGKFDEEGLRSLNISQCTYLTPSAVQAVCDTFPALHTCSGRHSLVMSGCLNLQSVHCACILQAHRTHTVYPHPAH

SEQ ID NO: 26700 - DNA, 1875 bp, Arabidopsis thaliana
  misc_feature (1)..(1875): Ceres Seq. ID no. 12328067
  misc_feature (1)..(1875): Ortholog of  Ceres SEQ ID NO 14302990 as cited in SEQ ID NO 67543
attcctttttaacaatcttctgcattttcgaacttgctttgctgtgataaagttctctcctttcctttctaaaggaagaagaaaggctttatctctcaaaaccctcatccacaaaatcccctttaatccgctaatcagagggtttttctgtttttgtgttgcttcgttactacggttacattcttctcttccccttttgatttcaaaggtacgatctttatcctcaattgcgtttcgatcgtatctcaaattctcttcgatctctgacagaaagtttccaactttagtgaatcgcgaaattgggttcgtgttcttgctctgatttcggtgtaacccttcaatttcagaaccctcttgataccttaagaagaggcaatttgaagttttcttcacagatccgtcttagctctttctagagaatggcggatttgataccattttatctgaatattgtggcgtttctatgtactgttggagctattgctttggcgatatttcatatctacaggcatcttttgaattacacggaaccaacttatcagagatatattgtacgcattatcttcatggtcccggtttatgccttcatgtcattcttgtctcttgtgttacccaaaagctcgatatattttgattccatacgagaagtatatgaagcatgggttatctacaattttctatcgctgtgtttggcatgggttggaggcccaggatcagtagtgcttagtttgagtggtcgttctttaaagccatcatggtctcttatgacatgttgctttccgcctttaacactggacgggcgatttattcgacgatgcaagcagggttgtctgcaatttgtaattctgaagcctatcctagttgctgtcacacttgtgctttatgctaaagggaagtacaaggatggaaattttaaccctgatcaagcatatctctatcttaccatcatctataccatatcctacacagtggctttgtacgcacttgtgctgttttatatggcatgcagagatctacttcagccattcaatccagtcccaaagtttgtgatcataaagtctgtggtctttctaacctattggcagggtgttctcgttttccttgctgcaaaatctggattcataaagagtgcagaggcagcagctcattttcaaaattttataatatgtgtcgagatgctcattgctgcagcatgtcatttctatgcttttccatacaaggagtatgctggtgccaatgttgttggatctggcagtttctcaggaagcttatcacatgctgtaaaactaaatgacttttaccatgacactgttcaccagtttgctcctacctatcacgattatgtgctctataaccatcaagatggtggtgacgaggggacaaagaagtaccgatcgagaacctttgtgccaactggccaagagatggatgcaatgagaaaaaacaaacctgtgtatgcaaacaagatagatggtgtttcagtctcaagtagtctatcttcagaggcaagctcacctaaaagctccagcgtaacttctgatcctgcacgctctgatgctgtgaaatcttccttgctggtggatgcctcagattctcttgaaacaatgtatgatatgtcgctcattgacattgatctatctagtttccccagcaatgtcccatctgcaagtgaaagtgggcctagataggagcagagaaaatgtagaaatcaccattaacaggtacaaaacatgctcctaatagttgtattcagatgaatcttctgaggtgtgttcttagttggaagatgttgttagttggagacttgaggataaatgaaaaaagcttataaacccatttaccttttgtagctttatacaatgagtcttctactgc

SEQ ID NO: 26701 - protein, 422 aa, Arabidopsis thaliana
  peptide (1)..(422): Ceres Seq. ID no. 12328068
MADLIPFYLNIVAFLCTVGAIALAIFHIYRHLLNYTEPTYQRYIVRIIFMVPVYAFMSFLSLVLPKSSIYFDSIREVYEAWVIYNFLSLCLAWVGGPGSVVLSLSGRSLKPSWSLMTCCFPPLTLDGRFIRRCKQGCLQFVILKPILVAVTLVLYAKGKYKDGNFNPDQAYLYLTIIYTISYTVALYALVLFYMACRDLLQPFNPVPKFVIIKSVVFLTYWQGVLVFLAAKSGFIKSAEAAAHFQNFIICVEMLIAAACHFYAFPYKEYAGANVVGSGSFSGSLSHAVKLNDFYHDTVHQFAPTYHDYVLYNHQDGGDEGTKKYRSRTFVPTGQEMDAMRKNKPVYANKIDGVSVSSSLSSEASSPKSSSVTSDPARSDAVKSSLLVDASDSLETMYDMSLIDIDLSSFPSNVPSASESGPR

SEQ ID NO: 26702 - protein, 373 aa, Arabidopsis thaliana
  peptide (1)..(373): Ceres Seq. ID no. 12328069
MVPVYAFMSFLSLVLPKSSIYFDSIREVYEAWVIYNFLSLCLAWVGGPGSVVLSLSGRSLKPSWSLMTCCFPPLTLDGRFIRRCKQGCLQFVILKPILVAVTLVLYAKGKYKDGNFNPDQAYLYLTIIYTISYTVALYALVLFYMACRDLLQPFNPVPKFVIIKSVVFLTYWQGVLVFLAAKSGFIKSAEAAAHFQNFIICVEMLIAAACHFYAFPYKEYAGANVVGSGSFSGSLSHAVKLNDFYHDTVHQFAPTYHDYVLYNHQDGGDEGTKKYRSRTFVPTGQEMDAMRKNKPVYANKIDGVSVSSSLSSEASSPKSSSVTSDPARSDAVKSSLLVDASDSLETMYDMSLIDIDLSSFPSNVPSASESGPR

SEQ ID NO: 26703 - protein, 366 aa, Arabidopsis thaliana
  peptide (1)..(366): Ceres Seq. ID no. 12328070
MSFLSLVLPKSSIYFDSIREVYEAWVIYNFLSLCLAWVGGPGSVVLSLSGRSLKPSWSLMTCCFPPLTLDGRFIRRCKQGCLQFVILKPILVAVTLVLYAKGKYKDGNFNPDQAYLYLTIIYTISYTVALYALVLFYMACRDLLQPFNPVPKFVIIKSVVFLTYWQGVLVFLAAKSGFIKSAEAAAHFQNFIICVEMLIAAACHFYAFPYKEYAGANVVGSGSFSGSLSHAVKLNDFYHDTVHQFAPTYHDYVLYNHQDGGDEGTKKYRSRTFVPTGQEMDAMRKNKPVYANKIDGVSVSSSLSSEASSPKSSSVTSDPARSDAVKSSLLVDASDSLETMYDMSLIDIDLSSFPSNVPSASESGPR

SEQ ID NO: 26704 - DNA, 1214 bp, Arabidopsis thaliana
  misc_feature (1)..(1214): Ceres Seq. ID no. 12394983
  misc_feature (1)..(1214): Ortholog of  Ceres SEQ ID NO 12598859 as cited in SEQ ID NO 62872
  misc_feature (1)..(1214): Ortholog of  Ceres SEQ ID NO 12617350 as cited in SEQ ID NO 63777
  misc_feature (1)..(1214): Ortholog of  Ceres SEQ ID NO 13598749 as cited in SEQ ID NO 64341
  misc_feature (1)..(1214): Ortholog of  Ceres SEQ ID NO 15176153 as cited in SEQ ID NO 0
  misc_feature (1)..(1214): Ortholog of  Ceres SEQ ID NO 15179157 as cited in SEQ ID NO 0
aaatctcacaaaccaatctaaacatcaaagacaaaaaccaaacctctttcactattacacttttcctcaaaaaaaagaaaaatgtatttgttagtgtttaaactctttctatttttgtctcttcttcaaatctctgtctctgctagaaacctagcttcacaagaaccaaaccagtttcaactactcaagtaccacaaaggagctcttctctccggcaaaatctccgttaacctaatctggtacggcaaattcaaaccatctcaaagagcaatcatctccgacttcattacctcactcacacacacttctcctacgtccaaaactctccaccaaccatctgttgccacgtggtggaaaaccacagaaaaatactacaaactcgcaacacccagcaaaaactcatcacctctgtctctaactctcgggaaacaaatcatcgacgagtcttgctctctaggaaaatctttaaccgataaaaagattcaaaccctagcttcgaaaggagaccaacgcaacgccatcaacgtcgttttgacttcagctgacgttacggttacaggatttggtatgagtcgttgcgggactcacggacacgctcgtggtttaggtaaacgtggctccaagtttgcttacatttgggttggaaactctgagacacaatgtcctggtcaatgcgcgtggcctttccacgcgccggtgtacggtccacagagtccaccactagtggcaccaaacaatgacgtgggactcgatgggatggttattaacttagctagtcttttagctggaaccgcaacgaacccttttggtaatggttactatcaaggtccacaaaacgcaccgcttgaagctgcttctgcttgtcctggcgtttatggtaaaggagcttatcctggttacgctggagatttgcttgtggatactacaacgggaggtagttttaatgcgtatggtgcaaacggcaggaagtttttgcttcctgctttgtatgatcctacgacgtcggcttgctctactatggtctgaatactaaaaaaaagtccaatgtttggtctttggtagtagaaaataatattctagcgtaattcttttgttatgtttggttacaaattctagtataattcaatttattcattaatattattctcatttttcccttcatgttgtatgactgaaatcttgtcgcttggactataatttaacggaatattatt

SEQ ID NO: 26705 - protein, 314 aa, Arabidopsis thaliana
  peptide (1)..(314): Ceres Seq. ID no. 12394984
MYLLVFKLFLFLSLLQISVSARNLASQEPNQFQLLKYHKGALLSGKISVNLIWYGKFKPSQRAIISDFITSLTHTSPTSKTLHQPSVATWWKTTEKYYKLATPSKNSSPLSLTLGKQIIDESCSLGKSLTDKKIQTLASKGDQRNAINVVLTSADVTVTGFGMSRCGTHGHARGLGKRGSKFAYIWVGNSETQCPGQCAWPFHAPVYGPQSPPLVAPNNDVGLDGMVINLASLLAGTATNPFGNGYYQGPQNAPLEAASACPGVYGKGAYPGYAGDLLVDTTTGGSFNAYGANGRKFLLPALYDPTTSACSTMV

SEQ ID NO: 26706 - DNA, 1161 bp, Arabidopsis thaliana
  misc_feature (1)..(1161): Ceres Seq. ID no. 12370808
  misc_feature (1)..(1161): Ortholog of  Ceres SEQ ID NO 13594727 as cited in SEQ ID NO 52169
  misc_feature (1)..(1161): Ortholog of  Ceres SEQ ID NO 13596474 as cited in SEQ ID NO 62169
  misc_feature (1)..(1161): Ortholog of  Ceres SEQ ID NO 13596969 as cited in SEQ ID NO 63375
  misc_feature (1)..(1161): Ortholog of  Ceres SEQ ID NO 13597519 as cited in SEQ ID NO 64759
  misc_feature (1)..(1161): Ortholog of  Ceres SEQ ID NO 13597870 as cited in SEQ ID NO 64982
  misc_feature (1)..(1161): Ortholog of  Ceres SEQ ID NO 12567001 as cited in SEQ ID NO 0
  misc_feature (1)..(1161): Ortholog of  Ceres SEQ ID NO 13587054 as cited in SEQ ID NO 0
cacaccaataattaattagacaaaagataagagagaatagagagagagagagcaatggccaatgcgaagcccttttgtctcctcggcttcttttgtctgttattacagttattctccatcttccatatcggaaatggggaattggagatgaactattacaaagagagttgtccaaaagcggaagagataataagacaacaagtggagacgctttactacaaacacggtaacacagccgtatcttggctccgtaatctcttccatgactgtgtcgtcaagtcgtgtgatgcgtcgctgctgctagagacagcgagaggtgtggaatctgagcagaaatcgaagaggagtttcggtatgagaaactttaagtacgttaagattatcaaagacgcactcgagaaagagtgtccttccacagtctcttgtgctgatattgtcgctctttctgcgagagacggtattgtcatgttgaaagggccaaagatagagatgataaagacaggaaggagagatagtagagggagctacttgggagatgttgagactctaatccctaaccacaatgactctctctcatctgttatctccacctttaactccattggcatcgatgtcgaagccaccgtcgctctcttaggtgctcactcagtgggtagggtccactgcgttaacctagtgcaccggctatacccaacgattgaccctactctcgacccaagttacgccctttacttaaaaaaacgttgcccaagtccaacaccggacccgaacgccgtcttgtactcccgtaacgatcgtgagactccgatggttgtggacaacatgtattataagaacatcatggcccataaggggcttcttgtcattgatgatgagctagccaccgatcccaggaccgcaccgtttgtggccaagatggctgcggacaataattacttccatgagcagttctcacgtggcgtcaggctcttgtccgagaccaacccgctcacgggagaccaaggggagatcaggaaggattgtcgttatgtgaactaatattgatggtccttgcataaaggatatatattgtggaaaagtaataataataatatatatgtgtatgaatgtctgtcaatgttttggattcaataagaagaaataccaaaaccgttgtggatc

SEQ ID NO: 26707 - protein, 327 aa, Arabidopsis thaliana
  peptide (1)..(327): Ceres Seq. ID no. 12370809
MANAKPFCLLGFFCLLLQLFSIFHIGNGELEMNYYKESCPKAEEIIRQQVETLYYKHGNTAVSWLRNLFHDCVVKSCDASLLLETARGVESEQKSKRSFGMRNFKYVKIIKDALEKECPSTVSCADIVALSARDGIVMLKGPKIEMIKTGRRDSRGSYLGDVETLIPNHNDSLSSVISTFNSIGIDVEATVALLGAHSVGRVHCVNLVHRLYPTIDPTLDPSYALYLKKRCPSPTPDPNAVLYSRNDRETPMVVDNMYYKNIMAHKGLLVIDDELATDPRTAPFVAKMAADNNYFHEQFSRGVRLLSETNPLTGDQGEIRKDCRYVN

SEQ ID NO: 26708 - protein, 296 aa, Arabidopsis thaliana
  peptide (1)..(296): Ceres Seq. ID no. 12370810
MNYYKESCPKAEEIIRQQVETLYYKHGNTAVSWLRNLFHDCVVKSCDASLLLETARGVESEQKSKRSFGMRNFKYVKIIKDALEKECPSTVSCADIVALSARDGIVMLKGPKIEMIKTGRRDSRGSYLGDVETLIPNHNDSLSSVISTFNSIGIDVEATVALLGAHSVGRVHCVNLVHRLYPTIDPTLDPSYALYLKKRCPSPTPDPNAVLYSRNDRETPMVVDNMYYKNIMAHKGLLVIDDELATDPRTAPFVAKMAADNNYFHEQFSRGVRLLSETNPLTGDQGEIRKDCRYVN

SEQ ID NO: 26709 - protein, 227 aa, Arabidopsis thaliana
  peptide (1)..(227): Ceres Seq. ID no. 12370811
MRNFKYVKIIKDALEKECPSTVSCADIVALSARDGIVMLKGPKIEMIKTGRRDSRGSYLGDVETLIPNHNDSLSSVISTFNSIGIDVEATVALLGAHSVGRVHCVNLVHRLYPTIDPTLDPSYALYLKKRCPSPTPDPNAVLYSRNDRETPMVVDNMYYKNIMAHKGLLVIDDELATDPRTAPFVAKMAADNNYFHEQFSRGVRLLSETNPLTGDQGEIRKDCRYVN

SEQ ID NO: 26710 - DNA, 799 bp, Arabidopsis thaliana
  misc_feature (1)..(799): Ceres Seq. ID no. 13509874
  misc_feature (1)..(799): Ortholog of  Ceres SEQ ID NO 15174048 as cited in SEQ ID NO 61892
atttcctaaaagaacgaacgacgccgtatacaccgagaagctcaacgttcgtcatcactcttctcgcttctcggcgtctccatcgccgtctctatctaatctcgtcctgcgtcgacctagtgagctacttcagattccggccatcacgcagctccagttgtatgctttgagagttaatacaaagatgacaacaatcgaaaccggtcagaaaactcaaaagtcttctccttccggttctggtactacccctactggtactcttaagcagtcatcagcatcgtttaaaaggtggggaaggagacacccgtttgtaagatatggacttccgatgatatctctcactgtatttggagccctcggactcggccaactccttcaaggcagttcagtaaggatattgcaaaggtaaaagatgaccaagaatgggagattatagaaacaagaaaggcactttcgagaacaggacctgtcgatgcctataaacctaaaaacacatccattgaagatgagctcaaggctatgcaagagaaggtggacataaacacgtacgagtacaagaaaattccaaagctaaacgaaagcaagtcgagttaagaagagtctttgtataagattagtctttttagatgtgtttcagttttaaatgactcttcagttcacataatcgcccaagtacaaattccagtaagttctgtctgggcttcctaaaaccaagaacaacgagggacttgccaattgttgataatacatgttgtcgtgttgatttacgacgtccaaatagatctgaaagaggttttat

SEQ ID NO: 26711 - protein, 135 aa, Arabidopsis thaliana
  peptide (1)..(135): Ceres Seq. ID no. 13509875
FPKRTNDAVYTEKLNVRHHSSRFSASPSPSLSNLVLRRPSELLQIPAITQLQLYALRVNTKMTTIETGQKTQKSSPSGSGTTPTGTLKQSSASFKRWGRRHPFVRYGLPMISLTVFGALGLGQLLQGSSVRILQR

SEQ ID NO: 26712 - protein, 74 aa, Arabidopsis thaliana
  peptide (1)..(74): Ceres Seq. ID no. 13509876
MTTIETGQKTQKSSPSGSGTTPTGTLKQSSASFKRWGRRHPFVRYGLPMISLTVFGALGLGQLLQGSSVRILQR

SEQ ID NO: 26713 - DNA, 1150 bp, Arabidopsis thaliana
  misc_feature (1)..(1150): Ceres Seq. ID no. 12322190
  misc_feature (1)..(1150): Ortholog of  Ceres SEQ ID NO 15180785 as cited in SEQ ID NO 0
aaaaaaagtttcagaatcgaactcgtctattctccgccggtgtgccgtcgccgatatgcttcgtcgtgtcttttacaagcgtgcacgtgatgatttatcttactgtcatcgtctgttgcacattccgtataacgaaccagagcctgactcaaaggcaatttctgaaatcgttggtatagtttcaaagaaagaagaagctgtattagttacggaaccaactcatcattggcgtaagaattgggaagatttgagaaagaataggttaacagctagtaatttcgcgcgtgctatcggattttcgcctgacggtagacgaaatctttggttagagaaaatcggggcagcgaaaccgtttgctggaaaccgagctacgttttgggacattgagaatgaggtcgaagcactcgagaggtacaacgagttaacgggaaatgaaatcctcatacctgagtttgttgtttataagaatggtgaaagccctgaagaaaactggttaggagcttctcctgatggagtgatcaatgtagttaaggacggtgttacttcgtgtggtgtgttagaagtgaaatgcccgtttgataaccgggataactcgaaagtttatccgtggaagaaggttccttataattgtgttccacaacttcagggtttaatggagattgtggatacagattggttggatttgtattgttggactcgcaatggaagcagtctctttagagtttggcgtgataccgcgttttgggaggatatgaaaccggcactgtttgatttttggcagaatcatgttttacctgcaagagagatatacaataactttgatataaaggatcctcaagtgaagctgagagagtttaaaccgaagcattggcatgaagattgcaagaagattatgcgtggagctgagagaatcagcgcaaacgcaaaccgtttgttctatgagatcgatgggaatcttgtagactgaggtttttgtaactgattatgtgaaatttgcaagcaagcaagccaggttcccttatttcatttgaatgttattttcttagtgtggaatgtagaaaacactaaatgaagctcttgtgttgagctaaagtacatatttcatattgtatactctgtttcttattgtctcatcagcttttgttacatc

SEQ ID NO: 26714 - protein, 321 aa, Arabidopsis thaliana
  peptide (1)..(321): Ceres Seq. ID no. 12322191
KKVSESNSSILRRCAVADMLRRVFYKRARDDLSYCHRLLHIPYNEPEPDSKAISEIVGIVSKKEEAVLVTEPTHHWRKNWEDLRKNRLTASNFARAIGFSPDGRRNLWLEKIGAAKPFAGNRATFWDIENEVEALERYNELTGNEILIPEFVVYKNGESPEENWLGASPDGVINVVKDGVTSCGVLEVKCPFDNRDNSKVYPWKKVPYNCVPQLQGLMEIVDTDWLDLYCWTRNGSSLFRVWRDTAFWEDMKPALFDFWQNHVLPAREIYNNFDIKDPQVKLREFKPKHWHEDCKKIMRGAERISANANRLFYEIDGNLVD

SEQ ID NO: 26715 - protein, 303 aa, Arabidopsis thaliana
  peptide (1)..(303): Ceres Seq. ID no. 12322192
MLRRVFYKRARDDLSYCHRLLHIPYNEPEPDSKAISEIVGIVSKKEEAVLVTEPTHHWRKNWEDLRKNRLTASNFARAIGFSPDGRRNLWLEKIGAAKPFAGNRATFWDIENEVEALERYNELTGNEILIPEFVVYKNGESPEENWLGASPDGVINVVKDGVTSCGVLEVKCPFDNRDNSKVYPWKKVPYNCVPQLQGLMEIVDTDWLDLYCWTRNGSSLFRVWRDTAFWEDMKPALFDFWQNHVLPAREIYNNFDIKDPQVKLREFKPKHWHEDCKKIMRGAERISANANRLFYEIDGNLVD

SEQ ID NO: 26716 - DNA, 1135 bp, Arabidopsis thaliana
  misc_feature (1)..(1135): Ceres Seq. ID no. 12324089
  misc_feature (1)..(1135): Ortholog of  Ceres SEQ ID NO 15179305 as cited in SEQ ID NO 0
agaacctcagatcttattcttagaagtttccccatgaaatccgagaagattcaaatgtaaattcagcctccgattcatatattttgctcaccggaaacttcagatcgagctactgcaatttgcggatcgtgttttttttttttctttcaattcacggtgtatttatctcgggagaagaagaatggatactttcacggcggaggatctgtcgacgatcggcggaatagcgacagtatcgctccttcactcgtttattccgacgcattggctacctttctccatcgtcggacgtgcgcagaaatggacgctttcgagaacactcctcgtcactgcatttggagcagtcctacatgttatatccacttctctccttggtataacagcaatcacaatggcgaataccatcgctggtgaagagactgttcacaaacttgcttcccttttgcttgtatttctcggtggaagctatgttttgctgtttttggctggtaaaggtggtcacactcattctcataaccaacccatggagaaaatggctgttgctggacttgtccttgttcctgcattatctccttgtgcaacaactctcccggttttcctcgctgttggaaattccaagtccatgatggttctcgccatcatagttctgctcttcagcaccatattggttatgacatcgctggttgctctatcgttctatggtgcaagccagctcaagtttcactgggtggagcggtacgacaaactactggttggttcagtcctgtgtttggtaggtatcttaacccttctcttccatgatcatgaccatggcggtcatgaagcacatcaactccacaggaaaatcattactctttagataccgtttcgagtctctgttttgcctatctgtcatgtctgtttgttgtagagcgtcttaaggtctattaatctttctgcttcgcgttgtatgtctataactagttgtaacgctctctgttgcacgtgaagaaacatatggaagcattaaattccttaaatagaacaactctttggaggtctagtgtaaggcttgtagcttttacataattttgtagttgttccgttgataaagttgggtttaatttttgtaatacaacatagttgtcttcgagtc

SEQ ID NO: 26717 - protein, 225 aa, Arabidopsis thaliana
  peptide (1)..(225): Ceres Seq. ID no. 12324090
MDTFTAEDLSTIGGIATVSLLHSFIPTHWLPFSIVGRAQKWTLSRTLLVTAFGAVLHVISTSLLGITAITMANTIAGEETVHKLASLLLVFLGGSYVLLFLAGKGGHTHSHNQPMEKMAVAGLVLVPALSPCATTLPVFLAVGNSKSMMVLAIIVLLFSTILVMTSLVALSFYGASQLKFHWVERYDKLLVGSVLCLVGILTLLFHDHDHGGHEAHQLHRKIITL

SEQ ID NO: 26718 - protein, 155 aa, Arabidopsis thaliana
  peptide (1)..(155): Ceres Seq. ID no. 12324091
MANTIAGEETVHKLASLLLVFLGGSYVLLFLAGKGGHTHSHNQPMEKMAVAGLVLVPALSPCATTLPVFLAVGNSKSMMVLAIIVLLFSTILVMTSLVALSFYGASQLKFHWVERYDKLLVGSVLCLVGILTLLFHDHDHGGHEAHQLHRKIITL

SEQ ID NO: 26719 - DNA, 1569 bp, Arabidopsis thaliana
  misc_feature (1)..(1569): Ceres Seq. ID no. 15178660
  misc_feature (1)..(1569): Ortholog of  Ceres SEQ ID NO 14315346 as cited in SEQ ID NO 53970
  misc_feature (1)..(1569): Ortholog of  Ceres SEQ ID NO 14309682 as cited in SEQ ID NO 58908
atccattctctatcaaattctaaaatcaaaaatggctctgcatttgagatcttctttttcatcaaaatcgactttactcaatattctcagacacaacctcggtttcggttctaggagccacgtgactcggcatatccgcaaaatcctaccacatgacccccccgcttcgaggttcacagaatccaattagccgtctctgtaataccatggcggagccagagacactctctagttttgttcagcacgaatacgccaacaatcatcaggtaatggactttccaggaggaaaggtagctttcacacctgagattcaattcatatcagaatctgataaagagcgtgttccttgctaccgtgttcttgatgacaatggccaacttatcaccaacagccagtttgttcaggttagcgaggaggttgcggtgaagatatatagcgatatggttactcttcaaattatggataacatattctacgaagctcaaagacaaggcagactttccttttacgctactgcaatcggtgaagaggccattaatattgcatcagctgctgctctcactcctcaagatgttatctttcctcagtacagagagcctggtgttctactatggcgtggtttcacgcttcaagaatttgcaaaccagtgttttgggaacaaatctgattatggaaaaggcaggcagatgcccgtccactatggctctaacaagctcaattattttaccgtttctgcaaccattgctacgcagttaccaaacgcggttggtgctgcttattccttaaagatggacaagaaggatgcatgtgcggtcacatattttggcgatggtggcacgagtgagggagatttccatgctgctttgaattttgcagcagttatggaagctcctgttttatttatttgccggaacaatggatgggccatcagtactcccacctcagatcagttccgaagtgatggtgtagtggtcaaaggccgtgcttatggaattcgaagtatacgtgtggatggaaatgatgcacttgccatgtacagtgcggtacatactgctcgcgaaatggcaattagagaacagaggccaatcttgattgaggccttaacataccgtgtaggacaccattcaacatcagatgattccactaggtaccgctctgcaggtgagatagagtggtggaacaaagcaagaaacccactgtctaggtttaggacatggattgaaagtaatggctggtggagtgataaaacggaatcggatctgagaagcagaatcaaaaaagagatgttagaagcgctccgggttgcagagaagactgagaaaccgaatctgcagaacatgttctcagatgtctacgatgttcctccatctaacctcagggaacaagaacttctggtgaggcagacgatcaatagtcacccacaagattacccatcagatgtgcctctttaggtagactctagttgtatgctttgtgtagtaatttatgtaagccaaataatctacattgtgtattgaaatcttttattgaaatcgagaccaatattcaaaaacaaaaaaaaaaaaaaaa

SEQ ID NO: 26720 - protein, 432 aa, Arabidopsis thaliana
  peptide (1)..(432): Ceres Seq. ID no. 15178661
MTPPLRGSQNPISRLCNTMAEPETLSSFVQHEYANNHQVMDFPGGKVAFTPEIQFISESDKERVPCYRVLDDNGQLITNSQFVQVSEEVAVKIYSDMVTLQIMDNIFYEAQRQGRLSFYATAIGEEAINIASAAALTPQDVIFPQYREPGVLLWRGFTLQEFANQCFGNKSDYGKGRQMPVHYGSNKLNYFTVSATIATQLPNAVGAAYSLKMDKKDACAVTYFGDGGTSEGDFHAALNFAAVMEAPVLFICRNNGWAISTPTSDQFRSDGVVVKGRAYGIRSIRVDGNDALAMYSAVHTAREMAIREQRPILIEALTYRVGHHSTSDDSTRYRSAGEIEWWNKARNPLSRFRTWIESNGWWSDKTESDLRSRIKKEMLEALRVAEKTEKPNLQNMFSDVYDVPPSNLREQELLVRQTINSHPQDYPSDVPL

SEQ ID NO: 26721 - protein, 414 aa, Arabidopsis thaliana
  peptide (1)..(414): Ceres Seq. ID no. 15178662
MAEPETLSSFVQHEYANNHQVMDFPGGKVAFTPEIQFISESDKERVPCYRVLDDNGQLITNSQFVQVSEEVAVKIYSDMVTLQIMDNIFYEAQRQGRLSFYATAIGEEAINIASAAALTPQDVIFPQYREPGVLLWRGFTLQEFANQCFGNKSDYGKGRQMPVHYGSNKLNYFTVSATIATQLPNAVGAAYSLKMDKKDACAVTYFGDGGTSEGDFHAALNFAAVMEAPVLFICRNNGWAISTPTSDQFRSDGVVVKGRAYGIRSIRVDGNDALAMYSAVHTAREMAIREQRPILIEALTYRVGHHSTSDDSTRYRSAGEIEWWNKARNPLSRFRTWIESNGWWSDKTESDLRSRIKKEMLEALRVAEKTEKPNLQNMFSDVYDVPPSNLREQELLVRQTINSHPQDYPSDVPL

SEQ ID NO: 26722 - protein, 393 aa, Arabidopsis thaliana
  peptide (1)..(393): Ceres Seq. ID no. 15178663
MDFPGGKVAFTPEIQFISESDKERVPCYRVLDDNGQLITNSQFVQVSEEVAVKIYSDMVTLQIMDNIFYEAQRQGRLSFYATAIGEEAINIASAAALTPQDVIFPQYREPGVLLWRGFTLQEFANQCFGNKSDYGKGRQMPVHYGSNKLNYFTVSATIATQLPNAVGAAYSLKMDKKDACAVTYFGDGGTSEGDFHAALNFAAVMEAPVLFICRNNGWAISTPTSDQFRSDGVVVKGRAYGIRSIRVDGNDALAMYSAVHTAREMAIREQRPILIEALTYRVGHHSTSDDSTRYRSAGEIEWWNKARNPLSRFRTWIESNGWWSDKTESDLRSRIKKEMLEALRVAEKTEKPNLQNMFSDVYDVPPSNLREQELLVRQTINSHPQDYPSDVPL

SEQ ID NO: 26723 - DNA, 1208 bp, Arabidopsis thaliana
  misc_feature (1)..(1208): Ceres Seq. ID no. 12370681
  misc_feature (1)..(1208): Ortholog of  Ceres SEQ ID NO 13595598 as cited in SEQ ID NO 56822
  misc_feature (1)..(1208): Ortholog of  Ceres SEQ ID NO 15171777 as cited in SEQ ID NO 57417
  misc_feature (1)..(1208): Ortholog of  Ceres SEQ ID NO 13655712 as cited in SEQ ID NO 63394
  misc_feature (1)..(1208): Ortholog of  Ceres SEQ ID NO 15179075 as cited in SEQ ID NO 0
aacacctaactcatttgatagtgatttccaaatctgcaaacaacaaagtatatttgatcatcactatactgatttcacaatccattaatcactgataggtttttggtggaatacatacatgtatgtgtttgatccaacaacagaagctggattgagattagagatggcgtttcctcaacatggttttatgttccaacaacttcatgaagacaacagtcaagatcagctcccttcttgtcctcctcatctcttcaatggaggaggaaactacatgatgaacagatctatgtctttaatgaacgtgcaagaagatcataatcaaaccttggatgaggagaatctatcagacgatggggcacatactatgctgggagagaagaagaagaggctgcaattagagcaagttaaggcattagagaagagctttgagcttggtaacaagctggagccagagaggaagatacaactagctaaagcattagggatgcaaccaagacagatcgcgatttggtttcaaaacaggagagctaggtggaagactagacagctcgagagagattatgattcactcaagaaacagtttgagtctcttaaatccgacaatgcttctctacttgcctataacaagaaactccttgctgaggtaatggctttaaagaacaaagaatgtaatgaaggaaacatagtaaagagagaagcagaagcttcatggagcaacaacggaagcacagagaatagttcagacatcaatctggagatgcctagagagaccattacaacacatgtgaacacgatcaaagacctattcccttcatcgattcgatcatctgcacatgatgatgatcatcatcagaatcatgaaatagttcaagaagaaagcctttgtaacatgtttaatggcattgatgaaacgacgccggctggttactgggcatggtctgacccaaaccacaaccaccaccaccaccagttcaactgattcatgattctaaagctcaaaaaaaagtcatcagcacgcatcaagacaaatgatcataatcatcatcatcatatcatcaggagaagatcaagacacaattcatctctttggaattatgttattgctactcatttcaatttaaattaatggagcattttgttttctttgggtttgtagagcattggtgtatagtgcgaaaatttgttgttgctttaatttaataaaaatc

SEQ ID NO: 26724 - protein, 286 aa, Arabidopsis thaliana
  peptide (1)..(286): Ceres Seq. ID no. 12370682
MYVFDPTTEAGLRLEMAFPQHGFMFQQLHEDNSQDQLPSCPPHLFNGGGNYMMNRSMSLMNVQEDHNQTLDEENLSDDGAHTMLGEKKKRLQLEQVKALEKSFELGNKLEPERKIQLAKALGMQPRQIAIWFQNRRARWKTRQLERDYDSLKKQFESLKSDNASLLAYNKKLLAEVMALKNKECNEGNIVKREAEASWSNNGSTENSSDINLEMPRETITTHVNTIKDLFPSSIRSSAHDDDHHQNHEIVQEESLCNMFNGIDETTPAGYWAWSDPNHNHHHHQFN

SEQ ID NO: 26725 - protein, 271 aa, Arabidopsis thaliana
  peptide (1)..(271): Ceres Seq. ID no. 12370683
MAFPQHGFMFQQLHEDNSQDQLPSCPPHLFNGGGNYMMNRSMSLMNVQEDHNQTLDEENLSDDGAHTMLGEKKKRLQLEQVKALEKSFELGNKLEPERKIQLAKALGMQPRQIAIWFQNRRARWKTRQLERDYDSLKKQFESLKSDNASLLAYNKKLLAEVMALKNKECNEGNIVKREAEASWSNNGSTENSSDINLEMPRETITTHVNTIKDLFPSSIRSSAHDDDHHQNHEIVQEESLCNMFNGIDETTPAGYWAWSDPNHNHHHHQFN

SEQ ID NO: 26726 - protein, 263 aa, Arabidopsis thaliana
  peptide (1)..(263): Ceres Seq. ID no. 12370684
MFQQLHEDNSQDQLPSCPPHLFNGGGNYMMNRSMSLMNVQEDHNQTLDEENLSDDGAHTMLGEKKKRLQLEQVKALEKSFELGNKLEPERKIQLAKALGMQPRQIAIWFQNRRARWKTRQLERDYDSLKKQFESLKSDNASLLAYNKKLLAEVMALKNKECNEGNIVKREAEASWSNNGSTENSSDINLEMPRETITTHVNTIKDLFPSSIRSSAHDDDHHQNHEIVQEESLCNMFNGIDETTPAGYWAWSDPNHNHHHHQFN

SEQ ID NO: 26727 - DNA, 728 bp, Arabidopsis thaliana
  misc_feature (1)..(728): Ceres Seq. ID no. 13487276
  misc_feature (1)..(728): Ortholog of  Ceres SEQ ID NO 13655262 as cited in SEQ ID NO 62944
ctactagattaactattatacaatcaagcttcgtctccgcaagaacaagactcaattacgtctccaagacaaatcattctgggttcgcttgtcgttctctttcaaaacccagaaacttgagtctctctgtttattctatgggttcttctagttcttctccgaaaccagacaacgtccaagaggctgagaagaatgagtttgcttctctaagtgaaaatgaatggaagaaacggctaacaccagaacagtactacatcactagacagaagggcacagagagagctttcactggggagtattggaactcaaagacccctggagtatataattgtgtatgttgcgacacacctctatttgattcatcaacaaagtttgatagtggaacagggtggccatcttactaccaaccaattggaaacaatgtgaagacaaagctagacctctctatcatcttcatgcctagacaagaagttgtctgtgctgtttgtaacgcccatcttggtcatgtctttgacgacggtccacgcccaaccggaaaacgatattgcctcaacagtgctgctctgaaacttaacgcattggagaaaacaagagattgagagtttctggtacaaggatttgttcatattacataatatactgtatcattatatccactgtatttcctcgtattaagtcgttgtatgtaagtcaactataatccatcaaaaggtttaaactttgagttg

SEQ ID NO: 26728 - protein, 198 aa, Arabidopsis thaliana
  peptide (1)..(198): Ceres Seq. ID no. 13487277
TRLTIIQSSFVSARTRLNYVSKTNHSGFACRSLSKPRNLSLSVYSMGSSSSSPKPDNVQEAEKNEFASLSENEWKKRLTPEQYYITRQKGTERAFTGEYWNSKTPGVYNCVCCDTPLFDSSTKFDSGTGWPSYYQPIGNNVKTKLDLSIIFMPRQEVVCAVCNAHLGHVFDDGPRPTGKRYCLNSAALKLNALEKTRD

SEQ ID NO: 26729 - protein, 153 aa, Arabidopsis thaliana
  peptide (1)..(153): Ceres Seq. ID no. 13487278
MGSSSSSPKPDNVQEAEKNEFASLSENEWKKRLTPEQYYITRQKGTERAFTGEYWNSKTPGVYNCVCCDTPLFDSSTKFDSGTGWPSYYQPIGNNVKTKLDLSIIFMPRQEVVCAVCNAHLGHVFDDGPRPTGKRYCLNSAALKLNALEKTRD

SEQ ID NO: 26730 - DNA, 830 bp, Arabidopsis thaliana
  misc_feature (1)..(830): Ceres Seq. ID no. 12323407
  misc_feature (1)..(830): Ortholog of  Ceres SEQ ID NO 14315067 as cited in SEQ ID NO 57249
  misc_feature (1)..(830): Ortholog of  Ceres SEQ ID NO 15173278 as cited in SEQ ID NO 58144
aacacataacaacaacaaagaaccaaataaaagaaaaaaattctataagtaatctttattttgctaaagaaaacatagaaatctgtttgcaaagaagaagatatgggaaacagtttacggtgttgtttggcttgtgtacttccatgtggagctttagatttgatccgtatcgtacatctcaacggccacgtcgacgagatcactagtccaatgaccgccggcgagattcttcaggcgaatcctaaccatgtcttaagcaaaccttgttctcaaggagttgtgcgtaagatcttgatcttgtctcctgaatctgagcttaagcgtggaagcatctattttcttatcccggatacttctatgccggagaagaagaaaacaaagaagagaaaagagctccgatgccggaaaaagcctcttgaaagcggcaacgatattaatagtgatcatgtgagtactaataaggatcttgatggtcattgtttgacgttgtgtgagaaatatttggaagatgttatgttgtcggagaagatgagttcggccggtaaagagaatcgtcaccgtcggaaacatagccggtcggcgtcagtgtccacgtggcggcctcaccttgatagcatcactgaggatcttaattaaattagtacttcttctttttttcactccttgttaattatgtctctattttcttaaattcttttttttttttttggatccggaatcggatttttatttaacatgcccggtgagaaaatttcaaatattttatttattatgaagttaaaaccaaaactatgtactgttctcatgtggataagatctatgttaaattg

SEQ ID NO: 26731 - protein, 177 aa, Arabidopsis thaliana
  peptide (1)..(177): Ceres Seq. ID no. 12323408
MGNSLRCCLACVLPCGALDLIRIVHLNGHVDEITSPMTAGEILQANPNHVLSKPCSQGVVRKILILSPESELKRGSIYFLIPDTSMPEKKKTKKRKELRCRKKPLESGNDINSDHVSTNKDLDGHCLTLCEKYLEDVMLSEKMSSAGKENRHRRKHSRSASVSTWRPHLDSITEDLN

SEQ ID NO: 26732 - protein, 141 aa, Arabidopsis thaliana
  peptide (1)..(141): Ceres Seq. ID no. 12323409
MTAGEILQANPNHVLSKPCSQGVVRKILILSPESELKRGSIYFLIPDTSMPEKKKTKKRKELRCRKKPLESGNDINSDHVSTNKDLDGHCLTLCEKYLEDVMLSEKMSSAGKENRHRRKHSRSASVSTWRPHLDSITEDLN

SEQ ID NO: 26733 - protein, 92 aa, Arabidopsis thaliana
  peptide (1)..(92): Ceres Seq. ID no. 12323410
MPEKKKTKKRKELRCRKKPLESGNDINSDHVSTNKDLDGHCLTLCEKYLEDVMLSEKMSSAGKENRHRRKHSRSASVSTWRPHLDSITEDLN

SEQ ID NO: 26734 - DNA, 866 bp, Arabidopsis thaliana
  misc_feature (1)..(866): Ceres Seq. ID no. 12559528
  misc_feature (1)..(866): Ortholog of  Ceres SEQ ID NO 13595667 as cited in SEQ ID NO 56786
aaatcgaaaactaattgtatcatcctcttccttgcgttctctctttctctctctcgccgacgacgaaaacatgggtgccaaggcgaagaaagctttgaagaagaacatgaagaaggttgctgcttcggcttcttcttctcagctacctcttccccagaacccgaaaccttcagctgattttttgccactagaaggaggtccagctcgaaaagctccagttaccaccccacctcttcagaataaagctactgtgctatacatcggtagaatccctcatggcttctatgagactgagattgaagctttcttctcgcagtttggaacagttaagagagttagagtcgccagaaacaaaaagactgggaaatcaaagcattttgggttcatacagtttgaggaccctgaggtggcggaaattgcagcgggtgcaatgaatgattatttgttgatggagcacatgcttaaagtccatgtcattgaaccagagaatgttaaacccaatctgtggagagggtttaaatgtaacttcaaaccagtggattcggttcagattgagcgaagacaacttaataaggaaaggacattggaagagcataggaaaatgttgcagaagatagttaaaaaggatcagaaaaggaggaagagaatcgaagccgctggaatagaatacgaatgccctgagcttgttggaaacacacagccagtcccgaagaggatcaagtttagtgaagaagactaaaagctgaagctgaacaacacttttccgataaccttttttgaatagaaatctgttctgttgtactcttgatattggatcaataactaaactttaaagtttgcaatgaaaacttctgtttcaatgatcc

SEQ ID NO: 26735 - protein, 245 aa, Arabidopsis thaliana
  peptide (1)..(245): Ceres Seq. ID no. 12559529
NRKLIVSSSSLRSLFLSLADDENMGAKAKKALKKNMKKVAASASSSQLPLPQNPKPSADFLPLEGGPARKAPVTTPPLQNKATVLYIGRIPHGFYETEIEAFFSQFGTVKRVRVARNKKTGKSKHFGFIQFEDPEVAEIAAGAMNDYLLMEHMLKVHVIEPENVKPNLWRGFKCNFKPVDSVQIERRQLNKERTLEEHRKMLQKIVKKDQKRRKRIEAAGIEYECPELVGNTQPVPKRIKFSEED

SEQ ID NO: 26736 - protein, 222 aa, Arabidopsis thaliana
  peptide (1)..(222): Ceres Seq. ID no. 12559530
MGAKAKKALKKNMKKVAASASSSQLPLPQNPKPSADFLPLEGGPARKAPVTTPPLQNKATVLYIGRIPHGFYETEIEAFFSQFGTVKRVRVARNKKTGKSKHFGFIQFEDPEVAEIAAGAMNDYLLMEHMLKVHVIEPENVKPNLWRGFKCNFKPVDSVQIERRQLNKERTLEEHRKMLQKIVKKDQKRRKRIEAAGIEYECPELVGNTQPVPKRIKFSEED

SEQ ID NO: 26737 - protein, 210 aa, Arabidopsis thaliana
  peptide (1)..(210): Ceres Seq. ID no. 12559531
MKKVAASASSSQLPLPQNPKPSADFLPLEGGPARKAPVTTPPLQNKATVLYIGRIPHGFYETEIEAFFSQFGTVKRVRVARNKKTGKSKHFGFIQFEDPEVAEIAAGAMNDYLLMEHMLKVHVIEPENVKPNLWRGFKCNFKPVDSVQIERRQLNKERTLEEHRKMLQKIVKKDQKRRKRIEAAGIEYECPELVGNTQPVPKRIKFSEED

SEQ ID NO: 26738 - DNA, 1950 bp, Arabidopsis thaliana
  misc_feature (1)..(1950): Ceres Seq. ID no. 12338515
  misc_feature (1)..(1950): Ortholog of  Ceres SEQ ID NO 14302588 as cited in SEQ ID NO 0
aacagagtcgcacacactaaaatggcgttccgcgttttgctcctcttctcactcaccgcacttctcatcttctccgccgtttctccttctttcgccgcttcttcctccgacgacgttgacgatgaggatctcagcttcctcgaagatctcaaagaagacgacgttcccggcgctgactcactctcttcctcaactggatttgacgaattcgaaggaggagaagaagaagatcccgatatgtacaacgacgatgacgatgaagaaggagatttttccgatctaggtaatccggattccgatccgttaccgacgccggagattgatgagaaagacgttgtggttatcaaggagcgtaacttcactgatgtgattgagaataatcaatacgttttggttgagttttatgctccgtggtgtggtcattgtcagtctcttgctcctgagtatgctgctgctgccacggagcttaaggaagatggtgttgttttggctaagattgatgcgacggaggagaatgagttagctcaggagtatcgtgttcagggctttccgacgcttcttttcttcgttgatggtgagcacaagccttacactggaggaaggactaaagaaacaattgtgacatgggtgaagaagaagattggtcctggtgtgtataatctaactacattagatgatgctgagaaagtgttgacttctgggaacaaagttgttttgggatacttgaactccttggtgggtgttgagcacgatcagcttaatgctgcttccaaagctgaagacgatgtgaacttttatcaaacagtgaatcctgatgttgcaaagatgtttcaccttgatccggagtctaaaaggcctgctcttgtcctagttaagaaggaagaggagaaaattagccattttgatggagaatttgttaagtctgctctagttagttttgtgtctgccaacaagcttgctttggtctctgttttcaccagagagactgctccggaaatttttgagagtgcaatcaagaaacagttgttgttgtttgtaaccaaaaatgaatctgaaaaggttcttacggaatttcaagaagcagcgaaatcattcaaaggaaagctcatctttgtatctgtggatctggataatgaggattatgggaagccagtcgctgaatactttggtgtgtctggaaatggtcctaaacttattggctacacagggaatgaagaccataaaaaatactttttcgatggcgagatccagtcagataaaattaagatatttggggaggatttcctgaacgacaagttaaagcctttctataagtcagaccccattcctgaaaagaacgatgaagatgtgaaaatagtggttggagataactttgatgaaattgttctggacgattctaaagatgtgcttctcgaggtctacgcaccatggtgtggccattgccaagcccttgagccaatgtataacaaacttgccaagcatttacgaagtattgattctctcgtcataaccaagatggatggaacaaccaatgaacatcccaaggcaaaggctgaggggttccctaccattctcttcttccctgcgggcaacaagacttcagagccgattactgtagatacagaccgcactgtggttgcattttacaagttcttaaggaaacacgcaacgatcccattcaaactggagaaacctgcatcaaccgaatcacctaaaactgcagagtccacaccaaaagtagaaactaccgagaccaaagaatcacccgatagcacgacaaagagtagccaaagtgactcgaaggacgaattgtgatcagaaaagggtataatatatattacatgtctccttaagttgttatatgtatgatcagaattgtcacatcatgagtttggactagataaagatgggaattaaagtaattttagttttgagaaagacaatttcttc

SEQ ID NO: 26739 - protein, 604 aa, Arabidopsis thaliana
  peptide (1)..(604): Ceres Seq. ID no. 12338516
NRVAHTKMAFRVLLLFSLTALLIFSAVSPSFAASSSDDVDDEDLSFLEDLKEDDVPGADSLSSSTGFDEFEGGEEEDPDMYNDDDDEEGDFSDLGNPDSDPLPTPEIDEKDVVVIKERNFTDVIENNQYVLVEFYAPWCGHCQSLAPEYAAAATELKEDGVVLAKIDATEENELAQEYRVQGFPTLLFFVDGEHKPYTGGRTKETIVTWVKKKIGPGVYNLTTLDDAEKVLTSGNKVVLGYLNSLVGVEHDQLNAASKAEDDVNFYQTVNPDVAKMFHLDPESKRPALVLVKKEEEKISHFDGEFVKSALVSFVSANKLALVSVFTRETAPEIFESAIKKQLLLFVTKNESEKVLTEFQEAAKSFKGKLIFVSVDLDNEDYGKPVAEYFGVSGNGPKLIGYTGNEDHKKYFFDGEIQSDKIKIFGEDFLNDKLKPFYKSDPIPEKNDEDVKIVVGDNFDEIVLDDSKDVLLEVYAPWCGHCQALEPMYNKLAKHLRSIDSLVITKMDGTTNEHPKAKAEGFPTILFFPAGNKTSEPITVDTDRTVVAFYKFLRKHATIPFKLEKPASTESPKTAESTPKVETTETKESPDSTTKSSQSDSKDEL

SEQ ID NO: 26740 - protein, 597 aa, Arabidopsis thaliana
  peptide (1)..(597): Ceres Seq. ID no. 12338517
MAFRVLLLFSLTALLIFSAVSPSFAASSSDDVDDEDLSFLEDLKEDDVPGADSLSSSTGFDEFEGGEEEDPDMYNDDDDEEGDFSDLGNPDSDPLPTPEIDEKDVVVIKERNFTDVIENNQYVLVEFYAPWCGHCQSLAPEYAAAATELKEDGVVLAKIDATEENELAQEYRVQGFPTLLFFVDGEHKPYTGGRTKETIVTWVKKKIGPGVYNLTTLDDAEKVLTSGNKVVLGYLNSLVGVEHDQLNAASKAEDDVNFYQTVNPDVAKMFHLDPESKRPALVLVKKEEEKISHFDGEFVKSALVSFVSANKLALVSVFTRETAPEIFESAIKKQLLLFVTKNESEKVLTEFQEAAKSFKGKLIFVSVDLDNEDYGKPVAEYFGVSGNGPKLIGYTGNEDHKKYFFDGEIQSDKIKIFGEDFLNDKLKPFYKSDPIPEKNDEDVKIVVGDNFDEIVLDDSKDVLLEVYAPWCGHCQALEPMYNKLAKHLRSIDSLVITKMDGTTNEHPKAKAEGFPTILFFPAGNKTSEPITVDTDRTVVAFYKFLRKHATIPFKLEKPASTESPKTAESTPKVETTETKESPDSTTKSSQSDSKDEL

SEQ ID NO: 26741 - protein, 525 aa, Arabidopsis thaliana
  peptide (1)..(525): Ceres Seq. ID no. 12338518
MYNDDDDEEGDFSDLGNPDSDPLPTPEIDEKDVVVIKERNFTDVIENNQYVLVEFYAPWCGHCQSLAPEYAAAATELKEDGVVLAKIDATEENELAQEYRVQGFPTLLFFVDGEHKPYTGGRTKETIVTWVKKKIGPGVYNLTTLDDAEKVLTSGNKVVLGYLNSLVGVEHDQLNAASKAEDDVNFYQTVNPDVAKMFHLDPESKRPALVLVKKEEEKISHFDGEFVKSALVSFVSANKLALVSVFTRETAPEIFESAIKKQLLLFVTKNESEKVLTEFQEAAKSFKGKLIFVSVDLDNEDYGKPVAEYFGVSGNGPKLIGYTGNEDHKKYFFDGEIQSDKIKIFGEDFLNDKLKPFYKSDPIPEKNDEDVKIVVGDNFDEIVLDDSKDVLLEVYAPWCGHCQALEPMYNKLAKHLRSIDSLVITKMDGTTNEHPKAKAEGFPTILFFPAGNKTSEPITVDTDRTVVAFYKFLRKHATIPFKLEKPASTESPKTAESTPKVETTETKESPDSTTKSSQSDSKDEL

SEQ ID NO: 26742 - DNA, 832 bp, Arabidopsis thaliana
  misc_feature (1)..(832): Ceres Seq. ID no. 12482239
  misc_feature (1)..(832): Ortholog of  Ceres SEQ ID NO 12557512 as cited in SEQ ID NO 4
  misc_feature (1)..(832): Ortholog of  Ceres SEQ ID NO 13657435 as cited in SEQ ID NO 66084
  misc_feature (1)..(832): Ortholog of  Ceres SEQ ID NO 14309476 as cited in SEQ ID NO 0
attggataagacaactatcaagaagccttcaatttccattggtcctcctctctccttctataatcccaaaaaccatctcacaaactcatcaaacctctttctcatctcatcttcaagccatctccgatcatcatcagacaatggcagcagctatggcaacagcaaccaagtgcatgtctctaaacccatctcctcctaaactccaaaaccaaaccaaatccaaaccattcatctccctaccaaccccaccaaaaccaaacgtctctctcgccgtcacaagcaccgccctagccggagccgtcttctcttccctcagctactctgagccagctttagccatccaacagatcgctcagctcgctgcagcaaacgccagtagcgacaaccgtggcttagctcttctccttcccatcgtcccagccattgcatgggtcctttacaacatcctccagccagctattaaccaggtcaacaagatgcgtgagagtaaaggtatcgttgttggtctaggtattggtggtggtcttgcagcgtcagggcttttgactccacctccggaggcttatgctgcggcagaagcggcggctgctagttcagacagcagaggacagttgttgttgattgttgtgacaccggcactactttgggttctgtacaatatcttgcagccagctttgaaccaaatcaacaagatgaggtctggggattaaaatcttatatatatataatattattataaatcatctttgggattcaaatgtaaaattaatcctttgttttatggacagttttatgtttacatttttggactaatatcgtttctcttatcggc

SEQ ID NO: 26743 - protein, 235 aa, Arabidopsis thaliana
  peptide (1)..(235): Ceres Seq. ID no. 12482240
WIRQLSRSLQFPLVLLSPSIIPKTISQTHQTSFSSHLQAISDHHQTMAAAMATATKCMSLNPSPPKLQNQTKSKPFISLPTPPKPNVSLAVTSTALAGAVFSSLSYSEPALAIQQIAQLAAANASSDNRGLALLLPIVPAIAWVLYNILQPAINQVNKMRESKGIVVGLGIGGGLAASGLLTPPPEAYAAAEAAAASSDSRGQLLLIVVTPALLWVLYNILQPALNQINKMRSGD

SEQ ID NO: 26744 - protein, 189 aa, Arabidopsis thaliana
  peptide (1)..(189): Ceres Seq. ID no. 12482241
MAAAMATATKCMSLNPSPPKLQNQTKSKPFISLPTPPKPNVSLAVTSTALAGAVFSSLSYSEPALAIQQIAQLAAANASSDNRGLALLLPIVPAIAWVLYNILQPAINQVNKMRESKGIVVGLGIGGGLAASGLLTPPPEAYAAAEAAAASSDSRGQLLLIVVTPALLWVLYNILQPALNQINKMRSGD

SEQ ID NO: 26745 - protein, 185 aa, Arabidopsis thaliana
  peptide (1)..(185): Ceres Seq. ID no. 12482242
MATATKCMSLNPSPPKLQNQTKSKPFISLPTPPKPNVSLAVTSTALAGAVFSSLSYSEPALAIQQIAQLAAANASSDNRGLALLLPIVPAIAWVLYNILQPAINQVNKMRESKGIVVGLGIGGGLAASGLLTPPPEAYAAAEAAAASSDSRGQLLLIVVTPALLWVLYNILQPALNQINKMRSGD

SEQ ID NO: 26746 - DNA, 1691 bp, Arabidopsis thaliana
  misc_feature (1)..(1691): Ceres Seq. ID no. 12738987
  misc_feature (1)..(1691): Ortholog of  Ceres SEQ ID NO 13595870 as cited in SEQ ID NO 62101
  misc_feature (1)..(1691): Ortholog of  Ceres SEQ ID NO 13590241 as cited in SEQ ID NO 63878
  misc_feature (1)..(1691): Ortholog of  Ceres SEQ ID NO 13657939 as cited in SEQ ID NO 66349
  misc_feature (1)..(1691): Ortholog of  Ceres SEQ ID NO 13660597 as cited in SEQ ID NO 67655
atcgctttgcataatccattccttcttctctcttctccatctccttcctccgatcttcgtctccaattcggaatcttcctatcacaatttcaaggctcctttaacccttgatcatcaccgattcaatcaattcggaatcacaatttcaaatcgagagaatttcaatttctcttgtaaaaccctaaattatgtacagcaatttcaaggaacaagcgatcgagtacgtgaagcaagcggttcatgaagacaatgctgggaattacaataaagctttccctctatacatgaacgcgcttgagtacttcaaaactcatctcaagtatgagaagaaccctaagatcagagaagctattacccagaagttcaccgagtatctccgtcgtgctgaggagatccgtgctgttctcgatgaaggtggatcgggtccaggatctaacggtgatgcagccgtcgcaacgaggcccaaaactaagcctaaagatggagaaggtggtggtaaagatggagaagatcctgaacaatcaaagcttcgagctgggttaaactctgcgattgttagagagaaacctaatatcaagtggtcagatgttgctgggcttgaaagtgctaaacaagctctgcaggaagctgtgattttgcctgtcaagtttccacagttcttcactggaaagagacggccttggagagcttttctgttgtatgggcctcctggaacaggaaaatcgtatttggctaaggctgttgccactgaagctgactctaccttttttagcgtgtcttcatcagaccttgtctcgaagtggatgggtgaaagtgagaagctagtatcaaaccttttcgagatggcccgtgaaagtgctccctcgattatttttgttgatgagatagattctttgtgtggtacacgtggagaaggaaacgagagtgaagcttcaagacgtatcaaaacagagcttctagtgcagatgcagggtgttggacacaatgatgagaaagtacttgtacttgcagcaaccaatacaccctatgctcttgatcaggctatccggcgacgttttgacaagcgtatctatattcctctcccagaggccaaggctcggcagcacatgttcaaagtccacttgggagatacacctcataatttaactgaacctgattttgaatatttaggccaaaagacagaagggttttctggttcagatgtgtctgtttgtgtaaaagatgttctgtttgaacctgttcgtaaaacacaagatgcaatgttctttttcaagtctcctgatggtacatggatgccatgtgggcctaggcaccctggtgccatccagactacaatgcaagatctagcaacaaaagggcttgccgagattattccaccaccaatcaccagaacagatttcgagaaggtacttgcaagacaaaggccaacagtgagcaagtctgaccttgatgtccacgagagattcacacaggagtttggagaagaaggttgatagatttgacattcccatcaagcatctttcacaatcatattattattagtctcttcaccatctccttatgtatgtactgagaagcaaaacaaaatctcaaacccatgtttgatttcttcccaaaacattgaatttgctttatttctcgaattgtgtaaaaaaaaaatgttctgaacaatgttttctatttattatgtc

SEQ ID NO: 26747 - protein, 434 aa, Arabidopsis thaliana
  peptide (1)..(434): Ceres Seq. ID no. 12738988
MYSNFKEQAIEYVKQAVHEDNAGNYNKAFPLYMNALEYFKTHLKYEKNPKIREAITQKFTEYLRRAEEIRAVLDEGGSGPGSNGDAAVATRPKTKPKDGEGGGKDGEDPEQSKLRAGLNSAIVREKPNIKWSDVAGLESAKQALQEAVILPVKFPQFFTGKRRPWRAFLLYGPPGTGKSYLAKAVATEADSTFFSVSSSDLVSKWMGESEKLVSNLFEMARESAPSIIFVDEIDSLCGTRGEGNESEASRRIKTELLVQMQGVGHNDEKVLVLAATNTPYALDQAIRRRFDKRIYIPLPEAKARQHMFKVHLGDTPHNLTEPDFEYLGQKTEGFSGSDVSVCVKDVLFEPVRKTQDAMFFFKSPDGTWMPCGPRHPGAIQTTMQDLATKGLAEIIPPPITRTDFEKVLARQRPTVSKSDLDVHERFTQEFGEEG

SEQ ID NO: 26748 - protein, 402 aa, Arabidopsis thaliana
  peptide (1)..(402): Ceres Seq. ID no. 12738989
MNALEYFKTHLKYEKNPKIREAITQKFTEYLRRAEEIRAVLDEGGSGPGSNGDAAVATRPKTKPKDGEGGGKDGEDPEQSKLRAGLNSAIVREKPNIKWSDVAGLESAKQALQEAVILPVKFPQFFTGKRRPWRAFLLYGPPGTGKSYLAKAVATEADSTFFSVSSSDLVSKWMGESEKLVSNLFEMARESAPSIIFVDEIDSLCGTRGEGNESEASRRIKTELLVQMQGVGHNDEKVLVLAATNTPYALDQAIRRRFDKRIYIPLPEAKARQHMFKVHLGDTPHNLTEPDFEYLGQKTEGFSGSDVSVCVKDVLFEPVRKTQDAMFFFKSPDGTWMPCGPRHPGAIQTTMQDLATKGLAEIIPPPITRTDFEKVLARQRPTVSKSDLDVHERFTQEFGEEG

SEQ ID NO: 26749 - protein, 229 aa, Arabidopsis thaliana
  peptide (1)..(229): Ceres Seq. ID no. 12738990
MGESEKLVSNLFEMARESAPSIIFVDEIDSLCGTRGEGNESEASRRIKTELLVQMQGVGHNDEKVLVLAATNTPYALDQAIRRRFDKRIYIPLPEAKARQHMFKVHLGDTPHNLTEPDFEYLGQKTEGFSGSDVSVCVKDVLFEPVRKTQDAMFFFKSPDGTWMPCGPRHPGAIQTTMQDLATKGLAEIIPPPITRTDFEKVLARQRPTVSKSDLDVHERFTQEFGEEG

SEQ ID NO: 26750 - DNA, 1228 bp, Arabidopsis thaliana
  misc_feature (1)..(1228): Ceres Seq. ID no. 12466463
  misc_feature (1)..(1228): Ortholog of  Ceres SEQ ID NO 13598513 as cited in SEQ ID NO 64102
acattaatttcttataaccaacaacaataatgacaaaccatcttcaagatcccttacctacttacccaaaaccggttttaaccaaagaagaacaagaagtggacgagaaaatggtaagcttgcaagcagagagtatcgtgaacaccgtggctttccctatggttctcaaagccgccttcgagcttggcgtcatcgacaccatcgctgctgcaggaaacgacacgtggctctcaccgtgtgagatagcgtgtagtctcccaaccaaacccaccaacccggaggcgccggtgttgcttgaccggatgctgagcttacttgtcagccactcgatcttgaagtgccgtatgattgaaaccggagagaacggtcgaaccggaaagatcgagagggtatatgcagccgaaccggtttgcaagtattttttgagagatagtgatggtacaggatctctcgtgcctctgttcatgttgctccatacccaagtgtttttcaagacttggacaaatcttaaagatgtgatactagaaggaagagatgcattcaactctgcccacggcatgaaaatcttcgaatacataaattcggatcaaccatttgctgagttgtttaatcgtgcaatgtcggaaccttccaccatgatcatgaagaaggttctagacgtatatagaggatttgaagatgttaacactttggtggatgttggaggaggaaatggcactgttttaggtttagtcacttctaagtatcctcatatcaaaggtgttaatttcgacttagctcaagttttaacccaagctcctttttatccaggagtcgagcatgtatctggagacatgtttgtagaagttccaaagggagatgccgtctttatgaaatggatactacatgattggggagacgaggattgtataaagattctgaaaaattgttggaaaagtctaccggaaaaagggaagattattattgtagagtttgttacaccaaaggaaccaaagggtggtgacttatcttctaacactgtctttgccatggacttgttgatgttaacccaatgctctggtggtaaagagagatctctttcacagttcgagaatttggcgtttgcgtcaggttttcttcgatgtgaaatcatttgtcttgcttattcgtattctgttatcgaattccacaaataaatttggaatttaagaaagaaaagaaaacaatatatacgtaactttttctgttt

SEQ ID NO: 26751 - protein, 381 aa, Arabidopsis thaliana
  peptide (1)..(381): Ceres Seq. ID no. 12466464
MTNHLQDPLPTYPKPVLTKEEQEVDEKMVSLQAESIVNTVAFPMVLKAAFELGVIDTIAAAGNDTWLSPCEIACSLPTKPTNPEAPVLLDRMLSLLVSHSILKCRMIETGENGRTGKIERVYAAEPVCKYFLRDSDGTGSLVPLFMLLHTQVFFKTWTNLKDVILEGRDAFNSAHGMKIFEYINSDQPFAELFNRAMSEPSTMIMKKVLDVYRGFEDVNTLVDVGGGNGTVLGLVTSKYPHIKGVNFDLAQVLTQAPFYPGVEHVSGDMFVEVPKGDAVFMKWILHDWGDEDCIKILKNCWKSLPEKGKIIIVEFVTPKEPKGGDLSSNTVFAMDLLMLTQCSGGKERSLSQFENLAFASGFLRCEIICLAYSYSVIEFHK

SEQ ID NO: 26752 - protein, 354 aa, Arabidopsis thaliana
  peptide (1)..(354): Ceres Seq. ID no. 12466465
MVSLQAESIVNTVAFPMVLKAAFELGVIDTIAAAGNDTWLSPCEIACSLPTKPTNPEAPVLLDRMLSLLVSHSILKCRMIETGENGRTGKIERVYAAEPVCKYFLRDSDGTGSLVPLFMLLHTQVFFKTWTNLKDVILEGRDAFNSAHGMKIFEYINSDQPFAELFNRAMSEPSTMIMKKVLDVYRGFEDVNTLVDVGGGNGTVLGLVTSKYPHIKGVNFDLAQVLTQAPFYPGVEHVSGDMFVEVPKGDAVFMKWILHDWGDEDCIKILKNCWKSLPEKGKIIIVEFVTPKEPKGGDLSSNTVFAMDLLMLTQCSGGKERSLSQFENLAFASGFLRCEIICLAYSYSVIEFHK

SEQ ID NO: 26753 - protein, 338 aa, Arabidopsis thaliana
  peptide (1)..(338): Ceres Seq. ID no. 12466466
MVLKAAFELGVIDTIAAAGNDTWLSPCEIACSLPTKPTNPEAPVLLDRMLSLLVSHSILKCRMIETGENGRTGKIERVYAAEPVCKYFLRDSDGTGSLVPLFMLLHTQVFFKTWTNLKDVILEGRDAFNSAHGMKIFEYINSDQPFAELFNRAMSEPSTMIMKKVLDVYRGFEDVNTLVDVGGGNGTVLGLVTSKYPHIKGVNFDLAQVLTQAPFYPGVEHVSGDMFVEVPKGDAVFMKWILHDWGDEDCIKILKNCWKSLPEKGKIIIVEFVTPKEPKGGDLSSNTVFAMDLLMLTQCSGGKERSLSQFENLAFASGFLRCEIICLAYSYSVIEFHK

SEQ ID NO: 26754 - DNA, 1471 bp, Arabidopsis thaliana
  misc_feature (1)..(1471): Ceres Seq. ID no. 13491196
  misc_feature (1)..(1471): Ortholog of  Ceres SEQ ID NO 14301423 as cited in SEQ ID NO 52204
  misc_feature (1)..(1471): Ortholog of  Ceres SEQ ID NO 12621037 as cited in SEQ ID NO 66448
  misc_feature (1)..(1471): Ortholog of  Ceres SEQ ID NO 12635639 as cited in SEQ ID NO 0
  misc_feature (1)..(1471): Ortholog of  Ceres SEQ ID NO 14305144 as cited in SEQ ID NO 0
aaaacacaaaccctatcttttcttcttcttcttcttcgttcagtcttcactttcttttcttttctccgccaccacacaaatacattcttcattctttgtaactttcacgctattcttcctcaatatattcattcgacctcctctcttcattcttaatttctcaaaaatcttatctttctccctcatttttcccgtcgagggttccttaatctccttcctaggaacgtttcatcgatttcatatttgctttccttaatccacaacgtttcttccttcgtttttttctgcaattttgttttcctttacaccaaattcatctcttagtcttgtccaattttcgattttttttccgacaatcctgattgtttgtttttttatctgtcgggatttcgaatggcgcttgcgtatgatcctctcttcattacatcggacaaatctttgtccgcctttgatgttgcctcttcaccgcctcagcccatgaatttaacacaagacgagctcaaacgtatcgccgcttacaaagccgtggaattcgtcgagtccggcatggttctcggtctcggaaccggctccaccgccaaacacgccgtcgaccgaatcggcgagcttctccgtcaaggcaaactcgagaacatcgttggtataccaacgtctaagaagacgcaggagcaggctctgtctctcggcatccctctctctgatctcgacgcacaccctgtcatcgatctctccatcgacggcgcagacgaggtcgacccttttctcaacctggtaaaaggcagaggagggtctctgcttcgagagaagatgatcgaaggagcttctaagaagtttgtggtgattgttgacgactccaagatggtgaagcatattggtggaagcaagcttgctcttccggtggagatagtgcccttttgctggaagttcacggcggagaagctccggagtctgctggaaggatacgggtgtgaagcgaatcttcggttgggagagaaagggaaggcctttgtgacagacaatgggaattacatagtggatatgcatgtggaagaggatatgggagatttgggagcagtgagtgatgcgattctgaggctaccgggagtagtggaacatgggatgtttctggatatggcttctactgttatcattgcaggtgagcttggtgttaagatcaagaacaaacactgaaacacacaccacacctcttctcgttgattttggcctttatgtattaggagacagaggattatggtttgctctatggtttagatgatatgagattaggttttggatgatgtcactgtgaggaggatgaatgactttcttttgacagagttttggatgcattgacatcgtcgtcatcatcatcaatcaatcttgtaaacagcattttgcttcttcattgcctttgttgtgtttgaatgctcttcttttactactgggcctgtgttgggctttgctccttgtt

SEQ ID NO: 26755 - protein, 265 aa, Arabidopsis thaliana
  peptide (1)..(265): Ceres Seq. ID no. 13491197
MALAYDPLFITSDKSLSAFDVASSPPQPMNLTQDELKRIAAYKAVEFVESGMVLGLGTGSTAKHAVDRIGELLRQGKLENIVGIPTSKKTQEQALSLGIPLSDLDAHPVIDLSIDGADEVDPFLNLVKGRGGSLLREKMIEGASKKFVVIVDDSKMVKHIGGSKLALPVEIVPFCWKFTAEKLRSLLEGYGCEANLRLGEKGKAFVTDNGNYIVDMHVEEDMGDLGAVSDAILRLPGVVEHGMFLDMASTVIIAGELGVKIKNKH

SEQ ID NO: 26756 - protein, 237 aa, Arabidopsis thaliana
  peptide (1)..(237): Ceres Seq. ID no. 13491198
MNLTQDELKRIAAYKAVEFVESGMVLGLGTGSTAKHAVDRIGELLRQGKLENIVGIPTSKKTQEQALSLGIPLSDLDAHPVIDLSIDGADEVDPFLNLVKGRGGSLLREKMIEGASKKFVVIVDDSKMVKHIGGSKLALPVEIVPFCWKFTAEKLRSLLEGYGCEANLRLGEKGKAFVTDNGNYIVDMHVEEDMGDLGAVSDAILRLPGVVEHGMFLDMASTVIIAGELGVKIKNKH

SEQ ID NO: 26757 - protein, 214 aa, Arabidopsis thaliana
  peptide (1)..(214): Ceres Seq. ID no. 13491199
MVLGLGTGSTAKHAVDRIGELLRQGKLENIVGIPTSKKTQEQALSLGIPLSDLDAHPVIDLSIDGADEVDPFLNLVKGRGGSLLREKMIEGASKKFVVIVDDSKMVKHIGGSKLALPVEIVPFCWKFTAEKLRSLLEGYGCEANLRLGEKGKAFVTDNGNYIVDMHVEEDMGDLGAVSDAILRLPGVVEHGMFLDMASTVIIAGELGVKIKNKH

SEQ ID NO: 26758 - DNA, 1248 bp, Arabidopsis thaliana
  misc_feature (1)..(1248): Ceres Seq. ID no. 12331575
  misc_feature (1)..(1248): Ortholog of  Ceres SEQ ID NO 15178042 as cited in SEQ ID NO 54787
  misc_feature (1)..(1248): Ortholog of  Ceres SEQ ID NO 13597899 as cited in SEQ ID NO 64374
atctccttctccggcgaagaaattgaaaattcattatccctaaaaccctaataaaggtccagagagtcgtcagaaaccaccgattagcttttgaaatggacggtgccacataccaaagattcccaaagatcaagatccgtgagcttaaagatgattacgccaagttcgagcttcgtgaaaccgacgtttctatggccaacgctctccgtcgcgtaatgatctccgaagtccctaccgtcgcaatagatctagtcgaaatcgaggttaattcatctgtactcaacgacgagttcattgctcatcgattaggtctcattcctctcactagcgaacgtgctatgagcatgcgtttctctcgagattgtgatgcttgtgatggagatggacaatgcgagttttgctctgttgagtttcggcttagttctaagtgtgttactgatcaaaccctagatgttactagtagggatttgtacagtgctgatcctactgttactcctgtggatttcactattgactcgtctgtatctgattcaagcgagcacaagggaattatcattgtgaaactgcgtcggggacaagagttgaagcttagagcgatagcgaggaaagggattgggaaagatcatgcgaaatggtctcctgcagctactgttacgtttatgtatgagcctgacataattattaatgaagatatgatggatactttgtcagacgaggaaaagatcgacttgattgagagcagtcctaccaaagtgtttggcatggatccagtcaccagacaggttgtagtggttgatcctgaagcatacacttacgatgaagaagtgatcaagaaagctgaagcaatggggaaaccgggactcattgagatcagtccgaaagatgacagttttatattcactgttgagtccacaggtgcagtgaaggcttcccaactggtactaaatgccattgatcttctgaagcagaagcttgatgcagtccgtctctcagatgacaccgtagaagcggatgatcagtttggtgaactcggtgcccatatgcgtggaggatgaactcaagtgattaattcgagctctttgttatacctgtttgtttcaggttttgagtttcttctggagcagactgatattaaccgtagtggcactgtcttgtttgataacatgtgaagtggcagtcttctatttgttctggacctctgatccctctgttcctgaatcttgttaagtttggttgttgttagttgtc

SEQ ID NO: 26759 - protein, 319 aa, Arabidopsis thaliana
  peptide (1)..(319): Ceres Seq. ID no. 12331576
MDGATYQRFPKIKIRELKDDYAKFELRETDVSMANALRRVMISEVPTVAIDLVEIEVNSSVLNDEFIAHRLGLIPLTSERAMSMRFSRDCDACDGDGQCEFCSVEFRLSSKCVTDQTLDVTSRDLYSADPTVTPVDFTIDSSVSDSSEHKGIIIVKLRRGQELKLRAIARKGIGKDHAKWSPAATVTFMYEPDIIINEDMMDTLSDEEKIDLIESSPTKVFGMDPVTRQVVVVDPEAYTYDEEVIKKAEAMGKPGLIEISPKDDSFIFTVESTGAVKASQLVLNAIDLLKQKLDAVRLSDDTVEADDQFGELGAHMRGG

SEQ ID NO: 26760 - protein, 287 aa, Arabidopsis thaliana
  peptide (1)..(287): Ceres Seq. ID no. 12331577
MANALRRVMISEVPTVAIDLVEIEVNSSVLNDEFIAHRLGLIPLTSERAMSMRFSRDCDACDGDGQCEFCSVEFRLSSKCVTDQTLDVTSRDLYSADPTVTPVDFTIDSSVSDSSEHKGIIIVKLRRGQELKLRAIARKGIGKDHAKWSPAATVTFMYEPDIIINEDMMDTLSDEEKIDLIESSPTKVFGMDPVTRQVVVVDPEAYTYDEEVIKKAEAMGKPGLIEISPKDDSFIFTVESTGAVKASQLVLNAIDLLKQKLDAVRLSDDTVEADDQFGELGAHMRGG

SEQ ID NO: 26761 - protein, 279 aa, Arabidopsis thaliana
  peptide (1)..(279): Ceres Seq. ID no. 12331578
MISEVPTVAIDLVEIEVNSSVLNDEFIAHRLGLIPLTSERAMSMRFSRDCDACDGDGQCEFCSVEFRLSSKCVTDQTLDVTSRDLYSADPTVTPVDFTIDSSVSDSSEHKGIIIVKLRRGQELKLRAIARKGIGKDHAKWSPAATVTFMYEPDIIINEDMMDTLSDEEKIDLIESSPTKVFGMDPVTRQVVVVDPEAYTYDEEVIKKAEAMGKPGLIEISPKDDSFIFTVESTGAVKASQLVLNAIDLLKQKLDAVRLSDDTVEADDQFGELGAHMRGG

SEQ ID NO: 26762 - DNA, 1723 bp, Arabidopsis thaliana
  misc_feature (1)..(1723): Ceres Seq. ID no. 13487732
  misc_feature (1)..(1723): Ortholog of  Ceres SEQ ID NO 14302251 as cited in SEQ ID NO 62093
gaaaaaaacattatcttacaaaaatccaaatactccgacttaaccgggtcggatcctggtgagtactagtatctatctcattacaattcatatccttccttcaacattcgatcatcacgaagccaaagaacaatttctccgtcactatcataaccatggcggtgctttcatctgcagatcgagctagtaatgagaagaaggtgaagagttcatactttgatttgccacctatggaaatgtctgtagcatttcctcaagcaactccagcctctacatttccaccttgtacttcagactattatcatttcaatgatctactgactccggaagaacaagctatccggaagaaagtgagggaatgcatggagaaagaagttgctccaataatgacagagtactgggagaaagcagaatttccattccatatcactccaaagcttggggctatgggtgttgctggtggctcgatcaagggttatggatgtcctggtctctccatcaccgccaatgcaattgccacagcagaaatagctagagttgatgcaagttgttcgactttcattttggtgcattcttctttgggcatgctcactattgcactctgtggatcagaagcacagaaggagaagtatttgccttctttggctcaattgaatactgtggcttgttgggctttgacagagcccgacaatggaagcgatgcaagtggtctaggaacgactgcaacaaaggttgaaggaggttggaaaattaatggacaaaagcgttggattggaaacagcacctttgcagatctgttgatcatctttgcgaggaatacaacaactaaccaaatcaacggattcatagtcaagaaagatgcgcctggcctaaaggctactaagatcccaaataaaataggtttacgtatggttcaaaatggagatattctactacagaatgtctttgttccagatgaggatcggttacctggggtaaattcttttcaggacaccagcaaggttctggctgtctcacgtgtaatggtggcctggcaaccaatcggcatatcaatgggaatctacgatatgtgccacaggtatctgaaggagaggaaacagtttggagcaccgttggctgctttccagttaaaccaacagaagcttgtgcagatgctgggtaacgttcaagcgatgtttctaatgggttggcgtctctgcaagctgtatgagacgggtcagatgactccaggtcaagccagtttaggaaaggcatggatttcatcaaaagcgagagaaactgcttcgctaggtcgggaattacttggtgggaatggaattctagcagattttctggtagcaaaggctttctgtgaccttgaacccatttatacatacgaagggacttatgatataaacaccttagtaacagggagggaagtaacgggtattgcgagtttcaaaccggctacacgtagccgtctctaagttaaaaggttgtccattgtttgttgttgtctgttggttagtattgatattgtgatgtggggtttacatctacaaatgtgccaaataatctgacccaaaaagatttagggtccaatgggggaataatatcgttgttgcaaaacttaatccagttattgcttcttgcaatatggattcgtcttgtggcttgtactgggggaaataccatttgttaaccttttattaattcaaattgccaatgtcaataacttttggtc

SEQ ID NO: 26763 - protein, 436 aa, Arabidopsis thaliana
  peptide (1)..(436): Ceres Seq. ID no. 13487733
MAVLSSADRASNEKKVKSSYFDLPPMEMSVAFPQATPASTFPPCTSDYYHFNDLLTPEEQAIRKKVRECMEKEVAPIMTEYWEKAEFPFHITPKLGAMGVAGGSIKGYGCPGLSITANAIATAEIARVDASCSTFILVHSSLGMLTIALCGSEAQKEKYLPSLAQLNTVACWALTEPDNGSDASGLGTTATKVEGGWKINGQKRWIGNSTFADLLIIFARNTTTNQINGFIVKKDAPGLKATKIPNKIGLRMVQNGDILLQNVFVPDEDRLPGVNSFQDTSKVLAVSRVMVAWQPIGISMGIYDMCHRYLKERKQFGAPLAAFQLNQQKLVQMLGNVQAMFLMGWRLCKLYETGQMTPGQASLGKAWISSKARETASLGRELLGGNGILADFLVAKAFCDLEPIYTYEGTYDINTLVTGREVTGIASFKPATRSRL

SEQ ID NO: 26764 - protein, 411 aa, Arabidopsis thaliana
  peptide (1)..(411): Ceres Seq. ID no. 13487734
MEMSVAFPQATPASTFPPCTSDYYHFNDLLTPEEQAIRKKVRECMEKEVAPIMTEYWEKAEFPFHITPKLGAMGVAGGSIKGYGCPGLSITANAIATAEIARVDASCSTFILVHSSLGMLTIALCGSEAQKEKYLPSLAQLNTVACWALTEPDNGSDASGLGTTATKVEGGWKINGQKRWIGNSTFADLLIIFARNTTTNQINGFIVKKDAPGLKATKIPNKIGLRMVQNGDILLQNVFVPDEDRLPGVNSFQDTSKVLAVSRVMVAWQPIGISMGIYDMCHRYLKERKQFGAPLAAFQLNQQKLVQMLGNVQAMFLMGWRLCKLYETGQMTPGQASLGKAWISSKARETASLGRELLGGNGILADFLVAKAFCDLEPIYTYEGTYDINTLVTGREVTGIASFKPATRSRL

SEQ ID NO: 26765 - protein, 409 aa, Arabidopsis thaliana
  peptide (1)..(409): Ceres Seq. ID no. 13487735
MSVAFPQATPASTFPPCTSDYYHFNDLLTPEEQAIRKKVRECMEKEVAPIMTEYWEKAEFPFHITPKLGAMGVAGGSIKGYGCPGLSITANAIATAEIARVDASCSTFILVHSSLGMLTIALCGSEAQKEKYLPSLAQLNTVACWALTEPDNGSDASGLGTTATKVEGGWKINGQKRWIGNSTFADLLIIFARNTTTNQINGFIVKKDAPGLKATKIPNKIGLRMVQNGDILLQNVFVPDEDRLPGVNSFQDTSKVLAVSRVMVAWQPIGISMGIYDMCHRYLKERKQFGAPLAAFQLNQQKLVQMLGNVQAMFLMGWRLCKLYETGQMTPGQASLGKAWISSKARETASLGRELLGGNGILADFLVAKAFCDLEPIYTYEGTYDINTLVTGREVTGIASFKPATRSRL

SEQ ID NO: 26766 - DNA, 1191 bp, Arabidopsis thaliana
  misc_feature (1)..(1191): Ceres Seq. ID no. 12333289
  misc_feature (1)..(1191): Ortholog of  Ceres SEQ ID NO 15170461 as cited in SEQ ID NO 52853
  misc_feature (1)..(1191): Ortholog of  Ceres SEQ ID NO 13595351 as cited in SEQ ID NO 55934
  misc_feature (1)..(1191): Ortholog of  Ceres SEQ ID NO 13639645 as cited in SEQ ID NO 57488
atcagctctttcttacatcatattccaatctatcactttataacaaattaaagtctacgttgagatatggctttaaaaacatggaagccattcataactgttgtttctctacaatttggatatgctggattgtcgatcatagcgaaattcgcactgaaccaaggcatgagtcctcacgttctagcgtcgtatcgccatatcgtcgctacaattttcattgctccatttgcctatttcttggatagaaaaatacggccgaagatgacgctatccatcttcttcaagatattgttgcttgggttattggaaccaacaattgatcagaacttatactacactggtatgaagtacacttccgccactttcacagctgcaatgacaaatgttcttcctgcctttgcctttattatggcatggatctttagacttgagaaggttaacgtcaagaaaatacacagccaagccaagattctaggaacaattgtgacagttggtggagcaatgcttatgactgttgtgaaaggacctttaattcctttgccttgggctaatcctcacgacattcatcaagactcatccaataccggagtcaaacaagacctaaccaaaggcgcaagcctcatcgctatcggttgtatctgctgggccggttttatcaatctccaagcgatcacgcttaagtcgtaccctgtagagctatccttgacagcttacatatgttttttggggtctattgaaagcactattgtggcactttttattgaaagaggaaatccatctgcgtgggccatccacttggattccaaattactagctgctgtttatggtggagtcatatgttcagggattggttactacgttcaaggagtgataatgaaaactcgtggacccgtgtttgttactgccttcaatccattgagcatggtcattgttgcgatcttggggtctataattcttgctgaggttatgttccttggaaggattcttggagcaatagtgatagttcttggactctattcggttttgtggggaaaaagcaaagacgaaccatcttcatcattttcagacatggacaaggagctaccacttagtacaccacaaattgtgctcccatcaaaagcaaatgcaaaaatggacacaaatgatgcaagtgttgtgatctcgaggcctaacaccaatgaatcagtctaa

SEQ ID NO: 26767 - protein, 374 aa, Arabidopsis thaliana
  peptide (1)..(374): Ceres Seq. ID no. 12333290
MALKTWKPFITVVSLQFGYAGLSIIAKFALNQGMSPHVLASYRHIVATIFIAPFAYFLDRKIRPKMTLSIFFKILLLGLLEPTIDQNLYYTGMKYTSATFTAAMTNVLPAFAFIMAWIFRLEKVNVKKIHSQAKILGTIVTVGGAMLMTVVKGPLIPLPWANPHDIHQDSSNTGVKQDLTKGASLIAIGCICWAGFINLQAITLKSYPVELSLTAYICFLGSIESTIVALFIERGNPSAWAIHLDSKLLAAVYGGVICSGIGYYVQGVIMKTRGPVFVTAFNPLSMVIVAILGSIILAEVMFLGRILGAIVIVLGLYSVLWGKSKDEPSSSFSDMDKELPLSTPQIVLPSKANAKMDTNDASVVISRPNTNESV

SEQ ID NO: 26768 - protein, 341 aa, Arabidopsis thaliana
  peptide (1)..(341): Ceres Seq. ID no. 12333291
MSPHVLASYRHIVATIFIAPFAYFLDRKIRPKMTLSIFFKILLLGLLEPTIDQNLYYTGMKYTSATFTAAMTNVLPAFAFIMAWIFRLEKVNVKKIHSQAKILGTIVTVGGAMLMTVVKGPLIPLPWANPHDIHQDSSNTGVKQDLTKGASLIAIGCICWAGFINLQAITLKSYPVELSLTAYICFLGSIESTIVALFIERGNPSAWAIHLDSKLLAAVYGGVICSGIGYYVQGVIMKTRGPVFVTAFNPLSMVIVAILGSIILAEVMFLGRILGAIVIVLGLYSVLWGKSKDEPSSSFSDMDKELPLSTPQIVLPSKANAKMDTNDASVVISRPNTNESV

SEQ ID NO: 26769 - protein, 309 aa, Arabidopsis thaliana
  peptide (1)..(309): Ceres Seq. ID no. 12333292
MTLSIFFKILLLGLLEPTIDQNLYYTGMKYTSATFTAAMTNVLPAFAFIMAWIFRLEKVNVKKIHSQAKILGTIVTVGGAMLMTVVKGPLIPLPWANPHDIHQDSSNTGVKQDLTKGASLIAIGCICWAGFINLQAITLKSYPVELSLTAYICFLGSIESTIVALFIERGNPSAWAIHLDSKLLAAVYGGVICSGIGYYVQGVIMKTRGPVFVTAFNPLSMVIVAILGSIILAEVMFLGRILGAIVIVLGLYSVLWGKSKDEPSSSFSDMDKELPLSTPQIVLPSKANAKMDTNDASVVISRPNTNESV

SEQ ID NO: 26770 - DNA, 1122 bp, Arabidopsis thaliana
  misc_feature (1)..(1122): Ceres Seq. ID no. 13610669
  misc_feature (1)..(1122): Ortholog of  Ceres SEQ ID NO 14309294 as cited in SEQ ID NO 0
accaatccttcacttcctttcacgatccaaaacaaaacacaagaaaatgcaacaaaatcttctccatctctgaactcaaaaactcattcactgagaaaaatggagacccttctctcccctcgtgcgctctctcctcctctcaatcccaaacctttgtcccttcaccagaccaaacccacttcacattcattgtctctctcaaaacccaccaccttctccggtcctaaacacctctccacccggttcactaaaccggaatcaagaaactggttaatagatgcaaagcaaggactagctgctttagctttatctctaactctcactttctcacctgttggcactgctttagcctctgagttcaatatcctcaacgatggtccacctaaagaaacttacgtagtcgatgacgctggtgttcttagtcgagtgacgaagtcagatcttaagaagcttttgtctgatcttgaatacagaaagaaactgagactcaatttcatcactgtccgaaagctcaccagtaaagcagatgcgtttgagtatgcagaccaggttttggaaaaatggtatccttctattgaagaaggtaacaataagggtattgttgttttgataacaagtcagaaggaaggagctattactggtggtcctgcttttattgaagctgttggtgaaaacattcttgatgctaccgtctccgaaaatcttcccgtactagcaacggacgaaaaatacaacgaggcggtatatagcagtgcgaaaaggttggttgcagctatagacggtcaaccagatcccgggggtccaaccgtaaaggatagcaagagagaatcaaatttcaagacgaaagaagaaaccgatgagaagcgaggacagttcagtcttgtcgttggaggattacttgtaattgcctttgtagttcccatggcacaatactttgcttatgtctccaggaagtaagtaagtaaactcggttcactctcgtaaaccaaaccgatcaggtcagaactttgatttacctcggttatttggttatggtttcttggtaaattggtttatttgaacaatataagtaaataataacagaaaactaaagaatgaatgaaaccatccgattgtaacggc

SEQ ID NO: 26771 - protein, 318 aa, Arabidopsis thaliana
  peptide (1)..(318): Ceres Seq. ID no. 13610670
TNPSLPFTIQNKTQENATKSSPSLNSKTHSLRKMETLLSPRALSPPLNPKPLSLHQTKPTSHSLSLSKPTTFSGPKHLSTRFTKPESRNWLIDAKQGLAALALSLTLTFSPVGTALASEFNILNDGPPKETYVVDDAGVLSRVTKSDLKKLLSDLEYRKKLRLNFITVRKLTSKADAFEYADQVLEKWYPSIEEGNNKGIVVLITSQKEGAITGGPAFIEAVGENILDATVSENLPVLATDEKYNEAVYSSAKRLVAAIDGQPDPGGPTVKDSKRESNFKTKEETDEKRGQFSLVVGGLLVIAFVVPMAQYFAYVSRK

SEQ ID NO: 26772 - protein, 285 aa, Arabidopsis thaliana
  peptide (1)..(285): Ceres Seq. ID no. 13610671
METLLSPRALSPPLNPKPLSLHQTKPTSHSLSLSKPTTFSGPKHLSTRFTKPESRNWLIDAKQGLAALALSLTLTFSPVGTALASEFNILNDGPPKETYVVDDAGVLSRVTKSDLKKLLSDLEYRKKLRLNFITVRKLTSKADAFEYADQVLEKWYPSIEEGNNKGIVVLITSQKEGAITGGPAFIEAVGENILDATVSENLPVLATDEKYNEAVYSSAKRLVAAIDGQPDPGGPTVKDSKRESNFKTKEETDEKRGQFSLVVGGLLVIAFVVPMAQYFAYVSRK

SEQ ID NO: 26773 - DNA, 651 bp, Arabidopsis thaliana
  misc_feature (1)..(651): Ceres Seq. ID no. 12323414
  misc_feature (1)..(651): Ortholog of  Ceres SEQ ID NO 15177478 as cited in SEQ ID NO 1121
atctctaaagttgttccttcttctctccttcgtctcccgtcaagctgctttagccatggctatggcggcgtctattatccaatcttctccgctctccttcaatagcaaagccacggattcatagttcaggatcgctcggcggaatcaaaagccaaaatagagtctctccattgagtgcggttggattaagctcaggccttggaagtagaaggaaatctcttttgatatgtcactcagccattaacgcgaaatgcagtgaaggacaaacacagaccgttactcgggagtcaccgactataacacaggctcctgtacactctaaggagaaatcaccaagcctagacgatggaggagacgggttcccaccgcgagatgatggagatggtggtggaggaggagggggtggaggcaactggtcgggtgggttcttcttctttggttttctggccttcttgggtctattgaaggataaagagggcgaggaagattaccgagggagcagaaggcgataataatatgggccactcttggttatcttattacagctacaggactcattttgtatctgtttcgttgagtgggggatgatatgccttgtattcaagagaagagagacacggttgatttcaacaaagcttatattgataactt

SEQ ID NO: 26774 - protein, 40 aa, Arabidopsis thaliana
  peptide (1)..(40): Ceres Seq. ID no. 12323415
SLKLFLLLSFVSRQAALAMAMAASIIQSSPLSFNSKATDS

SEQ ID NO: 26775 - protein, 39 aa, Arabidopsis thaliana
  peptide (1)..(39): Ceres Seq. ID no. 12323416
MEETGSHREMMEMVVEEEGVEATGRVGSSSLVFWPSWVY

SEQ ID NO: 26776 - protein, 34 aa, Arabidopsis thaliana
  peptide (1)..(34): Ceres Seq. ID no. 12323417
ISKVVPSSLLRLPSSCFSHGYGGVYYPIFSALLQ

SEQ ID NO: 26777 - DNA, 852 bp, Arabidopsis thaliana
  misc_feature (1)..(852): Ceres Seq. ID no. 12335906
  misc_feature (1)..(852): Ortholog of  Ceres SEQ ID NO 15173803 as cited in SEQ ID NO 61759
tccaaagtctcgagcttagagctctctctcagtcgaaaacaatggcgtcttcttcagcgacgctctctctctgctctactttctctgctcattgcaatgtcaattctcgccgttctagcactatcctctgttctctctctaaaccttcgcttaatttggctaaacctctgactggatttctttctccttccactgcgtcgacgtctcgaaccgcattcaccgtcgctccgaaattcgcggaatcagtcgtcgaagctgaaccggagactaccgatatcgaagctgtggtggtttccgatgtttcggaggttactgaggaaaaagctaaacgagaagagattttcgctgttattatggttggtggacgccaatacatagtgtttccagggagatatctctacactcagaggctaaaagatgcaaatgttgatgaccagattgttctcaacaaagtgttgcttgttggaacaaagacacacacttacattggcaagccggttgtgaccaatgccactgtacatgctgttgtggaaagtcaaggtttgaatgataaagtggtagtcttcaagtacaagcctaagaagaagtaccgtagaaatatcggtcacagacagccgaatacgaggattaggattaccggaatcacagggtatgaagagtatccagcctcgcccaatgttgcagttggagaagtaaatctttgacacaaaatgtttcttgaatgttaaaatttttctgatcttctctatgtaattttgtaaggaccctggtcatttcatttctgctgagattccttttattaatatgtaccttttgccattctttgatcacaaattctaagttagtgtatgg

SEQ ID NO: 26778 - protein, 233 aa, Arabidopsis thaliana
  peptide (1)..(233): Ceres Seq. ID no. 12335907
QSLELRALSQSKTMASSSATLSLCSTFSAHCNVNSRRSSTILCSLSKPSLNLAKPLTGFLSPSTASTSRTAFTVAPKFAESVVEAEPETTDIEAVVVSDVSEVTEEKAKREEIFAVIMVGGRQYIVFPGRYLYTQRLKDANVDDQIVLNKVLLVGTKTHTYIGKPVVTNATVHAVVESQGLNDKVVVFKYKPKKKYRRNIGHRQPNTRIRITGITGYEEYPASPNVAVGEVNL

SEQ ID NO: 26779 - protein, 220 aa, Arabidopsis thaliana
  peptide (1)..(220): Ceres Seq. ID no. 12335908
MASSSATLSLCSTFSAHCNVNSRRSSTILCSLSKPSLNLAKPLTGFLSPSTASTSRTAFTVAPKFAESVVEAEPETTDIEAVVVSDVSEVTEEKAKREEIFAVIMVGGRQYIVFPGRYLYTQRLKDANVDDQIVLNKVLLVGTKTHTYIGKPVVTNATVHAVVESQGLNDKVVVFKYKPKKKYRRNIGHRQPNTRIRITGITGYEEYPASPNVAVGEVNL

SEQ ID NO: 26780 - protein, 116 aa, Arabidopsis thaliana
  peptide (1)..(116): Ceres Seq. ID no. 12335909
MVGGRQYIVFPGRYLYTQRLKDANVDDQIVLNKVLLVGTKTHTYIGKPVVTNATVHAVVESQGLNDKVVVFKYKPKKKYRRNIGHRQPNTRIRITGITGYEEYPASPNVAVGEVNL

SEQ ID NO: 26781 - DNA, 2589 bp, Arabidopsis thaliana
  misc_feature (1)..(2589): Ceres Seq. ID no. 12372158
  misc_feature (1)..(2589): Ortholog of  Ceres SEQ ID NO 12384296 as cited in SEQ ID NO 0
aaacacaccaaaatcaaaagctgagagctctcttacattgaagctactttcgaagatagcattcactgattggtaaagagttctagaagcgacgagcatcttctttagttcccgagttttctgcgtttgagaagtctgttctagaaagtaatgggtgacagcgaggccatggtttccgagggttatacttctgctccatatggagactataatgcttctgctgctactgtggaatcgaccgggcaagagactgcaccaattgttgatgcatcacactcggtcaacaatgattctttggtcaatggtactgcgccagttgagaacggaagtgcaacagataatgtggctgtgactgctccagcagcggagcatggagacaatactggctctacactctcaacggaagaggagcgcttgtggaatattgtaagggcaaattctttagagtttaatgcttggactgccttgattgatgagacggagaggatagcgcaggacaatatagcaaaaatccggaaggtctatgatgctttcttagctgaatttcctctgtgttatggctattggaaaaagtttgccgatcatgaggctcgggtgggggcaatggacaaagtcgtggaggtttatgaaagagcagtgctgggagtgacatattcagtggatatctggttgcattattgcacttttgccatcaatacatatggagatccagaaacgatcagaaggctttttgaacgagctttggtttacgttggaactgattttctttcctctccgttgtgggacaaatacattgagtatgagtacatgcagcaggactggagccgagttgccttgatttacaccagaatattggagaatccaattcaaaatctggatagatatttcagcagttttaaggagctagctgaaacacggcctctgtcggaactaaggagtgctgaggaatccgcagctgctgctgttgctgttgctggtgatgcttctgaaagtgcagcatctgagtccggtgaaaaggcagatgaaggacgatctcaagttgatggttccaccgaacaatcccctaaattggaaagtgctagttcaactgaacctgaggagttgaagaagtatgtaggcatcagggaagccatgtacataaaatcgaaagagtttgaatctaaaatcattggttatgaaatggctataaggaggccctatttccatgtgcgtcctctgaatgtcgcagaactggagaattggcacaactatctggatttcattgagagggatggagacttcaataaggtggtcaagctgtatgaaagatgtgtggttacctgtgcaaattacccagaatactggattcgttatgtgacaaacatggaagcaagtggaagtgcggaccttgcagaaaatgcccttgctcgagcaactcaagtctttgtcaagaaacaaccagagattcacctatttgctgctcgattaaaagagcagaatggagatatagctggtgctagagctgcataccaattagtgcactctgaaatttctcctggacttcttgaagcagtaatcaagcatgcaaatatggaataccgactaggtaatctggatgatgctttctctttgtatgagcaagtgattgctgttgaaaaggggaaagaacattccacaatactgccactgctgtatgcgcagtattcaaggttttcatacttggtctccagggatgctgagaaagctaggaggattattgtcgaagcacttgaccatgtacaaccgtcaaaacctctcatggaagcactgattcattttgaggcgattcagccaccaccaagagagattgattaccttgagccacttgtagagaaagttataaagccagatgcagatgcccaaaacattgcaagttccactgagagggaagagctatccttaatatatatagagttcctgggtatttttggagatgtgaagtccattaaaaaagcggaagatcaacatgttaaactgttttatcctcatcggagcacgtcggagctgaaaaagcgtagcgcagatgattttctcgcatcagataggacgaaaatggcaaaaacttacaacggcactccacctgctcagccagtatccaatgcatatccaaatgctcaggctcaatggtctggtggttatgctgcgcagcctcagacttggccaccagcacaagctgctcctgctcaaccacagcaatggaaccctgcctacggtcaacaggctgcttatggtgcatatgggggatatcctgctggctataccgctccacaagcaccaacacctgtgccacaggccgcagcttatggagcgtatcctgctcagacatacccaacgcagagttatgcacctccagttgcagcagcagcaccagcggctgcaccggtgcagcaaccggctgctgctgttgctcctcaagcgtactacaacacgtactactgagcctattactgctgctggtcgtttttgtagtgtaattgataaccatttgcttctatctactcaaatttagtgtctggatgtttacatgtctctcttttctcgatcagtgacaatagatatttacttttcttc

SEQ ID NO: 26782 - protein, 768 aa, Arabidopsis thaliana
  peptide (1)..(768): Ceres Seq. ID no. 12372159
MGDSEAMVSEGYTSAPYGDYNASAATVESTGQETAPIVDASHSVNNDSLVNGTAPVENGSATDNVAVTAPAAEHGDNTGSTLSTEEERLWNIVRANSLEFNAWTALIDETERIAQDNIAKIRKVYDAFLAEFPLCYGYWKKFADHEARVGAMDKVVEVYERAVLGVTYSVDIWLHYCTFAINTYGDPETIRRLFERALVYVGTDFLSSPLWDKYIEYEYMQQDWSRVALIYTRILENPIQNLDRYFSSFKELAETRPLSELRSAEESAAAAVAVAGDASESAASESGEKADEGRSQVDGSTEQSPKLESASSTEPEELKKYVGIREAMYIKSKEFESKIIGYEMAIRRPYFHVRPLNVAELENWHNYLDFIERDGDFNKVVKLYERCVVTCANYPEYWIRYVTNMEASGSADLAENALARATQVFVKKQPEIHLFAARLKEQNGDIAGARAAYQLVHSEISPGLLEAVIKHANMEYRLGNLDDAFSLYEQVIAVEKGKEHSTILPLLYAQYSRFSYLVSRDAEKARRIIVEALDHVQPSKPLMEALIHFEAIQPPPREIDYLEPLVEKVIKPDADAQNIASSTEREELSLIYIEFLGIFGDVKSIKKAEDQHVKLFYPHRSTSELKKRSADDFLASDRTKMAKTYNGTPPAQPVSNAYPNAQAQWSGGYAAQPQTWPPAQAAPAQPQQWNPAYGQQAAYGAYGGYPAGYTAPQAPTPVPQAAAYGAYPAQTYPTQSYAPPVAAAAPAAAPVQQPAAAVAPQAYYNTYY

SEQ ID NO: 26783 - protein, 762 aa, Arabidopsis thaliana
  peptide (1)..(762): Ceres Seq. ID no. 12372160
MVSEGYTSAPYGDYNASAATVESTGQETAPIVDASHSVNNDSLVNGTAPVENGSATDNVAVTAPAAEHGDNTGSTLSTEEERLWNIVRANSLEFNAWTALIDETERIAQDNIAKIRKVYDAFLAEFPLCYGYWKKFADHEARVGAMDKVVEVYERAVLGVTYSVDIWLHYCTFAINTYGDPETIRRLFERALVYVGTDFLSSPLWDKYIEYEYMQQDWSRVALIYTRILENPIQNLDRYFSSFKELAETRPLSELRSAEESAAAAVAVAGDASESAASESGEKADEGRSQVDGSTEQSPKLESASSTEPEELKKYVGIREAMYIKSKEFESKIIGYEMAIRRPYFHVRPLNVAELENWHNYLDFIERDGDFNKVVKLYERCVVTCANYPEYWIRYVTNMEASGSADLAENALARATQVFVKKQPEIHLFAARLKEQNGDIAGARAAYQLVHSEISPGLLEAVIKHANMEYRLGNLDDAFSLYEQVIAVEKGKEHSTILPLLYAQYSRFSYLVSRDAEKARRIIVEALDHVQPSKPLMEALIHFEAIQPPPREIDYLEPLVEKVIKPDADAQNIASSTEREELSLIYIEFLGIFGDVKSIKKAEDQHVKLFYPHRSTSELKKRSADDFLASDRTKMAKTYNGTPPAQPVSNAYPNAQAQWSGGYAAQPQTWPPAQAAPAQPQQWNPAYGQQAAYGAYGGYPAGYTAPQAPTPVPQAAAYGAYPAQTYPTQSYAPPVAAAAPAAAPVQQPAAAVAPQAYYNTYY

SEQ ID NO: 26784 - protein, 617 aa, Arabidopsis thaliana
  peptide (1)..(617): Ceres Seq. ID no. 12372161
MDKVVEVYERAVLGVTYSVDIWLHYCTFAINTYGDPETIRRLFERALVYVGTDFLSSPLWDKYIEYEYMQQDWSRVALIYTRILENPIQNLDRYFSSFKELAETRPLSELRSAEESAAAAVAVAGDASESAASESGEKADEGRSQVDGSTEQSPKLESASSTEPEELKKYVGIREAMYIKSKEFESKIIGYEMAIRRPYFHVRPLNVAELENWHNYLDFIERDGDFNKVVKLYERCVVTCANYPEYWIRYVTNMEASGSADLAENALARATQVFVKKQPEIHLFAARLKEQNGDIAGARAAYQLVHSEISPGLLEAVIKHANMEYRLGNLDDAFSLYEQVIAVEKGKEHSTILPLLYAQYSRFSYLVSRDAEKARRIIVEALDHVQPSKPLMEALIHFEAIQPPPREIDYLEPLVEKVIKPDADAQNIASSTEREELSLIYIEFLGIFGDVKSIKKAEDQHVKLFYPHRSTSELKKRSADDFLASDRTKMAKTYNGTPPAQPVSNAYPNAQAQWSGGYAAQPQTWPPAQAAPAQPQQWNPAYGQQAAYGAYGGYPAGYTAPQAPTPVPQAAAYGAYPAQTYPTQSYAPPVAAAAPAAAPVQQPAAAVAPQAYYNTYY

SEQ ID NO: 26785 - DNA, 550 bp, Arabidopsis thaliana
  misc_feature (1)..(550): Ceres Seq. ID no. 12422862
  misc_feature (1)..(550): Ortholog of  Ceres SEQ ID NO 12562293 as cited in SEQ ID NO 20690
atcacttacttaacatactaagagagttattagaacttgcaaaaaatggcttccaaggctttgattctgttaggtctcttctcagttcttctcgtcgtctccgaagtgtctgccgcaaggcaatcgggcatggtgaagccagagagtgaggaaactgtgcaacctgaaggttatggcggtggccacggaggacatggtggtcacggagggggaggaggccacggacatggaggacacaacggaggagggggccacggacttgacggatacggaggaggtggaggacactatggaggaggtggaggacactacggaggaggtggaggacactacggaggaggtggaggacactacggaggaggtggccacggggctaaacgaacctgttcagactaagccgggtgtttaaaactatataatatcttcactaccatgcatgattgcatatatatatatacgcttatgtattatctatatgcctataaataaaccatggtgagtttgtaacgcagtgccttcagaaatgttcggaataaatttccataatatt

SEQ ID NO: 26786 - protein, 116 aa, Arabidopsis thaliana
  peptide (1)..(116): Ceres Seq. ID no. 12422863
MASKALILLGLFSVLLVVSEVSAARQSGMVKPESEETVQPEGYGGGHGGHGGHGGGGGHGHGGHNGGGGHGLDGYGGGGGHYGGGGGHYGGGGGHYGGGGGHYGGGGHGAKRTCSD

SEQ ID NO: 26787 - protein, 88 aa, Arabidopsis thaliana
  peptide (1)..(88): Ceres Seq. ID no. 12422864
MVKPESEETVQPEGYGGGHGGHGGHGGGGGHGHGGHNGGGGHGLDGYGGGGGHYGGGGGHYGGGGGHYGGGGGHYGGGGHGAKRTCSD

SEQ ID NO: 26788 - protein, 78 aa, Arabidopsis thaliana
  peptide (1)..(78): Ceres Seq. ID no. 12422865
MAVATEDMVVTEGEEATDMEDTTEEGATDLTDTEEVEDTMEEVEDTTEEVEDTTEEVEDTTEEVATGLNEPVQTKPGV

SEQ ID NO: 26789 - DNA, 631 bp, Arabidopsis thaliana
  misc_feature (1)..(631): Ceres Seq. ID no. 12333200
  misc_feature (1)..(631): Ortholog of  Ceres SEQ ID NO 12563124 as cited in SEQ ID NO 57104
ctacacatctcactgctcactactctcactgtaatcccttagatcttcttttcaaatttcaatggcgtccggtgatgttgagtatcggtgcttcgttggaggtctagcatgggccactgatgacagagctcttgagactgccttcgctcaatacggcgacgttattgattccaagatcattaacgatcgtgagactggaagatcaaggggattcggattcgtcaccttcaaggatgagaaagccatgaaggatgcgattgagggaatgaacggacaagatctcgatggccgtagcatcactgttaacgaggctcagtcacgaggaagaggtggtggtggcggaagctacggtggtggaagacgtgagggaggaggaggatacggtggtggtgaaggaggaggttacggaggaagcggtggtggtggaggatggtaattcctttaattaggtttgggattaccaatgaatgttctctctctcgcttgttatgcttctacttggttttgtgtgttctctattttgttctggttctgctttagatttgatgtaacagttcgtgattaggtattttggtatctggaaacgtaatgttaagtcacttgtcattctctaaataacaaatttcttcgg

SEQ ID NO: 26790 - protein, 124 aa, Arabidopsis thaliana
  peptide (1)..(124): Ceres Seq. ID no. 12333201
MASGDVEYRCFVGGLAWATDDRALETAFAQYGDVIDSKIINDRETGRSRGFGFVTFKDEKAMKDAIEGMNGQDLDGRSITVNEAQSRGRGGGGGSYGGGRREGGGGYGGGEGGGYGGSGGGGGW

SEQ ID NO: 26791 - protein, 63 aa, Arabidopsis thaliana
  peptide (1)..(63): Ceres Seq. ID no. 12333202
MKDAIEGMNGQDLDGRSITVNEAQSRGRGGGGGSYGGGRREGGGGYGGGEGGGYGGSGGGGGW

SEQ ID NO: 26792 - DNA, 1215 bp, Arabidopsis thaliana
  misc_feature (1)..(1215): Ceres Seq. ID no. 13488695
  misc_feature (1)..(1215): Ortholog of  Ceres SEQ ID NO 12614972 as cited in SEQ ID NO 61986
  misc_feature (1)..(1215): Ortholog of  Ceres SEQ ID NO 12625706 as cited in SEQ ID NO 64144
  misc_feature (1)..(1215): Ortholog of  Ceres SEQ ID NO 13584933 as cited in SEQ ID NO 65009
  misc_feature (1)..(1215): Ortholog of  Ceres SEQ ID NO 12634984 as cited in SEQ ID NO 0
  misc_feature (1)..(1215): Ortholog of  Ceres SEQ ID NO 13599377 as cited in SEQ ID NO 0
tggttgttcaaagcatcaaataagtaaataaaaactcttttatgttcacctttttcactatcctctctttgtgtttcaaatcgtgggaacaaattatcacaatggaggcttctaaagaagctcatcaccttccaaactacatgaaagacgacaacgttagtcaagaaaccaagaacttgatcacttctctaccttcagacaaagatttcatgggttatggtctctacaactacaaaggttgttggtactatccaaacacactccaagccgttcttgacgtccaaaaacacttcaagccacgagatactgatataatcctcgcttctttgcccaaaggtggaaccacttggctcaaatccctaattttcgctgttgtacatagagaaaagtaccgcggaacccctcaaacacatcctttgctcttacaaaaccctcatgaccttgtcccatttcttgaggttgagttatacgctaatagccaaattccggatctcgcaaagtattcttctcctatgatcttttctacacacatgcacttacaagcattgcgtgaagccaccacaaaagcttgcaaaaccgtatatgtgtgtagaggtatcaaagatacgtttgtctccggctggcattatagaaacatgttgcatcgcaccaagatggatcaagccacttttgagctcatgtttgatgcttattgtagaggagttctcttatatggaccttattgggaacatgtattgagctattggaaagggagcttggaagcaaaggagaatgttcttttcatgaagtacgaagagataattgaggagcctcgtgttcaagtcaagagactcgccgagttcttggaatgtccattcaccaaggaagaagaagaaagtggatcggtggaggagatcttgaagttgtgtagtttacgaaatttaagcaatttggaggttaataagaatgggacaacgagaattggtgtagattctcaggtgttctttaggaaaggtgaagttggtgattggaagaatcatcttacgccacaaatggcgaaaacctttgatgagattattgactatagactaggagactccggtttgatatttcaataaggttgtgttgtgttttttttcttttgtcatccgaaaataaattaggactcaaacgagtcattcttgagaaatgttatgttgtattcttagctttgaaattccatgtttcttcttttta

SEQ ID NO: 26793 - protein, 351 aa, Arabidopsis thaliana
  peptide (1)..(351): Ceres Seq. ID no. 13488696
MFTFFTILSLCFKSWEQIITMEASKEAHHLPNYMKDDNVSQETKNLITSLPSDKDFMGYGLYNYKGCWYYPNTLQAVLDVQKHFKPRDTDIILASLPKGGTTWLKSLIFAVVHREKYRGTPQTHPLLLQNPHDLVPFLEVELYANSQIPDLAKYSSPMIFSTHMHLQALREATTKACKTVYVCRGIKDTFVSGWHYRNMLHRTKMDQATFELMFDAYCRGVLLYGPYWEHVLSYWKGSLEAKENVLFMKYEEIIEEPRVQVKRLAEFLECPFTKEEEESGSVEEILKLCSLRNLSNLEVNKNGTTRIGVDSQVFFRKGEVGDWKNHLTPQMAKTFDEIIDYRLGDSGLIFQ

SEQ ID NO: 26794 - protein, 331 aa, Arabidopsis thaliana
  peptide (1)..(331): Ceres Seq. ID no. 13488697
MEASKEAHHLPNYMKDDNVSQETKNLITSLPSDKDFMGYGLYNYKGCWYYPNTLQAVLDVQKHFKPRDTDIILASLPKGGTTWLKSLIFAVVHREKYRGTPQTHPLLLQNPHDLVPFLEVELYANSQIPDLAKYSSPMIFSTHMHLQALREATTKACKTVYVCRGIKDTFVSGWHYRNMLHRTKMDQATFELMFDAYCRGVLLYGPYWEHVLSYWKGSLEAKENVLFMKYEEIIEEPRVQVKRLAEFLECPFTKEEEESGSVEEILKLCSLRNLSNLEVNKNGTTRIGVDSQVFFRKGEVGDWKNHLTPQMAKTFDEIIDYRLGDSGLIFQ

SEQ ID NO: 26795 - protein, 318 aa, Arabidopsis thaliana
  peptide (1)..(318): Ceres Seq. ID no. 13488698
MKDDNVSQETKNLITSLPSDKDFMGYGLYNYKGCWYYPNTLQAVLDVQKHFKPRDTDIILASLPKGGTTWLKSLIFAVVHREKYRGTPQTHPLLLQNPHDLVPFLEVELYANSQIPDLAKYSSPMIFSTHMHLQALREATTKACKTVYVCRGIKDTFVSGWHYRNMLHRTKMDQATFELMFDAYCRGVLLYGPYWEHVLSYWKGSLEAKENVLFMKYEEIIEEPRVQVKRLAEFLECPFTKEEEESGSVEEILKLCSLRNLSNLEVNKNGTTRIGVDSQVFFRKGEVGDWKNHLTPQMAKTFDEIIDYRLGDSGLIFQ

SEQ ID NO: 26796 - DNA, 1309 bp, Arabidopsis thaliana
  misc_feature (1)..(1309): Ceres Seq. ID no. 13490147
  misc_feature (1)..(1309): Ortholog of  Ceres SEQ ID NO 15176230 as cited in SEQ ID NO 58796
gtcccatcaccaaacattaagtagcactctttttcctctctatatctctcactcacactttttctctatatcttctcctcaacttggatatgggtgaagccgtagaggtcatgttcggaaatgggttcccggagattcacaaagccacatcacccactcaaaccctccactctaaccagcaagactgccattggtatgaagaaaccatcgatgatgatctcaagtggtcttttgccctcaacagtgttctccatcaaggaactagtgagtaccaagatattgctctgttggacaccaaacgttttggaaaggtgcttgtgattgatgggaaaatgcaaagtgctgagagagatgagtttatctaccatgaatgtttgatccatcccgctctccttttccatcccaaccccaagactgtgtttataatgggaggaggtgaaggctctgctgcaagagaaatactaaaacacacgacgatcgagaaagttgttatgtgtgatattgatcaggaagttgttgatttttgcagaagatttctgaccgttaacagcgatgctttctgtaacaaaaagcttgaacttgtgatcaaagatgcaaaggctgaattagagaaaagggaagagaagtttgatatcatagtgggagatttagctgatccagtggaaggtggaccttgttatcagctctacaccaaatccttctaccaaaacattctcaaacccaagcttagccctaatggcatttttgtcacccaggctggaccagcaggaatattcactcataaggaagtcttcacatcaatctacaacaccatgaagcaagtcttcaagtacgtgaaggcttacacagcacatgtgccatcatttgcggacacatggggatgggtgatggcatcggaccacgagtttgacgttgaagttgatgaaatggatcgaagaatcgaagagagagttaacggagaattgatgtatctaaacgctccttctttcgtctctgctgctactctcaacaaaaccatctctctcgcgctagagaaggagactgaagtttatagtgaagagaatgcgagattcattcatggtcatggtgtggcgtaccggcatatttaaagacgaaccggtttcagtttcagtgttattaccaaacccatgtcacaaaaacaaaaggccggtttcttttctccgcacagaaccgggtgttgtcttgaatcttgattactttggttcggttttattttctacattgctttttgttttcttgttcttccctcaagttattccggtttaacaagactatattgcttactaac

SEQ ID NO: 26797 - protein, 339 aa, Arabidopsis thaliana
  peptide (1)..(339): Ceres Seq. ID no. 13490148
MGEAVEVMFGNGFPEIHKATSPTQTLHSNQQDCHWYEETIDDDLKWSFALNSVLHQGTSEYQDIALLDTKRFGKVLVIDGKMQSAERDEFIYHECLIHPALLFHPNPKTVFIMGGGEGSAAREILKHTTIEKVVMCDIDQEVVDFCRRFLTVNSDAFCNKKLELVIKDAKAELEKREEKFDIIVGDLADPVEGGPCYQLYTKSFYQNILKPKLSPNGIFVTQAGPAGIFTHKEVFTSIYNTMKQVFKYVKAYTAHVPSFADTWGWVMASDHEFDVEVDEMDRRIEERVNGELMYLNAPSFVSAATLNKTISLALEKETEVYSEENARFIHGHGVAYRHI

SEQ ID NO: 26798 - protein, 332 aa, Arabidopsis thaliana
  peptide (1)..(332): Ceres Seq. ID no. 13490149
MFGNGFPEIHKATSPTQTLHSNQQDCHWYEETIDDDLKWSFALNSVLHQGTSEYQDIALLDTKRFGKVLVIDGKMQSAERDEFIYHECLIHPALLFHPNPKTVFIMGGGEGSAAREILKHTTIEKVVMCDIDQEVVDFCRRFLTVNSDAFCNKKLELVIKDAKAELEKREEKFDIIVGDLADPVEGGPCYQLYTKSFYQNILKPKLSPNGIFVTQAGPAGIFTHKEVFTSIYNTMKQVFKYVKAYTAHVPSFADTWGWVMASDHEFDVEVDEMDRRIEERVNGELMYLNAPSFVSAATLNKTISLALEKETEVYSEENARFIHGHGVAYRHI

SEQ ID NO: 26799 - protein, 258 aa, Arabidopsis thaliana
  peptide (1)..(258): Ceres Seq. ID no. 13490150
MQSAERDEFIYHECLIHPALLFHPNPKTVFIMGGGEGSAAREILKHTTIEKVVMCDIDQEVVDFCRRFLTVNSDAFCNKKLELVIKDAKAELEKREEKFDIIVGDLADPVEGGPCYQLYTKSFYQNILKPKLSPNGIFVTQAGPAGIFTHKEVFTSIYNTMKQVFKYVKAYTAHVPSFADTWGWVMASDHEFDVEVDEMDRRIEERVNGELMYLNAPSFVSAATLNKTISLALEKETEVYSEENARFIHGHGVAYRHI

SEQ ID NO: 26800 - DNA, 672 bp, Arabidopsis thaliana
  misc_feature (1)..(672): Ceres Seq. ID no. 12394973
  misc_feature (1)..(672): Ortholog of  Ceres SEQ ID NO 14307526 as cited in SEQ ID NO 58875
gtgtagactgagaaataaagaagcccttgattttgcccattgcagtcatctctctcgaatctctctctataatccgatctgagaaatttcgccggagctaggttttgttgtttaccgatcaatcctttaatcaatggcaatggctgttttccgtcgcgaagggaggcgtctcctcccttcaatcgccgctcgcccaatcgctgctatccgatctcctctctcttctgaccaggaggaaggacttcttggagttcgatctatctcaactcaagtggtgcgtaaccgcatgaagagtgttaagaacatccaaaagatcacaaaggcaatgaagatggttgctgcttccaagcttagagcagttcaaggccgagctgagaactcccgtggactttggcagccatttactgcacttctaggagataatcccagcattgatgtaaagaagagtgtgttaaaattttactgaatcagtttcctttgctggcttcttgttgagacctaccaatgtttgctcaacgatttttaataaacatacctgtaatttccagcaggatttcgaataattgcattaacattttgttctgattcagactcgcttcctccagagtctgtagtgttgttttgtgcaaacaccatgtactccggtttatttgatatttttttacctgagcc

SEQ ID NO: 26801 - protein, 110 aa, Arabidopsis thaliana
  peptide (1)..(110): Ceres Seq. ID no. 12394974
MAMAVFRREGRRLLPSIAARPIAAIRSPLSSDQEEGLLGVRSISTQVVRNRMKSVKNIQKITKAMKMVAASKLRAVQGRAENSRGLWQPFTALLGDNPSIDVKKSVLKFY

SEQ ID NO: 26802 - protein, 108 aa, Arabidopsis thaliana
  peptide (1)..(108): Ceres Seq. ID no. 12394975
MAVFRREGRRLLPSIAARPIAAIRSPLSSDQEEGLLGVRSISTQVVRNRMKSVKNIQKITKAMKMVAASKLRAVQGRAENSRGLWQPFTALLGDNPSIDVKKSVLKFY

SEQ ID NO: 26803 - protein, 59 aa, Arabidopsis thaliana
  peptide (1)..(59): Ceres Seq. ID no. 12394976
MKSVKNIQKITKAMKMVAASKLRAVQGRAENSRGLWQPFTALLGDNPSIDVKKSVLKFY

SEQ ID NO: 26804 - DNA, 1417 bp, Arabidopsis thaliana
  misc_feature (1)..(1417): Ceres Seq. ID no. 13499793
  misc_feature (1)..(1417): Ortholog of  Ceres SEQ ID NO 13596090 as cited in SEQ ID NO 68377
  misc_feature (1)..(1417): Ortholog of  Ceres SEQ ID NO 14303557 as cited in SEQ ID NO 68595
aatctagtaatcgttaaaaaagccactttgttagtattgcttaatactctctctctctctctgttcccaaggagatgaaaagcttcaatctcaaaacatagcagctctctcaataaaccaaacccaaatgcaagctgtgtagagagaaacggagtgaggaaggaaggagatgggaggggtgacgtcatcggtggcggcgaagtttgccttcttcccgccgagtccaccgtcttacaaggtggtgaccgacgagctcaccggactgttgcttctcagccctttcccccaccgcgaaaacgtagaaatcgtaaagcttcggaccaggagaggcacagagatcgtgggcatgtacgtgaggcatccgatggctacctccacgctcctctactcccatggcaacgccgccgatctgggacagatgtatgagctcttcattgagcttagcatccatctcaaggttaatcttatgggatacgattactccgggtatggacaatctactggaaagccgagtgagcataacacgtatgctgatatcgaagctgtttataagtgtcttgaagaaacctttggctctaagcaggaaggtgtcatcctctacggccaatctgtaggcagcggacctacgttagatcttgcttcccggttgcctcaacttagagccgtcgtccttcacagccccattctctccggtttaagagttatgtattccgtcaagaaaacctactggttcgacatctacaagaatatcgacaaaatcccatatgtcgattgcccggttctcatcattcatggaacttcggatgaggtagtggattgttctcatgggaaacaactatgggaactctgcaaagacaagtacgagccgctctgggtgaaaggagggaaccactgtgatcttgaacactaccctgaatacattagacacctcaagaagttcatagcaacagtagagagattaccatgtccgaggatgagcagcgaccaatcagagagagtgagagatgcgcccccgaggagaagtatggacaggagagtgaagccgaggcagagcacagagcgtagagagaaagagaagccaccaaagagtcagtcgaagatgagtagcagcagcagcaagctcaagatctcgtttgatcaacttgatcgctcgcggaggagcgttgactgccatgaaaagactcggaagagcgttgaccagattgagagggggaggaagagtgtggataggttggatagagttcgctccgagtaaaaaccacacactcacactcacacacgtataatacgtatgtagatgaaaagagtacataactgtttctatttaccgaacaaaataacatgtggatgtcgctcctcatattattgatttgtaatcttttatgcaatttgggatctctctcgccatctccttttg

SEQ ID NO: 26805 - protein, 361 aa, Arabidopsis thaliana
  peptide (1)..(361): Ceres Seq. ID no. 13499794
MGGVTSSVAAKFAFFPPSPPSYKVVTDELTGLLLLSPFPHRENVEIVKLRTRRGTEIVGMYVRHPMATSTLLYSHGNAADLGQMYELFIELSIHLKVNLMGYDYSGYGQSTGKPSEHNTYADIEAVYKCLEETFGSKQEGVILYGQSVGSGPTLDLASRLPQLRAVVLHSPILSGLRVMYSVKKTYWFDIYKNIDKIPYVDCPVLIIHGTSDEVVDCSHGKQLWELCKDKYEPLWVKGGNHCDLEHYPEYIRHLKKFIATVERLPCPRMSSDQSERVRDAPPRRSMDRRVKPRQSTERREKEKPPKSQSKMSSSSSKLKISFDQLDRSRRSVDCHEKTRKSVDQIERGRKSVDRLDRVRSE

SEQ ID NO: 26806 - protein, 302 aa, Arabidopsis thaliana
  peptide (1)..(302): Ceres Seq. ID no. 13499795
MYVRHPMATSTLLYSHGNAADLGQMYELFIELSIHLKVNLMGYDYSGYGQSTGKPSEHNTYADIEAVYKCLEETFGSKQEGVILYGQSVGSGPTLDLASRLPQLRAVVLHSPILSGLRVMYSVKKTYWFDIYKNIDKIPYVDCPVLIIHGTSDEVVDCSHGKQLWELCKDKYEPLWVKGGNHCDLEHYPEYIRHLKKFIATVERLPCPRMSSDQSERVRDAPPRRSMDRRVKPRQSTERREKEKPPKSQSKMSSSSSKLKISFDQLDRSRRSVDCHEKTRKSVDQIERGRKSVDRLDRVRSE

SEQ ID NO: 26807 - protein, 296 aa, Arabidopsis thaliana
  peptide (1)..(296): Ceres Seq. ID no. 13499796
MATSTLLYSHGNAADLGQMYELFIELSIHLKVNLMGYDYSGYGQSTGKPSEHNTYADIEAVYKCLEETFGSKQEGVILYGQSVGSGPTLDLASRLPQLRAVVLHSPILSGLRVMYSVKKTYWFDIYKNIDKIPYVDCPVLIIHGTSDEVVDCSHGKQLWELCKDKYEPLWVKGGNHCDLEHYPEYIRHLKKFIATVERLPCPRMSSDQSERVRDAPPRRSMDRRVKPRQSTERREKEKPPKSQSKMSSSSSKLKISFDQLDRSRRSVDCHEKTRKSVDQIERGRKSVDRLDRVRSE

SEQ ID NO: 26808 - DNA, 755 bp, Arabidopsis thaliana
  misc_feature (1)..(755): Ceres Seq. ID no. 13499790
  misc_feature (1)..(755): Ortholog of  Ceres SEQ ID NO 12611141 as cited in SEQ ID NO 55992
aaagaccagggtgttttttttctgacaaaacaaattgtaacactcactaggcatagcattctagttagttctgcagaaatttatagcgacactggtccaaattaggaggagcgagagcgaaggtacgagtgaggatttacaattgtcgatcgttttcacctagaaaccctaatttcgggggctcgcacgccctctctgattagaagcgacttcattatcggtcactagaatctgctgcttcttttctgaaactagcattgtcaggaacatggacactaagaagaaatctaaggaacatggcctataccgtatagtcaatgctatcggttatgcatttggagcgggagctgttggaggttctgtatatcatttcgtgagaggggcatacaattccccaataggtgctcgatatgttggaggaacacaagcggctagcatgaatgctcctcgcttgggaggcacttttgctgtatttggaggattgctctcaacatttgactatgcattggtgcgcatcaggaagaaggaagatccatggaactccatcgtagcgggtgctgctacaggtggagttctgtctatccgaaaaggggttgttgcagcttcaacatcagcggttatgtttggtttttttttggctgtactcaaccctccgttcgggagcaagtaagctttttgggttgtctttgatgagaatgtcatttagactttcatgataattgccttttcgttatcaattcttcaaaattactgtt

SEQ ID NO: 26809 - protein, 133 aa, Arabidopsis thaliana
  peptide (1)..(133): Ceres Seq. ID no. 13499791
MDTKKKSKEHGLYRIVNAIGYAFGAGAVGGSVYHFVRGAYNSPIGARYVGGTQAASMNAPRLGGTFAVFGGLLSTFDYALVRIRKKEDPWNSIVAGAATGGVLSIRKGVVAASTSAVMFGFFLAVLNPPFGSK

SEQ ID NO: 26810 - protein, 77 aa, Arabidopsis thaliana
  peptide (1)..(77): Ceres Seq. ID no. 13499792
MNAPRLGGTFAVFGGLLSTFDYALVRIRKKEDPWNSIVAGAATGGVLSIRKGVVAASTSAVMFGFFLAVLNPPFGSK

SEQ ID NO: 26811 - DNA, 1125 bp, Arabidopsis thaliana
  misc_feature (1)..(1125): Ceres Seq. ID no. 13489937
  misc_feature (1)..(1125): Ortholog of  Ceres SEQ ID NO 13593831 as cited in SEQ ID NO 53828
tgacagagacaacaaactaaagttggtggtgatagagtgagagagaaacatggaaggcaaagaagaagacgtcaatgttggagccaacaagttcccagagagacagccgatcggtacggcggctcagacggagagcaaggactataaggaaccaccaccggcgccgtttttcgaacccggcgagctcaaatcttggtctttctacagagcagggatagctgagttcatagccactttccttttcctctacgtcaccgttttgacagtcatgggtgttaagagagctcccaatatgtgtgcctctgttggaatccaaggcatcgcttgggcttttggtggcatgatctttgctcttgtttactgtactgctggaatctcaggaggacatattaatccggcggtgacttttggtttgttcttggcgaggaagctatctttaaccagagctctgttctacatagtaatgcagtgccttggagctatatgtggtgctggtgtggttaaagggtttcaaccagggctgtaccagacgaatggcggtggagctaatgtggtggctcatggttacacaaagggttcaggtcttggtgcagagattgttggaacttttgttctggtttacactgttttctcagctactgatgctaagagaagtgccagagactctcatgtccctatcttggctccgcttccaattgggtttgctgtcttcttggtgcacttggctaccatcccaattactggaactggcattaacccggccaggagtctcggagctgccatcatctacaacaaggatcatgcttgggatgaccattggatcttctgggtcggtccattcattggtgctgcgcttgctgctctgtaccatcagatagtcatcagagctattcctttcaagtccaagacataaagtttcctacatattctctgatcatcatcaagctaagaatatatcaatctttaattctatatgctttcttcttgtttcctatgtcatgtgtgatgatctctatatgtaccactagagctttgatcttgtaacagtgtaaatgtgtaatctattatgtatcaatggcattgtatcttgtaacattaattatgtcaatggaagaatacattgtg

SEQ ID NO: 26812 - protein, 287 aa, Arabidopsis thaliana
  peptide (1)..(287): Ceres Seq. ID no. 13489938
MEGKEEDVNVGANKFPERQPIGTAAQTESKDYKEPPPAPFFEPGELKSWSFYRAGIAEFIATFLFLYVTVLTVMGVKRAPNMCASVGIQGIAWAFGGMIFALVYCTAGISGGHINPAVTFGLFLARKLSLTRALFYIVMQCLGAICGAGVVKGFQPGLYQTNGGGANVVAHGYTKGSGLGAEIVGTFVLVYTVFSATDAKRSARDSHVPILAPLPIGFAVFLVHLATIPITGTGINPARSLGAAIIYNKDHAWDDHWIFWVGPFIGAALAALYHQIVIRAIPFKSKT

SEQ ID NO: 26813 - protein, 214 aa, Arabidopsis thaliana
  peptide (1)..(214): Ceres Seq. ID no. 13489939
MGVKRAPNMCASVGIQGIAWAFGGMIFALVYCTAGISGGHINPAVTFGLFLARKLSLTRALFYIVMQCLGAICGAGVVKGFQPGLYQTNGGGANVVAHGYTKGSGLGAEIVGTFVLVYTVFSATDAKRSARDSHVPILAPLPIGFAVFLVHLATIPITGTGINPARSLGAAIIYNKDHAWDDHWIFWVGPFIGAALAALYHQIVIRAIPFKSKT

SEQ ID NO: 26814 - protein, 206 aa, Arabidopsis thaliana
  peptide (1)..(206): Ceres Seq. ID no. 13489940
MCASVGIQGIAWAFGGMIFALVYCTAGISGGHINPAVTFGLFLARKLSLTRALFYIVMQCLGAICGAGVVKGFQPGLYQTNGGGANVVAHGYTKGSGLGAEIVGTFVLVYTVFSATDAKRSARDSHVPILAPLPIGFAVFLVHLATIPITGTGINPARSLGAAIIYNKDHAWDDHWIFWVGPFIGAALAALYHQIVIRAIPFKSKT

SEQ ID NO: 26815 - DNA, 1474 bp, Arabidopsis thaliana
  misc_feature (1)..(1474): Ceres Seq. ID no. 13490135
  misc_feature (1)..(1474): Ortholog of  Ceres SEQ ID NO 15177012 as cited in SEQ ID NO 56256
  misc_feature (1)..(1474): Ortholog of  Ceres SEQ ID NO 13596509 as cited in SEQ ID NO 62004
  misc_feature (1)..(1474): Ortholog of  Ceres SEQ ID NO 13500385 as cited in SEQ ID NO 67583
ctttgtctttctcattcgtcgttgatccatctttttcccccaaattcatatccttccttagatatttttctccttcttcttcttctagattccagctactccagaagattcttcgacttaatctgatgtgattaggaagagcaatagaggaagagaagaatcagaaaaaatggatccggcgactaattcaccgattatgccgattgatttaccgattatgcacgacagtgatcgttacgacttcgttaaagatattggctctggtaatttcggcgttgctcgtctcatgaccgatagagtcaccaaggagcttgttgctgttaaatacatcgagagaggagaaaagattgatgaaaatgttcagagggagattatcaatcatagatcattgagacatcctaatattgttaggtttaaagaggtgattttgacgccttcccatttggctattgttatggaatatgctgctggtggagaactttatgagcggatttgtaatgccggacggtttagtgaagatgaggctcggttcttctttcagcagcttatatctggagttagctattgtcatgcaatgcaaatatgccatcgggatctgaagctggaaaatacattgttagatggaagtccggcacctcgtttgaaaatatgtgattttggttattccaagtcttctgtttcttcattcccaaccaaagtcaactgttggtactcctgcatacattgcaccagagattcttcttcgacaggaatatgatggcaagcttgcagatgtatggtcttgcggtgtaacattatatgtaatgttggttggagcttatccattcgaggatccacaggagccacgagattatcgaaagacaatacaaagaatccttagtgtcacatactcgatcccagaggacttacacctctcaccagaatgtcgccatctaatatcgaggatcttcgtggctgatccggcaacaagaatcactattccggagatcacatccgataaatggttcttgaagaatctaccaggtgatttgatggatgagaaccgaatgggaagtcagtttcaagagcctgagcagccaatgcagagccttgacacgattatgcagataatatcggaggctacgattccgactgttcgtaatcgttgcctcgatgatttcatggcggataatcttgatctagacgatgacatggatgactttgattccgaatctgagattgatgttgacagtagtggagagatagtttatgctctctgagattcctgaggacaaagtctgttttgtccgtactgttgagacacaccactggagttttgtcttagctccacgcactccatcgttcatttttggatcgtttgttgttttttactctacaagctttggattcacatacatatatatgtattgtaatgtaatatgtaatatattctatgtatttctctttgtttaataactattggcacattttatac

SEQ ID NO: 26816 - protein, 195 aa, Arabidopsis thaliana
  peptide (1)..(195): Ceres Seq. ID no. 13490136
MDPATNSPIMPIDLPIMHDSDRYDFVKDIGSGNFGVARLMTDRVTKELVAVKYIERGEKIDENVQREIINHRSLRHPNIVRFKEVILTPSHLAIVMEYAAGGELYERICNAGRFSEDEARFFFQQLISGVSYCHAMQICHRDLKLENTLLDGSPAPRLKICDFGYSKSSVSSFPTKVNCWYSCIHCTRDSSSTGI

SEQ ID NO: 26817 - protein, 186 aa, Arabidopsis thaliana
  peptide (1)..(186): Ceres Seq. ID no. 13490137
MPIDLPIMHDSDRYDFVKDIGSGNFGVARLMTDRVTKELVAVKYIERGEKIDENVQREIINHRSLRHPNIVRFKEVILTPSHLAIVMEYAAGGELYERICNAGRFSEDEARFFFQQLISGVSYCHAMQICHRDLKLENTLLDGSPAPRLKICDFGYSKSSVSSFPTKVNCWYSCIHCTRDSSSTGI

SEQ ID NO: 26818 - protein, 179 aa, Arabidopsis thaliana
  peptide (1)..(179): Ceres Seq. ID no. 13490138
MHDSDRYDFVKDIGSGNFGVARLMTDRVTKELVAVKYIERGEKIDENVQREIINHRSLRHPNIVRFKEVILTPSHLAIVMEYAAGGELYERICNAGRFSEDEARFFFQQLISGVSYCHAMQICHRDLKLENTLLDGSPAPRLKICDFGYSKSSVSSFPTKVNCWYSCIHCTRDSSSTGI

SEQ ID NO: 26819 - DNA, 1221 bp, Arabidopsis thaliana
  misc_feature (1)..(1221): Ceres Seq. ID no. 12324762
  misc_feature (1)..(1221): Ortholog of  Ceres SEQ ID NO 14315440 as cited in SEQ ID NO 57161
ctcttccccttcgctctcgaatcaatcactctctcttctttagcgtttttattttgtcttcctcgttttcttctacctttttatattttctctcttttcagttttctctagaaaaaaacactagtaatcagtttgcgtttgataaatatttgatgtggcaaaactcttgtggatcttgatgttcaaacattcatgtctccggtgattagtgaaatccttagatcaggtttaactatagactcgtctcttagacgcaggacccatcttgttcaatctttctccgtcgtctttctctactggttctatgttttctcataaatcagctctcctttagccctttattattatatattctataaccataataatatatcaaaactatatactataatctttttacataataaactttgggtcctgcgtcttaatcatagtacttaattttctctgtgtgtgttttaatatgaataataaaactgaaatgggatcttccacaagtggaaattgctcgtcggtttcaaccactggtttagctaactccggttcagaatctgatctccggcaacgtgatctaatcgacgagcggaagagaaagaggaaacagtcgaacagagaatctgcgaggaggtcgaggatgaggaagcagaagcatttggatgatctcactgctcaggtgactcatctacgtaaagaaaacgctcagatcgtcgccggaatcgccgtcacgacgcagcactacgtcactatcgaggcggagaacgacattctcagagctcaggttcttgaacttaaccaccgtctccaatctcttaacgagatcgttgatttcgtcgaatcttcttcttcaggattcggtatggagaccggtcagggattattcgacggtggattattcgacggcgtgatgaatcctatgaatctagggttttataatcaaccaatcatggcttctgcttctactgctggtgatgttttcaactgttagaaaacttcacatcattatcatcgtgagtgagactaatcatcgcagcaggggtaaaactgtaattttcttaaaaattatgtgatgatgctttgtttctttattttataagatggttaattagtgtttaaaactgattgtaatgatagacagtgtaagaaatgtgtgatatcatggagatggtgatgtgagtttggtacaaatattttaagatcttttctttctatatattaaaagtg

SEQ ID NO: 26820 - protein, 173 aa, Arabidopsis thaliana
  peptide (1)..(173): Ceres Seq. ID no. 12324763
MNNKTEMGSSTSGNCSSVSTTGLANSGSESDLRQRDLIDERKRKRKQSNRESARRSRMRKQKHLDDLTAQVTHLRKENAQIVAGIAVTTQHYVTIEAENDILRAQVLELNHRLQSLNEIVDFVESSSSGFGMETGQGLFDGGLFDGVMNPMNLGFYNQPIMASASTAGDVFNC

SEQ ID NO: 26821 - protein, 167 aa, Arabidopsis thaliana
  peptide (1)..(167): Ceres Seq. ID no. 12324764
MGSSTSGNCSSVSTTGLANSGSESDLRQRDLIDERKRKRKQSNRESARRSRMRKQKHLDDLTAQVTHLRKENAQIVAGIAVTTQHYVTIEAENDILRAQVLELNHRLQSLNEIVDFVESSSSGFGMETGQGLFDGGLFDGVMNPMNLGFYNQPIMASASTAGDVFNC

SEQ ID NO: 26822 - protein, 116 aa, Arabidopsis thaliana
  peptide (1)..(116): Ceres Seq. ID no. 12324765
MRKQKHLDDLTAQVTHLRKENAQIVAGIAVTTQHYVTIEAENDILRAQVLELNHRLQSLNEIVDFVESSSSGFGMETGQGLFDGGLFDGVMNPMNLGFYNQPIMASASTAGDVFNC

SEQ ID NO: 26823 - DNA, 626 bp, Arabidopsis thaliana
  misc_feature (1)..(626): Ceres Seq. ID no. 12339956
  misc_feature (1)..(626): Ortholog of  Ceres SEQ ID NO 12593692 as cited in SEQ ID NO 0
tttcagcgagagcaccagactcgtgaagaagagaaaaagaagaagcaggagaaaagtttgcttgctgtgcctgtgttggtcagtctttgaagaaatggtgaaatcgactagtaaggatgctcaggatctcttccattctcttcactctgcttataccgctacaccaacgaatctcaagatcatcgacctttatgtttgtttcgcggtcttcacagctttgattcaggttgcttacatggctcttgttggatcgtttcctttcaactcatttctctctggagttctctcgtgtatcgggacagcggttcttgctgtctgcctccggattcaagtgaacaaagaaaacaaggaatttaaggatttagcaccggagcgagcttttgctgattttgtcctctgcaacttagtcctccacctagtgatcataaacttcttgggataaactaaacacctctcaagccggacataaatctcatgagatttttgagaacaatcactgcacttgctttccatacatcataaactttatttctgatatttgagattttatcatcttagtagcccttatgtgaagagcttgtttttcttttgttaatgctactttctcatagtgattgagccaactc

SEQ ID NO: 26824 - protein, 146 aa, Arabidopsis thaliana
  peptide (1)..(146): Ceres Seq. ID no. 12339957
FSESTRLVKKRKRRSRRKVCLLCLCWSVFEEMVKSTSKDAQDLFHSLHSAYTATPTNLKIIDLYVCFAVFTALIQVAYMALVGSFPFNSFLSGVLSCIGTAVLAVCLRIQVNKENKEFKDLAPERAFADFVLCNLVLHLVIINFLG

SEQ ID NO: 26825 - protein, 115 aa, Arabidopsis thaliana
  peptide (1)..(115): Ceres Seq. ID no. 12339958
MVKSTSKDAQDLFHSLHSAYTATPTNLKIIDLYVCFAVFTALIQVAYMALVGSFPFNSFLSGVLSCIGTAVLAVCLRIQVNKENKEFKDLAPERAFADFVLCNLVLHLVIINFLG

SEQ ID NO: 26826 - DNA, 1632 bp, Arabidopsis thaliana
  misc_feature (1)..(1632): Ceres Seq. ID no. 12661996
  misc_feature (1)..(1632): Ortholog of  Ceres SEQ ID NO 14303850 as cited in SEQ ID NO 53464
  misc_feature (1)..(1632): Ortholog of  Ceres SEQ ID NO 15176262 as cited in SEQ ID NO 54751
  misc_feature (1)..(1632): Ortholog of  Ceres SEQ ID NO 13656177 as cited in SEQ ID NO 64997
tctacctcaatttatattatttgcttcaatcttctctttatcgctccaccagatccaagttcgcgagatttcaagctctctaacaaagttcttcacttttactctcaaagctttcatctttcattcaactacttaagctccaagtatggcaggatccgcaccggaaggaacacaatttgatacgcgtcagtttgaccagaggctgaatgaagttctcgatggacaggatgagttcttcacctcatatgatgaggtccatgagagctttgatgccatgggtttgcaagagaatcttcttaggggtatctatgcttacggtttcgaaaagccttctgctattcagcaaagaggaattgtacccttttgcaagggtcttgatgtgatccagcaggcacagtctggtactggaaaaaccgccactttctgctctggtgtcttgcagcagcttgactatgcccttctccagtgccaggctctcgttttggctcccaccagagagcttgctcagcagattgagaaggtcatgcgtgcccttggtgactaccaaggtgtcaaggttcatgcctgtgttggtggaaccagtgtccgtgaggatcagcgcattctccaggctggtgttcatgttgtcgttggaactcccggtcgtgtttttgacatgcttagaagacaatctctccgccctgactgcatcaagatgtttgtccttgatgaagctgatgaaatgctctcccgtggtttcaaggatcagatctatgacatattccagcttctcccaccaaagattcaggttggagtgttctctgcgacaatgcctccggaagctttggagatcacaagaaaattcatgagcaaaccagtgagaatcttggtgaaacgtgatgagctcacacttgaaggtatcaagcaattctacgtgaacgtggagaaagaagactggaagcttgagactctctgcgatctctacgagactctagccatcactcagagtgtcatctttgtcaacactcgtcgcaaggtcgactggctcacagacaaaatgagaagccgtgaccacacagtctcagcaactcatggagacatggaccaaaacaccagagacatcatcatgagagagttcaggtctggctcgtctcgtgttctaatcacaaccgatctcttggctcgtggtatcgatgtgcagcaagtctctctagtcataaactttgacctcccaactcagccagagaattaccttcaccgtatcggaagaagtggaaggttcgggagaaagggtgtggcgattaactttgtgactcttgatgatcagagaatgctgtttgatattcagaaattctacaatgtggttgttgaggagcttccctcaaacgtggctgatttgctgtgaagaagaagaagaagaagaagaagaaaggttgcttgtttcgcaaatttcttatttgatttttgacccgtctctctctctctgaatcatcgatacatctttttcattctctagtattcttcatcaactctatcgaacatatatatgtctcttctgaccatatttcttttttatcaaatgcaatatttatttcttctcttgtatgatccaaaaatctttcgtaattacaagtctattcacagcaattctat

SEQ ID NO: 26827 - protein, 412 aa, Arabidopsis thaliana
  peptide (1)..(412): Ceres Seq. ID no. 12661997
MAGSAPEGTQFDTRQFDQRLNEVLDGQDEFFTSYDEVHESFDAMGLQENLLRGIYAYGFEKPSAIQQRGIVPFCKGLDVIQQAQSGTGKTATFCSGVLQQLDYALLQCQALVLAPTRELAQQIEKVMRALGDYQGVKVHACVGGTSVREDQRILQAGVHVVVGTPGRVFDMLRRQSLRPDCIKMFVLDEADEMLSRGFKDQIYDIFQLLPPKIQVGVFSATMPPEALEITRKFMSKPVRILVKRDELTLEGIKQFYVNVEKEDWKLETLCDLYETLAITQSVIFVNTRRKVDWLTDKMRSRDHTVSATHGDMDQNTRDIIMREFRSGSSRVLITTDLLARGIDVQQVSLVINFDLPTQPENYLHRIGRSGRFGRKGVAINFVTLDDQRMLFDIQKFYNVVVEELPSNVADLL

SEQ ID NO: 26828 - protein, 369 aa, Arabidopsis thaliana
  peptide (1)..(369): Ceres Seq. ID no. 12661998
MGLQENLLRGIYAYGFEKPSAIQQRGIVPFCKGLDVIQQAQSGTGKTATFCSGVLQQLDYALLQCQALVLAPTRELAQQIEKVMRALGDYQGVKVHACVGGTSVREDQRILQAGVHVVVGTPGRVFDMLRRQSLRPDCIKMFVLDEADEMLSRGFKDQIYDIFQLLPPKIQVGVFSATMPPEALEITRKFMSKPVRILVKRDELTLEGIKQFYVNVEKEDWKLETLCDLYETLAITQSVIFVNTRRKVDWLTDKMRSRDHTVSATHGDMDQNTRDIIMREFRSGSSRVLITTDLLARGIDVQQVSLVINFDLPTQPENYLHRIGRSGRFGRKGVAINFVTLDDQRMLFDIQKFYNVVVEELPSNVADLL

SEQ ID NO: 26829 - protein, 286 aa, Arabidopsis thaliana
  peptide (1)..(286): Ceres Seq. ID no. 12661999
MRALGDYQGVKVHACVGGTSVREDQRILQAGVHVVVGTPGRVFDMLRRQSLRPDCIKMFVLDEADEMLSRGFKDQIYDIFQLLPPKIQVGVFSATMPPEALEITRKFMSKPVRILVKRDELTLEGIKQFYVNVEKEDWKLETLCDLYETLAITQSVIFVNTRRKVDWLTDKMRSRDHTVSATHGDMDQNTRDIIMREFRSGSSRVLITTDLLARGIDVQQVSLVINFDLPTQPENYLHRIGRSGRFGRKGVAINFVTLDDQRMLFDIQKFYNVVVEELPSNVADLL

SEQ ID NO: 26830 - DNA, 939 bp, Arabidopsis thaliana
  misc_feature (1)..(939): Ceres Seq. ID no. 12331560
  misc_feature (1)..(939): Ortholog of  Ceres SEQ ID NO 13599448 as cited in SEQ ID NO 521
  misc_feature (1)..(939): Ortholog of  Ceres SEQ ID NO 14307472 as cited in SEQ ID NO 54559
  misc_feature (1)..(939): Ortholog of  Ceres SEQ ID NO 13596408 as cited in SEQ ID NO 62028
gttttggcataacgaagcatcttcttcttcttccttgtatttattatccatttccagagattctcccttgtgagataacaacgaagaacgaaagagagagagagagagagagatatgatggacggcgttgaagacggcacggcgatgtacggtggtctcgagacggtgcaatacgtacggacgcatcatcaacatctgtgcagagaaaaccagtgtacctctgctcttgtcaaacacatcaaagctcctcttcatctcgtttggtcacttgtacggagatttgatcaaccgcagaaatacaaaccgtttgtgagcagatgtacagtaatcggtgatcctgaaatcggcagtcttagagaagtcaatgttaaatctggtcttcctgcaacaacatctactgagagattagaacttcttgatgatgaagaacacatcctcggtatcaaaatcatcggtggtgatcacagacttaagaattactcgtcgattttgacggttcatccggagataatcgagggaagagcaggaacgatggtgattgaatcgtttgtagttgatgttcctcaaggtaacacaaaggatgagacttgctactttgttgaagcacttatcagatgtaatctcaagtcactagcagatgtttctgaaagattggcttctcaggacattactcagtgaactacataatcaatgaacaagggcattgaagtgaagtatcaattccagtttgtgatataatcaatattcttcaggatttttttggtttggcctagatatatatatagatatctatcctcggtaatgaccagtctaaaaagatgtacatattgtcccaatggtgaagttttgatgtaagatatctcctggtggtttgttatttgtagatatttttgtaaacaatgtaaatgtgaatggtttatgatgtataatatatagttc

SEQ ID NO: 26831 - protein, 187 aa, Arabidopsis thaliana
  peptide (1)..(187): Ceres Seq. ID no. 12331561
MMDGVEDGTAMYGGLETVQYVRTHHQHLCRENQCTSALVKHIKAPLHLVWSLVRRFDQPQKYKPFVSRCTVIGDPEIGSLREVNVKSGLPATTSTERLELLDDEEHILGIKIIGGDHRLKNYSSILTVHPEIIEGRAGTMVIESFVVDVPQGNTKDETCYFVEALIRCNLKSLADVSERLASQDITQ

SEQ ID NO: 26832 - protein, 186 aa, Arabidopsis thaliana
  peptide (1)..(186): Ceres Seq. ID no. 12331562
MDGVEDGTAMYGGLETVQYVRTHHQHLCRENQCTSALVKHIKAPLHLVWSLVRRFDQPQKYKPFVSRCTVIGDPEIGSLREVNVKSGLPATTSTERLELLDDEEHILGIKIIGGDHRLKNYSSILTVHPEIIEGRAGTMVIESFVVDVPQGNTKDETCYFVEALIRCNLKSLADVSERLASQDITQ

SEQ ID NO: 26833 - protein, 177 aa, Arabidopsis thaliana
  peptide (1)..(177): Ceres Seq. ID no. 12331563
MYGGLETVQYVRTHHQHLCRENQCTSALVKHIKAPLHLVWSLVRRFDQPQKYKPFVSRCTVIGDPEIGSLREVNVKSGLPATTSTERLELLDDEEHILGIKIIGGDHRLKNYSSILTVHPEIIEGRAGTMVIESFVVDVPQGNTKDETCYFVEALIRCNLKSLADVSERLASQDITQ

SEQ ID NO: 26834 - DNA, 1361 bp, Arabidopsis thaliana
  misc_feature (1)..(1361): Ceres Seq. ID no. 12335864
  misc_feature (1)..(1361): Ortholog of  Ceres SEQ ID NO 14307404 as cited in SEQ ID NO 54231
  misc_feature (1)..(1361): Ortholog of  Ceres SEQ ID NO 14315052 as cited in SEQ ID NO 56951
aaattcatcttctcttcttccttcgattccatctttctccgtttccggcgataatcttcatcgcttcttcagttgattatctttagaatggagctaaagaatgtcaaagatgcgtttgatcgtgttaccaaaaagcagaaactatgctatagcaaaacgcatgaagtggtagaaaaaatgtctcaagaaatcgacaaggcattgaaaacgatacaggaggataatcatgaatctgttgttgctgatctgaagaaaacttttgaggagattgctccaatcaatctactagaagcgtctcagaaagaaataaatggggttcttaccaaatacccgaaagctcttgacaaaactctgaatccagatatatcgacggcttacagaaacgttaagtttgatactcatacagttcatcagatactagctcagtttttctacaggcaaggcatgtacggcgttggtgactgtttcatttccgagactggtgaggttaagcctgaatcttctgttactaaagctttcatggaaatgaatatgatacttgaagccatgaaagaacgggatctcggaccagctttgaaatgggtagcttcaaactctgacaagctaaaggaagcaaagtcagatcttgagttgaaacttcacagccttcactttttggagatagctaaagacaaaacctccgaagaagctatcaactacgcgagaaaacactttgctacgtattcagcagatagctgctgtttccctgagatacagaaactcatgtgctctctcttatggaacagaaacctcaataaatccccatactcagagttcctctcacctgtattgtggaccaacgctgccaaggaactaacccgacaatactgcatcctactcggtgaatcaccagagagtcctttaagtgtaacagttgcagcaggttcacaagttttaccgacgtttttgaagtatttgaacgtgctgccggagaaaagaaaagagtggcaaacaatggagcaacttcttgtacctgtggaactctctgaagagtatcgcttctactcggtctttgtctgccctgtctctaaagaacactcgagtgaagataatccgccgatgagattggcttgcggtcatgtcctttgcaagcagtctatcaacagaatgtcgaggaatggttcaaggtcgttcaagtgtccttattgtccaacagatattgatgcttcgcagtgtaagcagttatatttttagactagctttacaacttcttatgcagcatttctaaagaaagtagacaaatgtttcttatcttttcttttatgaacttgaattgggttcgtgtacaaaaactatagtttgaaataaaaccttttataccc

SEQ ID NO: 26835 - protein, 381 aa, Arabidopsis thaliana
  peptide (1)..(381): Ceres Seq. ID no. 12335865
MELKNVKDAFDRVTKKQKLCYSKTHEVVEKMSQEIDKALKTIQEDNHESVVADLKKTFEEIAPINLLEASQKEINGVLTKYPKALDKTLNPDISTAYRNVKFDTHTVHQILAQFFYRQGMYGVGDCFISETGEVKPESSVTKAFMEMNMILEAMKERDLGPALKWVASNSDKLKEAKSDLELKLHSLHFLEIAKDKTSEEAINYARKHFATYSADSCCFPEIQKLMCSLLWNRNLNKSPYSEFLSPVLWTNAAKELTRQYCILLGESPESPLSVTVAAGSQVLPTFLKYLNVLPEKRKEWQTMEQLLVPVELSEEYRFYSVFVCPVSKEHSSEDNPPMRLACGHVLCKQSINRMSRNGSRSFKCPYCPTDIDASQCKQLYF

SEQ ID NO: 26836 - protein, 351 aa, Arabidopsis thaliana
  peptide (1)..(351): Ceres Seq. ID no. 12335866
MSQEIDKALKTIQEDNHESVVADLKKTFEEIAPINLLEASQKEINGVLTKYPKALDKTLNPDISTAYRNVKFDTHTVHQILAQFFYRQGMYGVGDCFISETGEVKPESSVTKAFMEMNMILEAMKERDLGPALKWVASNSDKLKEAKSDLELKLHSLHFLEIAKDKTSEEAINYARKHFATYSADSCCFPEIQKLMCSLLWNRNLNKSPYSEFLSPVLWTNAAKELTRQYCILLGESPESPLSVTVAAGSQVLPTFLKYLNVLPEKRKEWQTMEQLLVPVELSEEYRFYSVFVCPVSKEHSSEDNPPMRLACGHVLCKQSINRMSRNGSRSFKCPYCPTDIDASQCKQLYF

SEQ ID NO: 26837 - protein, 262 aa, Arabidopsis thaliana
  peptide (1)..(262): Ceres Seq. ID no. 12335867
MYGVGDCFISETGEVKPESSVTKAFMEMNMILEAMKERDLGPALKWVASNSDKLKEAKSDLELKLHSLHFLEIAKDKTSEEAINYARKHFATYSADSCCFPEIQKLMCSLLWNRNLNKSPYSEFLSPVLWTNAAKELTRQYCILLGESPESPLSVTVAAGSQVLPTFLKYLNVLPEKRKEWQTMEQLLVPVELSEEYRFYSVFVCPVSKEHSSEDNPPMRLACGHVLCKQSINRMSRNGSRSFKCPYCPTDIDASQCKQLYF

SEQ ID NO: 26838 - DNA, 1139 bp, Arabidopsis thaliana
  misc_feature (1)..(1139): Ceres Seq. ID no. 12331207
  misc_feature (1)..(1139): Ortholog of  Ceres SEQ ID NO 14307351 as cited in SEQ ID NO 54892
caatcatctgatctttccctctctcagcaatgcatgatcttcgattttctatcagtgttcaaagctgaaaaaaatcgaactgggtctgttgatttcttcaggtctaaaatcagattagattagagaagaagaagaagaatgctggaagctgtagatagctcaggagtggtgaatggaggattcccgcagattcagagcttttacggcgattgcagtagtgaagaagagttatcggtattgccacgtcatacaaaagtggtggtcaccggaaacaaccggacgaaatcggtgcttgttggtcttcaaggtgttgtcaaaaaagctgtcggtctcggtggttggcattggctggttttgacaaatggaatagaagtaaagttgcagaggaatgcgcttagtgtccttgaacctcctactggaaacgaagaagacgatgatcttgatttcgaaaacacacagaggaatggctctgatatgattgtttcttttccagcatctgaggacacactgaagcctcataagtcgaagctaagagggcagagatcatctcggtcatctcacaagacgatgagcaggtctctatcatctgactcgcaatcaaaaagttcgggttttactcctcctgaaaacatgaaggttgatcttagcaaattggaaatgcctgctttactgaattattggcgacattttaaccttgtggatgcaattccaaatccatcaaaggagcaactaattgacattgttcaaaggcacttcatgtctcagcaaatggatgagcttcaggttattgtggggtttgtccaagctgcaaagagaatgaagaaggcttgcaagtttcaatccaaagaatccagaaacactgatcttaactgcatcagctaaagaaaagccctgactcttaacaaatcctgtatgtacggtacatcaacttgtttaaccatttgtggcttgctaagtttagttcttctagtgatgtttggctaaagggtagatgttgtttcttctttgcttctgttgtttagccaatgtaagtaccatcaaaaaacccaaataactctctaaagctccctattggaaactatcttgtctgatacgatctggagtgaccggtatgttgttagaatgtaaatatgtttggt

SEQ ID NO: 26839 - protein, 247 aa, Arabidopsis thaliana
  peptide (1)..(247): Ceres Seq. ID no. 12331208
MLEAVDSSGVVNGGFPQIQSFYGDCSSEEELSVLPRHTKVVVTGNNRTKSVLVGLQGVVKKAVGLGGWHWLVLTNGIEVKLQRNALSVLEPPTGNEEDDDLDFENTQRNGSDMIVSFPASEDTLKPHKSKLRGQRSSRSSHKTMSRSLSSDSQSKSSGFTPPENMKVDLSKLEMPALLNYWRHFNLVDAIPNPSKEQLIDIVQRHFMSQQMDELQVIVGFVQAAKRMKKACKFQSKESRNTDLNCIS

SEQ ID NO: 26840 - protein, 135 aa, Arabidopsis thaliana
  peptide (1)..(135): Ceres Seq. ID no. 12331209
MIVSFPASEDTLKPHKSKLRGQRSSRSSHKTMSRSLSSDSQSKSSGFTPPENMKVDLSKLEMPALLNYWRHFNLVDAIPNPSKEQLIDIVQRHFMSQQMDELQVIVGFVQAAKRMKKACKFQSKESRNTDLNCIS

SEQ ID NO: 26841 - DNA, 1399 bp, Arabidopsis thaliana
  misc_feature (1)..(1399): Ceres Seq. ID no. 12325047
  misc_feature (1)..(1399): Ortholog of  Ceres SEQ ID NO 15177750 as cited in SEQ ID NO 57772
  misc_feature (1)..(1399): Ortholog of  Ceres SEQ ID NO 13596581 as cited in SEQ ID NO 62420
  misc_feature (1)..(1399): Ortholog of  Ceres SEQ ID NO 13591273 as cited in SEQ ID NO 65904
  misc_feature (1)..(1399): Ortholog of  Ceres SEQ ID NO 13623086 as cited in SEQ ID NO 0
aacatcacaatcacacaaaactaacaaaagatcaaaagcaagttcttcactgttgataatgtctaccaccggacagattattcgatgcaaagctgctgtggcatgggaagccggaaagccactggtgatcgaggaagtggaggttgctccaccgcagaaacacgaagttcgtatcaagattctcttcacttctctctgtcacaccgatgtttacttctgggaagctaagggacaaacaccgttgtttccacgtatcttcggccatgaagctggagggattgttgagagtgttggagaaggagtgactgatcttcagccaggagatcatgtgttgccgatctttaccggagaatgtggggagtgtcgtcattgccactcggaggaatcaaacatgtgtgatcttctcaggatcaacaccgagcgaggagggatgattcacgatggtgaatcaagattctccattaatggcaaaccaatttaccatttccttgggacttccacgttcagtgagtacacagtggttcactctggtcaggttgctaagatcaatccggatgctcctcttgacaaggtctgtattgtcagttgtggtttgtctactgggttaggagcaactttgaatgtggctaaacccaagaaaggtcaaagtgttgccatttttggtcttggtgctgttggtttaggcgctgcagaaggtgctagaatcgctggtgcttctaggatcatcggtgttgattttaactctaaaagattcgaccaagctaaggaattcggtgtgaccgagtgtgtgaacccgaaagaccatgacaagccaattcaacaggtgatcgctgagatgacggatggtggggtggacaggagtgtggaatgcaccggaagcgttcaggccatgattcaagcatttgaatgtgtccacgatggctggggtgttgcagtgctggtgggtgtgccaagcaaagacgatgccttcaagactcatccgatgaatttcttgaatgagaggactcttaagggtactttcttcgggaactacaaacccaaaactgacattcccggggttgtggaaaagtacatgaacaaggagctggagcttgagaaattcatcactcacacagtgccattctcggaaatcaacaaggcctttgattacatgctgaagggagagagtattcgttgcatcatcaccatgggtgcttgaagccattctctcgcagatgatgttcactttgtgttttacttcctttatgcattcacagcaataaaagaaagaaatctccatcgcttttggttttcttctctgtcttaagttagtcgttttcgtgtctaatctattacttatcattgtaatagactcttcttctattgagatttgaatataaactaaaacacattccatttc

SEQ ID NO: 26842 - protein, 398 aa, Arabidopsis thaliana
  peptide (1)..(398): Ceres Seq. ID no. 12325048
TSQSHKTNKRSKASSSLLIMSTTGQIIRCKAAVAWEAGKPLVIEEVEVAPPQKHEVRIKILFTSLCHTDVYFWEAKGQTPLFPRIFGHEAGGIVESVGEGVTDLQPGDHVLPIFTGECGECRHCHSEESNMCDLLRINTERGGMIHDGESRFSINGKPIYHFLGTSTFSEYTVVHSGQVAKINPDAPLDKVCIVSCGLSTGLGATLNVAKPKKGQSVAIFGLGAVGLGAAEGARIAGASRIIGVDFNSKRFDQAKEFGVTECVNPKDHDKPIQQVIAEMTDGGVDRSVECTGSVQAMIQAFECVHDGWGVAVLVGVPSKDDAFKTHPMNFLNERTLKGTFFGNYKPKTDIPGVVEKYMNKELELEKFITHTVPFSEINKAFDYMLKGESIRCIITMGA

SEQ ID NO: 26843 - protein, 379 aa, Arabidopsis thaliana
  peptide (1)..(379): Ceres Seq. ID no. 12325049
MSTTGQIIRCKAAVAWEAGKPLVIEEVEVAPPQKHEVRIKILFTSLCHTDVYFWEAKGQTPLFPRIFGHEAGGIVESVGEGVTDLQPGDHVLPIFTGECGECRHCHSEESNMCDLLRINTERGGMIHDGESRFSINGKPIYHFLGTSTFSEYTVVHSGQVAKINPDAPLDKVCIVSCGLSTGLGATLNVAKPKKGQSVAIFGLGAVGLGAAEGARIAGASRIIGVDFNSKRFDQAKEFGVTECVNPKDHDKPIQQVIAEMTDGGVDRSVECTGSVQAMIQAFECVHDGWGVAVLVGVPSKDDAFKTHPMNFLNERTLKGTFFGNYKPKTDIPGVVEKYMNKELELEKFITHTVPFSEINKAFDYMLKGESIRCIITMGA

SEQ ID NO: 26844 - protein, 268 aa, Arabidopsis thaliana
  peptide (1)..(268): Ceres Seq. ID no. 12325050
MCDLLRINTERGGMIHDGESRFSINGKPIYHFLGTSTFSEYTVVHSGQVAKINPDAPLDKVCIVSCGLSTGLGATLNVAKPKKGQSVAIFGLGAVGLGAAEGARIAGASRIIGVDFNSKRFDQAKEFGVTECVNPKDHDKPIQQVIAEMTDGGVDRSVECTGSVQAMIQAFECVHDGWGVAVLVGVPSKDDAFKTHPMNFLNERTLKGTFFGNYKPKTDIPGVVEKYMNKELELEKFITHTVPFSEINKAFDYMLKGESIRCIITMGA

SEQ ID NO: 26845 - DNA, 528 bp, Arabidopsis thaliana
  misc_feature (1)..(528): Ceres Seq. ID no. 12330060
  misc_feature (1)..(528): Ortholog of  Ceres SEQ ID NO 13661786 as cited in SEQ ID NO 61478
  misc_feature (1)..(528): Ortholog of  Ceres SEQ ID NO 15177467 as cited in SEQ ID NO 0
aaataacaaaaaaatggagattaacaaatttctggccgtagtcgtagtcgtcgtggtcctctactccgtcgaagcgacggcacaaggaggaagccctcagttgacggcttgtctgcacaaactgctgccgtgtcagccgtacatacactcattgaatccgcctcctccgccatcgtgttgcgggccaatgaaagagatcgtagagaaagacgcaccgtgtttatgcaccgcttttaacaatccggaggtgctcaaagccctaaacctcaccaaagagaacgctctcctacttcccaatgcatgtggagttaatcctgacgtttcactctgctccaaaatagccactccttcgcctattgcgtcgccgggatcaaccaatggaacttcttcagcttcaactatcagcttcaatcgatttagctttctgtctgcttttgtggcaatgatcttcttctgattatgtcattttttaatttataattatatgtgtgatgactgtgtaattcggtcatcagaatgtgtttaagt

SEQ ID NO: 26846 - protein, 151 aa, Arabidopsis thaliana
  peptide (1)..(151): Ceres Seq. ID no. 12330061
NNKKMEINKFLAVVVVVVVLYSVEATAQGGSPQLTACLHKLLPCQPYIHSLNPPPPPSCCGPMKEIVEKDAPCLCTAFNNPEVLKALNLTKENALLLPNACGVNPDVSLCSKIATPSPIASPGSTNGTSSASTISFNRFSFLSAFVAMIFF

SEQ ID NO: 26847 - protein, 147 aa, Arabidopsis thaliana
  peptide (1)..(147): Ceres Seq. ID no. 12330062
MEINKFLAVVVVVVVLYSVEATAQGGSPQLTACLHKLLPCQPYIHSLNPPPPPSCCGPMKEIVEKDAPCLCTAFNNPEVLKALNLTKENALLLPNACGVNPDVSLCSKIATPSPIASPGSTNGTSSASTISFNRFSFLSAFVAMIFF

SEQ ID NO: 26848 - protein, 89 aa, Arabidopsis thaliana
  peptide (1)..(89): Ceres Seq. ID no. 12330063
MKEIVEKDAPCLCTAFNNPEVLKALNLTKENALLLPNACGVNPDVSLCSKIATPSPIASPGSTNGTSSASTISFNRFSFLSAFVAMIFF

SEQ ID NO: 26849 - DNA, 883 bp, Arabidopsis thaliana
  misc_feature (1)..(883): Ceres Seq. ID no. 13491346
  misc_feature (1)..(883): Ortholog of  Ceres SEQ ID NO 12609185 as cited in SEQ ID NO 55761
  misc_feature (1)..(883): Ortholog of  Ceres SEQ ID NO 12615291 as cited in SEQ ID NO 62444
ctcccgacacaacacaaagttcatataataagaaaaacagagagaaacacacagagagctagaggagagtgagtgtcatgggttgtgttcgctgcaaatcatcagatccatggcaaacatctgccaatgcctttgaatccgtcgatgaatccggaatcaacgaagcctgggttgagatctccagccgcagatgttgtcgccggcgaaggtagttggaagaagctagagaggaagaagagccaagtgttactggaaggttacgttgagactgcttcttcttcctcggtggatgatcaaaaggacgatctgacgagatccaagagtttgacggatgacgacctcgaagatcttagaggttgtttagatctagggtttggttttagctacgacgagatccctgagctctgcaacactttacctgctttggagctttgctattcaatgagccagaagttcttagacgataagcaaaataaatcaccggaaacttcgtcggtggaagattgtccgtcgcctccactggtcaccgccactccgattgccaattggaagatctctagtcccggtgataatccggatgatgtgaaagctaggctcaaatactgggcacaagccgttgcctgtactgtccaattgtgcagctgaatgaatcattgtcacgtctgaaccaggaatactagcgaatgagcaatatctcaagcattggtagcggaggaggagatttcagaaagtggcattggaaggtctaaaattgaactgaatatcaacaatggttctcacttaattccatgtatgtgtactagtagttagtagtatctagtctaatgattttatgaacggaaataaaagatatcacttgaataaaaccatcaaattctttccc

SEQ ID NO: 26850 - protein, 172 aa, Arabidopsis thaliana
  peptide (1)..(172): Ceres Seq. ID no. 13491347
MPLNPSMNPESTKPGLRSPAADVVAGEGSWKKLERKKSQVLLEGYVETASSSSVDDQKDDLTRSKSLTDDDLEDLRGCLDLGFGFSYDEIPELCNTLPALELCYSMSQKFLDDKQNKSPETSSVEDCPSPPLVTATPIANWKISSPGDNPDDVKARLKYWAQAVACTVQLCS

SEQ ID NO: 26851 - protein, 166 aa, Arabidopsis thaliana
  peptide (1)..(166): Ceres Seq. ID no. 13491348
MNPESTKPGLRSPAADVVAGEGSWKKLERKKSQVLLEGYVETASSSSVDDQKDDLTRSKSLTDDDLEDLRGCLDLGFGFSYDEIPELCNTLPALELCYSMSQKFLDDKQNKSPETSSVEDCPSPPLVTATPIANWKISSPGDNPDDVKARLKYWAQAVACTVQLCS

SEQ ID NO: 26852 - DNA, 719 bp, Arabidopsis thaliana
  misc_feature (1)..(719): Ceres Seq. ID no. 13499538
  misc_feature (1)..(719): Ortholog of  Ceres SEQ ID NO 13580204 as cited in SEQ ID NO 0
agccagaattagggtttctctttgtcttcagcagtcagtgcgcatccgtaggagaaaagtgtgagaatctgccaccatgggtcgtatgcacagtcgaggaaagggtatttcagcctctgcgttgccttacaagagatcgtctccgagctggctcaagaccacctctcaggatgttgatgaatcaatctgcaaatttgccaaaaagggattgaccccttcccagattggtgtgattctccgtgactctcacggtatccctcaggtcaagagtgttactggaagcaagatcttgaggatactcaaagctcatggccttgctcctgagatccctgaggatctgtaccatctaattaagaaggctgttgccatccgtaaacatctcgagaggaacaggaaggacaaggattccaagttcaggctcatcttggttgagagcaggattcaccgcctcgctcgctattacaagaagaccaagaagctccctcccgtctggaagtacgaatccactaccgcgagcacccttgtggcttaagctggagtctggaggaggattctactagtctgttgcttcccttttgttttgatgaattctcaactttagtcttaatgtgtcagcaggatttttgtgtttgcctctcttttttttccggaatcttatgctcccttgtttaagagaatcgtatgatcttgaatttactattgaatatgcttttgcatct

SEQ ID NO: 26853 - protein, 151 aa, Arabidopsis thaliana [sequence omitted]

SEQ ID NO: 26854 - protein, 148 aa, Arabidopsis thaliana
  peptide (1)..(148): Ceres Seq. ID no. 13499540
MHSRGKGISASALPYKRSSPSWLKTTSQDVDESICKFAKKGLTPSQIGVILRDSHGIPQVKSVTGSKILRILKAHGLAPEIPEDLYHLIKKAVAIRKHLERNRKDKDSKFRLILVESRIHRLARYYKKTKKLPPVWKYESTTASTLVA

SEQ ID NO: 26855 - DNA, 746 bp, Arabidopsis thaliana
  misc_feature (1)..(746): Ceres Seq. ID no. 13487320
  misc_feature (1)..(746): Ortholog of  Ceres SEQ ID NO 14315684 as cited in SEQ ID NO 53131
  misc_feature (1)..(746): Ortholog of  Ceres SEQ ID NO 13583037 as cited in SEQ ID NO 67953
catcgactgctccttggtggatctgcgagttttcaataaaccaccggagtgaggaagaagcagacgacgacgacgaagatgagttcatcgactgttcgtgatttgcagagagacctagaaaacaaggctaatgatctcggcaaaatccagaaagatatcgggaagaatcatcagctgagaaagaagtatacgatccaactcggtgagaatgagctcgtgcttaaggagttagatttgctggaagaagatgctaacgtctacaaattgattggtccggtgttagtgaagcaggatttggctgaagctaatgcaaatgttcgtaaacgaattgagtacatctctgctgaattgaaacggcttgatgcaattcttcaagatatggaagaaaaacaaaacaacaagagagaaacgataatgaagttacaacaaaggctacaaactatccaggcaggaaaagcaaaggcttgattgagctactcagttgcaaccacacttgttaaaccctttccactgtgctcggccttgtctcaatggtgtcatattcagttactgagggttcttgtggtttcagtttattgggtgattgatgtctctttgtgtcactaatctttttttgttgacaactagacttaagtgtgtaacttatacatgatcttgtcgccctttatgaagttatgagtttggagatttacaaaaaaaatattgtgtgtgtgcgcctaatttggtcttcatacatacttcaagcc

SEQ ID NO: 26856 - protein, 129 aa, Arabidopsis thaliana
  peptide (1)..(129): Ceres Seq. ID no. 13487321
MSSSTVRDLQRDLENKANDLGKIQKDIGKNHQLRKKYTIQLGENELVLKELDLLEEDANVYKLIGPVLVKQDLAEANANVRKRIEYISAELKRLDAILQDMEEKQNNKRETIMKLQQRLQTIQAGKAKA

SEQ ID NO: 26857 - DNA, 904 bp, Arabidopsis thaliana
  misc_feature (1)..(904): Ceres Seq. ID no. 12394316
  misc_feature (1)..(904): Ortholog of  Ceres SEQ ID NO 13504447 as cited in SEQ ID NO 57609
aggaatattccggtgatggctgaagatttttcggcttgtgttggcttctgatctaggaattgacgctagacccttcttgacgagaagcgatgacgttgatgaacaagaaaactggcatgattgtccccaatacttaggagatgaagatttctctgatctcgatcttctccagttctttactctccagggcttggataggtccggtaaccggattttccgcatcgtcggaaagtatttccctgctcgtgtagtgagtgcggagcggctgaagaagtatatatcccagaagataagcaaccaatgtcctgagggacccttgtgcttggtttacatgcatagcacagtccaaaaggacgacaattcaccgggaattaccatcttacggtggatttacgaggaccttccttcagaaagcaaagacaggcttcaacttgtttatttcatccaccctggtcttcgttcaagacttgtcattgccactcttggccgccttcttttaagtggaggactgtactggaagattaagtacgtgagcaggttgcagtacctttgggaggacataaagaaaggcgaggtggaaattcccgactttgtgaagaaccatgacaatgtgctcgagcatagaccattaacggactatggaatcgaaccggatcctttccagttaagcgaggttcaatcttcatcgttctctctcaaccgctacgagaacagatgggtctcatagtacacatttgctctttgttgagctagaacctctatgtttttgtctgttgtatagagtaatctaatgtactaaacactcgtgtatcatcaatctgctttttgattgattttggaccgaaccagtaccagtattagatttgttttcaaaaccgggtcgaattttgctctttgttgagct

SEQ ID NO: 26858 - protein, 131 aa, Arabidopsis thaliana
  peptide (1)..(131): Ceres Seq. ID no. 12394317
MHSTVQKDDNSPGITILRWIYEDLPSESKDRLQLVYFIHPGLRSRLVIATLGRLLLSGGLYWKIKYVSRLQYLWEDIKKGEVEIPDFVKNHDNVLEHRPLTDYGIEPDPFQLSEVQSSSFSLNRYENRWVS

SEQ ID NO: 26859 - DNA, 2317 bp, Arabidopsis thaliana
  misc_feature (1)..(2317): Ceres Seq. ID no. 12325322
  misc_feature (1)..(2317): Ortholog of  Ceres SEQ ID NO 13656177 as cited in SEQ ID NO 64997
tttcccagaaacctttgtttcatttgcttcgtgtgcgatcgcgagaacaagggaaaattagggtttatatcctcaagctttttcgaacaccattgatcgttgatctaagatttttcttctagtcgagtttcttaaggggctttgatcaaactcaaaattgaagaccaatactttgaaggattctggtaaagctaagcaactatgagttcaaattcatgggctgatgtttctgaatcagagagggcaccatctggtggtggttggggttattctcgtccgtctcgaaccaactatgttcctccacatcttaggagccgtacaccatcttcggagtttgttgctccttcacctggtaataatgatcgtgggggatatggtggtgcaaatagtggttatggtggtcgaggccaaggttatggtggtcgaggttcgggctatggtggtagaggaggtcctgtgggcggttggaatgccagaagtggaggttgggaccgtcgggatactgaaactaacccgtttggtaatgatggaaatgcagacccggctgttaacgagcaggaaaacactgtcattaactttgaggcctatgaagatattcccatcgagacaagtggggataatgtgccacctcctgttaatacatttgcagagatagacctcggagaagctctcaatctaaatatccagaggtgcaaatacgtgaagccgacccctgtgcagcgtaatgcaattcccatattggctgcaggaagggatttgatggcttgtgctcagacaggctctgggaagacagctgccttttgttttccgattattagtgggattatgaaggatcagcatatagagagaccacgtggagttcggggagtctatcctcttgctgtcattctctcaccaacaagggaattggcttgccagatacatgatgaagccagaaagttctcctatcaaactggagtgaaagttgtggttgcttacggaggaacaccagtcaaccaacagattagggagcttgaaagaggagttgatattcttgttgcaactcctgggagattaaatgatttgcttgagagaggtagagtctcattacagatggtaagattcttggcacttgatgaggcggacagaatgctggacatgggttttgaaccacaaatcaggaagatcgttcagcagatggacatgcctcctcctggtgtccggcagacaatgttgttcagtgctacatttcctagggagatacagagacttgcatctgattttctttcaaattacatatttctggctgttggaagagtgggttcaagtacggatttaattgtccaaagagtagagtttgttcatgattctgacaaaagaagccatctaatggaccttcttcatgcccagagggagaatggtaaccaaggaaagcaagctttgactctagtttttgtggagacaaagaagggagctgactctttggagaattggttgtgcatcaatggtttcccagcaacgaccattcatggtgataggtcacaacaggaaagagaagtggcactgagatcattcaagactgggcggacacctattttggttgcaaccgatgtggcagcacgtggtcttgacattccgcacgtggctcatgtagtgaactttgatctaccaaacgacattgatgactatgtccaccgtatcggacgaacaggacgtgcaggaaattcaggactagcaactgctttcttcaatgacaacaacacaacaatggccaagccactggctgagctaatgcaagaagctaaccaggaggtccctgactggctgactcgatacgcatctcgtgcttcatttggaggtggtaagaaccggcggtctggtggacggtttggtggtcgtgacttcaggagagaatcttttagtcgaggcggtggtggtgctgactactatggtggaggtggtggatatggaggcgttcctggtggtggctatggagcaatgcctggtgggtacggacccgtaccaggtggtggatatggaaatgttccgggtggtggttatgcaccttatggtagaggtggtggtgcttactatggtcctggaggatatggaaccgttcctaaccaagggtatggtcctggagtggctagtgcgtgggactaagctttaacttcaattcttcaagaaccgattatgttctctttctctctcacttatctctattgtttattattagggagcagccacagatgtgtatgtttgctctttaaatggttatgtagtagacacgaatcgtctctttgttcaatgtgaaaaaagaaaaccccctagtagaccc

SEQ ID NO: 26860 - protein, 646 aa, Arabidopsis thaliana
  peptide (1)..(646): Ceres Seq. ID no. 12325323
MSSNSWADVSESERAPSGGGWGYSRPSRTNYVPPHLRSRTPSSEFVAPSPGNNDRGGYGGANSGYGGRGQGYGGRGSGYGGRGGPVGGWNARSGGWDRRDTETNPFGNDGNADPAVNEQENTVINFEAYEDIPIETSGDNVPPPVNTFAEIDLGEALNLNIQRCKYVKPTPVQRNAIPILAAGRDLMACAQTGSGKTAAFCFPIISGIMKDQHIERPRGVRGVYPLAVILSPTRELACQIHDEARKFSYQTGVKVVVAYGGTPVNQQIRELERGVDILVATPGRLNDLLERGRVSLQMVRFLALDEADRMLDMGFEPQIRKIVQQMDMPPPGVRQTMLFSATFPREIQRLASDFLSNYIFLAVGRVGSSTDLIVQRVEFVHDSDKRSHLMDLLHAQRENGNQGKQALTLVFVETKKGADSLENWLCINGFPATTIHGDRSQQEREVALRSFKTGRTPILVATDVAARGLDIPHVAHVVNFDLPNDIDDYVHRIGRTGRAGNSGLATAFFNDNNTTMAKPLAELMQEANQEVPDWLTRYASRASFGGGKNRRSGGRFGGRDFRRESFSRGGGGADYYGGGGGYGGVPGGGYGAMPGGYGPVPGGGYGNVPGGGYAPYGRGGGAYYGPGGYGTVPNQGYGPGVASAWD

SEQ ID NO: 26861 - protein, 460 aa, Arabidopsis thaliana
  peptide (1)..(460): Ceres Seq. ID no. 12325324
MACAQTGSGKTAAFCFPIISGIMKDQHIERPRGVRGVYPLAVILSPTRELACQIHDEARKFSYQTGVKVVVAYGGTPVNQQIRELERGVDILVATPGRLNDLLERGRVSLQMVRFLALDEADRMLDMGFEPQIRKIVQQMDMPPPGVRQTMLFSATFPREIQRLASDFLSNYIFLAVGRVGSSTDLIVQRVEFVHDSDKRSHLMDLLHAQRENGNQGKQALTLVFVETKKGADSLENWLCINGFPATTIHGDRSQQEREVALRSFKTGRTPILVATDVAARGLDIPHVAHVVNFDLPNDIDDYVHRIGRTGRAGNSGLATAFFNDNNTTMAKPLAELMQEANQEVPDWLTRYASRASFGGGKNRRSGGRFGGRDFRRESFSRGGGGADYYGGGGGYGGVPGGGYGAMPGGYGPVPGGGYGNVPGGGYAPYGRGGGAYYGPGGYGTVPNQGYGPGVASAWD

SEQ ID NO: 26862 - protein, 438 aa, Arabidopsis thaliana
  peptide (1)..(438): Ceres Seq. ID no. 12325325
MKDQHIERPRGVRGVYPLAVILSPTRELACQIHDEARKFSYQTGVKVVVAYGGTPVNQQIRELERGVDILVATPGRLNDLLERGRVSLQMVRFLALDEADRMLDMGFEPQIRKIVQQMDMPPPGVRQTMLFSATFPREIQRLASDFLSNYIFLAVGRVGSSTDLIVQRVEFVHDSDKRSHLMDLLHAQRENGNQGKQALTLVFVETKKGADSLENWLCINGFPATTIHGDRSQQEREVALRSFKTGRTPILVATDVAARGLDIPHVAHVVNFDLPNDIDDYVHRIGRTGRAGNSGLATAFFNDNNTTMAKPLAELMQEANQEVPDWLTRYASRASFGGGKNRRSGGRFGGRDFRRESFSRGGGGADYYGGGGGYGGVPGGGYGAMPGGYGPVPGGGYGNVPGGGYAPYGRGGGAYYGPGGYGTVPNQGYGPGVASAWD

SEQ ID NO: 26863 - DNA, 1460 bp, Arabidopsis thaliana
  misc_feature (1)..(1460): Ceres Seq. ID no. 12394994
  misc_feature (1)..(1460): Ortholog of  Ceres SEQ ID NO 13594345 as cited in SEQ ID NO 58043
  misc_feature (1)..(1460): Ortholog of  Ceres SEQ ID NO 13662880 as cited in SEQ ID NO 65422
  misc_feature (1)..(1460): Ortholog of  Ceres SEQ ID NO 12779098 as cited in SEQ ID NO 67698
  misc_feature (1)..(1460): Ortholog of  Ceres SEQ ID NO 13591190 as cited in SEQ ID NO 68044
agcattgcctgcatcatggccaaaccctcgcagccaacgcgagactcccacgtggcagttctcgttttccccttcggcactcatgcagctcctctcctcgccgtcacgtgccgtctcgccaccgctgctccctccaccgtcttctccttcttcagcaccgcacgatccaactcgtcgttactctcctccgatatccccacaaacattcgtgtccacaacgtcgatgacggtgttcctgagggattcgtgttgacggggaatccacagcacgctgttgagctgtttcttgaagcggcgccagagattttccgaagagaaatcaaggcggccgagaccgaagttggtaggaagttcaagtgcatccttacggatgcgttcctctggttagcagcggagacggcggctgcggagatgaaagcgtcgtgggttgcgtactatggaggcggagcaacctcgctcactgctcatctctacacagatgccatcagagaaaacgtcggtgtcaaagaagtaggtgagcgtatggaggagacaatagggtttatctcaggaatggagaagatcagagtcaaagacacacaagaaggcgttgtgtttgggaacttagactctgttttctctaaaacgttgcaccaaatgggtcttgctttacctcgtgccactgctgttttcatcaattcctttgaagaattggatcctacgtttacaaatgatttcagatcggaattcaaacgttacctaaacatcggtcctctcgctttattatcttctccatcgcaaacatcaacgctagtgcacgatcctcacggttgcttggcttggatcgagaagcggtccactgcttctgtagcgtacattgcctttggtagagtcgcgacaccgcctcctgtagagcttgtggcgatagcacaaggattggaatcgagtaaagtgccttttgtttggtcgctacaagagatgaaaatgactcatttaccagaaggctttttggatcggaccagagagcaagggatggtggttccatgggcaccacaagtggagctgctaaaccatgaagcaatgggtgtgtttgtttcgcatggtgggtggaactcagtgttggagagtgtgtcggcaggtgtaccgatgatttgtagaccgattttcggggatcatgcaatcaatgcaagatctgtggaagctgtgtgggagatcggagtgacgattagtagtggagtcttcacgaaggatggatttgaggagagtttggatcgggttttggttcaagatgatggcaagaagatgaaggttaatgctaaaaagcttgaagaactagcacaagaagctgtctctaccaaaggaagctcctttgagaattttggaggattgttggacgaagttgtgaactttggataaacatgtaaacaacacctactagttgttatcttgcattgtgggcgggaataataaattattgacgt

SEQ ID NO: 26864 - protein, 464 aa, Arabidopsis thaliana
  peptide (1)..(464): Ceres Seq. ID no. 12394995
SIACIMAKPSQPTRDSHVAVLVFPFGTHAAPLLAVTCRLATAAPSTVFSFFSTARSNSSLLSSDIPTNIRVHNVDDGVPEGFVLTGNPQHAVELFLEAAPEIFRREIKAAETEVGRKFKCILTDAFLWLAAETAAAEMKASWVAYYGGGATSLTAHLYTDAIRENVGVKEVGERMEETIGFISGMEKIRVKDTQEGVVFGNLDSVFSKTLHQMGLALPRATAVFINSFEELDPTFTNDFRSEFKRYLNIGPLALLSSPSQTSTLVHDPHGCLAWIEKRSTASVAYIAFGRVATPPPVELVAIAQGLESSKVPFVWSLQEMKMTHLPEGFLDRTREQGMVVPWAPQVELLNHEAMGVFVSHGGWNSVLESVSAGVPMICRPIFGDHAINARSVEAVWEIGVTISSGVFTKDGFEESLDRVLVQDDGKKMKVNAKKLEELAQEAVSTKGSSFENFGGLLDEVVNFG

SEQ ID NO: 26865 - protein, 459 aa, Arabidopsis thaliana
  peptide (1)..(459): Ceres Seq. ID no. 12394996
MAKPSQPTRDSHVAVLVFPFGTHAAPLLAVTCRLATAAPSTVFSFFSTARSNSSLLSSDIPTNIRVHNVDDGVPEGFVLTGNPQHAVELFLEAAPEIFRREIKAAETEVGRKFKCILTDAFLWLAAETAAAEMKASWVAYYGGGATSLTAHLYTDAIRENVGVKEVGERMEETIGFISGMEKIRVKDTQEGVVFGNLDSVFSKTLHQMGLALPRATAVFINSFEELDPTFTNDFRSEFKRYLNIGPLALLSSPSQTSTLVHDPHGCLAWIEKRSTASVAYIAFGRVATPPPVELVAIAQGLESSKVPFVWSLQEMKMTHLPEGFLDRTREQGMVVPWAPQVELLNHEAMGVFVSHGGWNSVLESVSAGVPMICRPIFGDHAINARSVEAVWEIGVTISSGVFTKDGFEESLDRVLVQDDGKKMKVNAKKLEELAQEAVSTKGSSFENFGGLLDEVVNFG

SEQ ID NO: 26866 - protein, 327 aa, Arabidopsis thaliana
  peptide (1)..(327): Ceres Seq. ID no. 12394997
MKASWVAYYGGGATSLTAHLYTDAIRENVGVKEVGERMEETIGFISGMEKIRVKDTQEGVVFGNLDSVFSKTLHQMGLALPRATAVFINSFEELDPTFTNDFRSEFKRYLNIGPLALLSSPSQTSTLVHDPHGCLAWIEKRSTASVAYIAFGRVATPPPVELVAIAQGLESSKVPFVWSLQEMKMTHLPEGFLDRTREQGMVVPWAPQVELLNHEAMGVFVSHGGWNSVLESVSAGVPMICRPIFGDHAINARSVEAVWEIGVTISSGVFTKDGFEESLDRVLVQDDGKKMKVNAKKLEELAQEAVSTKGSSFENFGGLLDEVVNFG

SEQ ID NO: 26867 - DNA, 1200 bp, Arabidopsis thaliana
  misc_feature (1)..(1200): Ceres Seq. ID no. 12394998
  misc_feature (1)..(1200): Ortholog of  Ceres SEQ ID NO 14304176 as cited in SEQ ID NO 56343
acttttcttttcctcatcataaaaaacattctcagagcaaatttcaagtttatttcattcaatttcgatccgattaaccatggagtgtagatcattggatctgacgattatatctgcggaagatctcaaagacgttcaattgatcggtaaacaagacttgtacgccgtcgtttccatcaacggcgacgctaggacgaagcagaagacaaaggttgataaagattgcggcaccaaacctaaatggaagcatcaaatgaagctcaccgtcgatgacgcatcggcgcgtgacaatcgtcttactcttgttttcgagatcgtggcggatcgtcccatcgctggtgataaacctgtcggtgaggttagcgttccgctgaaggagcttttggatcagaataaaggtgacgaggagaaaacggttacttacgccgtgaggttgcctaacgggaaggcgaaaggatctctcaaattctcgttcaaatttggggaaaagtatacttatggatcttcgagtggtcctcacgcgccggtcccttcggctatggatcataagactatggatcagcccgtcaccgcttacccgcccggacacggtgcaccgtctgcataccctgctcctcccgcgggtccttcttccggatatccaccacaaggacatgacgataagcacggtggtgtttatggatacccgcagcaggctggatatccagctggaaccggtggttatccgccacctggtgcatacccacaacagggaggttaccctgtatatccgcctcagcaacagggtggatacccgggttatccgccacagggtccatatggttacccgcaacaaggttatccaccacagggtccatacggttacccgcaacagcaagctcatggtaaaccgcagaaaccgaagaagcatggtaaggctggagctgggatgggactaggacttgggcttggagctggtttattgggtgggttgttggttggtgaagcggtttctgacatcgctgatatgggtgacatgggtgacatgggtggtttcgatttctgattgctgtgttatcaagttttaatttcttaggataattgctctaatgtttttcgtttgatgaatcatgtgaagaacgtgagagatcaagttttatcttgtgtttatgtctccggttacttattttcttctaatgaatgtaacattatgatatttcc

SEQ ID NO: 26868 - protein, 321 aa, Arabidopsis thaliana
  peptide (1)..(321): Ceres Seq. ID no. 12394999
MECRSLDLTIISAEDLKDVQLIGKQDLYAVVSINGDARTKQKTKVDKDCGTKPKWKHQMKLTVDDASARDNRLTLVFEIVADRPIAGDKPVGEVSVPLKELLDQNKGDEEKTVTYAVRLPNGKAKGSLKFSFKFGEKYTYGSSSGPHAPVPSAMDHKTMDQPVTAYPPGHGAPSAYPAPPAGPSSGYPPQGHDDKHGGVYGYPQQAGYPAGTGGYPPPGAYPQQGGYPVYPPQQQGGYPGYPPQGPYGYPQQGYPPQGPYGYPQQQAHGKPQKPKKHGKAGAGMGLGLGLGAGLLGGLLVGEAVSDIADMGDMGDMGGFDF

SEQ ID NO: 26869 - protein, 263 aa, Arabidopsis thaliana
  peptide (1)..(263): Ceres Seq. ID no. 12395000
MKLTVDDASARDNRLTLVFEIVADRPIAGDKPVGEVSVPLKELLDQNKGDEEKTVTYAVRLPNGKAKGSLKFSFKFGEKYTYGSSSGPHAPVPSAMDHKTMDQPVTAYPPGHGAPSAYPAPPAGPSSGYPPQGHDDKHGGVYGYPQQAGYPAGTGGYPPPGAYPQQGGYPVYPPQQQGGYPGYPPQGPYGYPQQGYPPQGPYGYPQQQAHGKPQKPKKHGKAGAGMGLGLGLGAGLLGGLLVGEAVSDIADMGDMGDMGGFDF

SEQ ID NO: 26870 - protein, 168 aa, Arabidopsis thaliana
  peptide (1)..(168): Ceres Seq. ID no. 12395001
MDHKTMDQPVTAYPPGHGAPSAYPAPPAGPSSGYPPQGHDDKHGGVYGYPQQAGYPAGTGGYPPPGAYPQQGGYPVYPPQQQGGYPGYPPQGPYGYPQQGYPPQGPYGYPQQQAHGKPQKPKKHGKAGAGMGLGLGLGAGLLGGLLVGEAVSDIADMGDMGDMGGFDF

SEQ ID NO: 26871 - DNA, 907 bp, Arabidopsis thaliana
  misc_feature (1)..(907): Ceres Seq. ID no. 12421693
  misc_feature (1)..(907): Ortholog of  Ceres SEQ ID NO 14306223 as cited in SEQ ID NO 56928
  misc_feature (1)..(907): Ortholog of  Ceres SEQ ID NO 12784326 as cited in SEQ ID NO 61717
aaaaatccctcaagaatcgcttcatcttcttcttcttcaacaaatcgagtcctttttctgataactcatttcgatttcagaaactcgccaagaactggatactctggcggaatcaaagattaagaaccgagacgtggttctgaaactgtatgaagccctgagatctcgcgacgtcaaatctgtgcaccagatcttaaccccagatctggagtattggttccacggtcctccgccgcaccagtttttgatgcgcgtactcaccggaggtgtctctccgtcttcttcctccttcgaattcgtacctctctccgtcgtttccttcggatctaccgtaatcgcggaaggctgcgacgccgcgacatcgatttcttggatccacgcttggactgtagcgaatgggataatcacacaggtgagggagtactctaacacttctctcaccgtcacacggatcggtaacgttgttgctggacgacgctccgctgagattgcgcctccgtcgcattgttcctccgtgtgggaaagccaattctcgggtcgggctggtaaacccgtacccggtttggttctggcgatttgaaagagtttggtaaagtaagtaacagccacgtcaggagaataactaaataaaggctgcttacgtgtctgtgtgtggttggtttgtttgttgtatgggttaaaaaggattttgttgctgttttaaacgcggtgtgggcttctggggctacggtcgcgtttggctgtcgctagtttttttttttttttaaagttgtttgtctgaaaattcgtgtgggtttgtgttttttagtgggagcaagtatggggaaacccaaatcgacttgttgtcccgttgcgtttgatgtaacgtttgcttatgttataattgaaataaaaaagtgcttttggg

SEQ ID NO: 26872 - protein, 110 aa, Arabidopsis thaliana
  peptide (1)..(110): Ceres Seq. ID no. 12421694
MRVLTGGVSPSSSSFEFVPLSVVSFGSTVIAEGCDAATSISWIHAWTVANGIITQVREYSNTSLTVTRIGNVVAGRRSAEIAPPSHCSSVWESQFSGRAGKPVPGLVLAI

SEQ ID NO: 26873 - DNA, 992 bp, Arabidopsis thaliana
  misc_feature (1)..(992): Ceres Seq. ID no. 12439671
  misc_feature (1)..(992): Ortholog of  Ceres SEQ ID NO 15177592 as cited in SEQ ID NO 58436
  misc_feature (1)..(992): Ortholog of  Ceres SEQ ID NO 13655251 as cited in SEQ ID NO 62888
  misc_feature (1)..(992): Ortholog of  Ceres SEQ ID NO 13597194 as cited in SEQ ID NO 63661
  misc_feature (1)..(992): Ortholog of  Ceres SEQ ID NO 14302883 as cited in SEQ ID NO 66384
  misc_feature (1)..(992): Ortholog of  Ceres SEQ ID NO 13662855 as cited in SEQ ID NO 69059
catctttacgatatcgccaatgttaaaggagttgctgctgatctaagtcattgtaacactccttctcaagttcgtgatttcactggtccttctgagttagctgattgtttgaaagatgttaacgttgttgtcatccctgctggtgtgccgaggaaacccggtatgactcgtgacgatcttttcaacatcaatgccaatattgtcaagactcttgttgaagctgttgctgagaattgccctaatgctttcattcatattattagtaacccggttaactctacggtacctattgctgctgaagtgttgaagaagaaaggtgtttatgatcctaagaagctgtttggtgtcactactttggatgttgtgagggctaacacttttgtttctcagaagaagaatcttaagcttattgatgttgatgttccggttattggtggacatgctggaatcaccattttgcctctcctctcgaagacaaaaccgtctgttaactttactgatgaagagatccaagagctcactgttaggattcagaacgctggtactgaggttgttgatgctaaggcaggtgcaggttcagctactttgtcaatggcttatgctgctgctagatttgtggagtcatctcttcgtgctcttgatggagacggagatgtctacgagtgctcgtttgtggagtcgactctgactgatcttcctttctttgcatcacgggttaagatagggaagaacggtcttgaagctgtgattgagtcagaccttcagggattgactgagtatgagcagaaagcactagaagctcttaaggtagaattgaaagctagcattgacaagggtgtcgcatttgcaaacaaaccagctgctgcagcagctaactagatcgcaagctgataacatttttcttctgatcatttcgagttttgttttatttttcatatttgttgcatcggcgagacattttcgtgttgtagaataaagaatgtatttgctcc

SEQ ID NO: 26874 - protein, 292 aa, Arabidopsis thaliana
  peptide (1)..(292): Ceres Seq. ID no. 12439672
HLYDIANVKGVAADLSHCNTPSQVRDFTGPSELADCLKDVNVVVIPAGVPRKPGMTRDDLFNINANIVKTLVEAVAENCPNAFIHIISNPVNSTVPIAAEVLKKKGVYDPKKLFGVTTLDVVRANTFVSQKKNLKLIDVDVPVIGGHAGITILPLLSKTKPSVNFTDEEIQELTVRIQNAGTEVVDAKAGAGSATLSMAYAAARFVESSLRALDGDGDVYECSFVESTLTDLPFFASRVKIGKNGLEAVIESDLQGLTEYEQKALEALKVELKASIDKGVAFANKPAAAAAN

SEQ ID NO: 26875 - protein, 238 aa, Arabidopsis thaliana; identical to SEQ ID NO: 22022
  peptide (1)..(238): Ceres Seq. ID no. 12439673

SEQ ID NO: 26876 - DNA, 1483 bp, Arabidopsis thaliana
  misc_feature (1)..(1483): Ceres Seq. ID no. 13487740
  misc_feature (1)..(1483): Ortholog of  Ceres SEQ ID NO 15175507 as cited in SEQ ID NO 20619
  misc_feature (1)..(1483): Ortholog of  Ceres SEQ ID NO 13639663 as cited in SEQ ID NO 57850
  misc_feature (1)..(1483): Ortholog of  Ceres SEQ ID NO 14302150 as cited in SEQ ID NO 0
acaacattctccttatccttctcctcgtgaagacttttctctctgtttattttttttagggttttcgtaagaacagagcaaaaaacatgtttggaagaggaccttcaaggaagagcgataacacaaagttctacgagatccttggtgttcctaagaccgcagcaccagaagatctcaagaaagcttataagaaagccgctatcaaaaaccatcctgataagggtggtgatcccgaaaagtttaaagagttagcacaggcttatgaagttttaagtgatcctgagaagcgtgagatctatgatcaatatggggaagatgcactcaaggaaggaatgggtggtggaggtggtggacacgatccatttgatatcttctcttccttctttggtagtggtggacacccattcggaagtcatagccggggaaggaggcagaggcgtggtgaagatgttgttcatcccttgaaggtttccttagaggatgtttatctcggaacaacaaagaagctctcactttctaggaaggctttgtgctcaaagtgtaacggcaagggttcaaagtctggagcttcaatgaaatgtggtggctgtcaaggttcgggaatgaagatctcgatcaggcagtttggacctggaatgatgcagcaggtgcagcatgcttgtaatgattgcaaaggcacaggagagaccatcaatgatcgggacaggtgtccacaatgcaaaggagagaaggttgtctctgagaagaaggtgcttgaagtaaatgtggagaagggaatgcaacacaatcagaagatcacattcagtggacaagccgatgaagcgcctgatactgtcaccggagatatagtgtttgtcattcagcagaaggagcacccaaagttcaaaagaaagggtgaggatctctttgtggagcacaccatctctctaaccgaggccttgtgtggcttccagtttgtcttgacccatttggacaaaagacagcttctcatcaaatccaagcccggagaggtcgtcaaacctgattcatacaaggcgataagtgatgagggaatgccaatataccaaaggccgttcatgaagggtaagctatacattcacttcacggttgaattcccggaatcgctgagcccggatcagacaaaggccattgaagcagttttgccaaagccaaccaaggcagctataagcgatatggaaatagacgactgcgaagagacgactctgcatgatgtgaacattgaggatgagatgaaaaggaaggcgcaagctcaaagagaggcttatgatgacgatgaggaagatcacccaggcggtgctcagcgtgtgcaatgtgcccagcagtgatcaacatgcgcatcttagtgatctccaatatttgcttctgtcttttctccttttcattgtattatttttgggtctttttatagactttgccaattcagtgggaagaacctcgtcctaattcaaatccttgttacacc

SEQ ID NO: 26877 - protein, 419 aa, Arabidopsis thaliana
  peptide (1)..(419): Ceres Seq. ID no. 13487741
MFGRGPSRKSDNTKFYEILGVPKTAAPEDLKKAYKKAAIKNHPDKGGDPEKFKELAQAYEVLSDPEKREIYDQYGEDALKEGMGGGGGGHDPFDIFSSFFGSGGHPFGSHSRGRRQRRGEDVVHPLKVSLEDVYLGTTKKLSLSRKALCSKCNGKGSKSGASMKCGGCQGSGMKISIRQFGPGMMQQVQHACNDCKGTGETINDRDRCPQCKGEKVVSEKKVLEVNVEKGMQHNQKITFSGQADEAPDTVTGDIVFVIQQKEHPKFKRKGEDLFVEHTISLTEALCGFQFVLTHLDKRQLLIKSKPGEVVKPDSYKAISDEGMPIYQRPFMKGKLYIHFTVEFPESLSPDQTKAIEAVLPKPTKAAISDMEIDDCEETTLHDVNIEDEMKRKAQAQREAYDDDEEDHPGGAQRVQCAQQ

SEQ ID NO: 26878 - protein, 337 aa, Arabidopsis thaliana
  peptide (1)..(337): Ceres Seq. ID no. 13487742
MGGGGGGHDPFDIFSSFFGSGGHPFGSHSRGRRQRRGEDVVHPLKVSLEDVYLGTTKKLSLSRKALCSKCNGKGSKSGASMKCGGCQGSGMKISIRQFGPGMMQQVQHACNDCKGTGETINDRDRCPQCKGEKVVSEKKVLEVNVEKGMQHNQKITFSGQADEAPDTVTGDIVFVIQQKEHPKFKRKGEDLFVEHTISLTEALCGFQFVLTHLDKRQLLIKSKPGEVVKPDSYKAISDEGMPIYQRPFMKGKLYIHFTVEFPESLSPDQTKAIEAVLPKPTKAAISDMEIDDCEETTLHDVNIEDEMKRKAQAQREAYDDDEEDHPGGAQRVQCAQQ

SEQ ID NO: 26879 - protein, 257 aa, Arabidopsis thaliana
  peptide (1)..(257): Ceres Seq. ID no. 13487743
MKCGGCQGSGMKISIRQFGPGMMQQVQHACNDCKGTGETINDRDRCPQCKGEKVVSEKKVLEVNVEKGMQHNQKITFSGQADEAPDTVTGDIVFVIQQKEHPKFKRKGEDLFVEHTISLTEALCGFQFVLTHLDKRQLLIKSKPGEVVKPDSYKAISDEGMPIYQRPFMKGKLYIHFTVEFPESLSPDQTKAIEAVLPKPTKAAISDMEIDDCEETTLHDVNIEDEMKRKAQAQREAYDDDEEDHPGGAQRVQCAQQ

SEQ ID NO: 26880 - DNA, 794 bp, Arabidopsis thaliana
  misc_feature (1)..(794): Ceres Seq. ID no. 13490180
  misc_feature (1)..(794): Ortholog of  Ceres SEQ ID NO 14309220 as cited in SEQ ID NO 0
actaccaacaacacttagagaacaagcagaggaatataactttttttttctttttcctttttgcttttttacaaccaaaaaaataaagcaagccgtagagagcaagagacggtgtaaagatgcactacacacgcatctcgccggctttagtaccatctctatcaccaaccgccgcggctgaatctagcggtggtgggacgatgatagctactgttttcatggcccttctcctcccctgcgtcggcatgtgcatcgtcttcctaatctatctattcctcttgtggtgctccacacggcgtcgtatcgaacgccttcgatttgctgaaccggttaaaccggtcacaggtaaaggcctttcggtgttggagctcgagaaaatccctaaactcaccggaagagagctagccgtaatagctagatcaacggaatgtgctgtttgccttgaagatatagagagtggtcaatcgactcgtctagttcccggttgcaaccatgggtttcaccaattatgtgctgatacgtggctatctaaccacacggtttgtccagtttgccgcgccgagctggctccgaacctacctcaatgtaatgaaaatcaaagtccatgttagaaacagaattttcaaaaacattctttccttcttttttactcgttttgtgtacttctcttgtttttcccttttcttagttttgtgtaagcgttatagagagagaagtttccaggttgtaactagccttgttgtttttttttgtacatgaaattagttttagagtaaattacgaaatttacagcc

SEQ ID NO: 26881 - protein, 163 aa, Arabidopsis thaliana
  peptide (1)..(163): Ceres Seq. ID no. 13490181
MHYTRISPALVPSLSPTAAAESSGGGTMIATVFMALLLPCVGMCIVFLIYLFLLWCSTRRRIERLRFAEPVKPVTGKGLSVLELEKIPKLTGRELAVIARSTECAVCLEDIESGQSTRLVPGCNHGFHQLCADTWLSNHTVCPVCRAELAPNLPQCNENQSPC

SEQ ID NO: 26882 - protein, 136 aa, Arabidopsis thaliana
  peptide (1)..(136): Ceres Seq. ID no. 13490182
MIATVFMALLLPCVGMCIVFLIYLFLLWCSTRRRIERLRFAEPVKPVTGKGLSVLELEKIPKLTGRELAVIARSTECAVCLEDIESGQSTRLVPGCNHGFHQLCADTWLSNHTVCPVCRAELAPNLPQCNENQSPC

SEQ ID NO: 26883 - protein, 130 aa, Arabidopsis thaliana
  peptide (1)..(130): Ceres Seq. ID no. 13490183
MALLLPCVGMCIVFLIYLFLLWCSTRRRIERLRFAEPVKPVTGKGLSVLELEKIPKLTGRELAVIARSTECAVCLEDIESGQSTRLVPGCNHGFHQLCADTWLSNHTVCPVCRAELAPNLPQCNENQSPC

SEQ ID NO: 26884 - DNA, 1741 bp, Arabidopsis thaliana
  misc_feature (1)..(1741): Ceres Seq. ID no. 12422200
  misc_feature (1)..(1741): Ortholog of  Ceres SEQ ID NO 12625335 as cited in SEQ ID NO 63326
cttgttcaaccctcgagagattacggatagtgaaagagaagctacaaaatttcccaatttatcaaaaaatagaaatttcttacttttttcaaaattcatttctccccaaaaaaaatatcttgtgaaaactgcaactgtgatccatggcggaggatatggctgccgacgaagttacggctcctcctcgtaaggttcttatcatctccgctggtgctagccactccgtcgctcttctctctggtgacattgtttgttcttggggtcgaggagaggatggacagttaggtcatggcgatgcagangagtcgaccttctccgactcagcttagcgctttagatggccaccaaattgtttccgttacctgtggtctgatcacactgttgcttattcacaatcaggcatggaagtctacagttggggatggggtgattttgggagattaggccatggtaactcaagcgacttgtttactccgctaccaatcaaagcattgcacggtattcggatcaagcagattgcttgtggggatagtcattgtttggctgtcactatggaaggagaggtccagagttggggccgcaaccagaatggtcaacttggtctgggggacaccgaagattctctagtgcctcagaagattcaagcctttgagggaatacgaatcaaaatggttgctgctggtgcagaacacactgctgcagttacagaagatggtgacctctatggatggggctggggaagatacggaaatttgggattaggtgaccggactgaccgcttagttcctgaaagagttacctctactggtggtgagaaaatgtcaatggttgcttgtggatggcggcacacaatatcagtttcctactctggagcattgtatacttatggatggagcaaatatggacagctaggacatggagacttggaggatcaccttattcctcacaaactggaagcactgagcaacagttttatctcccagatttcgggaggttggagacatacaatggcattgacttcagatggaaaactatatggatggggttggattaagtttggacaagtaggagtcggcaataatttagatcagtgttctcctgtgcaagtgcgatttcccgatgatcagaaagtagttcaagtctcatgtggatggagacataccttggctgtcactgaaagaaataacgtgtttgcttggggtagaagtacaaatggacagctcggcattggagagtcggttgacaggaactttcccaagattatagaggcactgagcgtcgatggagcaagtggacaacatatagaatcttctaatatcgatccatcttcagggaaaagctgggtgtcgcctgcagagagatatgcagttgttcctgatgaaacgggcctaacggatggttcaagcaaaggtaatggaggtgatatcagtgttccacaaactgatgtcaagcgtgtacgaatttgagcctgagtcaattccgttttttttttacttccggttcttccgttggattcgaaggtttttcagtgatctcttttgggttgaggtttgtactaagagtacgtctgtctagtttgggattgtactttttgttgttgttgttagtttgtaacttgtgatgcttccctccccctagctctcttattacatgggcgttgtaaactgtgtgtactactactactagtctctagggtatgtactttttttttcctcaccataataataccttctggttctat

SEQ ID NO: 26885 - protein, 354 aa, Arabidopsis thaliana
  peptide (1)..(354): Ceres Seq. ID no. 12422201
MEVYSWGWGDFGRLGHGNSSDLFTPLPIKALHGIRIKQIACGDSHCLAVTMEGEVQSWGRNQNGQLGLGDTEDSLVPQKIQAFEGIRIKMVAAGAEHTAAVTEDGDLYGWGWGRYGNLGLGDRTDRLVPERVTSTGGEKMSMVACGWRHTISVSYSGALYTYGWSKYGQLGHGDLEDHLIPHKLEALSNSFISQISGGWRHTMALTSDGKLYGWGWIKFGQVGVGNNLDQCSPVQVRFPDDQKVVQVSCGWRHTLAVTERNNVFAWGRSTNGQLGIGESVDRNFPKIIEALSVDGASGQHIESSNIDPSSGKSWVSPAERYAVVPDETGLTDGSSKGNGGDISVPQTDVKRVRI

SEQ ID NO: 26886 - protein, 304 aa, Arabidopsis thaliana
  peptide (1)..(304): Ceres Seq. ID no. 12422202
MEGEVQSWGRNQNGQLGLGDTEDSLVPQKIQAFEGIRIKMVAAGAEHTAAVTEDGDLYGWGWGRYGNLGLGDRTDRLVPERVTSTGGEKMSMVACGWRHTISVSYSGALYTYGWSKYGQLGHGDLEDHLIPHKLEALSNSFISQISGGWRHTMALTSDGKLYGWGWIKFGQVGVGNNLDQCSPVQVRFPDDQKVVQVSCGWRHTLAVTERNNVFAWGRSTNGQLGIGESVDRNFPKIIEALSVDGASGQHIESSNIDPSSGKSWVSPAERYAVVPDETGLTDGSSKGNGGDISVPQTDVKRVRI

SEQ ID NO: 26887 - protein, 265 aa, Arabidopsis thaliana
  peptide (1)..(265): Ceres Seq. ID no. 12422203
MVAAGAEHTAAVTEDGDLYGWGWGRYGNLGLGDRTDRLVPERVTSTGGEKMSMVACGWRHTISVSYSGALYTYGWSKYGQLGHGDLEDHLIPHKLEALSNSFISQISGGWRHTMALTSDGKLYGWGWIKFGQVGVGNNLDQCSPVQVRFPDDQKVVQVSCGWRHTLAVTERNNVFAWGRSTNGQLGIGESVDRNFPKIIEALSVDGASGQHIESSNIDPSSGKSWVSPAERYAVVPDETGLTDGSSKGNGGDISVPQTDVKRVRI

SEQ ID NO: 26888 - DNA, 813 bp, Arabidopsis thaliana
  misc_feature (1)..(813): Ceres Seq. ID no. 12581284
  misc_feature (1)..(813): Ortholog of  Ceres SEQ ID NO 12597207 as cited in SEQ ID NO 62146
aagctctcaccacagtttgagaagcgaaaatggtgtcaggatcagggatatgctcgaagcgcgttgtcgtcgacgcgcgccaccacatgcttggccgtcttgcgtcgatcaccgctaaagagcttctcaatggccagaaagttgtcattgtccggtgcgaagagatttgcctctccggcggactcgttcgtcagaaaatgaagtacatgaggtttcttcgcaaacgtatgaacactaaaccttctcatggacctattcacttccgtgctccttccaaaatcttctggcgtactgttcgcggtatgattccacacaagacgaagcgtggagctgctgcattagcacgtctgaaggtatatgaaggtgttcctactccatatgacaagatcaagaggatggtcatccctgatgctctcaaggtgttgaggcttcaagctggtcacaaatactgtctattgggccgtctttcttctgaagttgggtggaaccattacgacaccatcaaggagctggagacaaagaggaaggagagagcccacgtggtttacgagcgaaagaagcaacttaacaaacttagagttaaggccgagaaggtcgctgaagagaagctcggagcacagctcgatattcttgcgccagttaagtactgagcttgtcagtagtagttttttttttttttggtaaggagcttgtcagtagtagtttgtcttggcatgttttgagccaacccaatacttttttactttttatcttttacttaggtcttgtatcgaaatttgtactcctaacattttatgcttgagttttatttat

SEQ ID NO: 26889 - protein, 206 aa, Arabidopsis thaliana
  peptide (1)..(206): Ceres Seq. ID no. 12581285
MVSGSGICSKRVVVDARHHMLGRLASITAKELLNGQKVVIVRCEEICLSGGLVRQKMKYMRFLRKRMNTKPSHGPIHFRAPSKIFWRTVRGMIPHKTKRGAAALARLKVYEGVPTPYDKIKRMVIPDALKVLRLQAGHKYCLLGRLSSEVGWNHYDTIKELETKRKERAHVVYERKKQLNKLRVKAEKVAEEKLGAQLDILAPVKY

SEQ ID NO: 26890 - protein, 187 aa, Arabidopsis thaliana
  peptide (1)..(187): Ceres Seq. ID no. 12581286
MLGRLASITAKELLNGQKVVIVRCEEICLSGGLVRQKMKYMRFLRKRMNTKPSHGPIHFRAPSKIFWRTVRGMIPHKTKRGAAALARLKVYEGVPTPYDKIKRMVIPDALKVLRLQAGHKYCLLGRLSSEVGWNHYDTIKELETKRKERAHVVYERKKQLNKLRVKAEKVAEEKLGAQLDILAPVKY

SEQ ID NO: 26891 - protein, 150 aa, Arabidopsis thaliana
  peptide (1)..(150): Ceres Seq. ID no. 12581287
MKYMRFLRKRMNTKPSHGPIHFRAPSKIFWRTVRGMIPHKTKRGAAALARLKVYEGVPTPYDKIKRMVIPDALKVLRLQAGHKYCLLGRLSSEVGWNHYDTIKELETKRKERAHVVYERKKQLNKLRVKAEKVAEEKLGAQLDILAPVKY

SEQ ID NO: 26892 - DNA, 963 bp, Arabidopsis thaliana
  misc_feature (1)..(963): Ceres Seq. ID no. 12723825
  misc_feature (1)..(963): Ortholog of  Ceres SEQ ID NO 12617020 as cited in SEQ ID NO 63816
atcaatttttctttattttattcactaataataattttgagtctctcttctctctctcttatatctcaaaatccgagaaaacgaagttcaaagatccgtggttgaattcgtgattctgaaatttcgtttcttcaggtctctgatcgtcctggttctcctctgatctgttatttgcttcgaaatagaagtttgtttctcgtttgacgatggagactgcgactggagaaatcaccatcgtctgcaaccactgtgacagagacattccatcactgaatatcgatctgcatcgtgtacattgtgctcggaatttagaaaaatgtaagatttgtggtgatatggtacccaaaaagcatgctgaggaacactacttgaacacacatgctccgatagcatgctcgatgtgcaaagagaccatagaacgtgagattttcgatagtcataaaggagaaatttgccccaagaggattgtaacatgcgagttctgtgagtttccattgcctgcggttgatcttgccgagcatcaggaagtatgtggcaacaggacagaactctgttatcaatgcaacagctatgttagattgagagaaagatataaccatgaaaccaaatgccctggcactgttgaatcatccagaaggatcccgagagcagcagaaggagatggaaacgggagaagacgaagagatgggaacggtgtttcgaacaaaaggcttttcttcacgatagcaataacgggaatagctgtgataataggatccttgttcttccagaggaagcctgagtagaggaggcgtagcttatctgtaattctgtaaatttgcctcaaatccttcagacagattctaaggaagggtttatacattttaaagcttacccagacaagagaaaccccaaaagattgtttgagctgatcaccatgagacttgcttttatatttgatttcaataaaagagatttcagatt

SEQ ID NO: 26893 - protein, 192 aa, Arabidopsis thaliana
  peptide (1)..(192): Ceres Seq. ID no. 12723826
METATGEITIVCNHCDRDIPSLNIDLHRVHCARNLEKCKICGDMVPKKHAEEHYLNTHAPIACSMCKETIEREIFDSHKGEICPKRIVTCEFCEFPLPAVDLAEHQEVCGNRTELCYQCNSYVRLRERYNHETKCPGTVESSRRIPRAAEGDGNGRRRRDGNGVSNKRLFFTIAITGIAVIIGSLFFQRKPE

SEQ ID NO: 26894 - protein, 149 aa, Arabidopsis thaliana
  peptide (1)..(149): Ceres Seq. ID no. 12723827
MVPKKHAEEHYLNTHAPIACSMCKETIEREIFDSHKGEICPKRIVTCEFCEFPLPAVDLAEHQEVCGNRTELCYQCNSYVRLRERYNHETKCPGTVESSRRIPRAAEGDGNGRRRRDGNGVSNKRLFFTIAITGIAVIIGSLFFQRKPE

SEQ ID NO: 26895 - protein, 128 aa, Arabidopsis thaliana
  peptide (1)..(128): Ceres Seq. ID no. 12723828
MCKETIEREIFDSHKGEICPKRIVTCEFCEFPLPAVDLAEHQEVCGNRTELCYQCNSYVRLRERYNHETKCPGTVESSRRIPRAAEGDGNGRRRRDGNGVSNKRLFFTIAITGIAVIIGSLFFQRKPE

SEQ ID NO: 26896 - DNA, 590 bp, Arabidopsis thaliana
  misc_feature (1)..(590): Ceres Seq. ID no. 12394309
  misc_feature (1)..(590): Ortholog of  Ceres SEQ ID NO 13595627 as cited in SEQ ID NO 59826
  misc_feature (1)..(590): Ortholog of  Ceres SEQ ID NO 15177889 as cited in SEQ ID NO 0
aaaattcacactatgaaactcgccaaactaattccaaaacgtttcttcatcagatccaaagatcgttccactgtctctaagtcccccacggctttttccttcggatccgcttcctcatcttccggccaagactgtaaaaactccggtggtgatggcggtggcggttccgttaccccgactagcattctcccggaggttccttctccttattcctacgtcgagattctccaagcgtttaagttgatagacagagacaacgacggagctgtctctagacacgatcttgagtcgttacttagccggctaggtcctgatcctttgacggaggaggagatcaacgttatgcttaaagaggtggactgcgacggcgacggtacgatccgtcttgaagagcttgcgagtcgtgtagtctctttagatccggctcgtgactcgactgagctgaaggagactttcgagttctttgacgcggatcgtaacggtttgatctcggctgatgagcttctacgagttttctcgaccattggagatgacggtgcacgttagatgattgtaagcgtatgatagcagatgttgatgaggacggtgat

SEQ ID NO: 26897 - protein, 181 aa, Arabidopsis thaliana
  peptide (1)..(181): Ceres Seq. ID no. 12394310
KIHTMKLAKLIPKRFFIRSKDRSTVSKSPTAFSFGSASSSSGQDCKNSGGDGGGGSVTPTSILPEVPSPYSYVEILQAFKLIDRDNDGAVSRHDLESLLSRLGPDPLTEEEINVMLKEVDCDGDGTIRLEELASRVVSLDPARDSTELKETFEFFDADRNGLISADELLRVFSTIGDDGAR

SEQ ID NO: 26898 - protein, 177 aa, Arabidopsis thaliana
  peptide (1)..(177): Ceres Seq. ID no. 12394311
MKLAKLIPKRFFIRSKDRSTVSKSPTAFSFGSASSSSGQDCKNSGGDGGGGSVTPTSILPEVPSPYSYVEILQAFKLIDRDNDGAVSRHDLESLLSRLGPDPLTEEEINVMLKEVDCDGDGTIRLEELASRVVSLDPARDSTELKETFEFFDADRNGLISADELLRVFSTIGDDGAR

SEQ ID NO: 26899 - DNA, 841 bp, Arabidopsis thaliana
  misc_feature (1)..(841): Ceres Seq. ID no. 12331332
  misc_feature (1)..(841): Ortholog of  Ceres SEQ ID NO 15178133 as cited in SEQ ID NO 0
aaatcatcactcatcttcaccaatctccattgattccttcaagccaagcttctggcattctcctcttagatcaatctggttctttcatattccttgtggatatgatccgttaagattcgttcgttttgtgtctagtagatcgctgtgacgtaatataaagaaaaccctaaatctcagaaaactcgagactggctctaatggcttgtcaaattcaagcttcacgcgttttcccagttctggaaattgaaaaaggtctctcctttatgataaatgtcttgcataggagaagaaaagtttcgtccattactctcacttcatttccttatcccatgaaaagttttcagataagaagaccaaaccggaaaatagcgtttgcgttagacactggttcttctattcctggagatagtggtgaagggcaagagatgaatggagacagaaccggtctcggtagcactcggttaggtagaattgcgattgcaggaggcaaacagttacttgcaagataaactctgcaagaaaaaacttcccaatgaagatatttctgctgcttcttggtttctacactgccaatgcactagctactattcttggacagactggtgattgggatgtgcttgttgccggaatcgtcgttgctgcgatcgaaggaatcggtatgcttatgtataagaaaccgtcttcttcaatgttttcagggaagttgcagtcttttgttgtgtttatgaatttttggaaagctggtgtttgcttaggtctctttgttgatgctttcaagttgggtagttaaaaagacaaatctttcttttcttctactctatgtatatatgcaattgttact

SEQ ID NO: 26900 - protein, 103 aa, Arabidopsis thaliana
  peptide (1)..(103): Ceres Seq. ID no. 12331333
MACQIQASRVFPVLEIEKGLSFMINVLHRRRKVSSITLTSFPYPMKSFQIRRPNRKIAFALDTGSSIPGDSGEGQEMNGDRTGLGSTRLGRIAIAGGKQLLAR

SEQ ID NO: 26901 - protein, 85 aa, Arabidopsis thaliana
  peptide (1)..(85): Ceres Seq. ID no. 12331334
MKIFLLLLGFYTANALATILGQTGDWDVLVAGIVVAAIEGIGMLMYKKPSSSMFSGKLQSFVVFMNFWKAGVCLGLFVDAFKLGS

SEQ ID NO: 26902 - protein, 81 aa, Arabidopsis thaliana
  peptide (1)..(81): Ceres Seq. ID no. 12331335
MINVLHRRRKVSSITLTSFPYPMKSFQIRRPNRKIAFALDTGSSIPGDSGEGQEMNGDRTGLGSTRLGRIAIAGGKQLLAR

SEQ ID NO: 26903 - DNA, 1164 bp, Arabidopsis thaliana
  misc_feature (1)..(1164): Ceres Seq. ID no. 12674198
  misc_feature (1)..(1164): Ortholog of  Ceres SEQ ID NO 13596436 as cited in SEQ ID NO 68754
  misc_feature (1)..(1164): Ortholog of  Ceres SEQ ID NO 15180160 as cited in SEQ ID NO 0
atacaaaaaaaactctcttctcaagtctctccttcttctccgtccttcccaattcttccgttcaaacaaatttctccaaacccaaaccctaatttcctccgtctgtgaaatcaagggttttctctgatctgggttttgatcagaaatcagatctaggtttaattttcgaaatcaaattatgaggaagagagaaagagagaacccttgttcgatttgtgggcattaccataagtacgaggaaggagaagtatgtggagtctgtggtcactgtatgcctgtttcttccgatacggtggcgccgcaacaagtccacgtcagtgcttttccgtcggagattctccctgagtttctttacctcggtagttacgacaacgcttctcgctctgagcttcttaagactcaaggaatctctcgtgttcttaatacggttcctatgtgccagaatctctacaggaattcattcacttatcatggtcttgataatgaaaaagttttacagtttgatgatgctattaagttcttagaccaatgtgagaaggacaaggcacgtgttcttgtgcattgcatgtctgggaaaagtagatcaccagcggttgttgtagcgtacttgatgaaacgaaaagggtggagactcgctgagagtcatcagtgggttaaacaacggagaccaagcactgacataagtccagagttttaccaacaactgcaggagtttgagcaggggatattcggatctgagatgatgtcggcgatgaatattaatgatgctccaacgtttgggtttggtttccctaagattgataatcaagcacaagctcctgtgttcaacaatgctcctacttcttctatattttcatctcctgcttcaagtatccctcctcaggagttcacttttggagcaactccaccaaagccaacaactggtggtgatattgcaatggatggctcttagaaccagataatcatatactcttgcaagaattttcatcaacaaatatactgttgtgagaatgtttctttttcttttttgtacatggagattggtgcattgcttgagagagtttggggtttgagaacatgagattggaagcatctttgtctggtttattcctcactctcccacaattctgtatcgatctttacagcgaaatatactattaaacc

SEQ ID NO: 26904 - protein, 257 aa, Arabidopsis thaliana; identical to SEQ ID NO: 22394
  peptide (1)..(257): Ceres Seq. ID no. 12674199

SEQ ID NO: 26905 - protein, 226 aa, Arabidopsis thaliana; identical to SEQ ID NO: 22395
  peptide (1)..(226): Ceres Seq. ID no. 12674200

SEQ ID NO: 26906 - protein, 172 aa, Arabidopsis thaliana; identical to SEQ ID NO: 22396
  peptide (1)..(172): Ceres Seq. ID no. 12674201

SEQ ID NO: 26907 - DNA, 1394 bp, Arabidopsis thaliana
  misc_feature (1)..(1394): Ceres Seq. ID no. 12421706
  misc_feature (1)..(1394): Ortholog of  Ceres SEQ ID NO 13596048 as cited in SEQ ID NO 68476
  misc_feature (1)..(1394): Ortholog of  Ceres SEQ ID NO 12589137 as cited in SEQ ID NO 0
agtcatgtttccatagacataatctctcaccattgtttttctctgcaaaactaaagaaacaaaaaaagaaaaatcggagaaaccaagaaaaaagaaatgggaagtgtagaagcaggagaaaagaaggctttaggatgggctgcaagagatccttctggtgttctctctccttactcctacactttaaggagcacaggagcagatgatgtgtatataaaggttatatgctgtggaatatgccatactgatattcaccaaattaaaaatgatcttggaatgtctaattatcctatggttcctgggcacgaggtagtaggtgaggtgttggaagtgggatcagatgtgagcaagttcaccgtaggagatgtagtcggagtcggcgtggtcgttggatgctgcggtagctgcaaaccatgcagctcagaacttgagcagtattgtaacaagagaatctggagttacaacgatgtctacaccgatggaaaacctactcaaggtggcttcgccgacaccatgatcgtcaatcaaaagtttgtggtgaagattccagaaggaatggcggtggagcaggctgcaccgctactctgcgcgggagtaacggtttatagtccgttgagccacttcggtctaatggcgagtgggcttaaaggagggattctagggttaggtggagtagggcacatgggtgtgaagatagctaaagcaatgggacaccatgtgactgtgataagctcatcagataagaaaaaagaagaagctatcgaacatttaggagctgacgactatgtggtgagctctgatccagcagagatgcaaagactcgcagattcccttgactacatcattgacaccgtaccggtgtttcaccctctcgacccttacttggcttgtcttaaactcgacgggaaattgattctcatgggtgttatcaacactcctcttcagttcgtgacccctctcgtcattcttgggaggaaagtgatatcagggagctttatagggagcattaaagagacagaagaagtgttggctttctgcaaagagaaagggcttacgtcgacgattgaaactgtgaagatcgatgagcttaacattgcgtttgagaggcttcgcaagaacgatgttcgttacagatttgtggttgatgttgcaggaagtaatctggtggaggaggctgcaacaactacaaactaaagagggcagggcacattgatacatgaacgaaaaattgtaacgggcttgtttgtccaacgaatgttttgttgttgtctttttcaaatggttcaaacacgaatgctttggctttatttttttctaatcaatgtggattttctgtttacgtgtgtttgtcacaagaaaatcattatgataagaattttcttccacttgaactc

SEQ ID NO: 26908 - protein, 365 aa, Arabidopsis thaliana
  peptide (1)..(365): Ceres Seq. ID no. 12421707
MGSVEAGEKKALGWAARDPSGVLSPYSYTLRSTGADDVYIKVICCGICHTDIHQIKNDLGMSNYPMVPGHEVVGEVLEVGSDVSKFTVGDVVGVGVVVGCCGSCKPCSSELEQYCNKRIWSYNDVYTDGKPTQGGFADTMIVNQKFVVKIPEGMAVEQAAPLLCAGVTVYSPLSHFGLMASGLKGGILGLGGVGHMGVKIAKAMGHHVTVISSSDKKKEEAIEHLGADDYVVSSDPAEMQRLADSLDYIIDTVPVFHPLDPYLACLKLDGKLILMGVINTPLQFVTPLVILGRKVISGSFIGSIKETEEVLAFCKEKGLTSTIETVKIDELNIAFERLRKNDVRYRFVVDVAGSNLVEEAATTTN

SEQ ID NO: 26909 - protein, 305 aa, Arabidopsis thaliana
  peptide (1)..(305): Ceres Seq. ID no. 12421708
MSNYPMVPGHEVVGEVLEVGSDVSKFTVGDVVGVGVVVGCCGSCKPCSSELEQYCNKRIWSYNDVYTDGKPTQGGFADTMIVNQKFVVKIPEGMAVEQAAPLLCAGVTVYSPLSHFGLMASGLKGGILGLGGVGHMGVKIAKAMGHHVTVISSSDKKKEEAIEHLGADDYVVSSDPAEMQRLADSLDYIIDTVPVFHPLDPYLACLKLDGKLILMGVINTPLQFVTPLVILGRKVISGSFIGSIKETEEVLAFCKEKGLTSTIETVKIDELNIAFERLRKNDVRYRFVVDVAGSNLVEEAATTTN

SEQ ID NO: 26910 - protein, 300 aa, Arabidopsis thaliana
  peptide (1)..(300): Ceres Seq. ID no. 12421709
MVPGHEVVGEVLEVGSDVSKFTVGDVVGVGVVVGCCGSCKPCSSELEQYCNKRIWSYNDVYTDGKPTQGGFADTMIVNQKFVVKIPEGMAVEQAAPLLCAGVTVYSPLSHFGLMASGLKGGILGLGGVGHMGVKIAKAMGHHVTVISSSDKKKEEAIEHLGADDYVVSSDPAEMQRLADSLDYIIDTVPVFHPLDPYLACLKLDGKLILMGVINTPLQFVTPLVILGRKVISGSFIGSIKETEEVLAFCKEKGLTSTIETVKIDELNIAFERLRKNDVRYRFVVDVAGSNLVEEAATTTN

SEQ ID NO: 26911 - DNA, 1250 bp, Arabidopsis thaliana
  misc_feature (1)..(1250): Ceres Seq. ID no. 12332472
  misc_feature (1)..(1250): Ortholog of  Ceres SEQ ID NO 12634262 as cited in SEQ ID NO 0
agaggtttacgctaagggaactcataagtcagagtttgactcgaatttgcttgatcctcgttctgatcctatttgggatgctataagagaagaagctaaacttgaggcagagaaagagcctattttgagtagcttcttgtatgctggtatcttagcacatgattgtttagagcaagctttagggtttgttctagccaaccgtctccaaaacccaaccttgttggcaacacaactcttggatatattttatggtgttatgatgcatgacaaaggtattcagagttcgattcgccatgatctccaggcatttaaagatcgtgatcctgcttgtctgtcgtatagttctgctattttacatctgaagggttatcatgcgttacaagcatatagggttgcgcataaactgtggaatgaagggaggaaactattagctcttgcattgcaaagccgaataagcgaggtagttggtgatcgttgtcttttggttgagtcttgctggagctgcatttttgagctcaatgtctgatctatgctgtggtttctctcaggtttttggcattgacatacacccaggtagagttttgagcttcatatctctgctctcatctgtttgaacattctcagtttcccttctctgttgtaatagttgatcaggtttaccgatgaattgattgctggttatacatattacttgaattctctttctgcatagcggcaagaattggggagggaatattgttggatcatggaactggagtggtcattggtgagaccgctgtgataggcaacggtgtctcgatcttacatggtgtgactttaggaggaaccggaaaggaaactggcgatcgccacccaaagataggtgaaggtgcattgcttggagcttgtgtgactatacttggtaacataagcataggtgctggagcaatggtagctgcaggttcacttgtgttaaaagacgttccttcgcatagtgtggtggctggaaatcctgcaaaactgatcagggtcatggaagagcaagacccgtctctagcaatgaaacacgatgctactaaagagttctttcgacatgtagctgatggttacaaaggggcacaatctaacggaccatcactttcagcaggagatacagagaaaggacacactaacagcacatcatgagatctttgtatgcaaatttcttaccatcataagctaattcttgtatgctcttgcttatcatcataagctaatctcagcatttcctc

SEQ ID NO: 26912 - protein, 174 aa, Arabidopsis thaliana
  peptide (1)..(174): Ceres Seq. ID no. 12332473
EVYAKGTHKSEFDSNLLDPRSDPIWDAIREEAKLEAEKEPILSSFLYAGILAHDCLEQALGFVLANRLQNPTLLATQLLDIFYGVMMHDKGIQSSIRHDLQAFKDRDPACLSYSSAILHLKGYHALQAYRVAHKLWNEGRKLLALALQSRISEVVGDRCLLVESCWSCIFELNV

SEQ ID NO: 26913 - protein, 89 aa, Arabidopsis thaliana
  peptide (1)..(89): Ceres Seq. ID no. 12332474
MMHDKGIQSSIRHDLQAFKDRDPACLSYSSAILHLKGYHALQAYRVAHKLWNEGRKLLALALQSRISEVVGDRCLLVESCWSCIFELNV

SEQ ID NO: 26914 - protein, 88 aa, Arabidopsis thaliana
  peptide (1)..(88): Ceres Seq. ID no. 12332475
MHDKGIQSSIRHDLQAFKDRDPACLSYSSAILHLKGYHALQAYRVAHKLWNEGRKLLALALQSRISEVVGDRCLLVESCWSCIFELNV

SEQ ID NO: 26915 - DNA, 1325 bp, Arabidopsis thaliana
  misc_feature (1)..(1325): Ceres Seq. ID no. 13488426
  misc_feature (1)..(1325): Ortholog of  Ceres SEQ ID NO 14304475 as cited in SEQ ID NO 53438
  misc_feature (1)..(1325): Ortholog of  Ceres SEQ ID NO 15170555 as cited in SEQ ID NO 55313
  misc_feature (1)..(1325): Ortholog of  Ceres SEQ ID NO 15224695 as cited in SEQ ID NO 65418
atgtttaacgttacactcattaagatcgtaccttagggaaaaaaaactcaagagacaaaaaaaaaaggaaggcgcgtcagtgatggagaagattattgacgtagcttatggcgcatcagtgaaggtgggtttgacgttgttggagatgaatctgttgccggatattgtcattaggcggctcacacgtctgcttctggccggtcgtctccgttccggttacaaacccacggcggagatgcaactctccgatctcctccgttttgttgactctataaagaagatgcctatagctatccataccgagaagccaaagactcaacactatgaattaccgacagctttcttcgaacttgtccttggaagaaacatgaagtacagctcttgttacttctcaaacgattcaagtagcttagaagatgcagaggaagcaattttggctctttattgtgaaagagctaaagtggaagatggtcaaagtgttcttgatatcggatgtggctggggatccttgtctttgtacattgcacgcaagtacagcaaatgcaagttaaccggtatctgcaactccaaaacgcagaaagcatttatcgatgagaaatgccggaaactcgggcttcagaatatcgaaatcattgtcgcggatattagcacttttgagcatgaagggacatacgatcggatattctccatcgagatgtttgagcatatgaaaaactatggagagctactaaagaagataggaaagtggatgaaggaagatagtcttctgtttgttcactatttctgccataagacatttgcttaccactttgaggatgtgaatgacgatgactggatcacaagacacttcttcagcggaggaacaatgccatcagcagatcttctgctatattttcaagaaaatgtttcgattgtggatcattggctcgtaagcgggacgcattatgcaaaaacaagtgaagagtggctaaaaagaatggataaggagatagttgcagtaaaaaaaatcatggaagtgacttatgggaaagaagaagcagtgaagtggatggtttactggagaaccttcttcatcgcggttgctgagcttttcggatacaacaatggagaagagtggatggttgcacacttcctcttcaagaagaaatgatgatgatttctttatttttcttccaatttttcaataaagaatacaacaatcccattctactttgtattctatgatgttatggtttcataccaaaggagtttgttcaatctttttaaagtgacaatgttatctcgaaaaacatggggatcaagtatcatgaactggattcttttgt

SEQ ID NO: 26916 - protein, 382 aa, Arabidopsis thaliana
  peptide (1)..(382): Ceres Seq. ID no. 13488427
CLTLHSLRSYLREKKLKRQKKKEGASVMEKIIDVAYGASVKVGLTLLEMNLLPDIVIRRLTRLLLAGRLRSGYKPTAEMQLSDLLRFVDSIKKMPIAIHTEKPKTQHYELPTAFFELVLGRNMKYSSCYFSNDSSSLEDAEEAILALYCERAKVEDGQSVLDIGCGWGSLSLYIARKYSKCKLTGICNSKTQKAFIDEKCRKLGLQNIEIIVADISTFEHEGTYDRIFSIEMFEHMKNYGELLKKIGKWMKEDSLLFVHYFCHKTFAYHFEDVNDDDWITRHFFSGGTMPSADLLLYFQENVSIVDHWLVSGTHYAKTSEEWLKRMDKEIVAVKKIMEVTYGKEEAVKWMVYWRTFFIAVAELFGYNNGEEWMVAHFLFKKK

SEQ ID NO: 26917 - protein, 355 aa, Arabidopsis thaliana
  peptide (1)..(355): Ceres Seq. ID no. 13488428
MEKIIDVAYGASVKVGLTLLEMNLLPDIVIRRLTRLLLAGRLRSGYKPTAEMQLSDLLRFVDSIKKMPIAIHTEKPKTQHYELPTAFFELVLGRNMKYSSCYFSNDSSSLEDAEEAILALYCERAKVEDGQSVLDIGCGWGSLSLYIARKYSKCKLTGICNSKTQKAFIDEKCRKLGLQNIEIIVADISTFEHEGTYDRIFSIEMFEHMKNYGELLKKIGKWMKEDSLLFVHYFCHKTFAYHFEDVNDDDWITRHFFSGGTMPSADLLLYFQENVSIVDHWLVSGTHYAKTSEEWLKRMDKEIVAVKKIMEVTYGKEEAVKWMVYWRTFFIAVAELFGYNNGEEWMVAHFLFKKK

SEQ ID NO: 26918 - protein, 334 aa, Arabidopsis thaliana
  peptide (1)..(334): Ceres Seq. ID no. 13488429
MNLLPDIVIRRLTRLLLAGRLRSGYKPTAEMQLSDLLRFVDSIKKMPIAIHTEKPKTQHYELPTAFFELVLGRNMKYSSCYFSNDSSSLEDAEEAILALYCERAKVEDGQSVLDIGCGWGSLSLYIARKYSKCKLTGICNSKTQKAFIDEKCRKLGLQNIEIIVADISTFEHEGTYDRIFSIEMFEHMKNYGELLKKIGKWMKEDSLLFVHYFCHKTFAYHFEDVNDDDWITRHFFSGGTMPSADLLLYFQENVSIVDHWLVSGTHYAKTSEEWLKRMDKEIVAVKKIMEVTYGKEEAVKWMVYWRTFFIAVAELFGYNNGEEWMVAHFLFKKK

SEQ ID NO: 26919 - DNA, 1154 bp, Arabidopsis thaliana
  misc_feature (1)..(1154): Ceres Seq. ID no. 12385275
  misc_feature (1)..(1154): Ortholog of  Ceres SEQ ID NO 14312711 as cited in SEQ ID NO 1401
  misc_feature (1)..(1154): Ortholog of  Ceres SEQ ID NO 13586635 as cited in SEQ ID NO 14217
  misc_feature (1)..(1154): Ortholog of  Ceres SEQ ID NO 15170220 as cited in SEQ ID NO 55383
  misc_feature (1)..(1154): Ortholog of  Ceres SEQ ID NO 14304198 as cited in SEQ ID NO 56479
  misc_feature (1)..(1154): Ortholog of  Ceres SEQ ID NO 14316543 as cited in SEQ ID NO 57118
  misc_feature (1)..(1154): Ortholog of  Ceres SEQ ID NO 12616285 as cited in SEQ ID NO 63483
acacatcttaaaaagtaaaaacacattcatctatccaacaaaaaaaaagaaaggagaaatggaaggaatcgatcatagaatggtgagtgtcaatggcataacaatgcacattgccgagaaaggtcccaaagaaggacctgtggtgcttctcctccatggattccctgatctctggtacacgtggcgtcaccagattagtgggttatcatctctaggttaccgcgctgtagctccagacctccgaggctacggagactctgattcgccggagtctttctccgagtacacgtgtcttaacgtcgttggggacctcgtagctcttctggacagtgttgctggaaatcaagagaaggtgtttctggtcggtcatgattggggagccattatcggatggtttctctgtttgtttcgacctgaaaagattaacggctttgtgtgtttgagtgtgccgtatagatcaagaaaccctaaagtcaagcccgttcaagggttcaaggctgtatttggagatgattactacatttgtagatttcaggaaccggggaagattgaaggagagattgcaagtgcagatccaagaatatttctgaggaacctcttcacagggaggacactcggtccgccgattttacctaaggataatccctttggggaaaaacctaaccctaatagcgaaaacattgaattgcctgaatggttttctaagaaagatctcgatttctatgtctccaaattcgagaaggcaggatttaccggtggattgaactactacagagccatggatctgaattgggagctcactgcaccatggaccggagctaagattcaagttccagtgaagttcatgacaggtgacttcgacatggtgtacaccacaccagggatgaaagagtacattcacggtggtggatttgctgcagatgttccaactcttcaagagatagtggtgattgaagatgctggtcacttcgttaaccaagagaaacctcaagaggtcactgctcacatcaatgacttcttcaccaagcttcgggacaacaacaaaagcttttagagttctcgtttggttctattatgttggctctcaaaacaagttggttcttgcatgtgttgtttcgacaagattttgaataagacttggcattatgaagctc

SEQ ID NO: 26920 - protein, 350 aa, Arabidopsis thaliana
  peptide (1)..(350): Ceres Seq. ID no. 12385276
HILKSKNTFIYPTKKKKGEMEGIDHRMVSVNGITMHIAEKGPKEGPVVLLLHGFPDLWYTWRHQISGLSSLGYRAVAPDLRGYGDSDSPESFSEYTCLNVVGDLVALLDSVAGNQEKVFLVGHDWGAIIGWFLCLFRPEKINGFVCLSVPYRSRNPKVKPVQGFKAVFGDDYYICRFQEPGKIEGEIASADPRIFLRNLFTGRTLGPPILPKDNPFGEKPNPNSENIELPEWFSKKDLDFYVSKFEKAGFTGGLNYYRAMDLNWELTAPWTGAKIQVPVKFMTGDFDMVYTTPGMKEYIHGGGFAADVPTLQEIVVIEDAGHFVNQEKPQEVTAHINDFFTKLRDNNKSF

SEQ ID NO: 26921 - protein, 331 aa, Arabidopsis thaliana; identical to SEQ ID NO: 21476
  peptide (1)..(331): Ceres Seq. ID no. 12385277

SEQ ID NO: 26922 - protein, 324 aa, Arabidopsis thaliana; identical to SEQ ID NO: 21477
  peptide (1)..(324): Ceres Seq. ID no. 12385278

SEQ ID NO: 26923 - DNA, 1034 bp, Arabidopsis thaliana
  misc_feature (1)..(1034): Ceres Seq. ID no. 12576332
  misc_feature (1)..(1034): Ortholog of  Ceres SEQ ID NO 14314174 as cited in SEQ ID NO 54350
  misc_feature (1)..(1034): Ortholog of  Ceres SEQ ID NO 15224566 as cited in SEQ ID NO 55626
  misc_feature (1)..(1034): Ortholog of  Ceres SEQ ID NO 13502979 as cited in SEQ ID NO 69150
agatttggacagaggtattttttgatccgattcttacgaatcctgaatcttcctcgtagattaatcgatcgatcggttcttaattcgcggaaaattgtttcagtaacctgtgatcgtgtcggttggggtagaagagatcgaagtgggagcaaaatcatgatgaatcggctattcgggaaacccaagcaggaggctaatgctctccaaactttagacaagcttaacgagacgcttgagatgctagagaaaaaggagaaagtactcttgaagaaagctggtgcagaggttgagaaggcaaaagaatactcccgggctaagaacaaacgagcggctatacagtgtttgaaaaggaagaggttatatgagggacaagtcgaacagcttgggaatttccagctccgtattcatgatcaaatgattatgttagaaggtgcaaaagcaacaaccgaaactgttgatgcattgaggagtggagcttctgcaatgaaggcaatgcagaaagcaacaaatattgatgatgtggataagaccatggacgagatcaatgagcaaaccgagaacatgaaacagatccaagaagcattggcgactccaatgggggcagcggctgacttcgacgaggatgagcttgcagcagagcttgatgaactagaaagtgaagagcttgaatcgcaacttctacagccggcaacaacagctcctccattgccttcagttccagtgcctgcagggcgtcaaccggctcgtcctgttccccagaagcggactgctgaggaagaagaactcgctgcattacaggctgagatggccctctaaggttattcacctctccgagcagagacatgtatgcattgatagacacgaacagacgatgtatataaggatctgaatcagattaattcggagcgaaaaacttttataatccccgtcgttaatgttatctgcaatttgagtgttcttcacataatttatcttttgtaatttttgtatctttttatgacactttttcctttggttaataatcactttactcc

SEQ ID NO: 26924 - protein, 271 aa, Arabidopsis thaliana
  peptide (1)..(271): Ceres Seq. ID no. 12576333
RFGQRYFLIRFLRILNLPRRLIDRSVLNSRKIVSVTCDRVGWGRRDRSGSKIMMNRLFGKPKQEANALQTLDKLNETLEMLEKKEKVLLKKAGAEVEKAKEYSRAKNKRAAIQCLKRKRLYEGQVEQLGNFQLRIHDQMIMLEGAKATTETVDALRSGASAMKAMQKATNIDDVDKTMDEINEQTENMKQIQEALATPMGAAADFDEDELAAELDELESEELESQLLQPATTAPPLPSVPVPAGRQPARPVPQKRTAEEEELAALQAEMAL

SEQ ID NO: 26925 - protein, 219 aa, Arabidopsis thaliana
  peptide (1)..(219): Ceres Seq. ID no. 12576334
MMNRLFGKPKQEANALQTLDKLNETLEMLEKKEKVLLKKAGAEVEKAKEYSRAKNKRAAIQCLKRKRLYEGQVEQLGNFQLRIHDQMIMLEGAKATTETVDALRSGASAMKAMQKATNIDDVDKTMDEINEQTENMKQIQEALATPMGAAADFDEDELAAELDELESEELESQLLQPATTAPPLPSVPVPAGRQPARPVPQKRTAEEEELAALQAEMAL

SEQ ID NO: 26926 - protein, 218 aa, Arabidopsis thaliana
  peptide (1)..(218): Ceres Seq. ID no. 12576335
MNRLFGKPKQEANALQTLDKLNETLEMLEKKEKVLLKKAGAEVEKAKEYSRAKNKRAAIQCLKRKRLYEGQVEQLGNFQLRIHDQMIMLEGAKATTETVDALRSGASAMKAMQKATNIDDVDKTMDEINEQTENMKQIQEALATPMGAAADFDEDELAAELDELESEELESQLLQPATTAPPLPSVPVPAGRQPARPVPQKRTAEEEELAALQAEMAL

SEQ ID NO: 26927 - DNA, 965 bp, Arabidopsis thaliana
  misc_feature (1)..(965): Ceres Seq. ID no. 12370710
  misc_feature (1)..(965): Ortholog of  Ceres SEQ ID NO 14306062 as cited in SEQ ID NO 57524
aacaacaaaacctctctctctttcactttctctctaaaaaccagaaaaaaaaaaaatggagctttcatcgagaaagccttatttcattgaggaagaagaagaagagaatttggcttcttctttatcagaaatggaagctgggttttctggtaacaataataatagtaataaccatggaaatccccaaaacggtgtcgtttcttcaagccgtttctcttacggtagattaaacagtcttaggaacagtcagagttattattacaatcaatactctgtttcgtctccgagatctgttgtgtctggaagatttcatgatttcagattcgatattcaacaacctcatttcttggactcgtgtttcctctgtaagaaacctcttggtgataacagagacatctacatgtacagaggagatacaccgttttgcagtgaagagtgtagacaagaacagatagagagagatgaagcaaaagagaagaaacagaatctgtctcattcggtgaaatcagttatgcggaggaaagaacaatcttcaccaactagatctcgtgattatgcttttcacaatggaactgttgctgctgcttaattaaaaatagctgggaactttgagaattattataattaattaggttaagaaaaaaataagctatattgtatctaacgctatgaagctggttttggatcctctctctttctctcgagatcttaaggatcttttaaaactttagcttcaagtcttgggaaaaagatgaagaagctaaagatcctttaattttcttttctttttttgtaagaaaaaaatagtttcttgacatgaaattttgggagtatgagaagagaaaatgtaaatgcctatgtgaattataatagtccatggcatgtttgagttatattttttcttttgtttttagatttcggtatcaatgtctttcgagggatatacagatgttaaatcaaatttt

SEQ ID NO: 26928 - protein, 177 aa, Arabidopsis thaliana
  peptide (1)..(177): Ceres Seq. ID no. 12370711
MELSSRKPYFIEEEEEENLASSLSEMEAGFSGNNNNSNNHGNPQNGVVSSSRFSYGRLNSLRNSQSYYYNQYSVSSPRSVVSGRFHDFRFDIQQPHFLDSCFLCKKPLGDNRDIYMYRGDTPFCSEECRQEQIERDEAKEKKQNLSHSVKSVMRRKEQSSPTRSRDYAFHNGTVAAA

SEQ ID NO: 26929 - protein, 152 aa, Arabidopsis thaliana
  peptide (1)..(152): Ceres Seq. ID no. 12370712
MEAGFSGNNNNSNNHGNPQNGVVSSSRFSYGRLNSLRNSQSYYYNQYSVSSPRSVVSGRFHDFRFDIQQPHFLDSCFLCKKPLGDNRDIYMYRGDTPFCSEECRQEQIERDEAKEKKQNLSHSVKSVMRRKEQSSPTRSRDYAFHNGTVAAA

SEQ ID NO: 26930 - DNA, 1005 bp, Arabidopsis thaliana
  misc_feature (1)..(1005): Ceres Seq. ID no. 12389220
  misc_feature (1)..(1005): Ortholog of  Ceres SEQ ID NO 13581889 as cited in SEQ ID NO 50900
  misc_feature (1)..(1005): Ortholog of  Ceres SEQ ID NO 13581902 as cited in SEQ ID NO 52223
atgatttgtttgtaattagatcaggggtttaggtctttccattactttttaatgttttttctgttactgtctccgcgatctgattttacgacaatagagtttcgggttttgtcccattccagtttgaaaataaaggtccgtcttttaagtttgctggatcgataaacctgtgaagattgagtctagtcgatttattggatgatccattcttcatcgtttttttcttgcttcgaagttctgtataaccagatttgtctgtgtgcgattgtcattacctagccgtgtatcgagaactagggttttcgagtcaattttgccccttttggttatatctggttcgataacgattcatctggattagggttttaagtgatggctcgtaccaagcaaaccgctcgtaagtccaccggaggtaaagctccaaggaagcaacttgctactaaggctgctcgtaaatctgcaccaactactggtggagtcaagaaaccacatcgttaccgtcctggaactgttgctctccgtgaaatccgtaagtaccagaagagtactgagttgcttatcaggaaactgccatttcagaggctagtccgtgagattgctcaagatttcaagactgatttgcgtttccagagccatgctgtcttagctctccaggaagctgcagaagcatatcttgttggtctctttgaagacactaacctttgtgccattcatgccaagcgtgtgaccataatgcccaaagacattcagctcgctcgtcgtatcagaggtgaacgcgcttaagccaaccaagaatccgagatttggttcatgtagtttttgttttttatgaaagcaagatcttaattgctgtgttttttaaatctctgggtatgtagtagtaagagtagtaagaagtctgcaatctaagaatgttgtgttctttaagcttattattatgtgtgttgcgaactctttttaactcttttgttaaattcttatgttttcttaactcgtttgttcgtc

SEQ ID NO: 26931 - protein, 136 aa, Arabidopsis thaliana; identical to SEQ ID NO: 26403
  peptide (1)..(136): Ceres Seq. ID no. 12389221

SEQ ID NO: 26932 - DNA, 1488 bp, Arabidopsis thaliana
  misc_feature (1)..(1488): Ceres Seq. ID no. 12324052
  misc_feature (1)..(1488): Ortholog of  Ceres SEQ ID NO 13594104 as cited in SEQ ID NO 55505
aaacccaacgataaaacgcaggagccatagaagaataacagataaaactctctgtgtgagtgagtgagactcaaccatggcgtctttggctcagcaattctcgggattgagatgttccccactctcttcttcttctaggttatcgaggagagcttcgaagaactttccccagaacaaatctgcctctgtttctccgactattgtcgccgcggttgcaatgtctagcggtcaaacaaaggagcgtcttgagctgaagaagatgttcgaagatgcttatgaacgatgtagaacttctcctatggaaggtgttgctttcaccgtcgacgatttcgctgctgctattgaacaatacgacttcaattccgaaatcggcactagggtaaaaggaacagtgttcaagactgatgcaaatggtgcattagttgacatttctgcaaagtcatcggcttacttgtcggtagaacaagcgtgtattcatagaattaagcatgtggaagaagctggtattgtacctggtatggtggaagagtttgtcatcattggtgaaaatgaaagtgatgacagtttgctattgagcttaaggaatattcaatacgaacttgcttgggaacgttgcaggcagcttcaggctgaggatgttattgtcaaggctaaggttattggtgctaacaaaggtggattggttgctcttgtggaaggtcttcgtggatttgtgcccttttcgcagatatcatcgaaagcagcagctgaagagcttcttgaaaaagaaatacctcttaagtttgtggaggttgatgaggaacaaacaaagcttgtcctcagcaaccgtaaagctgtagcagatagccaagctcagcttggaattggatctgtggtcctcggagttgttcagagcttgaaaccttatggtgccttcattgacattggtggaatcaatgggcttcttcatgtcagtcagataagtcatgaccgtgtctcagatatcgcaactgttcttcagcctggtgacactttgaaggttatgatattgagtcacgaccgtgacagaggaagagtaagtctctccacaaagaagctggagccaacacctggtgatatgattcgtaacccaaaacttgtgttcgagaaggctgaggagatggctcagacattcagacagagaattgcgcaagcagaagccatggctcgtgcagacatgcttcgcttccaacctgagagtggactgacgctgagttctgacgggatactaggaccactcggatctgagttaccagatgatggcgtagatctaacggtcgacgacattccttctgcagttgatatttagattctaaagctttagtgtattttttcatacacaaaaacacctccttgagcttaattgaatatgtagtttacttcctacaagacattttatcatgtgtactttgtcttttgtaatcgatatgttctgttacaatgtcaagaaaccaaagaaaggctttgccc

SEQ ID NO: 26933 - protein, 416 aa, Arabidopsis thaliana
  peptide (1)..(416): Ceres Seq. ID no. 12324053
MASLAQQFSGLRCSPLSSSSRLSRRASKNFPQNKSASVSPTIVAAVAMSSGQTKERLELKKMFEDAYERCRTSPMEGVAFTVDDFAAAIEQYDFNSEIGTRVKGTVFKTDANGALVDISAKSSAYLSVEQACIHRIKHVEEAGIVPGMVEEFVIIGENESDDSLLLSLRNIQYELAWERCRQLQAEDVIVKAKVIGANKGGLVALVEGLRGFVPFSQISSKAAAEELLEKEIPLKFVEVDEEQTKLVLSNRKAVADSQAQLGIGSVVLGVVQSLKPYGAFIDIGGINGLLHVSQISHDRVSDIATVLQPGDTLKVMILSHDRDRGRVSLSTKKLEPTPGDMIRNPKLVFEKAEEMAQTFRQRIAQAEAMARADMLRFQPESGLTLSSDGILGPLGSELPDDGVDLTVDDIPSAVDI

SEQ ID NO: 26934 - protein, 369 aa, Arabidopsis thaliana
  peptide (1)..(369): Ceres Seq. ID no. 12324054
MSSGQTKERLELKKMFEDAYERCRTSPMEGVAFTVDDFAAAIEQYDFNSEIGTRVKGTVFKTDANGALVDISAKSSAYLSVEQACIHRIKHVEEAGIVPGMVEEFVIIGENESDDSLLLSLRNIQYELAWERCRQLQAEDVIVKAKVIGANKGGLVALVEGLRGFVPFSQISSKAAAEELLEKEIPLKFVEVDEEQTKLVLSNRKAVADSQAQLGIGSVVLGVVQSLKPYGAFIDIGGINGLLHVSQISHDRVSDIATVLQPGDTLKVMILSHDRDRGRVSLSTKKLEPTPGDMIRNPKLVFEKAEEMAQTFRQRIAQAEAMARADMLRFQPESGLTLSSDGILGPLGSELPDDGVDLTVDDIPSAVDI

SEQ ID NO: 26935 - protein, 355 aa, Arabidopsis thaliana
  peptide (1)..(355): Ceres Seq. ID no. 12324055
MFEDAYERCRTSPMEGVAFTVDDFAAAIEQYDFNSEIGTRVKGTVFKTDANGALVDISAKSSAYLSVEQACIHRIKHVEEAGIVPGMVEEFVIIGENESDDSLLLSLRNIQYELAWERCRQLQAEDVIVKAKVIGANKGGLVALVEGLRGFVPFSQISSKAAAEELLEKEIPLKFVEVDEEQTKLVLSNRKAVADSQAQLGIGSVVLGVVQSLKPYGAFIDIGGINGLLHVSQISHDRVSDIATVLQPGDTLKVMILSHDRDRGRVSLSTKKLEPTPGDMIRNPKLVFEKAEEMAQTFRQRIAQAEAMARADMLRFQPESGLTLSSDGILGPLGSELPDDGVDLTVDDIPSAVDI

SEQ ID NO: 26936 - DNA, 1193 bp, Arabidopsis thaliana
  misc_feature (1)..(1193): Ceres Seq. ID no. 12422204
  misc_feature (1)..(1193): Ortholog of  Ceres SEQ ID NO 13579918 as cited in SEQ ID NO 64644
  misc_feature (1)..(1193): Ortholog of  Ceres SEQ ID NO 13654122 as cited in SEQ ID NO 68192
aactaatctctctctccctctctttcttcttcttccacaaatggcttcttgcgtcaccggaacagaggcagcaatcagagcagcggcatgtagagacggcgaagaagcctctcatctaaagatagtcgccgtcttcgccatctttctcacaagcgttttcggagtttggggaccagttttactcgctaaatactttcatggtaaacctctgtacgataaagcaattcttgtgataaagtgtttcgccgccggcgtgattctctcgacgtctttagtccacgttttaccggaagcgtttgagtcactcggctgattgccaagtgtcgtcacgtcatccatggaaagattttccgtttgctggtttagttacgatgatcggagctataacggctttgttggttgatttaacggcgagtgaacatatgggacacggtggtggtggtggtggtgacggagggatggagtatatgccggtgggtaaggcggttggagggttagaaatgaaagaaggaaagtgtggggctgatttggaaatacaagaaaatagtgaggaggaaattgtgaagatgaaacaaagattagtgtcacaagttcttgaaatagggattatatttcattcggtgataattggagtaacaatgggaatgtcacaaaataagtgtaccattagacctttgattgctgcgctttcttttcatcagatttttgaaggtttgggtcttggtggttgcattgctcaggctgggtttaaggcagggacagtggtgtatatgtgcttaatgttcgcggtaacaacgccactcgggattgtactagggatggtgatatttgcagcgaccgggtacgatgatcagaacccgaatgcattgataatggagggtttattgggatcattctcttcaggtattctaatatacatggccttggttgacctaattgcattggatttcttccataacaagatgctgacgacttgcggtgaatcgggttctcgcctcaagaagctttgttttgtggctttggttttaggttctgcctctatgtcactacttgctctttgggcttagacaaaaaaaaattgaggttatatactaatttggctacaggaaatattatgaatacgtaaacggctaaacctgttttaacatatttgaactttttactttataatatatctaattatcatttcttcg

SEQ ID NO: 26937 - protein, 231 aa, Arabidopsis thaliana
  peptide (1)..(231): Ceres Seq. ID no. 12422205
MIGAITALLVDLTASEHMGHGGGGGGDGGMEYMPVGKAVGGLEMKEGKCGADLEIQENSEEEIVKMKQRLVSQVLEIGIIFHSVIIGVTMGMSQNKCTIRPLIAALSFHQIFEGLGLGGCIAQAGFKAGTVVYMCLMFAVTTPLGIVLGMVIFAATGYDDQNPNALIMEGLLGSFSSGILIYMALVDLIALDFFHNKMLTTCGESGSRLKKLCFVALVLGSASMSLLALWA

SEQ ID NO: 26938 - protein, 214 aa, Arabidopsis thaliana
  peptide (1)..(214): Ceres Seq. ID no. 12422206
MGHGGGGGGDGGMEYMPVGKAVGGLEMKEGKCGADLEIQENSEEEIVKMKQRLVSQVLEIGIIFHSVIIGVTMGMSQNKCTIRPLIAALSFHQIFEGLGLGGCIAQAGFKAGTVVYMCLMFAVTTPLGIVLGMVIFAATGYDDQNPNALIMEGLLGSFSSGILIYMALVDLIALDFFHNKMLTTCGESGSRLKKLCFVALVLGSASMSLLALWA

SEQ ID NO: 26939 - protein, 202 aa, Arabidopsis thaliana
  peptide (1)..(202): Ceres Seq. ID no. 12422207
MEYMPVGKAVGGLEMKEGKCGADLEIQENSEEEIVKMKQRLVSQVLEIGIIFHSVIIGVTMGMSQNKCTIRPLIAALSFHQIFEGLGLGGCIAQAGFKAGTVVYMCLMFAVTTPLGIVLGMVIFAATGYDDQNPNALIMEGLLGSFSSGILIYMALVDLIALDFFHNKMLTTCGESGSRLKKLCFVALVLGSASMSLLALWA

SEQ ID NO: 26940 - DNA, 1382 bp, Arabidopsis thaliana
  misc_feature (1)..(1382): Ceres Seq. ID no. 12384983
  misc_feature (1)..(1382): Ortholog of  Ceres SEQ ID NO 13639246 as cited in SEQ ID NO 56576
aataataattagacttctgcactttctcacgaacctctctgtctcgtccattacttaaaaaccaaatctttcatcatcttccttcaccagttgactctctttcaatctatctctgaatctctcactctcctacccgaaaaccatgaactccaacgaccaggatccgattccgttcagacccgaagacaacaacttctccggttccaaaacctacgccatgagcggcaaaatcatgctaagtgcaatagtaatcctcttcttcgtcgtcattttaatggtcttcctccatctttacgctcgttggtatctcctccgtgctcgtagacgtcatctccgtcgtcgtagccgtaaccgtcgcgctacgatggttttcttcaccgctgatccttccaccgccgcaacttccgtcgtcgcttcacgtggacttgatccaaacgttattaaatctcttcctgttttcactttctccgacgagactcataaagatccgatcgaatgcgccgtttgtttatcggaattcgaagagagcgagacgggtcgggttttgcccaattgtcaacatacttttcatgttgattgtattgatatgtggtttcattctcattccacttgtcctctttgtcgatctctcgttgagtctctcgccgggattgaatcaacggcggcggcgagggagagggaagttgtgattgcggttgattctgatccggttttggtaattgaaccgagttctagctctggattgacggatgaaccacatggatctggatcttctcagatgctgagggaagattccgggagaaaaccggcggcgattgaggttccgaggaggacttttagcgagtttgaagatgagttgactcggagagactcgccggcgagtcagtcgtttaggtctccgatgagtcggatgttatctttcactcggatgttgagtagagatagaagaagcgcttcgtctcctatcgccggagctccgccgctatcgccgacgttaagctgccggatacagatgaccgagtcagatatcgaacggggaggagaagagagtaggtgacttgtcacgtgttggtgtctgattggtttaatgttaaccgggagtaaaaaaaggaattactacaagtcaacaggcttttgtctaggtgttgatttcggcgcccaaggacacgtggcgtaaactgagcttccaggaatcaatattcaccgtctattatgattagataggttagatagatttgtgtaacgatgtacaaagtcatctacaatattgaatctatttccatttattttaccatattctttttttttataattttcgaagttctacaaactcttttatgtaaaacacaatccaatggtcataattgtgataaagactttgc

SEQ ID NO: 26941 - protein, 304 aa, Arabidopsis thaliana
  peptide (1)..(304): Ceres Seq. ID no. 12384984
MNSNDQDPIPFRPEDNNFSGSKTYAMSGKIMLSAIVILFFVVILMVFLHLYARWYLLRARRRHLRRRSRNRRATMVFFTADPSTAATSVVASRGLDPNVIKSLPVFTFSDETHKDPIECAVCLSEFEESETGRVLPNCQHTFHVDCIDMWFHSHSTCPLCRSLVESLAGIESTAAAREREVVIAVDSDPVLVIEPSSSSGLTDEPHGSGSSQMLREDSGRKPAAIEVPRRTFSEFEDELTRRDSPASQSFRSPMSRMLSFTRMLSRDRRSASSPIAGAPPLSPTLSCRIQMTESDIERGGEESR

SEQ ID NO: 26942 - protein, 279 aa, Arabidopsis thaliana
  peptide (1)..(279): Ceres Seq. ID no. 12384985
MSGKIMLSAIVILFFVVILMVFLHLYARWYLLRARRRHLRRRSRNRRATMVFFTADPSTAATSVVASRGLDPNVIKSLPVFTFSDETHKDPIECAVCLSEFEESETGRVLPNCQHTFHVDCIDMWFHSHSTCPLCRSLVESLAGIESTAAAREREVVIAVDSDPVLVIEPSSSSGLTDEPHGSGSSQMLREDSGRKPAAIEVPRRTFSEFEDELTRRDSPASQSFRSPMSRMLSFTRMLSRDRRSASSPIAGAPPLSPTLSCRIQMTESDIERGGEESR

SEQ ID NO: 26943 - protein, 274 aa, Arabidopsis thaliana
  peptide (1)..(274): Ceres Seq. ID no. 12384986
MLSAIVILFFVVILMVFLHLYARWYLLRARRRHLRRRSRNRRATMVFFTADPSTAATSVVASRGLDPNVIKSLPVFTFSDETHKDPIECAVCLSEFEESETGRVLPNCQHTFHVDCIDMWFHSHSTCPLCRSLVESLAGIESTAAAREREVVIAVDSDPVLVIEPSSSSGLTDEPHGSGSSQMLREDSGRKPAAIEVPRRTFSEFEDELTRRDSPASQSFRSPMSRMLSFTRMLSRDRRSASSPIAGAPPLSPTLSCRIQMTESDIERGGEESR

SEQ ID NO: 26944 - DNA, 1222 bp, Arabidopsis thaliana
  misc_feature (1)..(1222): Ceres Seq. ID no. 12333520
  misc_feature (1)..(1222): Ortholog of  Ceres SEQ ID NO 13597019 as cited in SEQ ID NO 64303
  misc_feature (1)..(1222): Ortholog of  Ceres SEQ ID NO 13654191 as cited in SEQ ID NO 68235
  misc_feature (1)..(1222): Ortholog of  Ceres SEQ ID NO 15179513 as cited in SEQ ID NO 0
aaaattttgttttctctccttctctctccctctctcggtttctcaatctttcttattttttccataattctgaatttttcttttcaacaatctccggctaaaaaatgcccttagaggctgtcgtatacccgcaagatccattcggatatctctccaattgcaaagattttatgttccacgacttatactctcaagaagagttcgtagctcaagatacgaagaacaacattgataagttagggcatgaacagagctttgtggaacaaggtaaggaggacgatcatcaatggcgagactatcatcagtatcctttgttgatcccttcgttgggagaagagcttggtcttaccgccattgatgtggagagtcatcctcctccacagcaccggaggaagaggaggagaacgagaaactgcaagaacaaggaagagatcgagaaccagagaatgactcacatcgccgtcgagagaaatcgccggaaacagatgaacgagtatctggctgtgctccgttctctaatgccgtcgtcgtatgctcaaagaggagatcaagcgtcgatagtaggaggagctataaactacgtgaaggagttagagcatattttacaatctatggagccgaagagaactaggactcatgatcccaaaggagacaagactagcactagctcgttagtgggtccattcacagattttttcagcttcccacaatattctacaaagtcatcatcagatgtaccggaaagctcatcttcaccggcggagatagaggttacggtggcagaaagccatgcgaacatcaagataatgacgaagaagaaaccgaggcagcttcttaagctcataacttctttacaaagcctaaggctcactcttcttcatctcaatgtcaccactctccacaactccattctctactccatcagcgtcagggttgaagaaggaagccaactgaataccgtggacgacattgcaacagctttgaatcaaaccataaggaggattcaagaagagacataattcagcaaatagattataattaacttgttttatttttattttattttgaaataactgaaatcagttttctaatttatgtattttttttttcactattcctctaatcctccctatgtaagttgcatttttgtctcttgtaatgaatcaatggtcataaagatctgaacaaaaaaattgaataaaagaaaatggtttaagtcggc

SEQ ID NO: 26945 - protein, 304 aa, Arabidopsis thaliana
  peptide (1)..(304): Ceres Seq. ID no. 12333521
MPLEAVVYPQDPFGYLSNCKDFMFHDLYSQEEFVAQDTKNNIDKLGHEQSFVEQGKEDDHQWRDYHQYPLLIPSLGEELGLTAIDVESHPPPQHRRKRRRTRNCKNKEEIENQRMTHIAVERNRRKQMNEYLAVLRSLMPSSYAQRGDQASIVGGAINYVKELEHILQSMEPKRTRTHDPKGDKTSTSSLVGPFTDFFSFPQYSTKSSSDVPESSSSPAEIEVTVAESHANIKIMTKKKPRQLLKLITSLQSLRLTLLHLNVTTLHNSILYSISVRVEEGSQLNTVDDIATALNQTIRRIQEET

SEQ ID NO: 26946 - protein, 282 aa, Arabidopsis thaliana
  peptide (1)..(282): Ceres Seq. ID no. 12333522
MFHDLYSQEEFVAQDTKNNIDKLGHEQSFVEQGKEDDHQWRDYHQYPLLIPSLGEELGLTAIDVESHPPPQHRRKRRRTRNCKNKEEIENQRMTHIAVERNRRKQMNEYLAVLRSLMPSSYAQRGDQASIVGGAINYVKELEHILQSMEPKRTRTHDPKGDKTSTSSLVGPFTDFFSFPQYSTKSSSDVPESSSSPAEIEVTVAESHANIKIMTKKKPRQLLKLITSLQSLRLTLLHLNVTTLHNSILYSISVRVEEGSQLNTVDDIATALNQTIRRIQEET

SEQ ID NO: 26947 - protein, 190 aa, Arabidopsis thaliana
  peptide (1)..(190): Ceres Seq. ID no. 12333523
MTHIAVERNRRKQMNEYLAVLRSLMPSSYAQRGDQASIVGGAINYVKELEHILQSMEPKRTRTHDPKGDKTSTSSLVGPFTDFFSFPQYSTKSSSDVPESSSSPAEIEVTVAESHANIKIMTKKKPRQLLKLITSLQSLRLTLLHLNVTTLHNSILYSISVRVEEGSQLNTVDDIATALNQTIRRIQEET

SEQ ID NO: 26948 - DNA, 1821 bp, Arabidopsis thaliana
  misc_feature (1)..(1821): Ceres Seq. ID no. 12738467
  misc_feature (1)..(1821): Ortholog of  Ceres SEQ ID NO 13584573 as cited in SEQ ID NO 60711
  misc_feature (1)..(1821): Ortholog of  Ceres SEQ ID NO 15180548 as cited in SEQ ID NO 0
aaggtgaccttcgtctttggttgaccatcaaaaactacaacgctctttctccgtaggaaaggggaagcaaataaattatcgaagcccactggtttcggagctgatcggtctctatttctctcttcatacatatctcaagcagataaagttgatcggatactagaatgggaggaggatttagagttttgcatttggtgaggccattcttggcttttctgcctgaggttcagagtgctgataggaaggttccattcagagagaaggttatctacactgtcatctctctcttcatctttcttgtctgcagtcagcttcctctttatggaatccattccaccaccggtgcggatccattctattggatgcgtgtcattcttgcgtccaaccgtggaactgtcatggagctcggtattactcctattgttacatctggacttgtgatgcaactcttggctggttccaagattattgaggttgacaacaatgttcgtgaggatcgtgccctcttgaatggtgctcagaagcttctaggtattctgattgccattggtgaggctgttgcatatgttctttctggaatgtatggtcccgttggacagcttggtgttggaaatgccattctgatcatccttcagcttttctttgctggaatcattgttatctgccttgatgaactccttcagaagggatatggtctcggatcaggaatctcccttttcattgccaccaacatttgtgaaagcattatctggaaggcatttagcccaactaccatcaacaccgggcgtggagctgagtttgaaggtgctgttattgcactgttccatatgctgataaccaagtccaacaaggttgcggctctccgccaagctttctaccggcaaaaccttccaaatgttaccaacttgcttgccacagtcttgatcttcctgattgtgatctacttccaaggtttccgtgtggttttgcctgtgagatcaaagaatgcccgtggacaacagggttcttacccaatcaagctgttctacacctctaacatgcccatcatcctccaatccgccctcgtctcaaatctttacttcatttctcagcttctctaccggaagttcagcggaaatttctttgtaaaccttttgggacaatggaaagaatctgagtacagtggacaatctattccagttagtggtctggcttacctcatcacagctccagcaagtttctctgacatggcagctcacccgttccatgcactgttctacatcgtcttcatgctcactgcttgtgctcttttctcaaagacatggattgaagtctctggatcttctgctagggatgtagctaagcagctaaaggaacaacaaatggtgatgccaggacacagagaatcaaacttacagaaggaactgaacagatacatcccaacagcagcagcttttggaggagtttgtatcggtgcacttaccgttttggctgatttcatgggagccatcgggtcgggaaccggaattctgttggcggtcacgatcatataccagtatttcgagacctttgagaaggaaaaagccagtgaactcggcttcttcgggttctaagttagcttaaagaaggtgtaaactttgcctgaggcaaaaaagcagagcagaagaggctttagcttctgtgcccacctcaaacacagacaatttgtggtggcacttgggttagactacttttttttgttgttgttgaaacgaaattttctctttagtcatttatgtttttttgttactttttacaagttaaaaaacttatgtgatagacgcttttctaatgtatgtttct

SEQ ID NO: 26949 - protein, 475 aa, Arabidopsis thaliana
  peptide (1)..(475): Ceres Seq. ID no. 12738468
MGGGFRVLHLVRPFLAFLPEVQSADRKVPFREKVIYTVISLFIFLVCSQLPLYGIHSTTGADPFYWMRVILASNRGTVMELGITPIVTSGLVMQLLAGSKIIEVDNNVREDRALLNGAQKLLGILIAIGEAVAYVLSGMYGPVGQLGVGNAILIILQLFFAGIIVICLDELLQKGYGLGSGISLFIATNICESIIWKAFSPTTINTGRGAEFEGAVIALFHMLITKSNKVAALRQAFYRQNLPNVTNLLATVLIFLIVIYFQGFRVVLPVRSKNARGQQGSYPIKLFYTSNMPIILQSALVSNLYFISQLLYRKFSGNFFVNLLGQWKESEYSGQSIPVSGLAYLITAPASFSDMAAHPFHALFYIVFMLTACALFSKTWIEVSGSSARDVAKQLKEQQMVMPGHRESNLQKELNRYIPTAAAFGGVCIGALTVLADFMGAIGSGTGILLAVTIIYQYFETFEKEKASELGFFGF

SEQ ID NO: 26950 - protein, 409 aa, Arabidopsis thaliana
  peptide (1)..(409): Ceres Seq. ID no. 12738469
MRVILASNRGTVMELGITPIVTSGLVMQLLAGSKIIEVDNNVREDRALLNGAQKLLGILIAIGEAVAYVLSGMYGPVGQLGVGNAILIILQLFFAGIIVICLDELLQKGYGLGSGISLFIATNICESIIWKAFSPTTINTGRGAEFEGAVIALFHMLITKSNKVAALRQAFYRQNLPNVTNLLATVLIFLIVIYFQGFRVVLPVRSKNARGQQGSYPIKLFYTSNMPIILQSALVSNLYFISQLLYRKFSGNFFVNLLGQWKESEYSGQSIPVSGLAYLITAPASFSDMAAHPFHALFYIVFMLTACALFSKTWIEVSGSSARDVAKQLKEQQMVMPGHRESNLQKELNRYIPTAAAFGGVCIGALTVLADFMGAIGSGTGILLAVTIIYQYFETFEKEKASELGFFGF

SEQ ID NO: 26951 - protein, 397 aa, Arabidopsis thaliana
  peptide (1)..(397): Ceres Seq. ID no. 12738470
MELGITPIVTSGLVMQLLAGSKIIEVDNNVREDRALLNGAQKLLGILIAIGEAVAYVLSGMYGPVGQLGVGNAILIILQLFFAGIIVICLDELLQKGYGLGSGISLFIATNICESIIWKAFSPTTINTGRGAEFEGAVIALFHMLITKSNKVAALRQAFYRQNLPNVTNLLATVLIFLIVIYFQGFRVVLPVRSKNARGQQGSYPIKLFYTSNMPIILQSALVSNLYFISQLLYRKFSGNFFVNLLGQWKESEYSGQSIPVSGLAYLITAPASFSDMAAHPFHALFYIVFMLTACALFSKTWIEVSGSSARDVAKQLKEQQMVMPGHRESNLQKELNRYIPTAAAFGGVCIGALTVLADFMGAIGSGTGILLAVTIIYQYFETFEKEKASELGFFGF

SEQ ID NO: 26952 - DNA, 1709 bp, Arabidopsis thaliana
  misc_feature (1)..(1709): Ceres Seq. ID no. 12324064
  misc_feature (1)..(1709): Ortholog of  Ceres SEQ ID NO 13654409 as cited in SEQ ID NO 68534
aaaaaatttattagccattcgagaaacaaggcatctctatttttttgcttcttctaatagacttcttcgtcactgatctcccacgacgatctcccaaactcatttctctacgttcatcgatctctctctttctcgtttgctctacgaaaatcagccatggatgaagagtacgaggttattgttctcggcaccggtctcaaggagtgtatcctcagcggtctcctttccgtcgatggtgtcaaggtgcttcacatggacaggaatgactactatggtggagaatcaacttcccttaatctcaatcagctttggaagaagttcaggggagaagagaaggctcctgagcatttaggcgctagccgggattacaatgttgacatgatgcctaagtttatgatgggaaatggcaagcttgttcgtacccttattcatacagatgttacaaagtatttgtccttcaaagctgttgatggaagctatgttttcgtcaaaggaaaggttcaaaaggtgccagctactcctatggaggccctgaaatcttctctcatgggcatatttgagaaacgtcgagccggcaagtttttcagttttgttcaagaatacgatgagaaggacccaaaaacacacgatggaatggatttgaccagagttacaacaaaggaactgattgcgaaatatggtcttgatggcaacactattgactttattggtcacgcagtggcacttcacacgaatgaccaacatctcgaccaacccgcctttgatactgtaatgagaatgaagctctatgcggaatctcttgcacgtttccaaggaacatctccatatatttatcctctctatgggttgggagaactaccccaggcatttgcacgacttagtgctgtctatggtggcacatatatgttgaacaaacctgagtgcaaggtagagtttgacgagggaggtaaggttattggtgtaacatctgagggagagactgctaaatgcaaaaagattgtgtgtgacccttcatacctgccgaacaaggttaggaagattggcagggttgctcgggccatcgccattatgagccacccgattccgaacaccaatgattctcactcagtgcaggtcatcataccccagaaacagttggcccgcaaatcggatatgtatgtcttctgttgttcgtactcccacaacgttgctcccaagggaaaattcattgcatttgtgtctacagatgcagagactgataaccctcaaaccgaactaaagcctggaactgatcttttgggtcctgttgatgagatattcttcgacatgtatgatagatacgagcctgtcaacgagccagagttggacaactgctttatttcaacgagctatgatgctacaacacactttgagacaactgttgcggatgtgttgaacatgtataccctaatcaccggaaagcaactggacctaagtgttgacctgagtgccgcaagtgctgcagaggaatgaagaatcatcaccagatcgctccctctctagttgattttctaaaagcttgttttgctcatttctctgtttccgactcttgctttcgtgttcttttttggtttgaactttgaatacaaaatcagaatgatccttcatgttttagaaactaacaaccatgtgtctccgtttgatgttggattcctcggttaaagacttataaatgctctttaaaactcaat

SEQ ID NO: 26953 - protein, 444 aa, Arabidopsis thaliana
  peptide (1)..(444): Ceres Seq. ID no. 12324065
MDEEYEVIVLGTGLKECILSGLLSVDGVKVLHMDRNDYYGGESTSLNLNQLWKKFRGEEKAPEHLGASRDYNVDMMPKFMMGNGKLVRTLIHTDVTKYLSFKAVDGSYVFVKGKVQKVPATPMEALKSSLMGIFEKRRAGKFFSFVQEYDEKDPKTHDGMDLTRVTTKELIAKYGLDGNTIDFIGHAVALHTNDQHLDQPAFDTVMRMKLYAESLARFQGTSPYIYPLYGLGELPQAFARLSAVYGGTYMLNKPECKVEFDEGGKVIGVTSEGETAKCKKIVCDPSYLPNKVRKIGRVARAIAIMSHPIPNTNDSHSVQVIIPQKQLARKSDMYVFCCSYSHNVAPKGKFIAFVSTDAETDNPQTELKPGTDLLGPVDEIFFDMYDRYEPVNEPELDNCFISTSYDATTHFETTVADVLNMYTLITGKQLDLSVDLSAASAAEE

SEQ ID NO: 26954 - protein, 412 aa, Arabidopsis thaliana
  peptide (1)..(412): Ceres Seq. ID no. 12324066
MDRNDYYGGESTSLNLNQLWKKFRGEEKAPEHLGASRDYNVDMMPKFMMGNGKLVRTLIHTDVTKYLSFKAVDGSYVFVKGKVQKVPATPMEALKSSLMGIFEKRRAGKFFSFVQEYDEKDPKTHDGMDLTRVTTKELIAKYGLDGNTIDFIGHAVALHTNDQHLDQPAFDTVMRMKLYAESLARFQGTSPYIYPLYGLGELPQAFARLSAVYGGTYMLNKPECKVEFDEGGKVIGVTSEGETAKCKKIVCDPSYLPNKVRKIGRVARAIAIMSHPIPNTNDSHSVQVIIPQKQLARKSDMYVFCCSYSHNVAPKGKFIAFVSTDAETDNPQTELKPGTDLLGPVDEIFFDMYDRYEPVNEPELDNCFISTSYDATTHFETTVADVLNMYTLITGKQLDLSVDLSAASAAEE

SEQ ID NO: 26955 - protein, 370 aa, Arabidopsis thaliana
  peptide (1)..(370): Ceres Seq. ID no. 12324067
MMPKFMMGNGKLVRTLIHTDVTKYLSFKAVDGSYVFVKGKVQKVPATPMEALKSSLMGIFEKRRAGKFFSFVQEYDEKDPKTHDGMDLTRVTTKELIAKYGLDGNTIDFIGHAVALHTNDQHLDQPAFDTVMRMKLYAESLARFQGTSPYIYPLYGLGELPQAFARLSAVYGGTYMLNKPECKVEFDEGGKVIGVTSEGETAKCKKIVCDPSYLPNKVRKIGRVARAIAIMSHPIPNTNDSHSVQVIIPQKQLARKSDMYVFCCSYSHNVAPKGKFIAFVSTDAETDNPQTELKPGTDLLGPVDEIFFDMYDRYEPVNEPELDNCFISTSYDATTHFETTVADVLNMYTLITGKQLDLSVDLSAASAAEE

SEQ ID NO: 26956 - DNA, 843 bp, Arabidopsis thaliana
  misc_feature (1)..(843): Ceres Seq. ID no. 12384977
  misc_feature (1)..(843): Ortholog of  Ceres SEQ ID NO 13599448 as cited in SEQ ID NO 521
  misc_feature (1)..(843): Ortholog of  Ceres SEQ ID NO 13596408 as cited in SEQ ID NO 62028
aaaagagagagagagtctaaaagctcgtcgtcgtcttcaatggtgaatctcaaaccaattggataaataaaacaaaacaaaaaaaaacttcacaagaaaaaaaaaagatccaaattacaaccatgccttcggagttaacaccagaagaacgatcggaactaaaaaactcaatcgccgagttccacacataccaactcgatccaggaagctgttcatcactccacgcgcaacgaatccacgcgcctccggaactcgtctggtcaatcgtacgacgattcgacaaaccacaaacatacaaacacttcatcaaatcctgctccgtcgaacaaaacttcgagatgcgcgtcggatgcacgcgcgacgtgatcgtcatcagtggattaccggcgaacacatcaacggaaagactcgatatactcgacgacgaacggagagttaccggattcagtatcatcggaggcgaacataggctgacgaattacaaatccgttacgacggtgcatcggttcgagaaagagaatcggatctggacggtggttttggaatcttacgtcgttgatatgccggaaggtaactcggaggatgatactcgtatgtttgctgatacggttgtgaagcttaatttgcagaaactcgcgacggttgctgaagctatggctcgtaactccggtgacggaagtggttctcaggtgacgtgaaaatgaagaaaaaaatatgatttaatttcttttattaaaaacaaaatccagaaatgttatttatgttgcttcgtataagattctcttcttcttttgtctgtttttgcttttttaacctcatatagtcatatttttaccattttct

SEQ ID NO: 26957 - protein, 191 aa, Arabidopsis thaliana
  peptide (1)..(191): Ceres Seq. ID no. 12384978
MPSELTPEERSELKNSIAEFHTYQLDPGSCSSLHAQRIHAPPELVWSIVRRFDKPQTYKHFIKSCSVEQNFEMRVGCTRDVIVISGLPANTSTERLDILDDERRVTGFSIIGGEHRLTNYKSVTTVHRFEKENRIWTVVLESYVVDMPEGNSEDDTRMFADTVVKLNLQKLATVAEAMARNSGDGSGSQVT

SEQ ID NO: 26958 - protein, 119 aa, Arabidopsis thaliana
  peptide (1)..(119): Ceres Seq. ID no. 12384979
MRVGCTRDVIVISGLPANTSTERLDILDDERRVTGFSIIGGEHRLTNYKSVTTVHRFEKENRIWTVVLESYVVDMPEGNSEDDTRMFADTVVKLNLQKLATVAEAMARNSGDGSGSQVT

SEQ ID NO: 26959 - DNA, 1494 bp, Arabidopsis thaliana
  misc_feature (1)..(1494): Ceres Seq. ID no. 12370144
  misc_feature (1)..(1494): Ortholog of  Ceres SEQ ID NO 12593058 as cited in SEQ ID NO 63090
ataagactcctctccaaatgctaccacacaattcctctatcaaagccgcccaatcctccacccaaaaatggcttatctccggcgagcagccaccgcattggttctcattttccagctccatctctttctctctctctcaaatgcacataacataacccgaatcttggccaaagaccctgatttctccactttcaaccactatctctcagcgactcatctcgccgacgagatcaaccgccggcaaacaatcaccgtcttggccgtcgataactcagcaatgtcctccatcctctctaacggatactcactctaccaaatccgcaacattctctctctccacgtcctggtcgattacttcggcaccaagaaacttcaccagatcaccgacggctccacctccactgcctccatgtttcaatccaccggatccgccaccggaacttctggatacatcaacatcaccgatataaaaggcggtaaagtcgcttttggtgtccaagacgacgatagcaagctcacagctcactacgtcaaatccgtctttgaaaagccttacaacatctctgttcttcacatcagccaagtcttaacctcgccggaagcagaagctcccacggcgagtcccagcgacctcatcctcaccacaatcctcgaaaaacaagggtgcaaagctttctccgacatcttgaagtcaaccggcgccgacaaaacgttccaagataccgtagacggaggcttaacggtgttctgtccctccgacagcgctgtcggtaagttcatgccgaaattcaaatccctttctccggcgaacaagactgcgttagtgctttaccacggcatgccggtttaccagtcgttacaaatgcttagatcaggtaacggcgccgttaacacgttagcgacggaaggtaacaacaagtttgatttcaccgttcaaaatgacggagaagacgtgacgctggagacggacgttgtgacggcgaaggtaatggggacgttaaaggatcaagagccattgatagtttacaagatcgataaagtgttgttgcctagagaaatctacaaggccgttaagacgtccgctccagctcctaagtcgagtaagaaaaagcctaagaacgcggaggctgacgccgacggacctagcgccgatgctccgtcagatgatgatgttgaggtggctgacgataaaaacggcgccgtatcagcgatgattactcgaacaagtaatgtcgtaacggccattgtcgggctctgtttcggagtttggcttatgtgaagtgacgtggcatttacctcgctttgggaatcttgttttcctttttctttgtgatctgtcggtttaatttattttacatattcttttttttgttcacgttgatacttggtgtggagatttggaataattaattgttccacttgtgttggatctgatatgttttattctaaaaaaatgtgatgatcattcaaaagagtgattggtacgttggaatc

SEQ ID NO: 26960 - protein, 403 aa, Arabidopsis thaliana
  peptide (1)..(403): Ceres Seq. ID no. 12370145
MAYLRRAATALVLIFQLHLFLSLSNAHNITRILAKDPDFSTFNHYLSATHLADEINRRQTITVLAVDNSAMSSILSNGYSLYQIRNILSLHVLVDYFGTKKLHQITDGSTSTASMFQSTGSATGTSGYINITDIKGGKVAFGVQDDDSKLTAHYVKSVFEKPYNISVLHISQVLTSPEAEAPTASPSDLILTTILEKQGCKAFSDILKSTGADKTFQDTVDGGLTVFCPSDSAVGKFMPKFKSLSPANKTALVLYHGMPVYQSLQMLRSGNGAVNTLATEGNNKFDFTVQNDGEDVTLETDVVTAKVMGTLKDQEPLIVYKIDKVLLPREIYKAVKTSAPAPKSSKKKPKNAEADADGPSADAPSDDDVEVADDKNGAVSAMITRTSNVVTAIVGLCFGVWLM

SEQ ID NO: 26961 - protein, 333 aa, Arabidopsis thaliana
  peptide (1)..(333): Ceres Seq. ID no. 12370146
MSSILSNGYSLYQIRNILSLHVLVDYFGTKKLHQITDGSTSTASMFQSTGSATGTSGYINITDIKGGKVAFGVQDDDSKLTAHYVKSVFEKPYNISVLHISQVLTSPEAEAPTASPSDLILTTILEKQGCKAFSDILKSTGADKTFQDTVDGGLTVFCPSDSAVGKFMPKFKSLSPANKTALVLYHGMPVYQSLQMLRSGNGAVNTLATEGNNKFDFTVQNDGEDVTLETDVVTAKVMGTLKDQEPLIVYKIDKVLLPREIYKAVKTSAPAPKSSKKKPKNAEADADGPSADAPSDDDVEVADDKNGAVSAMITRTSNVVTAIVGLCFGVWLM

SEQ ID NO: 26962 - protein, 289 aa, Arabidopsis thaliana
  peptide (1)..(289): Ceres Seq. ID no. 12370147
MFQSTGSATGTSGYINITDIKGGKVAFGVQDDDSKLTAHYVKSVFEKPYNISVLHISQVLTSPEAEAPTASPSDLILTTILEKQGCKAFSDILKSTGADKTFQDTVDGGLTVFCPSDSAVGKFMPKFKSLSPANKTALVLYHGMPVYQSLQMLRSGNGAVNTLATEGNNKFDFTVQNDGEDVTLETDVVTAKVMGTLKDQEPLIVYKIDKVLLPREIYKAVKTSAPAPKSSKKKPKNAEADADGPSADAPSDDDVEVADDKNGAVSAMITRTSNVVTAIVGLCFGVWLM

SEQ ID NO: 26963 - DNA, 1336 bp, Arabidopsis thaliana
  misc_feature (1)..(1336): Ceres Seq. ID no. 13493744
  misc_feature (1)..(1336): Ortholog of  Ceres SEQ ID NO 15227099 as cited in SEQ ID NO 53558
  misc_feature (1)..(1336): Ortholog of  Ceres SEQ ID NO 14314563 as cited in SEQ ID NO 59349
  misc_feature (1)..(1336): Ortholog of  Ceres SEQ ID NO 12616360 as cited in SEQ ID NO 63543
actctttactctttcttccgtttgctcgaaccatctagtctaagagaaagaaaaaatactaaagagaaagaagaagaggacttgaatacggaagcttgagagaatgaaagcgatcgtgatctcggagccaggtaagccggaggttctgcaactccgtgatgtggcagacccagaagttaaagacgatgaggttctcatcagagttctcgctactgctttgaatcgtgcagatactctccaaagacttggcctttataatccaccacctggctcaagcccttaccttggtctcgaatgttctgggaccattgaatccgtcggtaaaggcgtctctcgatggaaagtcggagaccaggtgtgtgctcttctttctggaggaggttatgcagagaaagtttctgttcctgctggacaaattttcccaattcccgctggtatctctctaaaggatgcagcggctttccctgaagtggcatgcactgtttggtctactgtcttcatgatgggccgtctctctgttggtgaatcattcttgattcatggaggttcaagtgggattgggacatttgctattcagatagctaaacatctgggagtgagagtatttgtcacagctgggagtgatgaaaagctagctgcgtgcaaagaactcggggctgatgtttgtataaattacaaaaccgaggattttgttgcaaaggtaaaagcggaaaccgatgggaaaggagtggatgttatcttggactgcattggggcaccgtatttgcagaaaaatctcgacagcttaaactttgatggaaggttatgtattatcggtttaatgggaggagccaatgcagaaataaaactaagtagtctgcttccaaagcgtctcactgtcttaggagctgcattaagaccaagaagccctgaaaacaaagcagttgttgtaagggaagtcgagaagaatgtctggccagcgatagaagcagggaaggtaaaaccagtgatttacaagtatttaccattgtcacaagcagcagaaggtcatagccttatggagagtagcaaccatattggtaagattctccttgagacttgattctctgcaaagggagaaatgttcagagacaagagtcatggtcaataatcaataaaatctggtcgattctgttcatagatatctctttacaagagttctgtttgttggcttttatgtatctctgatttggtcaaaaagacactgtaactatggaacatatatagtatcaaataagctgttgtataccaaacattgatttcgaagtagaatatgattttgtaagaagtttttatttattttgggcttaaaaagtgc

SEQ ID NO: 26964 - protein, 325 aa, Arabidopsis thaliana
  peptide (1)..(325): Ceres Seq. ID no. 13493745
MKAIVISEPGKPEVLQLRDVADPEVKDDEVLIRVLATALNRADTLQRLGLYNPPPGSSPYLGLECSGTIESVGKGVSRWKVGDQVCALLSGGGYAEKVSVPAGQIFPIPAGISLKDAAAFPEVACTVWSTVFMMGRLSVGESFLIHGGSSGIGTFAIQIAKHLGVRVFVTAGSDEKLAACKELGADVCINYKTEDFVAKVKAETDGKGVDVILDCIGAPYLQKNLDSLNFDGRLCIIGLMGGANAEIKLSSLLPKRLTVLGAALRPRSPENKAVVVREVEKNVWPAIEAGKVKPVIYKYLPLSQAAEGHSLMESSNHIGKILLET

SEQ ID NO: 26965 - protein, 193 aa, Arabidopsis thaliana
  peptide (1)..(193): Ceres Seq. ID no. 13493746
MMGRLSVGESFLIHGGSSGIGTFAIQIAKHLGVRVFVTAGSDEKLAACKELGADVCINYKTEDFVAKVKAETDGKGVDVILDCIGAPYLQKNLDSLNFDGRLCIIGLMGGANAEIKLSSLLPKRLTVLGAALRPRSPENKAVVVREVEKNVWPAIEAGKVKPVIYKYLPLSQAAEGHSLMESSNHIGKILLET

SEQ ID NO: 26966 - protein, 192 aa, Arabidopsis thaliana
  peptide (1)..(192): Ceres Seq. ID no. 13493747
MGRLSVGESFLIHGGSSGIGTFAIQIAKHLGVRVFVTAGSDEKLAACKELGADVCINYKTEDFVAKVKAETDGKGVDVILDCIGAPYLQKNLDSLNFDGRLCIIGLMGGANAEIKLSSLLPKRLTVLGAALRPRSPENKAVVVREVEKNVWPAIEAGKVKPVIYKYLPLSQAAEGHSLMESSNHIGKILLET

SEQ ID NO: 26967 - DNA, 1252 bp, Arabidopsis thaliana
  misc_feature (1)..(1252): Ceres Seq. ID no. 12324079
  misc_feature (1)..(1252): Ortholog of  Ceres SEQ ID NO 13597260 as cited in SEQ ID NO 63885
  misc_feature (1)..(1252): Ortholog of  Ceres SEQ ID NO 15180208 as cited in SEQ ID NO 0
aactgagttttcttcttctctcttatttctctcccaagtttcttatttttttttcctctttactttacacaaaggaacaacaaataatgtggaaccttaacgactcacccgatcatcacgaagaatccgacagtagagggaatccggtcggacacgtgtcaaacgggatgagtcaatctgcaacgtggctaccgtttgtgcttccggtgaccaggaatttctttccggctcaaagcatggaaccgggagttcgttggtccggtttcaatagtgtcggtaagtcggatccaagcggatcgggtcgaccagaagagccggagatatcaccgccgataaagaagagccgacgtggtcctcgctcacgtagctctcagtatcgaggagttacgttttaccgacgaaccggaagatgggagtcacatatttgggactgtgggaagcaagtgtacttaggtggatttgacactgcacatgctgctgctcgagcctatgatcgagcggcgattaaattcagaggtgtagatgcagatattaatttcgacattgaagactaccttgacgatttgaaacagatgggaaatttgacaaaggaagagtttatgcatgtacttagaaggcaaagcactgggtttccaagaggcagttctaaatacagaggtgttactttgcacaaatgtggaagatgggagtcacgtttgggtcaattcctcaacaaaaagtacgtttatttgggtctctttgataccgagattgaagctgctagagcttatgataaagcggcaataaagtgtaatgggaaagacgctgttaccaattttgaccctaaagtatacgaggaagaagaagatcttagctcagagacgacgaggaacggtcataatcttggtctaagtctaggagaatcatcatctgaagagtttagactcaagtctgatattgcaagcataagaagtaggattagagatgaggagagattattagggagcgatctatcgctagcaatgatgacgacgactgtcagatcggaaaagcagcaatcggacggtggaggaaatcgagtggtgggaatggcagcatcatcaggattctctcctcaaccttccccttaccgcattcctcgcaccttccacttctctcgtccctgattcatcatcatcatcatcactatcatcacaatcatcatctgagctagtgttaaccaagttatgctttaatgaatttgagttattctcgagctatttttgggctctgc

SEQ ID NO: 26968 - protein, 380 aa, Arabidopsis thaliana
  peptide (1)..(380): Ceres Seq. ID no. 12324080
LSFLLLSYFSPKFLIFFSSLLYTKEQQIMWNLNDSPDHHEESDSRGNPVGHVSNGMSQSATWLPFVLPVTRNFFPAQSMEPGVRWSGFNSVGKSDPSGSGRPEEPEISPPIKKSRRGPRSRSSQYRGVTFYRRTGRWESHIWDCGKQVYLGGFDTAHAAARAYDRAAIKFRGVDADINFDIEDYLDDLKQMGNLTKEEFMHVLRRQSTGFPRGSSKYRGVTLHKCGRWESRLGQFLNKKYVYLGLFDTEIEAARAYDKAAIKCNGKDAVTNFDPKVYEEEEDLSSETTRNGHNLGLSLGESSSEEFRLKSDIASIRSRIRDEERLLGSDLSLAMMTTTVRSEKQQSDGGGNRVVGMAASSGFSPQPSPYRIPRTFHFSRP

SEQ ID NO: 26969 - protein, 352 aa, Arabidopsis thaliana
  peptide (1)..(352): Ceres Seq. ID no. 12324081
MWNLNDSPDHHEESDSRGNPVGHVSNGMSQSATWLPFVLPVTRNFFPAQSMEPGVRWSGFNSVGKSDPSGSGRPEEPEISPPIKKSRRGPRSRSSQYRGVTFYRRTGRWESHIWDCGKQVYLGGFDTAHAAARAYDRAAIKFRGVDADINFDIEDYLDDLKQMGNLTKEEFMHVLRRQSTGFPRGSSKYRGVTLHKCGRWESRLGQFLNKKYVYLGLFDTEIEAARAYDKAAIKCNGKDAVTNFDPKVYEEEEDLSSETTRNGHNLGLSLGESSSEEFRLKSDIASIRSRIRDEERLLGSDLSLAMMTTTVRSEKQQSDGGGNRVVGMAASSGFSPQPSPYRIPRTFHFSRP

SEQ ID NO: 26970 - protein, 325 aa, Arabidopsis thaliana
  peptide (1)..(325): Ceres Seq. ID no. 12324082
MSQSATWLPFVLPVTRNFFPAQSMEPGVRWSGFNSVGKSDPSGSGRPEEPEISPPIKKSRRGPRSRSSQYRGVTFYRRTGRWESHIWDCGKQVYLGGFDTAHAAARAYDRAAIKFRGVDADINFDIEDYLDDLKQMGNLTKEEFMHVLRRQSTGFPRGSSKYRGVTLHKCGRWESRLGQFLNKKYVYLGLFDTEIEAARAYDKAAIKCNGKDAVTNFDPKVYEEEEDLSSETTRNGHNLGLSLGESSSEEFRLKSDIASIRSRIRDEERLLGSDLSLAMMTTTVRSEKQQSDGGGNRVVGMAASSGFSPQPSPYRIPRTFHFSRP

SEQ ID NO: 26971 - DNA, 1477 bp, Arabidopsis thaliana
  misc_feature (1)..(1477): Ceres Seq. ID no. 13493729
  misc_feature (1)..(1477): Ortholog of  Ceres SEQ ID NO 14316017 as cited in SEQ ID NO 67028
  misc_feature (1)..(1477): Ortholog of  Ceres SEQ ID NO 15177500 as cited in SEQ ID NO 0
acaattctttgcatcatcatcattcatcatggattcttcttaccttagaatctctctttcttttctcttctgggctttactactctcaccggctgtgtcacagtcatcttcttgttcgtcacagacattttccggcgtcaaatcttaccctcactgtctcgacctccctgatcttaaagccattctccattactcttatgacgcatctaacacaactctcgccgttgttttctctgctccaccgtcaaaacctggtggttggatcgcttgggctattaaccctaaatccaccggcatggctggatctcaagccctcgttgcctctaaggaccctagcaccggcgttgcttccgtgacgacccttaacatcgtctcttacagctctctggttccctcgaaactgtcctttgacgtgtgggatgttaaggcggaggaggcggctaatgacggtggagctttacgaatctttgcgaaagtgaaggttccggcggatttagcggcgagtgggaaggttaaccaggtttggcaggttggtccgggagtgtctaatgggaggatacaggctcatgatttcagcggtcccaatcttaactcagtgggatcactcgatttaaccgggaccacccccggagtccctgtctccggaggtggtggtgccggtaattctagaatccacaagagaaatatccatggaatattgaacgcagtgagttggggacttctatttcccattggagcaatgatagctaggtatatgagaatctttgaatcagcagatcctgcttggttttacctccacgtgtcatgccaattctctgcttatgtcatcggtgttgccggatgggccaccggactcaagcttggttcagaatctaaaggtattcagtacaacactcaccggaacatcggcatctgtctcttctctatagccactcttcagatgtttgcgatgctgttgcggccaaggaaggaccacaagtttagattcgtttggaatatttaccaccacggagttggatactctatcctcatccttggaatcatcaatgttttcaaaggtcttagcatcttgaatccaaagcatacttacaagacggcttatatcgctgtgattgggaccttaggaggcatcacgttactcttggaagttgttacttgggtcattgtcctcaagagaaaatctgccaagtctacaaagcctctcaaggcctaatggtgttggtaattcaaaggatttgtattgttttattttcttttttttttgaagttagaaattgcattgtctttctccacaaattatgattcatctcttgacgttgcttgttttgaggatgatgattatgacttgtgtgttttatgtatagtaggagaaacacatatatgtcttagtgtttgttctttgtagctctgccttttatttcgtgtgtttttgtggttcagaatacttgtagggaattataaactaatttttcaatct

SEQ ID NO: 26972 - protein, 403 aa, Arabidopsis thaliana
  peptide (1)..(403): Ceres Seq. ID no. 13493730
QFFASSSFIMDSSYLRISLSFLFWALLLSPAVSQSSSCSSQTFSGVKSYPHCLDLPDLKAILHYSYDASNTTLAVVFSAPPSKPGGWIAWAINPKSTGMAGSQALVASKDPSTGVASVTTLNIVSYSSLVPSKLSFDVWDVKAEEAANDGGALRIFAKVKVPADLAASGKVNQVWQVGPGVSNGRIQAHDFSGPNLNSVGSLDLTGTTPGVPVSGGGGAGNSRIHKRNIHGILNAVSWGLLFPIGAMIARYMRIFESADPAWFYLHVSCQFSAYVIGVAGWATGLKLGSESKGIQYNTHRNIGICLFSIATLQMFAMLLRPRKDHKFRFVWNIYHHGVGYSILILGIINVFKGLSILNPKHTYKTAYIAVIGTLGGITLLLEVVTWVIVLKRKSAKSTKPLKA

SEQ ID NO: 26973 - protein, 394 aa, Arabidopsis thaliana
  peptide (1)..(394): Ceres Seq. ID no. 13493731
MDSSYLRISLSFLFWALLLSPAVSQSSSCSSQTFSGVKSYPHCLDLPDLKAILHYSYDASNTTLAVVFSAPPSKPGGWIAWAINPKSTGMAGSQALVASKDPSTGVASVTTLNIVSYSSLVPSKLSFDVWDVKAEEAANDGGALRIFAKVKVPADLAASGKVNQVWQVGPGVSNGRIQAHDFSGPNLNSVGSLDLTGTTPGVPVSGGGGAGNSRIHKRNIHGILNAVSWGLLFPIGAMIARYMRIFESADPAWFYLHVSCQFSAYVIGVAGWATGLKLGSESKGIQYNTHRNIGICLFSIATLQMFAMLLRPRKDHKFRFVWNIYHHGVGYSILILGIINVFKGLSILNPKHTYKTAYIAVIGTLGGITLLLEVVTWVIVLKRKSAKSTKPLKA

SEQ ID NO: 26974 - protein, 305 aa, Arabidopsis thaliana
  peptide (1)..(305): Ceres Seq. ID no. 13493732
MAGSQALVASKDPSTGVASVTTLNIVSYSSLVPSKLSFDVWDVKAEEAANDGGALRIFAKVKVPADLAASGKVNQVWQVGPGVSNGRIQAHDFSGPNLNSVGSLDLTGTTPGVPVSGGGGAGNSRIHKRNIHGILNAVSWGLLFPIGAMIARYMRIFESADPAWFYLHVSCQFSAYVIGVAGWATGLKLGSESKGIQYNTHRNIGICLFSIATLQMFAMLLRPRKDHKFRFVWNIYHHGVGYSILILGIINVFKGLSILNPKHTYKTAYIAVIGTLGGITLLLEVVTWVIVLKRKSAKSTKPLKA

SEQ ID NO: 26975 - DNA, 1707 bp, Arabidopsis thaliana
  misc_feature (1)..(1707): Ceres Seq. ID no. 13489655
  misc_feature (1)..(1707): Ortholog of  Ceres SEQ ID NO 13581273 as cited in SEQ ID NO 54551
  misc_feature (1)..(1707): Ortholog of  Ceres SEQ ID NO 13594209 as cited in SEQ ID NO 59089
  misc_feature (1)..(1707): Ortholog of  Ceres SEQ ID NO 14306857 as cited in SEQ ID NO 60035
  misc_feature (1)..(1707): Ortholog of  Ceres SEQ ID NO 13502874 as cited in SEQ ID NO 66298
  misc_feature (1)..(1707): Ortholog of  Ceres SEQ ID NO 12614124 as cited in SEQ ID NO 68392
aaaaacaatagtaaaaaaaagagagacgaaaagaaagaaagagagagagccccacaaacaaacaaaatggatttgaaccaaatcttgatcctctcatttctctctctttttaccttagccatattcttgctcacaagatccaaacggaaactaaaccttcctccgtcgccggcgatctccttgccggtgatcggacacctccatctcctcaagccaccgcttcaccgtaccttcctttccctttccaaatccatcggaaatgctccggtcttccatctccgactcggaaatcgcctcgtttatgtcatctcttcacgttccatcgctgaagaatgtttcacaaagaacgatgtcgttctcgcgaaccgccccaagttcaccataagtaagcacctcggctacaacgccacctacttactctcggcatcttacggcgatcattggaggaacctccgccgcatagccgccgtcgagatattctccactcatagactcaattcgtttctgtatattcgtaaggacgagatccgacggctcatttcacatctctctcgtgattccttacacggatttgtggaggtagagatgaaaacattgttaaccaatttggcatccaacaccaccatcagaatgttggccgggaagagatatttcggtgaggacaacgatgacgctaaactcgtgaagaaccttgtgtcggaggcggtgaccagcgccggtgcaggaaaccccattgattatctttccattttacgttgggtctcgagttatgaaaaacgaatcaagaatttgggaaataggtttgatacgtttttgcagaaattagtcgacgaaaaacgtgcggagaaggaaaaaggtgaaactatgatcgatcacttgcttgctctccaagacattcaacctgattactatacggatgtcatcatcaaaggaatcatacttaccctgataattgcagggacagatacgtcatcagtaacactagaatgggcaatgtcaaatctgttgaaccatccagaaatacttaagaaagcgagaatggaaatcgatgaaaaagtcggtttagaccgattagtagacgaatcggacattgtaaatctctcttatctccaaagcattgtattggaaacactacgtatgtacccggcagtcccactactactacctcatttgtcatcagaagattgtaaagttggaggctacgatataccaagtggaacaatggtattgaccaacgcatgggccatgcatagagatccagaggtatgggaagatcctgagatattcaaaccagaaagatttgaaaaagaaggagaggctgagaagctaatctcatttgggatgggacgaagagcttgtcctggagccgggctagctcatcggctaataaaccaggctcttggaagtttggttcaatgttttgagtgggaaagagttggtgaggattttgtggacatgaccgaagacaaaggagccacattgcccaaagctataccattaagagccatgtgcaaagcacgttctattgttgataaactgatataaatgttttacgttgaaaaatgtattctatttaatgacatgtttttaattatgtgttttggtcttcaattcgtccttcaatcttttgttgtatctttgaatcttgcttaatatcatcgggtcaatgaagctggcttgctcaccgggtagtggctgctcttgcgt

SEQ ID NO: 26976 - protein, 514 aa, Arabidopsis thaliana
  peptide (1)..(514): Ceres Seq. ID no. 13489656
KNNSKKKRDEKKERERAPQTNKMDLNQILILSFLSLFTLAIFLLTRSKRKLNLPPSPAISLPVIGHLHLLKPPLHRTFLSLSKSIGNAPVFHLRLGNRLVYVISSRSIAEECFTKNDVVLANRPKFTISKHLGYNATYLLSASYGDHWRNLRRIAAVEIFSTHRLNSFLYIRKDEIRRLISHLSRDSLHGFVEVEMKTLLTNLASNTTIRMLAGKRYFGEDNDDAKLVKNLVSEAVTSAGAGNPIDYLSILRWVSSYEKRIKNLGNRFDTFLQKLVDEKRAEKEKGETMIDHLLALQDIQPDYYTDVIIKGIILTLIIAGTDTSSVTLEWAMSNLLNHPEILKKARMEIDEKVGLDRLVDESDIVNLSYLQSIVLETLRMYPAVPLLLPHLSSEDCKVGGYDIPSGTMVLTNAWAMHRDPEVWEDPEIFKPERFEKEGEAEKLISFGMGRRACPGAGLAHRLINQALGSLVQCFEWERVGEDFVDMTEDKGATLPKAIPLRAMCKARSIVDKLI

SEQ ID NO: 26977 - protein, 492 aa, Arabidopsis thaliana
  peptide (1)..(492): Ceres Seq. ID no. 13489657
MDLNQILILSFLSLFTLAIFLLTRSKRKLNLPPSPAISLPVIGHLHLLKPPLHRTFLSLSKSIGNAPVFHLRLGNRLVYVISSRSIAEECFTKNDVVLANRPKFTISKHLGYNATYLLSASYGDHWRNLRRIAAVEIFSTHRLNSFLYIRKDEIRRLISHLSRDSLHGFVEVEMKTLLTNLASNTTIRMLAGKRYFGEDNDDAKLVKNLVSEAVTSAGAGNPIDYLSILRWVSSYEKRIKNLGNRFDTFLQKLVDEKRAEKEKGETMIDHLLALQDIQPDYYTDVIIKGIILTLIIAGTDTSSVTLEWAMSNLLNHPEILKKARMEIDEKVGLDRLVDESDIVNLSYLQSIVLETLRMYPAVPLLLPHLSSEDCKVGGYDIPSGTMVLTNAWAMHRDPEVWEDPEIFKPERFEKEGEAEKLISFGMGRRACPGAGLAHRLINQALGSLVQCFEWERVGEDFVDMTEDKGATLPKAIPLRAMCKARSIVDKLI

SEQ ID NO: 26978 - protein, 319 aa, Arabidopsis thaliana
  peptide (1)..(319): Ceres Seq. ID no. 13489658
MKTLLTNLASNTTIRMLAGKRYFGEDNDDAKLVKNLVSEAVTSAGAGNPIDYLSILRWVSSYEKRIKNLGNRFDTFLQKLVDEKRAEKEKGETMIDHLLALQDIQPDYYTDVIIKGIILTLIIAGTDTSSVTLEWAMSNLLNHPEILKKARMEIDEKVGLDRLVDESDIVNLSYLQSIVLETLRMYPAVPLLLPHLSSEDCKVGGYDIPSGTMVLTNAWAMHRDPEVWEDPEIFKPERFEKEGEAEKLISFGMGRRACPGAGLAHRLINQALGSLVQCFEWERVGEDFVDMTEDKGATLPKAIPLRAMCKARSIVDKLI

SEQ ID NO: 26979 - DNA, 2024 bp, Arabidopsis thaliana
  misc_feature (1)..(2024): Ceres Seq. ID no. 13492616
  misc_feature (1)..(2024): Ortholog of  Ceres SEQ ID NO 15175923 as cited in SEQ ID NO 54037
  misc_feature (1)..(2024): Ortholog of  Ceres SEQ ID NO 13503610 as cited in SEQ ID NO 62416
  misc_feature (1)..(2024): Ortholog of  Ceres SEQ ID NO 13657610 as cited in SEQ ID NO 66165
  misc_feature (1)..(2024): Ortholog of  Ceres SEQ ID NO 13598312 as cited in SEQ ID NO 68448
  misc_feature (1)..(2024): Ortholog of  Ceres SEQ ID NO 13596100 as cited in SEQ ID NO 68573
gccaacacaactccttataagatatacacttcatcaacctatagatctcactcacataatcaacctacaaaacaaaaacaagaatgggtagatccaacgagcaagatctgctctctaccgagatcgttaatcgtgggatcgaaccatccggtcctaacgccggctcaccaacgttctcggttagggtcaggagacgtttgcctgattttcttcagtcggtgaacttgaagtacgtgaaacttggttaccactacctcataaaccatgcggtttatttggcgaccataccggttcttgtgctggtttttagtgctgaggttgggagtttaagcagagaagagatttggaagaagctttgggactatgatcttgcaactgttatcggattcttcggtgtctttgttttaaccgcttgtgtctacttcatgtctcgtcctcgctctgtttatcttattgatttcgcttgttacaagccctccgatgaacacaaggtgacaaaagaagagttcatagaactagcgagaaaatcagggaagttcgacgaagagacactcggtttcaagaagaggatcttacaagcctcaggcataggcgacgagacatacgtcccaagatccatctcttcatcagaaaacataacaacgatgaaagaaggtcgtgaagaagcctctacagtgatctttggagcactagacgaactcttcgagaagacacgtgtaaaacctaaagacgttggtgtccttgtggttaactgtagcattttcaacccgacaccgtcgttgtccgcaatggtgataaaccattacaagatgagagggaacatacttagttacaaccttggagggatgggatgttcggctggaatcatagctattgatcttgctcgtgacatgcttcagtctaaccctaatagttatgctgttgttgtgagtactgagatggttgggtataattggtacgtgggaagtgacaagtcaatggttatacctaattgtttctttaggatgggttgttctgccgttatgctctctaaccgtcgtcgtgactttcgccatgctaagtaccgtctcgagcacattgtccgaactcataaggctgctgacgaccgtagcttcaggagtgtgtaccaggaagaagatgaacaaggattcaaggggttgaagataagtagagacttaatggaagttggaggtgaagctctcaagacaaacatcactaccttaggtcctcttgtcctacctttctccgagcagcttctcttctttgctgctttgctccgccgaacattctcacctgctgccaaaacgtccacaaccacttccttctctacttccgccaccgcaaaaaccaatggaatcaagtcttcctcttccgatctgtccaagccatacatcccggactacaagctcgccttcgagcatttttgcttccacgcggcaagcaaagtagtgcttgaagagcttcaaaagaatctaggcttgagtgaagagaatatggaggcttctaggatgacacttcacaggtttggaaacacttctagcagtggaatctggtatgagttggcttacatggaggccaaggaaagtgttcgtagaggcgatagggtttggcagatcgctttcggttctggttttaagtgtaacagtgtggtgtggaaggcaatgaggaaggtgaagaagccaaccaggaacaatccttgggtggattgcatcaaccgttaccctgtgcctctctaaattatcattcttctaaattaaatcaagtaagatctctaattactccaaccaaaagatacagtttggttggatgataggagttatttactgatcattcgtatctaagtctgttataagaatggatgtggctagagtcctgttcagcttcaacttgttttattttttgtttgttctctattggatcttcataaactttgagagattaaagaaaaaaactcttctttagtttgatagaacagatggtcattgtaatttctttaatatgtcaaagtaaaacaatttcttttt

SEQ ID NO: 26980 - protein, 550 aa, Arabidopsis thaliana; identical to SEQ ID NO: 23995
  peptide (1)..(550): Ceres Seq. ID no. 13492617

SEQ ID NO: 26981 - protein, 436 aa, Arabidopsis thaliana; identical to SEQ ID NO: 23996
  peptide (1)..(436): Ceres Seq. ID no. 13492618

SEQ ID NO: 26982 - protein, 363 aa, Arabidopsis thaliana; identical to SEQ ID NO: 23997
  peptide (1)..(363): Ceres Seq. ID no. 13492619

SEQ ID NO: 26983 - DNA, 611 bp, Arabidopsis thaliana
  misc_feature (1)..(611): Ceres Seq. ID no. 12384717
  misc_feature (1)..(611): Ortholog of  Ceres SEQ ID NO 13600689 as cited in SEQ ID NO 0
  misc_feature (1)..(611): Ortholog of  Ceres SEQ ID NO 15178120 as cited in SEQ ID NO 0
gaagattaattgaatcacacaaagtcgaatccaaagtttttgatcttaaccaagtcgcataatccagagaggaatcaaaagaagatgagtaacgtcagcttcaggcaggatcatgatttcgagaagaggaaagctgaggctttaaggatcagagagaagtattctgacagagtcccggtgattgtggagaagtcagagaaaagtgatatcccaaacattgacaagaagaaataccttgtcccagctgatctaacggtaggccagtttgtgtatgtgattcgtaagagaatccaacttagtgcagagaaagctatcttcatctttgttgataatgttcttcctcccaccggagcgatgatgtcaaccatttacgatgagaataaggaagaagacggcttcttgtatgttacctacagtggggaaaacacttttggatcgtcaatgacttaatttggtgttcttgcttttaattgaatgtaaatattccattttcttttcttgtccgtgaacttgcttagatgcggatatgattattatggcttatgtaggcacaaccaatcggtttgcaaacaaagtgttggtttttttatcctctgtttttttctttggtc

SEQ ID NO: 26984 - protein, 121 aa, Arabidopsis thaliana
  peptide (1)..(121): Ceres Seq. ID no. 12384718
MSNVSFRQDHDFEKRKAEALRIREKYSDRVPVIVEKSEKSDIPNIDKKKYLVPADLTVGQFVYVIRKRIQLSAEKAIFIFVDNVLPPTGAMMSTIYDENKEEDGFLYVTYSGENTFGSSMT

SEQ ID NO: 26985 - DNA, 610 bp, Arabidopsis thaliana
  misc_feature (1)..(610): Ceres Seq. ID no. 12323284
  misc_feature (1)..(610): Ortholog of  Ceres SEQ ID NO 12329459 as cited in SEQ ID NO 20533
aatatccgtcaaattcaattgatcctctctccaaatcatcttaaaatcacagatctttgggtatcaagtaaaactgtgaagtgatgtcgggaagaggaaagggaggaaaaggattgggaaagggaggagcgaagaggcacaggaagattctgagggataacattcaaggaatcaccaagcctgccattcgtcgtcttgctcgtagaggtggtgtcaagcgtatcagtggtctcatctacgaagagaccagaggtgtcctcaagatcttcctcgagaatgtcatccgtgacgccgttacttacactgagcacgctagaaggaagacggtgaccgccatggatgttgtctacgctttgaagaggcaaggtcgtactctctacggtttcggaggttaatccgatttgggggattagggtttatgcaagtttggggatttcttcttgtttctgagatctgtgttaaatggtttgaattagtctaaagtaaatctaggagtgttagctactgcttttgttttctattgtgatgtcgttgttagccaatgcggtgtagttgaaaatctttgcaaacttaaagctaagaaaatctaatgaggatgaacaatttactc

SEQ ID NO: 26986 - protein, 103 aa, Arabidopsis thaliana
  peptide (1)..(103): Ceres Seq. ID no. 12323285
MSGRGKGGKGLGKGGAKRHRKILRDNIQGITKPAIRRLARRGGVKRISGLIYEETRGVLKIFLENVIRDAVTYTEHARRKTVTAMDVVYALKRQGRTLYGFGG

SEQ ID NO: 26987 - DNA, 561 bp, Arabidopsis thaliana
  misc_feature (1)..(561): Ceres Seq. ID no. 12394261
  misc_feature (1)..(561): Ortholog of  Ceres SEQ ID NO 15175146 as cited in SEQ ID NO 0
gctctagtttcccccaacaatcgccatggcagcttcgtctctcaatctcctcctcattctctctcttctcactttcatttctctccagagatctgaatctctttccgataatccatctctcactcttctacccgacggattcgactggccgatctctcactccgatgaattcgatatcatcgacggtgaagaaagcttcgaagttacggaggaagacgacggcgtaacagatcgacggtcattgtactggcggaggacgaagtattacatatcgtacggtgcattgtcggcgaatagagtgccatgtcctcccagatctggaagatcgtactacactcataactgcttcagagctagaggtcccgttcatccgtatagcctaggctgctcgtcgatcactcccggagatagatgaagaaagcttaaaactccatgggcattttcgtaattttgccaaccatggtttattattatgatgtttgtatttgtaatgttcgatgtttgtttgtaaaccgtgattagttacgttcgttaaacggtaaacccgatgattataatttc

SEQ ID NO: 26988 - protein, 129 aa, Arabidopsis thaliana
  peptide (1)..(129): Ceres Seq. ID no. 12394262
MAASSLNLLLILSLLTFISLQRSESLSDNPSLTLLPDGFDWPISHSDEFDIIDGEESFEVTEEDDGVTDRRSLYWRRTKYYISYGALSANRVPCPPRSGRSYYTHNCFRARGPVHPYSLGCSSITPGDR

SEQ ID NO: 26989 - protein, 74 aa, Arabidopsis thaliana
  peptide (1)..(74): Ceres Seq. ID no. 12394263
SSFPQQSPWQLRLSISSSFSLFSLSFLSRDLNLFPIIHLSLFYPTDSTGRSLTPMNSISSTVKKASKLRRKTTA

SEQ ID NO: 26990 - DNA, 1065 bp, Arabidopsis thaliana
  misc_feature (1)..(1065): Ceres Seq. ID no. 12327094
  misc_feature (1)..(1065): Ortholog of  Ceres SEQ ID NO 14307296 as cited in SEQ ID NO 53966
  misc_feature (1)..(1065): Ortholog of  Ceres SEQ ID NO 15225423 as cited in SEQ ID NO 64689
atcatcttcattttctctataggtttatgagaagctaaagctatgatgatttctttaatcaaaatagcttagggttttggagagagattactaagaaagttttaatgtttgtttaagagaaaagttatatattagggttttctttattcagaagcttcaagatcagaaaagatggaagttagagagaagaaagatgagaaaatggagatgacaagaagaaaatcatcagctctagatcatcatcgtcttcctccgtacacttactcccaaaccgccaacaaagagaaacccaccaccaaaagaaacgggtcggacccggatccggatccggatcttgatactaacccaatttctatatctcatgctccaagatcatacgctaggcctcaaactacttctccggggaaggcaaggtatagagaatgccaaaagaatcacgcggcgagctccggtggacacgttgtcgacggttgcggcgagtttatgtcttccggggaagaaggcacggtggagtctcttctttgtgcagcttgtgattgccaccggagcttccatagaaaagagatcgatggtttgtttgttgtcaatttcaatagctttggccattcacagagaccactcggaagccgccacgtgtctccgataatgatgagttttggtggtggtggtggttgtgcggcggagtcatcgacggaggatctaaacaagtttcatcaatcttttagtggttatggagtggatcagtttcatcattatcaacccaagaaacggtttaggacaaagtttaatgaagaacagaaggagaagatgatggagtttgctgagaagattggttggagaatgacaaaactagaagatgatgaagtgaatcggttttgtcgtgagattaaagttaaaagacaagtgtttaaagtttggatgcacaacaataaacaagcagcaaagaagaaggatttgtgagagatttctatatatatatatatactatttttacttctctttgttcaacattgctttaacttaaagactttgtgtttattgtataacaaattgattttagagccc

SEQ ID NO: 26991 - protein, 262 aa, Arabidopsis thaliana
  peptide (1)..(262): Ceres Seq. ID no. 12327095
MEVREKKDEKMEMTRRKSSALDHHRLPPYTYSQTANKEKPTTKRNGSDPDPDPDLDTNPISISHAPRSYARPQTTSPGKARYRECQKNHAASSGGHVVDGCGEFMSSGEEGTVESLLCAACDCHRSFHRKEIDGLFVVNFNSFGHSQRPLGSRHVSPIMMSFGGGGGCAAESSTEDLNKFHQSFSGYGVDQFHHYQPKKRFRTKFNEEQKEKMMEFAEKIGWRMTKLEDDEVNRFCREIKVKRQVFKVWMHNNKQAAKKKDL

SEQ ID NO: 26992 - protein, 252 aa, Arabidopsis thaliana
  peptide (1)..(252): Ceres Seq. ID no. 12327096
MEMTRRKSSALDHHRLPPYTYSQTANKEKPTTKRNGSDPDPDPDLDTNPISISHAPRSYARPQTTSPGKARYRECQKNHAASSGGHVVDGCGEFMSSGEEGTVESLLCAACDCHRSFHRKEIDGLFVVNFNSFGHSQRPLGSRHVSPIMMSFGGGGGCAAESSTEDLNKFHQSFSGYGVDQFHHYQPKKRFRTKFNEEQKEKMMEFAEKIGWRMTKLEDDEVNRFCREIKVKRQVFKVWMHNNKQAAKKKDL

SEQ ID NO: 26993 - protein, 250 aa, Arabidopsis thaliana
  peptide (1)..(250): Ceres Seq. ID no. 12327097
MTRRKSSALDHHRLPPYTYSQTANKEKPTTKRNGSDPDPDPDLDTNPISISHAPRSYARPQTTSPGKARYRECQKNHAASSGGHVVDGCGEFMSSGEEGTVESLLCAACDCHRSFHRKEIDGLFVVNFNSFGHSQRPLGSRHVSPIMMSFGGGGGCAAESSTEDLNKFHQSFSGYGVDQFHHYQPKKRFRTKFNEEQKEKMMEFAEKIGWRMTKLEDDEVNRFCREIKVKRQVFKVWMHNNKQAAKKKDL

SEQ ID NO: 26994 - DNA, 663 bp, Arabidopsis thaliana
  misc_feature (1)..(663): Ceres Seq. ID no. 12323564
  misc_feature (1)..(663): Ortholog of  Ceres SEQ ID NO 15173986 as cited in SEQ ID NO 1074
  misc_feature (1)..(663): Ortholog of  Ceres SEQ ID NO 13586102 as cited in SEQ ID NO 0
agaaacactatcgaacctcaaaatctctgttgccggaaattttcttcaccgaaactgaaagaagtcgaaagagagaagagaagaaattgaagcaatggagggagcagaggaagctggggctgagatagcggttgattcaaaggacttgcagcaacaaagcaaagctttcgacaagctcaccgatcgtgtcgaggatcgccagctcgattcctctcgtgttcaatcggctatggcttcgattgctgcttctagggaggctgatctgaatgctaagaggttgagggagaaagaactggcctctgtgaagatcaatcctgcagatgttgagtttattgtaaacgaacttgagatagaaaagaatgtggcggaaagaactctaagggagcacaaaggtgatgcggttgctgcgactaggcaattgctttcacgatatcctctatgatggagcaggaccattctttacttccaaggttttttgtatgtttgagaggttgagagcaagtctcctaatatttaaccgagttaaaattgtctattgctgaaccgatctctctgagaagccctgaatacagttacaatcgattctggggtggtgttttgtggttctacctgaagtttgaagttcaatcttattatcaagatataagaatgtgttcttcgttt

SEQ ID NO: 26995 - protein, 115 aa, Arabidopsis thaliana
  peptide (1)..(115): Ceres Seq. ID no. 12323565
MEGAEEAGAEIAVDSKDLQQQSKAFDKLTDRVEDRQLDSSRVQSAMASIAASREADLNAKRLREKELASVKINPADVEFIVNELEIEKNVAERTLREHKGDAVAATRQLLSRYPL

SEQ ID NO: 26996 - protein, 70 aa, Arabidopsis thaliana
  peptide (1)..(70): Ceres Seq. ID no. 12323566
MASIAASREADLNAKRLREKELASVKINPADVEFIVNELEIEKNVAERTLREHKGDAVAATRQLLSRYPL

SEQ ID NO: 26997 - DNA, 773 bp, Arabidopsis thaliana
  misc_feature (1)..(773): Ceres Seq. ID no. 12466393
  misc_feature (1)..(773): Ortholog of  Ceres SEQ ID NO 13663563 as cited in SEQ ID NO 66853
acaattcgcaagctatcttcctttcttcttcgcaatctcaaaatccaaaattttctgcaacccgaatcagaaacctccaacatcgtcatgggtttaattcctcaaccacaagaatcgatccaagaatctcattactacacacataaactcttcctcactgcaaactacgtcctcctcggtgcatcgtcaagctgcatcttcctcactctctctctccgtctaatcccttcactctgcggtttcttcctcatcctccttcacgccaccacgatcgcagccgccgtctcaggctgtgcagccgcatcttatggtaagaaccggtggtacgcagctcacatgatcgcaactgtccttaccgccattttccaaggctcagtctctgttctcatctttaccaacacttcgaatttcctcgagagccttaactcttacgtccgtgagaaagaagcgtctatgatcttgaaactagctggtgggctctgtgttgtaatcttttgccttgagtggatcgttcttgttctcgcctttttcttgaagtactacgcttatgtcgatggtgataacaatggagttgctatgaaaaggactggtaaggttcagagtgaagagactctcaaaaattccccatgggcgttccaagtttgaagaaaaattcacttcttgtaatgattttgtttaagagaagagaggttgtatcaaatgttagtttgatctgtgtttcagggtttggtttatatgtattgaagaattgaattggttgattactttgttga

SEQ ID NO: 26998 - protein, 214 aa, Arabidopsis thaliana
  peptide (1)..(214): Ceres Seq. ID no. 12466394
TIRKLSSFLLRNLKIQNFLQPESETSNIVMGLIPQPQESIQESHYYTHKLFLTANYVLLGASSSCIFLTLSLRLIPSLCGFFLILLHATTIAAAVSGCAAASYGKNRWYAAHMIATVLTAIFQGSVSVLIFTNTSNFLESLNSYVREKEASMILKLAGGLCVVIFCLEWIVLVLAFFLKYYAYVDGDNNGVAMKRTGKVQSEETLKNSPWAFQV

SEQ ID NO: 26999 - protein, 185 aa, Arabidopsis thaliana
  peptide (1)..(185): Ceres Seq. ID no. 12466395
MGLIPQPQESIQESHYYTHKLFLTANYVLLGASSSCIFLTLSLRLIPSLCGFFLILLHATTIAAAVSGCAAASYGKNRWYAAHMIATVLTAIFQGSVSVLIFTNTSNFLESLNSYVREKEASMILKLAGGLCVVIFCLEWIVLVLAFFLKYYAYVDGDNNGVAMKRTGKVQSEETLKNSPWAFQV

SEQ ID NO: 27000 - DNA, 664 bp, Arabidopsis thaliana
  misc_feature (1)..(664): Ceres Seq. ID no. 13492620
  misc_feature (1)..(664): Ortholog of  Ceres SEQ ID NO 12608953 as cited in SEQ ID NO 51227
  misc_feature (1)..(664): Ortholog of  Ceres SEQ ID NO 12597253 as cited in SEQ ID NO 62959
gttaatttcgtcaagaaaaaaattcgatttttttgcgctctttgtgggttgttgttgttgaaaatggctggtcgtggaaaaactcttggatccggtggggcgaagaaagctacatctcggagtagcaaagccggtcttcaattcccggtgggtcgtatcgctcgtttcttaaaagccggtaaatacgccgaacgtgttggtgccggtgctccggtttatctcgccgccgttctcgaatatttggccgccgaggttcttgaattagctggaaacgcagcaagagacaacaagaagacacgtattgttcctcgtcacattcagcttgcggtcagaaacgatgaggagctaagcaagcttcttggagatgtgacgattgctaatggaggagtgatgcctaacatccacaatctccttctccctaagaaggctggtgcttcaaagcctcaggaagattaggtcttttaacacaatgatatagaacacgtctctcttttggctttagatctaataacctaataactagctagatgttttcactttttgtatctttgctttttttaattcctttagggatttgtttctttccgtttctgtttcgacatgttgtttctgtttttgtgaatatatgaaagtattttgcgaaaaatgaatgataatgtctttc

SEQ ID NO: 27001 - protein, 151 aa, Arabidopsis thaliana
  peptide (1)..(151): Ceres Seq. ID no. 13492621
VNFVKKKIRFFCALCGLLLLKMAGRGKTLGSGGAKKATSRSSKAGLQFPVGRIARFLKAGKYAERVGAGAPVYLAAVLEYLAAEVLELAGNAARDNKKTRIVPRHIQLAVRNDEELSKLLGDVTIANGGVMPNIHNLLLPKKAGASKPQED

SEQ ID NO: 27002 - protein, 130 aa, Arabidopsis thaliana
  peptide (1)..(130): Ceres Seq. ID no. 13492622
MAGRGKTLGSGGAKKATSRSSKAGLQFPVGRIARFLKAGKYAERVGAGAPVYLAAVLEYLAAEVLELAGNAARDNKKTRIVPRHIQLAVRNDEELSKLLGDVTIANGGVMPNIHNLLLPKKAGASKPQED

SEQ ID NO: 27003 - DNA, 658 bp, Arabidopsis thaliana
  misc_feature (1)..(658): Ceres Seq. ID no. 12331423
  misc_feature (1)..(658): Ortholog of  Ceres SEQ ID NO 13595376 as cited in SEQ ID NO 56084
  misc_feature (1)..(658): Ortholog of  Ceres SEQ ID NO 12593187 as cited in SEQ ID NO 60652
agtaaaaaaaaatatcctctctcttgttctttctcgcgttctgctctctcgatttcagccaagagatgtcggcatacgacaatgttattggtgggaagctaaagctaaaagggaaggctttggatgtgaaagcaggtggagtaaagaagaagaagaaacataagagacaggaagaacaagctcttaaaattactgatcatgaactcatagaaggagaaagcactgaagcattgggtaaattgattgaaggagaagaaggagatgaagaaatgaacaggagtgaaaaggcaagcgaggatgcgaagttgcagcagcagctcgatgatgatgatcacttaacgccagcagaaaggcgatacatagagcagaaacaaagattggatgtgcagaagctagctaaggaagcgaacaagtctcaccgtaacaggattgaggatttcaatcagtatctggctaacatgagtgagcactacgatatccctaaagtcggacctggttaatataattctttcttgtctttgttttactctgcttatctattttgcatcgttaaacgactactttggatgtctgttatgtttagtccctttaacttttgaatgatgtgatcgcaaatctgtaatgtcaaaaacacattttcttggaatatttcttctgc

SEQ ID NO: 27004 - protein, 144 aa, Arabidopsis thaliana
  peptide (1)..(144): Ceres Seq. ID no. 12331424
MSAYDNVIGGKLKLKGKALDVKAGGVKKKKKHKRQEEQALKITDHELIEGESTEALGKLIEGEEGDEEMNRSEKASEDAKLQQQLDDDDHLTPAERRYIEQKQRLDVQKLAKEANKSHRNRIEDFNQYLANMSEHYDIPKVGPG

SEQ ID NO: 27005 - protein, 76 aa, Arabidopsis thaliana
  peptide (1)..(76): Ceres Seq. ID no. 12331425
MNRSEKASEDAKLQQQLDDDDHLTPAERRYIEQKQRLDVQKLAKEANKSHRNRIEDFNQYLANMSEHYDIPKVGPG

SEQ ID NO: 27006 - DNA, 790 bp, Arabidopsis thaliana
  misc_feature (1)..(790): Ceres Seq. ID no. 12330008
  misc_feature (1)..(790): Ortholog of  Ceres SEQ ID NO 13661557 as cited in SEQ ID NO 60999
aagtctcttttctcctcgtctctgcctagccgataaattcgccgttctccatcggtaaacgcagctgaggagctagataattctctgatatctgcgttacgccggtgtggaagcaaaatttaggttaatcggatctcaattatggacgaagaggcagcaaaacctagagactccaccgtgaatcagcaacatcaatactattacggaacgtttcaaggcgttgcgaattttcctactcctgctccaccaccgcaatttatgcaaccacagcatccgattactacgtttcctggacatgcttaccaaaatctccaaggtcatggtggtggtgtgaattatgctcaaggattcccagttgttgttcctgattatacagtggttgaggtgagaccaatgatagagcatgaacttccttgttgtggcttgggcatgggctggtttctgtttatcatgggcttcttgttcggtgggatcccttggtacctcggtgcttttattgttctagtcacatctgttgatcaccgcgagaaagctggttacgttgcctgttcaatcgcatccgttgtctatttgattgccgtcatgctcgggatgactggggatattaacatctggtgaaactactccccagccaaaaccaaactcaatcttgtatatatatctacatatatactcgaaaacgtagatatatatcaatatcatttacaccagttattgctgattttagtgagttacagaagggaaatatttgtaactttgtgttgaattttatatcataactaaatattgt

SEQ ID NO: 27007 - protein, 158 aa, Arabidopsis thaliana
  peptide (1)..(158): Ceres Seq. ID no. 12330009
MDEEAAKPRDSTVNQQHQYYYGTFQGVANFPTPAPPPQFMQPQHPITTFPGHAYQNLQGHGGGVNYAQGFPVVVPDYTVVEVRPMIEHELPCCGLGMGWFLFIMGFLFGGIPWYLGAFIVLVTSVDHREKAGYVACSIASVVYLIAVMLGMTGDINIW

SEQ ID NO: 27008 - protein, 119 aa, Arabidopsis thaliana
  peptide (1)..(119): Ceres Seq. ID no. 12330010
MQPQHPITTFPGHAYQNLQGHGGGVNYAQGFPVVVPDYTVVEVRPMIEHELPCCGLGMGWFLFIMGFLFGGIPWYLGAFIVLVTSVDHREKAGYVACSIASVVYLIAVMLGMTGDINIW

SEQ ID NO: 27009 - DNA, 663 bp, Arabidopsis thaliana
  misc_feature (1)..(663): Ceres Seq. ID no. 12673973
  misc_feature (1)..(663): Ortholog of  Ceres SEQ ID NO 15169763 as cited in SEQ ID NO 1284
  misc_feature (1)..(663): Ortholog of  Ceres SEQ ID NO 12610243 as cited in SEQ ID NO 56206
  misc_feature (1)..(663): Ortholog of  Ceres SEQ ID NO 13661089 as cited in SEQ ID NO 61053
  misc_feature (1)..(663): Ortholog of  Ceres SEQ ID NO 12586495 as cited in SEQ ID NO 64946
aaacctaagagacagagagatcttaacacaaaacaaagcaaacaccaaaaaaaacagagatgggtttggttacagatgaagtgagagctagggcagagaaatacacaggagatgagatatgccgtgagaagacaaaggagtttctcaaggaagtttctatgcctaatggtttattgccattgaaggacattgaagaagttggttacgacagagagacaggtattgtctggctgaagcagaagaagagcatcacccacaagtttgaagccattggtaaacttgtctcttacgccaccgaggtcattgcacaggtggaggtcggaaagatcaagaagcttaccggtgttaaggccaaggagcttcttatttgggtcactctcaatgagcttgtcttggagcagccgacaagttcagggaagatcaatttcaggacaccaactggtctgtccaggactttcccagtgtctgctttcgttgttcctgaagttgagaagcctgcaacggagaagaacaatggaaccactgaggtcaaagaagctgttgcagtcacagatgcttagtctctctaatcttattaatcttatccttccaatcatgaattactttctgctatttgctgcttaatttccttttatcaataagatgatacaatttcagatttgg

SEQ ID NO: 27010 - protein, 166 aa, Arabidopsis thaliana
  peptide (1)..(166): Ceres Seq. ID no. 12673974
MGLVTDEVRARAEKYTGDEICREKTKEFLKEVSMPNGLLPLKDIEEVGYDRETGIVWLKQKKSITHKFEAIGKLVSYATEVIAQVEVGKIKKLTGVKAKELLIWVTLNELVLEQPTSSGKINFRTPTGLSRTFPVSAFVVPEVEKPATEKNNGTTEVKEAVAVTDA

SEQ ID NO: 27011 - protein, 133 aa, Arabidopsis thaliana
  peptide (1)..(133): Ceres Seq. ID no. 12673975
MPNGLLPLKDIEEVGYDRETGIVWLKQKKSITHKFEAIGKLVSYATEVIAQVEVGKIKKLTGVKAKELLIWVTLNELVLEQPTSSGKINFRTPTGLSRTFPVSAFVVPEVEKPATEKNNGTTEVKEAVAVTDA

SEQ ID NO: 27012 - DNA, 992 bp, Arabidopsis thaliana
  misc_feature (1)..(992): Ceres Seq. ID no. 12340249
  misc_feature (1)..(992): Ortholog of  Ceres SEQ ID NO 15172070 as cited in SEQ ID NO 59663
ataagcttgagaacacttgaaaagacaagattcgcgagttcttcgttcttcgttctgccttttttttttttttgtgtgttcgagagatgtctgcctttgaagacgattccttcgtcatactcaacgatgatgcgtctgagtctgttccagtctcaggctcttttgacgccactgaatctttctcagctttcgacggctcactccaagtcgaggactccgtcgacgatgtttttgcagcgccgtcttctgactacggtgcttactccaacggtgacggcatcttcggatccaacggggatcacgacggtcctatcttgccaccaccgtcggagatggaatcagatgagggatttgctcttagagaatggagaagacaaaatgcaattcaacttgaggagaaggagaagagagaaaaggaattgttgaagcaaattattgaggaagctgatcaatacaaagaagagtttcataagaagattgaagtaacttgtgaaaacaacaaagcagctaacagagagaaggaaaagctgtatctggagaaccaagagaagttctacgcggaatccagcaagaattactggaaggcaatagcagagctagttcctaaagaagttccaacaatagagaaaaggagaggaaaaaaagagcaacaagatcctaagaagccaacagtctctgtgattcaaggtccaaagcccggtaagccaaccgatctaacaagaatgagacaaatattggtgaagctcaaacacaacccaccttctcacctgaaactcacttctcaacctccatcggaggaggcggctgctcctccaaagaatgttcccgaaaccaagcccactgaggcagttactgctgcttaaaaacctcttttgttttcttattcgttgcttacatctgtgtgaattcagtctttgcatttcattatgtgttataaacagctgagagattttatggttcatgtgtgttattaacataattatgtcatattg

SEQ ID NO: 27013 - protein, 258 aa, Arabidopsis thaliana
  peptide (1)..(258): Ceres Seq. ID no. 12340250
MSAFEDDSFVILNDDASESVPVSGSFDATESFSAFDGSLQVEDSVDDVFAAPSSDYGAYSNGDGIFGSNGDHDGPILPPPSEMESDEGFALREWRRQNAIQLEEKEKREKELLKQIIEEADQYKEEFHKKIEVTCENNKAANREKEKLYLENQEKFYAESSKNYWKAIAELVPKEVPTIEKRRGKKEQQDPKKPTVSVIQGPKPGKPTDLTRMRQILVKLKHNPPSHLKLTSQPPSEEAAAPPKNVPETKPTEAVTAA

SEQ ID NO: 27014 - protein, 176 aa, Arabidopsis thaliana
  peptide (1)..(176): Ceres Seq. ID no. 12340251
MESDEGFALREWRRQNAIQLEEKEKREKELLKQIIEEADQYKEEFHKKIEVTCENNKAANREKEKLYLENQEKFYAESSKNYWKAIAELVPKEVPTIEKRRGKKEQQDPKKPTVSVIQGPKPGKPTDLTRMRQILVKLKHNPPSHLKLTSQPPSEEAAAPPKNVPETKPTEAVTAA

SEQ ID NO: 27015 - protein, 141 aa, Arabidopsis thaliana
  peptide (1)..(141): Ceres Seq. ID no. 12340252
ISLRTLEKTRFASSSFFVLPFFFFCVFERCLPLKTIPSSYSTMMRLSLFQSQALLTPLNLSQLSTAHSKSRTPSTMFLQRRLLTTVLTPTVTASSDPTGITTVLSCHHRRRWNQMRDLLLENGEDKMQFNLRRRRREKRNC

SEQ ID NO: 27016 - DNA, 628 bp, Arabidopsis thaliana
  misc_feature (1)..(628): Ceres Seq. ID no. 12384747
  misc_feature (1)..(628): Ortholog of  Ceres SEQ ID NO 13655766 as cited in SEQ ID NO 64583
aaaaagatctgaaagaaataaaaaacgaatcggaagagagagagagagagagagattggagctagttggagatgggaataaggttcatattgatggtgaacaagcaaggccagactcgtcttgctcagtactacgaatggctcactctcgaggaacgtcgcgctctcgaaggcgaaatcgtccgtaaatgcctcgctcgcaacgaccaacagtgttcgtttgtcgagcatcgcaactacaagatagtctacaggcgttacgcatctctcttcttcatggttggggttgatgacgatgaaaacgagctggcgattctagagttcatacatcttttggtcgagacaatggacaagcattttggaaatgtgtgtgagctagacataatgttccatctggagaaagctcatttcatgctggaagaaatggtgatgaatggttgcattgtggagacaagcaaagccaacatactttcacctatacaacttatggacaaagcccattaatgctaaacaccctgtttctatttctgttaatccgtttcatcactttgttacacacttcttcttgtattattattaacgatgcttcaaagagaggataatacaaaagaagcaggaaatcgaaaagt

SEQ ID NO: 27017 - protein, 143 aa, Arabidopsis thaliana
  peptide (1)..(143): Ceres Seq. ID no. 12384748
MGIRFILMVNKQGQTRLAQYYEWLTLEERRALEGEIVRKCLARNDQQCSFVEHRNYKIVYRRYASLFFMVGVDDDENELAILEFIHLLVETMDKHFGNVCELDIMFHLEKAHFMLEEMVMNGCIVETSKANILSPIQLMDKAH

SEQ ID NO: 27018 - protein, 136 aa, Arabidopsis thaliana
  peptide (1)..(136): Ceres Seq. ID no. 12384749
MVNKQGQTRLAQYYEWLTLEERRALEGEIVRKCLARNDQQCSFVEHRNYKIVYRRYASLFFMVGVDDDENELAILEFIHLLVETMDKHFGNVCELDIMFHLEKAHFMLEEMVMNGCIVETSKANILSPIQLMDKAH

SEQ ID NO: 27019 - protein, 75 aa, Arabidopsis thaliana
  peptide (1)..(75): Ceres Seq. ID no. 12384750
MVGVDDDENELAILEFIHLLVETMDKHFGNVCELDIMFHLEKAHFMLEEMVMNGCIVETSKANILSPIQLMDKAH

SEQ ID NO: 27020 - DNA, 853 bp, Arabidopsis thaliana
  misc_feature (1)..(853): Ceres Seq. ID no. 13645771
  misc_feature (1)..(853): Ortholog of  Ceres SEQ ID NO 14308278 as cited in SEQ ID NO 55403
  misc_feature (1)..(853): Ortholog of  Ceres SEQ ID NO 12618176 as cited in SEQ ID NO 64489
  misc_feature (1)..(853): Ortholog of  Ceres SEQ ID NO 15179231 as cited in SEQ ID NO 0
ctcaaaagagattctcacgatcgagcaagagagagatggatggtcgattacctgacaaaggcattctcaagagcgaggctctaaaacagtacatcatggaaacaacagcgtatccaagagaacacgaattgcttaaagaacttcgagaagctacaatccagagatatggaaatttaagcgagatgggagttccggttgatgaaagtctatttttatcgatgcttgtaaagatcatcaacgcgaaaaacactatcgagatcggtgtgttcaccggttactcacttttcaccgtagctcttgctttgcctgaagatggccgtattactgcgatagacattgatcaagcaggttacaatttgggactagagtttatgaagaaagcaggtgttgatcacaagatcaatttcattcaatctgatgctgttagaggcttagaccaattattgaacggggagaaacaagagtatgattttgcatttgtggatgctgacaagacgaactacgtttacttccttgagaagctccttaagttagtgaaggttggaggaatcattgccttcgacaacactttatggtttggtactctaattcagaaggaaaacgaagttccaggccatatgagagcttatagagaggcacttttagagttcaataagatattggctcgggatcctcgagtcgaaatcgctcaaatatccatcggagatggtctcacgctatgtagacgtcttatatgataaacctatagtaaataatgttatatggttcaataataactttggcctttgtttgtaatgttatatgctactataatgactcttcatcttcctaataaaactcctctttcaattcc

SEQ ID NO: 27021 - protein, 244 aa, Arabidopsis thaliana
  peptide (1)..(244): Ceres Seq. ID no. 13645772
QKRFSRSSKREMDGRLPDKGILKSEALKQYIMETTAYPREHELLKELREATIQRYGNLSEMGVPVDESLFLSMLVKIINAKNTIEIGVFTGYSLFTVALALPEDGRITAIDIDQAGYNLGLEFMKKAGVDHKINFIQSDAVRGLDQLLNGEKQEYDFAFVDADKTNYVYFLEKLLKLVKVGGIIAFDNTLWFGTLIQKENEVPGHMRAYREALLEFNKILARDPRVEIAQISIGDGLTLCRRLI

SEQ ID NO: 27022 - protein, 233 aa, Arabidopsis thaliana
  peptide (1)..(233): Ceres Seq. ID no. 13645773
MDGRLPDKGILKSEALKQYIMETTAYPREHELLKELREATIQRYGNLSEMGVPVDESLFLSMLVKIINAKNTIEIGVFTGYSLFTVALALPEDGRITAIDIDQAGYNLGLEFMKKAGVDHKINFIQSDAVRGLDQLLNGEKQEYDFAFVDADKTNYVYFLEKLLKLVKVGGIIAFDNTLWFGTLIQKENEVPGHMRAYREALLEFNKILARDPRVEIAQISIGDGLTLCRRLI

SEQ ID NO: 27023 - protein, 213 aa, Arabidopsis thaliana
  peptide (1)..(213): Ceres Seq. ID no. 13645774
METTAYPREHELLKELREATIQRYGNLSEMGVPVDESLFLSMLVKIINAKNTIEIGVFTGYSLFTVALALPEDGRITAIDIDQAGYNLGLEFMKKAGVDHKINFIQSDAVRGLDQLLNGEKQEYDFAFVDADKTNYVYFLEKLLKLVKVGGIIAFDNTLWFGTLIQKENEVPGHMRAYREALLEFNKILARDPRVEIAQISIGDGLTLCRRLI

SEQ ID NO: 27024 - DNA, 1870 bp, Arabidopsis thaliana
  misc_feature (1)..(1870): Ceres Seq. ID no. 12328430
  misc_feature (1)..(1870): Ortholog of  Ceres SEQ ID NO 14308221 as cited in SEQ ID NO 60363
aatcacaagacaaccacaaaactctcactccaaaactctcaattttgccttcctttgatcgaatactacaatggcgtctgtatctgcaattggagttctcaaggtacctcctgcttcgacttccaattccaccggaaaagccacggaggcggttcccacgaggactctttctttctcctcctctgttacttcatccgacgacaagatttcactcaaatccaccgtctcccgtctttgtaaatctgttgttcgcaggaatccgatcatcgtctctcccaaagccgtctcagattctcaaaactctcaaacttgtctcgatcctgatgctagcagcagtgttttggggataatcttaggaggtggagctggaactcgtctttatccacttacgaagaagagagcgaaaccagctgtgcctcttggtgctaactataggcttattgatattcctgtgagcaactgtttgaatagcaacatatccaagatctatgttcttactcagttcaattccgcgtctttgaatcgtcatctttcacgagcttatgctagtaacatgggaggttataagaatgaaggattcgttgaagttctcgctgctcaacagagtcctgaaaaccccaactggttccaggggacagctgatgccgtcaggcaatacttgtggttgttcgaggagcataatgtcttggagtatctcattcttgctggggatcatttgtatagaatggactatgagaagtttattcaagcacatagggagactgatgctgatatcacagtagctgcattaccaatggacgagcaacgagccactgcttttgggctgatgaagattgatgaggaaggacgtattattgaatttgctgaaaaaccaaaaggggagcacctaaaggccatgaaggttgacacaacaattctaggtcttgatgatcagagagccaaggagatgcctttcattgctagtatgggtatttatgttgtaagcagagatgtaatgctagacttactacggaatcagtttcctggagctaatgactttggaagtgaagtcattcccggtgccacttcccttggactgagggtgcaagcttacctatatgatggttactgggaagacattggtactatagaggcattttataacgctaatcttggaatcaccaagaaaccagttcctgattttagtttctatgaccgttctgctccgatctacacacagccgcgttatttaccaccgtctaagatgcttgatgctgatgttactgacagtgtcatcggagagggctgtgttatcaagaactgcaaaattcatcactctgtggttggactccgttcctgcatatcagaaggtgctattattgaagattcgttattaatgggagctgattattacgagactgctacggaaaagagcctcttaagcgcgaaaggaagtgtacccataggtattgggaaaaactcgcacatcaaaagggccatcatcgacaaaaacgcacgtatcggtgacaatgtcaagatcataaacagcgacaacgtgcaagaggcagcgagagagactgatggatatttcataaagagcggaattgtaacggttatcaaagacgccttaatcccaaccggcactgtcatctgaagtacacataatgctcctttgtttatttcttcatctttctaatgccctatcaataagttttctttatggctttttaagccccaataaatctactactagttgtaatgctgcttacgaaagagattacgaaatcatgttttcacaataccattgtctcttttgagaaaaaaagaagaccctatgaatttcactaaatttatcttttgtagcttattatcaataaaattaagtttctcc

SEQ ID NO: 27025 - protein, 520 aa, Arabidopsis thaliana
  peptide (1)..(520): Ceres Seq. ID no. 12328431
MASVSAIGVLKVPPASTSNSTGKATEAVPTRTLSFSSSVTSSDDKISLKSTVSRLCKSVVRRNPIIVSPKAVSDSQNSQTCLDPDASSSVLGIILGGGAGTRLYPLTKKRAKPAVPLGANYRLIDIPVSNCLNSNISKIYVLTQFNSASLNRHLSRAYASNMGGYKNEGFVEVLAAQQSPENPNWFQGTADAVRQYLWLFEEHNVLEYLILAGDHLYRMDYEKFIQAHRETDADITVAALPMDEQRATAFGLMKIDEEGRIIEFAEKPKGEHLKAMKVDTTILGLDDQRAKEMPFIASMGIYVVSRDVMLDLLRNQFPGANDFGSEVIPGATSLGLRVQAYLYDGYWEDIGTIEAFYNANLGITKKPVPDFSFYDRSAPIYTQPRYLPPSKMLDADVTDSVIGEGCVIKNCKIHHSVVGLRSCISEGAIIEDSLLMGADYYETATEKSLLSAKGSVPIGIGKNSHIKRAIIDKNARIGDNVKIINSDNVQEAARETDGYFIKSGIVTVIKDALIPTGTVI

SEQ ID NO: 27026 - protein, 359 aa, Arabidopsis thaliana
  peptide (1)..(359): Ceres Seq. ID no. 12328432
MGGYKNEGFVEVLAAQQSPENPNWFQGTADAVRQYLWLFEEHNVLEYLILAGDHLYRMDYEKFIQAHRETDADITVAALPMDEQRATAFGLMKIDEEGRIIEFAEKPKGEHLKAMKVDTTILGLDDQRAKEMPFIASMGIYVVSRDVMLDLLRNQFPGANDFGSEVIPGATSLGLRVQAYLYDGYWEDIGTIEAFYNANLGITKKPVPDFSFYDRSAPIYTQPRYLPPSKMLDADVTDSVIGEGCVIKNCKIHHSVVGLRSCISEGAIIEDSLLMGADYYETATEKSLLSAKGSVPIGIGKNSHIKRAIIDKNARIGDNVKIINSDNVQEAARETDGYFIKSGIVTVIKDALIPTGTVI

SEQ ID NO: 27027 - protein, 302 aa, Arabidopsis thaliana
  peptide (1)..(302): Ceres Seq. ID no. 12328433
MDYEKFIQAHRETDADITVAALPMDEQRATAFGLMKIDEEGRIIEFAEKPKGEHLKAMKVDTTILGLDDQRAKEMPFIASMGIYVVSRDVMLDLLRNQFPGANDFGSEVIPGATSLGLRVQAYLYDGYWEDIGTIEAFYNANLGITKKPVPDFSFYDRSAPIYTQPRYLPPSKMLDADVTDSVIGEGCVIKNCKIHHSVVGLRSCISEGAIIEDSLLMGADYYETATEKSLLSAKGSVPIGIGKNSHIKRAIIDKNARIGDNVKIINSDNVQEAARETDGYFIKSGIVTVIKDALIPTGTVI

SEQ ID NO: 27028 - DNA, 485 bp, Arabidopsis thaliana
  misc_feature (1)..(485): Ceres Seq. ID no. 12676418
  misc_feature (1)..(485): Ortholog of  Ceres SEQ ID NO 13582124 as cited in SEQ ID NO 51028
  misc_feature (1)..(485): Ortholog of  Ceres SEQ ID NO 15176134 as cited in SEQ ID NO 0
aagcctttgttgtgttctttacctctcttcacgaaatcccatttgagaaagtactgctaaaaaaatggcttctcctattcccgtcggcgttactaaggaacaggcgtttagtatggcacaaacggagatggagtatcgcgtggaactctttaacaagcttgctcaaacatgctttaataaatgtgtggataaaaggtacaaggaagctgagctaaacatgggtgagaatagttgcatcgaccgttgtgtttccaagtactggcaggtaaatggaatggttggacagcttctaagtgctggcaagcctcccgtgtaatccagtttaaaggcaattattacagaccaaaaagctcatggagggaacacaactctgttctttgtttttctaaagtttaaggcaatcttgtttttattgtcaagaaagttgcatcacatttttggcgctgatttggacaaattatgcaattccatgtgaacccattatt

SEQ ID NO: 27029 - protein, 83 aa, Arabidopsis thaliana
  peptide (1)..(83): Ceres Seq. ID no. 12676419
MASPIPVGVTKEQAFSMAQTEMEYRVELFNKLAQTCFNKCVDKRYKEAELNMGENSCIDRCVSKYWQVNGMVGQLLSAGKPPV

SEQ ID NO: 27030 - protein, 70 aa, Arabidopsis thaliana
  peptide (1)..(70): Ceres Seq. ID no. 12676420
AFVVFFTSLHEIPFEKVLLKKWLLLFPSALLRNRRLVWHKRRWSIAWNSLTSLLKHALINVWIKGTRKLS

SEQ ID NO: 27031 - protein, 67 aa, Arabidopsis thaliana
  peptide (1)..(67): Ceres Seq. ID no. 12676421
MAQTEMEYRVELFNKLAQTCFNKCVDKRYKEAELNMGENSCIDRCVSKYWQVNGMVGQLLSAGKPPV

SEQ ID NO: 27032 - DNA, 656 bp, Arabidopsis thaliana
  misc_feature (1)..(656): Ceres Seq. ID no. 12330054
  misc_feature (1)..(656): Ortholog of  Ceres SEQ ID NO 12610253 as cited in SEQ ID NO 56230
aagctgctgctttgatcatcatcttcctcttatagcttccgagagatttatatcaatcaccatgtcgaggatcttcgccattcttcctctcgctgctgtttttcttctcctccttgtttcaccgattgtagccatcgatgtccattactgtgaagagaacgcagagtatgaagttaaagtgaaagaggttgatatatctcctaatcctatagcaccaggcgagccagctactttcaccatctctgccgacacaggccgtgagatttcgtttgggaagctggtgattgaagtttcatactttggatggcatgttcactctgagactcatgacctctgcactgagactagttgtcctatacaaaccggagatttcttggttgcacactctcaagttcttcctggttatactcctcctggttcatacttgctgaaaatgaagatgcttgatgcaaagaagaaggagttaacatgcatcaaattctcgttcgacattggactcagagcatctgtggctgacatttagagcagcttcacctgtattggtgattgtagagatagtttaggaaaattgttaattctttctatatcagttatgtcagaccctgaatgtgaaggtgatcttattttttggacaccaatgtgaatgtgctttctcc

SEQ ID NO: 27033 - protein, 173 aa, Arabidopsis thaliana
  peptide (1)..(173): Ceres Seq. ID no. 12330055
SCCFDHHLPLIASERFISITMSRIFAILPLAAVFLLLLVSPIVAIDVHYCEENAEYEVKVKEVDISPNPIAPGEPATFTISADTGREISFGKLVIEVSYFGWHVHSETHDLCTETSCPIQTGDFLVAHSQVLPGYTPPGSYLLKMKMLDAKKKELTCIKFSFDIGLRASVADI

SEQ ID NO: 27034 - protein, 153 aa, Arabidopsis thaliana
  peptide (1)..(153): Ceres Seq. ID no. 12330056
MSRIFAILPLAAVFLLLLVSPIVAIDVHYCEENAEYEVKVKEVDISPNPIAPGEPATFTISADTGREISFGKLVIEVSYFGWHVHSETHDLCTETSCPIQTGDFLVAHSQVLPGYTPPGSYLLKMKMLDAKKKELTCIKFSFDIGLRASVADI

SEQ ID NO: 27035 - DNA, 988 bp, Arabidopsis thaliana
  misc_feature (1)..(988): Ceres Seq. ID no. 12327444
  misc_feature (1)..(988): Ortholog of  Ceres SEQ ID NO 13661969 as cited in SEQ ID NO 61215
  misc_feature (1)..(988): Ortholog of  Ceres SEQ ID NO 12614809 as cited in SEQ ID NO 68808
  misc_feature (1)..(988): Ortholog of  Ceres SEQ ID NO 12634366 as cited in SEQ ID NO 0
  misc_feature (1)..(988): Ortholog of  Ceres SEQ ID NO 14309113 as cited in SEQ ID NO 0
  misc_feature (1)..(988): Ortholog of  Ceres SEQ ID NO 15175257 as cited in SEQ ID NO 0
attttcttgtcttcgtatagaatcaaaaaaaaagtaacgacgatgcaaatatactatatattacataggtttcaccagatcatctcgaatcttaatcacattattaatacaattacatagaaggagcaattaaatctctatatataaaaggaagcgtgtgtttcgccttctcttttcaccattttcagttactttctctctttcatcttttaccattctcttcttcttttttttctctcattctgatcatggcttcctctatttccactggagtgaaatttgttccagaagaagataatttcttgcagagacatgtcgcttttttcgataggaacaaagatggtatcgtttatccctcggagacatttcaaggatttagagcaattgggtgtggatatttgttgtcagcagtcgcttctgtgttcataaacataggtctcagcagcaaaactcgtccgggtaaaggattctctatctggtttcctatagaggttaagaatattcaccttgccaaacacggaagcgattcaggcgtttacgacaaagatggacggtttgttgcttcgaagtttgaggagatatttacgaagcatgcacacacacatcgcgatgctttgaccaacgaggaactcaaacaactcctaaaggcaaacaaagaacctaatgatcgtaaaggatggcttgcagggtatacggagtggaaggtattgcattatttgtgtaaagacaagaatggtttgttgcacaaagacacagtgagagctgcctacgatggttctcttttcgaaaaactcgagaaacaaagatcttctaaaacttctaagaaacatccataaatccttatttaaatataatcaagctctcctgcatgcttgtggatctgtttatttttaaaactattacttcaatgttatagtgaatatttatggtgtgaagattgtaatgagttttaacaacaataaaaaaaacatgtaatgtgtttaattat

SEQ ID NO: 27036 - protein, 195 aa, Arabidopsis thaliana
  peptide (1)..(195): Ceres Seq. ID no. 12327445
MASSISTGVKFVPEEDNFLQRHVAFFDRNKDGIVYPSETFQGFRAIGCGYLLSAVASVFINIGLSSKTRPGKGFSIWFPIEVKNIHLAKHGSDSGVYDKDGRFVASKFEEIFTKHAHTHRDALTNEELKQLLKANKEPNDRKGWLAGYTEWKVLHYLCKDKNGLLHKDTVRAAYDGSLFEKLEKQRSSKTSKKHP

SEQ ID NO: 27037 - DNA, 1195 bp, Arabidopsis thaliana
  misc_feature (1)..(1195): Ceres Seq. ID no. 12370669
  misc_feature (1)..(1195): Ortholog of  Ceres SEQ ID NO 14303340 as cited in SEQ ID NO 54642
gttccgattaggaacttcctctccggcgactgaactttttctggaaatggatagtgaaggagcttcaagcgagtcttcttcttctggagatcagctcgagaagtggacagaagagcaggatgagctgaagaagaaactgatcgcgtacgatgacttcacatggaagttatcttcatcaacggaactgtctcagggatcggagatacttaagtatgttggaggtgtagacatgagcttttgcaaagaagattcttccgtcgcatgcgcttgtctcgtcgttcttgagcttccttctctccgtgtagtccaccatgacttctctcttctccgcctccatgttccttatgtccctggatttcttgcctttcgtgaggctccggttcttttgcagattctgcagaagatgagagatgagaagcatccattctatcctcaggtactgatggtggatggaaatggaatacttcatccacgaggatttggcttggcgtgtcatttaggtgttcttgctcacctaccaaccattggggtcggaaagaatctgcatcatgtggatggtctgaatcaatctgaggttaaacagtcgcttcagctccaaataaacgagcatgagcaaactatcactttggtaggaaactctggaattacatggggagtaggatttaggccaactctgagttctctaaagcccatatatgtatcggttggccatcgcatatcactggactctgccgttgaagttgtcaagataacctgcaagtaccgtgttccagaacctattagacaggcagatattagatcaagagcatatctccagaagcatcaaactgagtcttttaaagaactggcagtgcgaccaccggatcagactgaaccttaatccctcaagcaaccaagaacactattccacattacatagaaactctccaaagtctttaccaaagattgttaaatggacagattcaggcactgaagatccgccccaattatctccttcatttatctcactgacttgaagattgcaagctaaccaaggtaatcatgttatatccgatacattggaatttcctttccatacataccttaaacaagtgtaaatagaaaggctaggcaactggtaatttggttgtttgggcactgtatattggaagattttggggttctcgacaaacaattctatagctttgggtttggc

SEQ ID NO: 27038 - protein, 292 aa, Arabidopsis thaliana
  peptide (1)..(292): Ceres Seq. ID no. 12370670
FRLGTSSPATELFLEMDSEGASSESSSSGDQLEKWTEEQDELKKKLIAYDDFTWKLSSSTELSQGSEILKYVGGVDMSFCKEDSSVACACLVVLELPSLRVVHHDFSLLRLHVPYVPGFLAFREAPVLLQILQKMRDEKHPFYPQVLMVDGNGILHPRGFGLACHLGVLAHLPTIGVGKNLHHVDGLNQSEVKQSLQLQINEHEQTITLVGNSGITWGVGFRPTLSSLKPIYVSVGHRISLDSAVEVVKITCKYRVPEPIRQADIRSRAYLQKHQTESFKELAVRPPDQTEP

SEQ ID NO: 27039 - protein, 277 aa, Arabidopsis thaliana
  peptide (1)..(277): Ceres Seq. ID no. 12370671
MDSEGASSESSSSGDQLEKWTEEQDELKKKLIAYDDFTWKLSSSTELSQGSEILKYVGGVDMSFCKEDSSVACACLVVLELPSLRVVHHDFSLLRLHVPYVPGFLAFREAPVLLQILQKMRDEKHPFYPQVLMVDGNGILHPRGFGLACHLGVLAHLPTIGVGKNLHHVDGLNQSEVKQSLQLQINEHEQTITLVGNSGITWGVGFRPTLSSLKPIYVSVGHRISLDSAVEVVKITCKYRVPEPIRQADIRSRAYLQKHQTESFKELAVRPPDQTEP

SEQ ID NO: 27040 - protein, 216 aa, Arabidopsis thaliana
  peptide (1)..(216): Ceres Seq. ID no. 12370672
MSFCKEDSSVACACLVVLELPSLRVVHHDFSLLRLHVPYVPGFLAFREAPVLLQILQKMRDEKHPFYPQVLMVDGNGILHPRGFGLACHLGVLAHLPTIGVGKNLHHVDGLNQSEVKQSLQLQINEHEQTITLVGNSGITWGVGFRPTLSSLKPIYVSVGHRISLDSAVEVVKITCKYRVPEPIRQADIRSRAYLQKHQTESFKELAVRPPDQTEP

SEQ ID NO: 27041 - DNA, 1356 bp, Arabidopsis thaliana
  misc_feature (1)..(1356): Ceres Seq. ID no. 12331465
  misc_feature (1)..(1356): Ortholog of  Ceres SEQ ID NO 14308615 as cited in SEQ ID NO 58538
  misc_feature (1)..(1356): Ortholog of  Ceres SEQ ID NO 13585342 as cited in SEQ ID NO 63601
aaacctctctcttctctcacttcccagctacttctctctctcgcgctctctctttcttttttggcaatggctactggatcaacaaccgattccgccaggtctccttcctcaggtgttctccaaaagctgttattactattctctgtctgtatagctgcttcaacttataaagcaatccagcctcctccatcaaagctatgtggctctcctgatggtccatccatcacaggaccaaggattaagctaagagacggaggcagttagcttacaaagagcatggagttcctagagatgaagctactcataaaatcatcgttgtccatggatctgatagttgcagacatgataatgctttcgcagctctactatcaccggatattaaggaaggactaggtgtgtatatggtttcatttgatagacctggttatgcagagagtgatcctgacccaaaccgtactcctaaaagcttggctttggacattgaagagcttgctgatcagttgagtctaggatcgaagttctatgtcatcggttactcgatgggaggacaagctacatgggcatgccttaaatacattcctcacaggttggctggagtaacgcttgttgctccagtggtgaactattggtggaagaactttccatcagagatctcaaccgaagcttttaaccaacaagggagaaatgaccaatgggcggttcgtgttgcacactatgctccttggcttactcattggtggaactcccagagctggttccctggatcaagtgttgtggctcgcaatctcggtatgttgtccaaagcagacaaagagatcatgtttaagctcggtgctgcaaggagccaacatgaggcacaaataaggcaacaaggaacacacgagacattgcaccgtgacatgattgttggatttggaagggagttcgatccaatggagctcgagaatctgttcccgaacaatgaaggatcagtgcacttgtggcagggagatgatgatgtgcttgtccctgtgactctgcaacgttacattgcgaagaagctgccatggatccattaccatgagattcctggagcagggcatttgttcccgtttgctccaggtatggttaataacattgttaaaacgctcttaaccaatgatggagtgaagaagtaaacgatgtcttctctctcaaaaagttggctagttttggttttgtaacatgcattgctatgatattttgaaccgggatcagagagattcatgagaatctcaagtttctcttggttgctgatatatattgtgggtgattagtaaagagttctggtacctatgtaaaacattctcagcattcatctcaaaaagctgtttctgg

SEQ ID NO: 27042 - protein, 251 aa, Arabidopsis thaliana
  peptide (1)..(251): Ceres Seq. ID no. 12331466
MVSFDRPGYAESDPDPNRTPKSLALDIEELADQLSLGSKFYVIGYSMGGQATWACLKYIPHRLAGVTLVAPVVNYWWKNFPSEISTEAFNQQGRNDQWAVRVAHYAPWLTHWWNSQSWFPGSSVVARNLGMLSKADKEIMFKLGAARSQHEAQIRQQGTHETLHRDMIVGFGREFDPMELENLFPNNEGSVHLWQGDDDVLVPVTLQRYIAKKLPWIHYHEIPGAGHLFPFAPGMVNNIVKTLLTNDGVKK

SEQ ID NO: 27043 - protein, 205 aa, Arabidopsis thaliana
  peptide (1)..(205): Ceres Seq. ID no. 12331467
MGGQATWACLKYIPHRLAGVTLVAPVVNYWWKNFPSEISTEAFNQQGRNDQWAVRVAHYAPWLTHWWNSQSWFPGSSVVARNLGMLSKADKEIMFKLGAARSQHEAQIRQQGTHETLHRDMIVGFGREFDPMELENLFPNNEGSVHLWQGDDDVLVPVTLQRYIAKKLPWIHYHEIPGAGHLFPFAPGMVNNIVKTLLTNDGVKK

SEQ ID NO: 27044 - DNA, 1427 bp, Arabidopsis thaliana
  misc_feature (1)..(1427): Ceres Seq. ID no. 13489694
  misc_feature (1)..(1427): Ortholog of  Ceres SEQ ID NO 13637685 as cited in SEQ ID NO 53978
  misc_feature (1)..(1427): Ortholog of  Ceres SEQ ID NO 14315989 as cited in SEQ ID NO 57571
acagtagtaggcacacacacattctcttctattttggcgaatttcgccttttgtgcattctctctctctctctcccggagtctcaggctttctcttaacttctcattctctccttggttgatgaaactggatcgatttgatagaacccagatcaaatctgttgacatttttccagatttcgatgcttttttgagattgggtttctctttcttttgatgaaacttatcactttcagcgttgcccagttttggccacaaggtgtttgttgaaattccggagagagagagaagctcgaaattgggaattctgtaaggaaaaaaaaatgagagattttccttcttgctctggtgaaaatggtgttcagattgcggactcttcgtcttcctcgagcgctggaagaaatgctcagaatttggtaatatgcatctaccgttgccgcatccgaggtaggacttgcttgatcacagtcacatggactaagaatctgatgggtcagtgtgttaccgtgggggttgatgattcttgcaaccgaagtctgtgtaaagtcgagattaagccgtggctcttcactaaacgaaaagggtccaagactctagaggcgtatgcctgtaatatcgatgttttctgggatctctcgtctgctaaatttggatccagccctgaacctttaggagggttctatgttggagttgttgttgacaaagagatggttcttcttcttggtgatatgaagaaagaagcttttaaaaagacgaatgctgcaccttcttcatctttaggtgctgtgttcattgctaagaaagagcatgtctttggcaagagaacgtttgcaactaaagctcagttttcaggtgatggcaaaactcatgatcttgtgatcgagtgtgacactagtctcagtgatccttgtctcattgttcgtgtcgatggaaagatcttgatgcaagtgcagcggcttcattggaagttccgtggcaacgataccataattgtcaatagaatctctgtggaagttctctgggatgtccacagttggttctttgggttgccatcatcaccaggaaatgcagtgtttatgttcaggacttgtcaatctgttgaaaagacctggtctttcacacaggtccccacgagctcaaaatctcaaagttttgggttttcattgattctgtatgcttggaagaacgagtagagaagaagagttttgagagttcttttgtttctcttgagtgctaactaaaggttaaaaaggaactgttgattcttgtcaatttattttatcatatgatcaattggtttcaattatagttttctcgtaaaatgttcgaaccggatcattgaagtatatatcagtttcatatgtcaaaagtttttacttgagacttgtaaagacttttgttcaaagccgattactttagccctgtatc

SEQ ID NO: 27045 - protein, 289 aa, Arabidopsis thaliana
  peptide (1)..(289): Ceres Seq. ID no. 13489695
MRDFPSCSGENGVQIADSSSSSSAGRNAQNLVICIYRCRIRGRTCLITVTWTKNLMGQCVTVGVDDSCNRSLCKVEIKPWLFTKRKGSKTLEAYACNIDVFWDLSSAKFGSSPEPLGGFYVGVVVDKEMVLLLGDMKKEAFKKTNAAPSSSLGAVFIAKKEHVFGKRTFATKAQFSGDGKTHDLVIECDTSLSDPCLIVRVDGKILMQVQRLHWKFRGNDTIIVNRISVEVLWDVHSWFFGLPSSPGNAVFMFRTCQSVEKTWSFTQVPTSSKSQSFGFSLILYAWKNE

SEQ ID NO: 27046 - protein, 234 aa, Arabidopsis thaliana
  peptide (1)..(234): Ceres Seq. ID no. 13489696
MGQCVTVGVDDSCNRSLCKVEIKPWLFTKRKGSKTLEAYACNIDVFWDLSSAKFGSSPEPLGGFYVGVVVDKEMVLLLGDMKKEAFKKTNAAPSSSLGAVFIAKKEHVFGKRTFATKAQFSGDGKTHDLVIECDTSLSDPCLIVRVDGKILMQVQRLHWKFRGNDTIIVNRISVEVLWDVHSWFFGLPSSPGNAVFMFRTCQSVEKTWSFTQVPTSSKSQSFGFSLILYAWKNE

SEQ ID NO: 27047 - protein, 161 aa, Arabidopsis thaliana
  peptide (1)..(161): Ceres Seq. ID no. 13489697
MVLLLGDMKKEAFKKTNAAPSSSLGAVFIAKKEHVFGKRTFATKAQFSGDGKTHDLVIECDTSLSDPCLIVRVDGKILMQVQRLHWKFRGNDTIIVNRISVEVLWDVHSWFFGLPSSPGNAVFMFRTCQSVEKTWSFTQVPTSSKSQSFGFSLILYAWKNE

SEQ ID NO: 27048 - DNA, 1227 bp, Arabidopsis thaliana
  misc_feature (1)..(1227): Ceres Seq. ID no. 12324143
  misc_feature (1)..(1227): Ortholog of  Ceres SEQ ID NO 14311981 as cited in SEQ ID NO 55703
aacaaacccaacaatctttgaaaacaaatcaccctttcgtttttatttaaatttcttgggtcgtttcttaaatttgtatgtgtttattaatggagatcaacaataatgccaacaatactaatactactattgataatcacaaggcaaagatgagccttgtgttgtcaacggatgctaagccaaggttgaaatggacttgtgatcttcatcacaaattcatcgaagccgttaatcaacttggaggacctaacaaagcaacacctaagggtttgatgaaggttatggagattcctgggcttaccttataccatctcaagagccatttacagaaatatcggttagggaagagcatgaagttcgatgataacaagctagaagtttcctctgcatcagagaatcaagaagttgagagtaaaaacgattcaagagatctccgaggctgcagtgtcaccgaagaaaacagcaatccagctaaagacagagggctacaaatcacagaggctttacaaatgcagatggaagttcagaagaaacttcatgaacaaatcgaagttcagaggcatttgcaggtgaagattgaggcacaaggaaagtatctacagtccgttttaatgaaagctcaacaaactctcgctggctactcatcttcaaatctcggcatggattttgcgaggaccgagctctctagattagcttcaatggtgaacagaggctgtccaagcacttcgttctcagagctaacgcaagtagaagaagaagaagaagcagaagaaggtttcttgtggtacaagaaaccagaaaacagaggaattagtcagctgagatgttcagtagagagctcgttgacatcttcagagacctcagagacaaaactggatactgacaataaccttaataaatcgattgaacttccgttgatggagatcaactcggaagtgatgaaggggaagaagagaagcataaacgacgtcgtttgcgtggagcagcctctaatgaagagagcttttggagttgatgatgatgagcatttgaagttgagtttgaatacttacaagaaagacatggaggcgtgtacgaacataggactagggtttaattaaaaaaaaaaacattttactaaagttatataaaaatgttttaaaagaatccagtaatatatatgcgtagatttctatcgattattgtagagattttgtgagtaagtcgtggtgaagaagaacgcatggg

SEQ ID NO: 27049 - protein, 340 aa, Arabidopsis thaliana
  peptide (1)..(340): Ceres Seq. ID no. 12324144
MCLLMEINNNANNTNTTIDNHKAKMSLVLSTDAKPRLKWTCDLHHKFIEAVNQLGGPNKATPKGLMKVMEIPGLTLYHLKSHLQKYRLGKSMKFDDNKLEVSSASENQEVESKNDSRDLRGCSVTEENSNPAKDRGLQITEALQMQMEVQKKLHEQIEVQRHLQVKIEAQGKYLQSVLMKAQQTLAGYSSSNLGMDFARTELSRLASMVNRGCPSTSFSELTQVEEEEEAEEGFLWYKKPENRGISQLRCSVESSLTSSETSETKLDTDNNLNKSIELPLMEINSEVMKGKKRSINDVVCVEQPLMKRAFGVDDDEHLKLSLNTYKKDMEACTNIGLGFN

SEQ ID NO: 27050 - protein, 336 aa, Arabidopsis thaliana
  peptide (1)..(336): Ceres Seq. ID no. 12324145
MEINNNANNTNTTIDNHKAKMSLVLSTDAKPRLKWTCDLHHKFIEAVNQLGGPNKATPKGLMKVMEIPGLTLYHLKSHLQKYRLGKSMKFDDNKLEVSSASENQEVESKNDSRDLRGCSVTEENSNPAKDRGLQITEALQMQMEVQKKLHEQIEVQRHLQVKIEAQGKYLQSVLMKAQQTLAGYSSSNLGMDFARTELSRLASMVNRGCPSTSFSELTQVEEEEEAEEGFLWYKKPENRGISQLRCSVESSLTSSETSETKLDTDNNLNKSIELPLMEINSEVMKGKKRSINDVVCVEQPLMKRAFGVDDDEHLKLSLNTYKKDMEACTNIGLGFN

SEQ ID NO: 27051 - protein, 316 aa, Arabidopsis thaliana
  peptide (1)..(316): Ceres Seq. ID no. 12324146
MSLVLSTDAKPRLKWTCDLHHKFIEAVNQLGGPNKATPKGLMKVMEIPGLTLYHLKSHLQKYRLGKSMKFDDNKLEVSSASENQEVESKNDSRDLRGCSVTEENSNPAKDRGLQITEALQMQMEVQKKLHEQIEVQRHLQVKIEAQGKYLQSVLMKAQQTLAGYSSSNLGMDFARTELSRLASMVNRGCPSTSFSELTQVEEEEEAEEGFLWYKKPENRGISQLRCSVESSLTSSETSETKLDTDNNLNKSIELPLMEINSEVMKGKKRSINDVVCVEQPLMKRAFGVDDDEHLKLSLNTYKKDMEACTNIGLGFN

SEQ ID NO: 27052 - DNA, 639 bp, Arabidopsis thaliana; identical to SEQ ID NO: 22252
  misc_feature (1)..(639): Ceres Seq. ID no. 13580410
  misc_feature (1)..(639): Ortholog of  Ceres SEQ ID NO 13581889 as cited in SEQ ID NO 50900
  misc_feature (1)..(639): Ortholog of  Ceres SEQ ID NO 13581902 as cited in SEQ ID NO 52223
  misc_feature (1)..(639): Ortholog of  Ceres SEQ ID NO 12585528 as cited in SEQ ID NO 62991

SEQ ID NO: 27053 - protein, 136 aa, Arabidopsis thaliana; identical to SEQ ID NO: 8709
  peptide (1)..(136): Ceres Seq. ID no. 13580411

SEQ ID NO: 27054 - protein, 83 aa, Arabidopsis thaliana; identical to SEQ ID NO: 22254
  peptide (1)..(83): Ceres Seq. ID no. 13580412

SEQ ID NO: 27055 - DNA, 725 bp, Arabidopsis thaliana
  misc_feature (1)..(725): Ceres Seq. ID no. 12332438
  misc_feature (1)..(725): Ortholog of  Ceres SEQ ID NO 13505291 as cited in SEQ ID NO 56614
  misc_feature (1)..(725): Ortholog of  Ceres SEQ ID NO 13596535 as cited in SEQ ID NO 62321
  misc_feature (1)..(725): Ortholog of  Ceres SEQ ID NO 13597394 as cited in SEQ ID NO 63457
gttcatcttttgattttgaaattgttagtaaagaaagaaaaaaagctttgatttcgatttctcaagctgtgtttttttatttttcttcttcgcatcaggaaggaattgaaaaagatttttggtgttaaaagatggatccagatgcagtcaaatcgactctctcgaatctagcatttggaaatgtaatggcggctgctgcaagaaattatcaaaaggaagttcttgcaaatgagaaggcgcaaggatcaaatcctgttaatgaagaggttgatgttgatgaacttatggatgatccagagctagaaagattgcacgcagataggattgcagcactaaagagagaggttgagaagagagaatcgtttaaaagacaagggcatggtgaatatcgagaggtgagtgaaggagatttcttgggtgaagtcaccaggagtgagaaagtgatatgtcatttctaccataaggaattttaccggtgcaagattatggacaagcatctgaaaactcttgcacctagacatgtggacacaaagttcattaaagtggacgcagagaatgctcctttctttgtcacgaagcttgcaataaagactttgccttgcgttgtgcttttcagcaagggagtcgcgatggataggctagttgggttccaggatctgggaaccaaggacgatttcacaacgaataaactagagaacgttcttcttaaaaagggaatgctcagc

SEQ ID NO: 27056 - protein, 198 aa, Arabidopsis thaliana
  peptide (1)..(198): Ceres Seq. ID no. 12332439
MDPDAVKSTLSNLAFGNVMAAAARNYQKEVLANEKAQGSNPVNEEVDVDELMDDPELERLHADRIAALKREVEKRESFKRQGHGEYREVSEGDFLGEVTRSEKVICHFYHKEFYRCKIMDKHLKTLAPRHVDTKFIKVDAENAPFFVTKLAIKTLPCVVLFSKGVAMDRLVGFQDLGTKDDFTTNKLENVLLKKGMLS

SEQ ID NO: 27057 - protein, 180 aa, Arabidopsis thaliana
  peptide (1)..(180): Ceres Seq. ID no. 12332440
MAAAARNYQKEVLANEKAQGSNPVNEEVDVDELMDDPELERLHADRIAALKREVEKRESFKRQGHGEYREVSEGDFLGEVTRSEKVICHFYHKEFYRCKIMDKHLKTLAPRHVDTKFIKVDAENAPFFVTKLAIKTLPCVVLFSKGVAMDRLVGFQDLGTKDDFTTNKLENVLLKKGMLS

SEQ ID NO: 27058 - protein, 147 aa, Arabidopsis thaliana
  peptide (1)..(147): Ceres Seq. ID no. 12332441
MDDPELERLHADRIAALKREVEKRESFKRQGHGEYREVSEGDFLGEVTRSEKVICHFYHKEFYRCKIMDKHLKTLAPRHVDTKFIKVDAENAPFFVTKLAIKTLPCVVLFSKGVAMDRLVGFQDLGTKDDFTTNKLENVLLKKGMLS

SEQ ID NO: 27059 - DNA, 750 bp, Arabidopsis thaliana
  misc_feature (1)..(750): Ceres Seq. ID no. 12420752
  misc_feature (1)..(750): Ortholog of  Ceres SEQ ID NO 15174384 as cited in SEQ ID NO 0
acacatttttttttcttcactcggactgatatgagtagccaaatcgctttgtcaccggccatcgccgccgccattcgccgtccgtcctctcacgactgtctatccgcttccgccactactgttaccgccacccccatggctctcaaatcttgcatcgtcgcacctctctcgctattcacctctcaatctcaaatcaaacactcaagctcaagaaaaacttctcgaaccacgattcgatgcgatgtagcgataaaatccgcagattcgataaacgcagacgccaatccttcgtcctcaccgtcatcagaggaagaaatcgaagcggaagcgaaggcgaagataggatctagggttagagtaactgcaccgttgaaggtttatcatgtaaatcgagttccagaggttgatttagaaggtatggaaggtaaactcaaagattacgttgctgtttggaaagggaaacgaatctcagctaatcttccttataagattgagttcttcaaagaaattgaaggtcgtggtcttgttaaatttgtttcacatcttaaggaagatgagttcgagttcattgatcagtgatgaaacaagaaagacaatttttgttttcctttctcagtgtttgtttttgtttgttgtgtttactggaacctgggaatggagaatgatttgtatgtagtgtgatgtgtattcaacctttagcaatcatatacataagggtgtcttcactctctgtttatgttgatttgattc

SEQ ID NO: 27060 - protein, 192 aa, Arabidopsis thaliana
  peptide (1)..(192): Ceres Seq. ID no. 12420753
THFFFFTRTDMSSQIALSPAIAAAIRRPSSHDCLSASATTVTATPMALKSCIVAPLSLFTSQSQIKHSSSRKTSRTTIRCDVAIKSADSINADANPSSSPSSEEEIEAEAKAKIGSRVRVTAPLKVYHVNRVPEVDLEGMEGKLKDYVAVWKGKRISANLPYKIEFFKEIEGRGLVKFVSHLKEDEFEFIDQ

SEQ ID NO: 27061 - protein, 182 aa, Arabidopsis thaliana
  peptide (1)..(182): Ceres Seq. ID no. 12420754
MSSQIALSPAIAAAIRRPSSHDCLSASATTVTATPMALKSCIVAPLSLFTSQSQIKHSSSRKTSRTTIRCDVAIKSADSINADANPSSSPSSEEEIEAEAKAKIGSRVRVTAPLKVYHVNRVPEVDLEGMEGKLKDYVAVWKGKRISANLPYKIEFFKEIEGRGLVKFVSHLKEDEFEFIDQ

SEQ ID NO: 27062 - protein, 147 aa, Arabidopsis thaliana
  peptide (1)..(147): Ceres Seq. ID no. 12420755
MALKSCIVAPLSLFTSQSQIKHSSSRKTSRTTIRCDVAIKSADSINADANPSSSPSSEEEIEAEAKAKIGSRVRVTAPLKVYHVNRVPEVDLEGMEGKLKDYVAVWKGKRISANLPYKIEFFKEIEGRGLVKFVSHLKEDEFEFIDQ

SEQ ID NO: 27063 - DNA, 1024 bp, Arabidopsis thaliana
  misc_feature (1)..(1024): Ceres Seq. ID no. 12394829
  misc_feature (1)..(1024): Ortholog of  Ceres SEQ ID NO 13597333 as cited in SEQ ID NO 63974
  misc_feature (1)..(1024): Ortholog of  Ceres SEQ ID NO 12407937 as cited in SEQ ID NO 0
  misc_feature (1)..(1024): Ortholog of  Ceres SEQ ID NO 13599307 as cited in SEQ ID NO 0
acttcttctagtcttaaaataaaacaaacaaaaaaatcagtgttcggctctaacacgctcgacgaccatggcggtctcgtttaatacaacgcttcaccagccttctctgagtcccagctgtagcatcaagctttattctgggttaaagcctcaatctgcaagctttttggcaagtgggtatcagaatttgaataaggagttctatggaagagttcataagagtctgcaatctgggactggcaaagcgagcaggtcacgggtaaagatgatgccaataggaacaccgagagtgccctacagaaaccgtgaagaaggcacttggcaatgggttgatatatggaatgccctttatcgagagcgtgtaatcttcattggacaaaacattgatgaagagtttagcaaccagatattagcaaccatgttgtaccttgatactcttgatgactcgaggaggatttatatgtacctaaatggtccgggtggtgatcttactccaagtctagccatctatgatacaatgaagagcttgaaaagtccggttgggacacattgcgttgggcttgcttacaaccttgcaggttttcttcttgcggctggagaaaagggtcaccgatttgcgatgccattgtcaagaatcgccctccaatcaccagctggtgcagcccgtggccaggctgatgatatccaaaatgaagcaaaagagctttcaaggataagagactacctcttcaatgaactagccaagaatacaggccagcctgcggaaagggtcttcaaagacttgagccgggtgaaaaggttcaatgcagaggaagcaatcgagtatggacttattgataagattgttagaccaccgcgcatcaaagaagacgctcctcgccaagacgaaagcgcagggctaggctagtcttttttgtttgtttgttatgtcaaaagttttaatctttatgttattgtgattgtgattgttacctaaaaaaatcactgattattgttttttcattccaccgattttctgatttct

SEQ ID NO: 27064 - protein, 279 aa, Arabidopsis thaliana
  peptide (1)..(279): Ceres Seq. ID no. 12394830
MAVSFNTTLHQPSLSPSCSIKLYSGLKPQSASFLASGYQNLNKEFYGRVHKSLQSGTGKASRSRVKMMPIGTPRVPYRNREEGTWQWVDIWNALYRERVIFIGQNIDEEFSNQILATMLYLDTLDDSRRIYMYLNGPGGDLTPSLAIYDTMKSLKSPVGTHCVGLAYNLAGFLLAAGEKGHRFAMPLSRIALQSPAGAARGQADDIQNEAKELSRIRDYLFNELAKNTGQPAERVFKDLSRVKRFNAEEAIEYGLIDKIVRPPRIKEDAPRQDESAGLG

SEQ ID NO: 27065 - protein, 213 aa, Arabidopsis thaliana; identical to SEQ ID NO: 26213
  peptide (1)..(213): Ceres Seq. ID no. 12394831

SEQ ID NO: 27066 - protein, 212 aa, Arabidopsis thaliana
  peptide (1)..(212): Ceres Seq. ID no. 12394832
MPIGTPRVPYRNREEGTWQWVDIWNALYRERVIFIGQNIDEEFSNQILATMLYLDTLDDSRRIYMYLNGPGGDLTPSLAIYDTMKSLKSPVGTHCVGLAYNLAGFLLAAGEKGHRFAMPLSRIALQSPAGAARGQADDIQNEAKELSRIRDYLFNELAKNTGQPAERVFKDLSRVKRFNAEEAIEYGLIDKIVRPPRIKEDAPRQDESAGLG

SEQ ID NO: 27067 - DNA, 763 bp, Arabidopsis thaliana
  misc_feature (1)..(763): Ceres Seq. ID no. 12482010
  misc_feature (1)..(763): Ortholog of  Ceres SEQ ID NO 13662677 as cited in SEQ ID NO 63824
acttctgtcgtctctgcaaaaactctctatttctctttcgccggagataatgggagaagggaaggcctccactctggttttcatcctcgtcgtcgctcttagtttagtagccttcggcttctccatcgccgccgagcgccgccgcagcatcgggaaatctattcaagacccaataacaaacacaacgttctgcgtttatgactctgatgtagccactggttatggagttggagctttccttttcctcctctctagtgaatcattgcttatgagtgttaccaaatgcatgtgttttggaagacccttagcccctggaagtgaccgtgcttggtctattatctatttcatctcttcgtggatgacatttctggtagcagaagcttgtgtaatagcaggagcgaccaagaacgcataccacacaaagtacttaagttcgcaaaccttttcgtgtgcatcattgcgtaaaggaattttcattgcaggtgcagtctttatagttgctactatggttcttaatgtctactactacatgtattttaccaagtccgtctcttcgccgcctgctcacaaagccaaccgctctagttccaatattggtatggcgggttatgcataaatgtcaaaaagaggaaatggttagtcatttgcattgtagatgtaagaaaggaaagagattgttgcattgttacaacacttggttactcttatatcttttgcttatatatctcttacttatttatgaaaattttcgctatttgctctc

SEQ ID NO: 27068 - protein, 204 aa, Arabidopsis thaliana
  peptide (1)..(204): Ceres Seq. ID no. 12482011
LLSSLQKLSISLSPEIMGEGKASTLVFILVVALSLVAFGFSIAAERRRSIGKSIQDPITNTTFCVYDSDVATGYGVGAFLFLLSSESLLMSVTKCMCFGRPLAPGSDRAWSIIYFISSWMTFLVAEACVIAGATKNAYHTKYLSSQTFSCASLRKGIFIAGAVFIVATMVLNVYYYMYFTKSVSSPPAHKANRSSSNIGMAGYA

SEQ ID NO: 27069 - protein, 188 aa, Arabidopsis thaliana
  peptide (1)..(188): Ceres Seq. ID no. 12482012
MGEGKASTLVFILVVALSLVAFGFSIAAERRRSIGKSIQDPITNTTFCVYDSDVATGYGVGAFLFLLSSESLLMSVTKCMCFGRPLAPGSDRAWSIIYFISSWMTFLVAEACVIAGATKNAYHTKYLSSQTFSCASLRKGIFIAGAVFIVATMVLNVYYYMYFTKSVSSPPAHKANRSSSNIGMAGYA

SEQ ID NO: 27070 - protein, 115 aa, Arabidopsis thaliana
  peptide (1)..(115): Ceres Seq. ID no. 12482013
MSVTKCMCFGRPLAPGSDRAWSIIYFISSWMTFLVAEACVIAGATKNAYHTKYLSSQTFSCASLRKGIFIAGAVFIVATMVLNVYYYMYFTKSVSSPPAHKANRSSSNIGMAGYA

SEQ ID NO: 27071 - DNA, 2764 bp, Arabidopsis thaliana
  misc_feature (1)..(2764): Ceres Seq. ID no. 13491797
  misc_feature (1)..(2764): Ortholog of  Ceres SEQ ID NO 13598926 as cited in SEQ ID NO 0
actctctcttcccaaagttctctgtaaaactctctctccgtcttcaatggtttacacgatttcaggcgtacgttttcctcatcttccatcgattaagaagaagaattcgtctcttcacagtttcaatgaagatctcaggagaagcaacgctgtctcattctctctgaggaaggactctcgttcttctgggaaggtttttgctcggaagccatcgtatgattctgattcgtcttccttagctaccactgcatctgagaagctccgtggccatcagagtgatagctcttcatctgcctctgatcaagtacaatctcgggatactgtctctgacgatactcaggtgctcggcaatgtagacgttcagaaaactgaagaagcccaggaaacagagacactagatcaaacttctgcactctcaacatctggaagcataagttataaagaagattttgcaaagatgtcacactctgtcgaccaagaagttgggcagaggaagattccacctcctggagatgggaagagaatatatgacattgatcctatgttgaacagtcatcgtaatcatcttgattaccgatatgggcagtacagaaaactgcgtgaagaaattgacaagaatgaaggtggtttggaggcattttctcgtggttatgaaatatttggcttcactcgaagcgccactggtatcacttaccgggaatgggcaccgggagctaaggcagcatcactgatcggagattttaataactggaatgcgaaatctgatgttatggctcggaacgactttggtgtgtgggaaatatttctgccaaataatgctgatggctcaccagcaattccccatggctcccgtgtgaagatccgcatggataccccatctggtattaaagactccattccagcttggatcaagtattctgtccagccacctggcgagatcccatataatggagtatattatgaccctcctgaggaggataaatatgcgttcaaacatcctcgtccaaagaaacccacatcgctgcgtatatatgaatcacatgttggaatgagtagtacggaaccaaagataaatacatatgccaactttagagatgatgtacttccccgtataaaaaagctaggctataatgctgtgcagataatggccattcaagagcatgcctactatgccagctttgggtatcatgtgacaaattttttcgcacctagcagccgctttggaacacctgatgaccttaaatctttgatagacaaagctcatgagctaggtctggttgttctgatggatattgtgcacagccatgcatcaaaaaacacactggatggcctggacatgtttgatggtactgatggtcaatatttccactctggatcgcgtggttatcattggatgtgggattctcgtcttttcaattacggaagctgggaagtgcttaggtatcttctttccaacgcgagatggtggctggaagaatacaagtttgatgggttcagatttgatggtgtgacttccatgatgtacactcatcatggactgcaggtcgaatttactgggaattacaatgagtactttggatattctactgatgttgacgctgtggtctatctaatgctggtgaacgatttgattcatgggctataccctgaggctattgttgtcggcgaagatgttagcgggatgccagctttttgcgttcctgtcgaagacggtggtgtgggttttgactaccgtctacacatggcagtggcagataaatggattgagcttcttaagaagagagacgaggactggcaggttggtgatataactttcacgcttaccaacaggaggtggggagaaaaatgtgtcgtctatgcagagagtcatgatcaagcccttgttggagacaaaacgatagctttctggctaatggataaggacatgtatgatttcatggccgttgatagacaggccactccgcgtgtagaccgtgggattgctttacacaaaatgatccgtctcattacgatgggattgggtggagaaggatacctcaatttcatgggaaacgaatttggacacccagaatggatcgacttcccaaggaccgaccagcaccttcctgatggcagagtcatcgctgggaataatggtagttatgataaatgccgacgtaggtttgatctgggagatgcagaatatcttagataccatggactacaagagtttgatcgagcaatgcaaaatctagaggagacgtatggtttcatgacttcagagcaccagtacatatcccgcaaggatgaaggagacagagtcattgtattcgagagaggtaacttgctcttcgtcttcaacttccactggaccaacagttactctgactaccgtatcggttgctctgttcccggaaagtacaaaatcgttttggactctgataactctttatttggaggcttcaaccggctagatgactccgcggagtttttcacctctgatggaaggcacgacgataggccttgctccttcatggtgtatgcaccgtgcagaaccgctgtagtttacgctgcagtagatgatgatgatgatgatgaacgttcttctcttgtccccataggcctgttacccgaagatgtttaggagcaaagacagttgtccgagtttacctactgtaagcttctttgtactacaaaaatttactcgttgatcttcttctcctttagttttcgcttgcagcatcattataacttaaaaatgaaataaaaagtcgttgcacttctg

SEQ ID NO: 27072 - protein, 873 aa, Arabidopsis thaliana
  peptide (1)..(873): Ceres Seq. ID no. 13491798
LSLPKVLCKTLSPSSMVYTISGVRFPHLPSIKKKNSSLHSFNEDLRRSNAVSFSLRKDSRSSGKVFARKPSYDSDSSSLATTASEKLRGHQSDSSSSASDQVQSRDTVSDDTQVLGNVDVQKTEEAQETETLDQTSALSTSGSISYKEDFAKMSHSVDQEVGQRKIPPPGDGKRIYDIDPMLNSHRNHLDYRYGQYRKLREEIDKNEGGLEAFSRGYEIFGFTRSATGITYREWAPGAKAASLIGDFNNWNAKSDVMARNDFGVWEIFLPNNADGSPAIPHGSRVKIRMDTPSGIKDSIPAWIKYSVQPPGEIPYNGVYYDPPEEDKYAFKHPRPKKPTSLRIYESHVGMSSTEPKINTYANFRDDVLPRIKKLGYNAVQIMAIQEHAYYASFGYHVTNFFAPSSRFGTPDDLKSLIDKAHELGLVVLMDIVHSHASKNTLDGLDMFDGTDGQYFHSGSRGYHWMWDSRLFNYGSWEVLRYLLSNARWWLEEYKFDGFRFDGVTSMMYTHHGLQVEFTGNYNEYFGYSTDVDAVVYLMLVNDLIHGLYPEAIVVGEDVSGMPAFCVPVEDGGVGFDYRLHMAVADKWIELLKKRDEDWQVGDITFTLTNRRWGEKCVVYAESHDQALVGDKTIAFWLMDKDMYDFMAVDRQATPRVDRGIALHKMIRLITMGLGGEGYLNFMGNEFGHPEWIDFPRTDQHLPDGRVIAGNNGSYDKCRRRFDLGDAEYLRYHGLQEFDRAMQNLEETYGFMTSEHQYISRKDEGDRVIVFERGNLLFVFNFHWTNSYSDYRIGCSVPGKYKIVLDSDNSLFGGFNRLDDSAEFFTSDGRHDDRPCSFMVYAPCRTAVVYAAVDDDDDDERSSLVPIGLLPEDV

SEQ ID NO: 27073 - protein, 858 aa, Arabidopsis thaliana
  peptide (1)..(858): Ceres Seq. ID no. 13491799
MVYTISGVRFPHLPSIKKKNSSLHSFNEDLRRSNAVSFSLRKDSRSSGKVFARKPSYDSDSSSLATTASEKLRGHQSDSSSSASDQVQSRDTVSDDTQVLGNVDVQKTEEAQETETLDQTSALSTSGSISYKEDFAKMSHSVDQEVGQRKIPPPGDGKRIYDIDPMLNSHRNHLDYRYGQYRKLREEIDKNEGGLEAFSRGYEIFGFTRSATGITYREWAPGAKAASLIGDFNNWNAKSDVMARNDFGVWEIFLPNNADGSPAIPHGSRVKIRMDTPSGIKDSIPAWIKYSVQPPGEIPYNGVYYDPPEEDKYAFKHPRPKKPTSLRIYESHVGMSSTEPKINTYANFRDDVLPRIKKLGYNAVQIMAIQEHAYYASFGYHVTNFFAPSSRFGTPDDLKSLIDKAHELGLVVLMDIVHSHASKNTLDGLDMFDGTDGQYFHSGSRGYHWMWDSRLFNYGSWEVLRYLLSNARWWLEEYKFDGFRFDGVTSMMYTHHGLQVEFTGNYNEYFGYSTDVDAVVYLMLVNDLIHGLYPEAIVVGEDVSGMPAFCVPVEDGGVGFDYRLHMAVADKWIELLKKRDEDWQVGDITFTLTNRRWGEKCVVYAESHDQALVGDKTIAFWLMDKDMYDFMAVDRQATPRVDRGIALHKMIRLITMGLGGEGYLNFMGNEFGHPEWIDFPRTDQHLPDGRVIAGNNGSYDKCRRRFDLGDAEYLRYHGLQEFDRAMQNLEETYGFMTSEHQYISRKDEGDRVIVFERGNLLFVFNFHWTNSYSDYRIGCSVPGKYKIVLDSDNSLFGGFNRLDDSAEFFTSDGRHDDRPCSFMVYAPCRTAVVYAAVDDDDDDERSSLVPIGLLPEDV

SEQ ID NO: 27074 - protein, 721 aa, Arabidopsis thaliana
  peptide (1)..(721): Ceres Seq. ID no. 13491800
MSHSVDQEVGQRKIPPPGDGKRIYDIDPMLNSHRNHLDYRYGQYRKLREEIDKNEGGLEAFSRGYEIFGFTRSATGITYREWAPGAKAASLIGDFNNWNAKSDVMARNDFGVWEIFLPNNADGSPAIPHGSRVKIRMDTPSGIKDSIPAWIKYSVQPPGEIPYNGVYYDPPEEDKYAFKHPRPKKPTSLRIYESHVGMSSTEPKINTYANFRDDVLPRIKKLGYNAVQIMAIQEHAYYASFGYHVTNFFAPSSRFGTPDDLKSLIDKAHELGLVVLMDIVHSHASKNTLDGLDMFDGTDGQYFHSGSRGYHWMWDSRLFNYGSWEVLRYLLSNARWWLEEYKFDGFRFDGVTSMMYTHHGLQVEFTGNYNEYFGYSTDVDAVVYLMLVNDLIHGLYPEAIVVGEDVSGMPAFCVPVEDGGVGFDYRLHMAVADKWIELLKKRDEDWQVGDITFTLTNRRWGEKCVVYAESHDQALVGDKTIAFWLMDKDMYDFMAVDRQATPRVDRGIALHKMIRLITMGLGGEGYLNFMGNEFGHPEWIDFPRTDQHLPDGRVIAGNNGSYDKCRRRFDLGDAEYLRYHGLQEFDRAMQNLEETYGFMTSEHQYISRKDEGDRVIVFERGNLLFVFNFHWTNSYSDYRIGCSVPGKYKIVLDSDNSLFGGFNRLDDSAEFFTSDGRHDDRPCSFMVYAPCRTAVVYAAVDDDDDDERSSLVPIGLLPEDV

SEQ ID NO: 27075 - DNA, 1556 bp, Arabidopsis thaliana
  misc_feature (1)..(1556): Ceres Seq. ID no. 13487486
  misc_feature (1)..(1556): Ortholog of  Ceres SEQ ID NO 12618559 as cited in SEQ ID NO 64385
aactccaaatctctacacttccatataattaaaacacagagagacgaagaaaatcgagatctcgaataatgcgaatctgaaggatctttacgaattccataatcttcagatcgaaaggtttctatcgattcgttggtcaagaggagattgtgcgtgtgattcgtgagcatgggctgttcgttttcaggattgaacgcactttacgacgccgtcaacggtggaggtgacgtatggatcaatgagaatcgattcaggatcgtgaggcagctcggcgaaggaggtttcgcattcgtctttttggtcaaggaaattgtcgccgacgcttcctccgccgcatccggtggtggtctagctaagaaagtcaaggatccggctcatctctccgctgacggaacttatgctatgaagaaagttttgattcagaacaaggagcaattggaattggtgcgtgaggagatccgtgtttcttcattgttcaatcaccctaatttgcttccactccttgatcatgccattatttctgttaaggacggccaagagggagcttggaaacacgaggccttcttgctgtttcctgttcacttggatgggaccttgctggataatttcactttgatgaaggctaaaaaagaaactttctcaacaactgatgttttgcacatattccgtcagctttgtgatggacttaaacacatgcactctctggagccaccatatgctcacaacgatgtcaaacctggcaacgtccttttaacacgtagaaaaggacagcctcctcttgcgatattgatggactttggaagtgctcgcccatcacggaagcaaatccgttcccgtcaagaggccttacagttacaggaatggacatctgagcattgctcagcaccgtttcgagctcccgagctctgggattgcccaagccatgctgatattgatgagagaacagatatctggtcactaggctgcacattatatgcaataatgtatggtgtgtctccattcgagtatgcgcttggagaatctggtggaagtcttcagcttgcaatcgtgaacgctcagatcaaatggccaaacactggaccaaaagcttcttaccctgaagctcttcaccagttcgtaacttggatgctgcaaccacaagctgctgttcgaccgcgcatagacgatatcatcatccatgtcgacaaattgatcgctaaattcaccaaatgattcccgaattatgttggttttcaaaaaaaggtgaaaggaaagaaaagaagactctttatacattgctttgtctctttttttttctaatatccttagctgttttcaaaaatcccatattagatacatatatttaatagtattacattgctcttcgtaatgtattttgaactttttaggattcggggttttctttttgactatgggaagttgtgaaccaataaatttacttaagacagtatatctcgtagttgtcctaattctggtcgatgatgctgtaatgctattataattttgtgctgattcatattttaattataaccatagggtttttgaaaatgttattt

SEQ ID NO: 27076 - protein, 347 aa, Arabidopsis thaliana
  peptide (1)..(347): Ceres Seq. ID no. 13487487
MGCSFSGLNALYDAVNGGGDVWINENRFRIVRQLGEGGFAFVFLVKEIVADASSAASGGGLAKKVKDPAHLSADGTYAMKKVLIQNKEQLELVREEIRVSSLFNHPNLLPLLDHAIISVKDGQEGAWKHEAFLLFPVHLDGTLLDNFTLMKAKKETFSTTDVLHIFRQLCDGLKHMHSLEPPYAHNDVKPGNVLLTRRKGQPPLAILMDFGSARPSRKQIRSRQEALQLQEWTSEHCSAPFRAPELWDCPSHADIDERTDIWSLGCTLYAIMYGVSPFEYALGESGGSLQLAIVNAQIKWPNTGPKASYPEALHQFVTWMLQPQAAVRPRIDDIIIHVDKLIAKFTK

SEQ ID NO: 27077 - protein, 269 aa, Arabidopsis thaliana
  peptide (1)..(269): Ceres Seq. ID no. 13487488
MKKVLIQNKEQLELVREEIRVSSLFNHPNLLPLLDHAIISVKDGQEGAWKHEAFLLFPVHLDGTLLDNFTLMKAKKETFSTTDVLHIFRQLCDGLKHMHSLEPPYAHNDVKPGNVLLTRRKGQPPLAILMDFGSARPSRKQIRSRQEALQLQEWTSEHCSAPFRAPELWDCPSHADIDERTDIWSLGCTLYAIMYGVSPFEYALGESGGSLQLAIVNAQIKWPNTGPKASYPEALHQFVTWMLQPQAAVRPRIDDIIIHVDKLIAKFTK

SEQ ID NO: 27078 - protein, 198 aa, Arabidopsis thaliana
  peptide (1)..(198): Ceres Seq. ID no. 13487489
MKAKKETFSTTDVLHIFRQLCDGLKHMHSLEPPYAHNDVKPGNVLLTRRKGQPPLAILMDFGSARPSRKQIRSRQEALQLQEWTSEHCSAPFRAPELWDCPSHADIDERTDIWSLGCTLYAIMYGVSPFEYALGESGGSLQLAIVNAQIKWPNTGPKASYPEALHQFVTWMLQPQAAVRPRIDDIIIHVDKLIAKFTK

SEQ ID NO: 27079 - DNA, 1132 bp, Arabidopsis thaliana
  misc_feature (1)..(1132): Ceres Seq. ID no. 12325365
  misc_feature (1)..(1132): Ortholog of  Ceres SEQ ID NO 15178797 as cited in SEQ ID NO 1152
  misc_feature (1)..(1132): Ortholog of  Ceres SEQ ID NO 15175688 as cited in SEQ ID NO 60465
  misc_feature (1)..(1132): Ortholog of  Ceres SEQ ID NO 13495628 as cited in SEQ ID NO 60727
catcaaaattcaaaaccaacaccatggataagacagcgacattactttccactctcttgttcttgttcacattcctcacgacctgtttgtctaaagatctctgtaaccaaaatgacaaaaacaccctcctcaagatcaagaaatctctaaacaacccttatcacctcgcttcatgggaccctcaaaccgactgttgctcctggtactgccttgagtgcggcgacgccaccgttaaccaccgtgttaccgccttaaccatattctccggccagatctccggtcagatcccggctgaagtcggtgacttgccgtatcttgagacccttgtcttccgcaaactctctaacctcaccggtacaatccaacccaccatcgccaaactcaagaacctccgaatgctcaggctcagctggacgaatctgacaggtccaattcctgactttataagtcagctcaagaatctcgagttcttagaactttccttcaatgatctctctggttccattccaagttctctctctacgttacctaaaatcttggctcttgaacttagcaggaacaaacttacaggttccataccagagtcatttgggtcgtttccaggaacagtccctgaccttcgcctatcacataaccagctctccggtccaatacccaaatcattaggcaacatcgactttaaccggatcgatttatcccgcaacaagctccaaggtgatgcttcgatgttgtttggttccaacaaaacaacctggtctattgacttatcaagaaacatgttccagttcgatatctcaaaggttgatatccctaaaacacttggtatcttggacttgaaccacaatgggatcactgggaatattccggtgcagtggactgaagctcctcttcagttcttcaatgttagctacaacaaactgtgtggacacatcccaactggagggaaacttcagacatttgattcttattcctattttcacaacaagtgtttgtgtggtgctcctcttgaaatttgcaagtaaaccaagcttatctctaggattacgaaaaaatatatttgagtcaataatatagacaaatatgtaatgttattcggattgattaataaaacatgaaccaaacctctcattcg

SEQ ID NO: 27080 - protein, 339 aa, Arabidopsis thaliana
  peptide (1)..(339): Ceres Seq. ID no. 12325366
SKFKTNTMDKTATLLSTLLFLFTFLTTCLSKDLCNQNDKNTLLKIKKSLNNPYHLASWDPQTDCCSWYCLECGDATVNHRVTALTIFSGQISGQIPAEVGDLPYLETLVFRKLSNLTGTIQPTIAKLKNLRMLRLSWTNLTGPIPDFISQLKNLEFLELSFNDLSGSIPSSLSTLPKILALELSRNKLTGSIPESFGSFPGTVPDLRLSHNQLSGPIPKSLGNIDFNRIDLSRNKLQGDASMLFGSNKTTWSIDLSRNMFQFDISKVDIPKTLGILDLNHNGITGNIPVQWTEAPLQFFNVSYNKLCGHIPTGGKLQTFDSYSYFHNKCLCGAPLEICK

SEQ ID NO: 27081 - protein, 332 aa, Arabidopsis thaliana
  peptide (1)..(332): Ceres Seq. ID no. 12325367
MDKTATLLSTLLFLFTFLTTCLSKDLCNQNDKNTLLKIKKSLNNPYHLASWDPQTDCCSWYCLECGDATVNHRVTALTIFSGQISGQIPAEVGDLPYLETLVFRKLSNLTGTIQPTIAKLKNLRMLRLSWTNLTGPIPDFISQLKNLEFLELSFNDLSGSIPSSLSTLPKILALELSRNKLTGSIPESFGSFPGTVPDLRLSHNQLSGPIPKSLGNIDFNRIDLSRNKLQGDASMLFGSNKTTWSIDLSRNMFQFDISKVDIPKTLGILDLNHNGITGNIPVQWTEAPLQFFNVSYNKLCGHIPTGGKLQTFDSYSYFHNKCLCGAPLEICK

SEQ ID NO: 27082 - protein, 208 aa, Arabidopsis thaliana
  peptide (1)..(208): Ceres Seq. ID no. 12325368
MLRLSWTNLTGPIPDFISQLKNLEFLELSFNDLSGSIPSSLSTLPKILALELSRNKLTGSIPESFGSFPGTVPDLRLSHNQLSGPIPKSLGNIDFNRIDLSRNKLQGDASMLFGSNKTTWSIDLSRNMFQFDISKVDIPKTLGILDLNHNGITGNIPVQWTEAPLQFFNVSYNKLCGHIPTGGKLQTFDSYSYFHNKCLCGAPLEICK

SEQ ID NO: 27083 - DNA, 628 bp, Arabidopsis thaliana
  misc_feature (1)..(628): Ceres Seq. ID no. 13487326
  misc_feature (1)..(628): Ortholog of  Ceres SEQ ID NO 12557888 as cited in SEQ ID NO 76
  misc_feature (1)..(628): Ortholog of  Ceres SEQ ID NO 15179616 as cited in SEQ ID NO 1061
  misc_feature (1)..(628): Ortholog of  Ceres SEQ ID NO 13664090 as cited in SEQ ID NO 61005
  misc_feature (1)..(628): Ortholog of  Ceres SEQ ID NO 15174400 as cited in SEQ ID NO 0
ttgtcctcttctcaaacatatctcaacttattgtttgaatataaaaagagatatcaaaaagaagagaagaccaaaaacaaaacaaaaatctctaataaaaatggcttccaaagctatcttcttctctttctttgtcgtctccgccgtgtgtttgtcttctctggcaggtttcgccgccgctgatgctgacgacttcgatcgtttccagattcaaggatcagtttactgtgacacttgccgtgtccaattcgttacccgtctcagcaaattcctcgaaggcgcgaaagtgaagttggagtgcaggagcagaacaaacggaaccataacattgaccaaagaagctgttaccgacaaaacaggaagctacaaaatggaagtaaccggtgaccacgaggaagaagtttgcgagcttgttttggtccaatcaccagacagtggttgcagtgatgtcagcacagaggcttacttacgtaacgccgctaagatcagtttaacggcgaatgacggaatcgtctcccacgagacacgtattgttaaccctctcggtttcatggttcagactccattggctgattgtcctgctgccttcaaggagcttggtattgtccctgacgtaacattctaagcg

SEQ ID NO: 27084 - protein, 207 aa, Arabidopsis thaliana
  peptide (1)..(207): Ceres Seq. ID no. 13487327
CPLLKHISTYCLNIKRDIKKKRRPKTKQKSLIKMASKAIFFSFFVVSAVCLSSLAGFAAADADDFDRFQIQGSVYCDTCRVQFVTRLSKFLEGAKVKLECRSRTNGTITLTKEAVTDKTGSYKMEVTGDHEEEVCELVLVQSPDSGCSDVSTEAYLRNAAKISLTANDGIVSHETRIVNPLGFMVQTPLADCPAAFKELGIVPDVTF

SEQ ID NO: 27085 - protein, 174 aa, Arabidopsis thaliana
  peptide (1)..(174): Ceres Seq. ID no. 13487328
MASKAIFFSFFVVSAVCLSSLAGFAAADADDFDRFQIQGSVYCDTCRVQFVTRLSKFLEGAKVKLECRSRTNGTITLTKEAVTDKTGSYKMEVTGDHEEEVCELVLVQSPDSGCSDVSTEAYLRNAAKISLTANDGIVSHETRIVNPLGFMVQTPLADCPAAFKELGIVPDVTF

SEQ ID NO: 27086 - DNA, 914 bp, Arabidopsis thaliana
  misc_feature (1)..(914): Ceres Seq. ID no. 13487345
  misc_feature (1)..(914): Ortholog of  Ceres SEQ ID NO 13595495 as cited in SEQ ID NO 56624
  misc_feature (1)..(914): Ortholog of  Ceres SEQ ID NO 12608406 as cited in SEQ ID NO 58017
  misc_feature (1)..(914): Ortholog of  Ceres SEQ ID NO 13599397 as cited in SEQ ID NO 0
tgagataagttccgtggttatcccattaaccttctttctacacaacacaaaactatatataaagatcatacatgtaataacgtcctgcaactattacaatcattctcgcttgaattaacgtggacgtcattgtttttggattgttaatcaaaggcggcgttacttttttttaatataattgtttctttaggatctttgtctctggaaaatgaaggaagacgcaggaaaccctttgcatctcacgtcactgaaccatgtctctgtcttgtgccgatccgtcgacgaatctatgaatttttaccaaaaggtgttagggttcatcccgatacgaagacctgaatccttaaattttgaaggcgcttggttgtttggtcacgggattggaatacacctcctgtgtgccccagaaccagagaaacttcccaagaaaactgcgattaatcccaaggataatcacatctctttccagtgtgagagtatgggagtagtggagaagaagctggaggaaatggggatagattatgtaagggcattagtagaagaaggagggatccaagtggaccagctcttcttccatgaccctgatggcttcatgatcgagatttgcaactgcgatagcctccccgtagtccccctcgtaggagaaatggctcggtcctgctcaagagtcaaactccaccagatggtgcagccacaaccgcagactcagatccaccaagtggtctacccttaattataaacagctcacttcttctttatattgtgtgtgtttgtgtattggtgtgcttggttttgggtgtaatatacaataagagaccgatgtgaatcagcgaatgtgattcccttcgaggaaatgaccattctctttgctccacaagcttatataatataatcaagggaaatcatgttttact

SEQ ID NO: 27087 - protein, 174 aa, Arabidopsis thaliana
  peptide (1)..(174): Ceres Seq. ID no. 13487346
MKEDAGNPLHLTSLNHVSVLCRSVDESMNFYQKVLGFIPIRRPESLNFEGAWLFGHGIGIHLLCAPEPEKLPKKTAINPKDNHISFQCESMGVVEKKLEEMGIDYVRALVEEGGIQVDQLFFHDPDGFMIEICNCDSLPVVPLVGEMARSCSRVKLHQMVQPQPQTQIHQVVYP

SEQ ID NO: 27088 - protein, 147 aa, Arabidopsis thaliana
  peptide (1)..(147): Ceres Seq. ID no. 13487347
MNFYQKVLGFIPIRRPESLNFEGAWLFGHGIGIHLLCAPEPEKLPKKTAINPKDNHISFQCESMGVVEKKLEEMGIDYVRALVEEGGIQVDQLFFHDPDGFMIEICNCDSLPVVPLVGEMARSCSRVKLHQMVQPQPQTQIHQVVYP

SEQ ID NO: 27089 - DNA, 861 bp, Arabidopsis thaliana
  misc_feature (1)..(861): Ceres Seq. ID no. 12323663
  misc_feature (1)..(861): Ortholog of  Ceres SEQ ID NO 15225398 as cited in SEQ ID NO 67001
  misc_feature (1)..(861): Ortholog of  Ceres SEQ ID NO 12635509 as cited in SEQ ID NO 0
actatcaattcgactggaaaaaggatatttccagattaggtagagagagagcaaaagtactttcattcagacttcagtttaagctatggcggcgaacgattcttcaaatgctattgacatcgacgggaatctcgactccgattcgaatcttaacactgacggtgacgaagcgaccgataatgattcctcgaaggcattggttactatccctgctccagccgtttgtcttttccggttcgccggagatgctgctggtggcgccgttatgggctctatcttcggatatggttcaggattgttcaagaagaaaggcttcaaaggatcatttgcagatgcagggcagtctgctaagacttttgctgttttatctggagtccacagtttggttgtttgccttctgaagcaaatccgaggcaaagatgacgccattaatgttggagtagcagggtgttgcactggtcttgctcttagtttccctggtgctccacaggctcttctacagagttgtctcacgtttggggcattctcttttattcttgagggactcaacaaaagacaaacagctttggcacactcggtctcgttgagacaccaaaccggactgttccaagatcatcatcgtgctttaccactctctcttgctctcccgatccctgaagaaatcaaaggagccttttcttctttctgcaagtccttagctaaaccaaggaagttctaatctcgtcttattattctccctttcttgtgtcttaggctctctctatgtagatgtaaaattttcccgcttttgttgtactttgtgagacatgttttgtgaaaggctttttgcaagagccaatttgaagagaaaaagagttgtgt

SEQ ID NO: 27090 - protein, 210 aa, Arabidopsis thaliana
  peptide (1)..(210): Ceres Seq. ID no. 12323664
MAANDSSNAIDIDGNLDSDSNLNTDGDEATDNDSSKALVTIPAPAVCLFRFAGDAAGGAVMGSIFGYGSGLFKKKGFKGSFADAGQSAKTFAVLSGVHSLVVCLLKQIRGKDDAINVGVAGCCTGLALSFPGAPQALLQSCLTFGAFSFILEGLNKRQTALAHSVSLRHQTGLFQDHHRALPLSLALPIPEEIKGAFSSFCKSLAKPRKF

SEQ ID NO: 27091 - protein, 150 aa, Arabidopsis thaliana
  peptide (1)..(150): Ceres Seq. ID no. 12323665
MGSIFGYGSGLFKKKGFKGSFADAGQSAKTFAVLSGVHSLVVCLLKQIRGKDDAINVGVAGCCTGLALSFPGAPQALLQSCLTFGAFSFILEGLNKRQTALAHSVSLRHQTGLFQDHHRALPLSLALPIPEEIKGAFSSFCKSLAKPRKF

SEQ ID NO: 27092 - protein, 132 aa, Arabidopsis thaliana
  peptide (1)..(132): Ceres Seq. ID no. 12323666
YQFDWKKDISRLGRERAKVLSFRLQFKLWRRTILQMLLTSTGISTPIRILTLTVTKRPIMIPRRHWLLSLLQPFVFSGSPEMLLVAPLWALSSDMVQDCSRRKASKDHLQMQGSLLRLLLFYLESTVWLFAF

SEQ ID NO: 27093 - DNA, 686 bp, Arabidopsis thaliana
  misc_feature (1)..(686): Ceres Seq. ID no. 12394301
  misc_feature (1)..(686): Ortholog of  Ceres SEQ ID NO 15175857 as cited in SEQ ID NO 59046
aatcccttgcgtcgccaagaaagctcaatgggctatgaaatggatcgacggttctcagactttcgccgaacgaatcatcgctttcgcttgcgtcgaaggtatcttcttctccggaagcttttgttcaatcttctggctgaagaaacggggactcatgcctggattaacattctcaaacgaattgatctctcgtgacgaaggtttacactgcgacttcgcttgtctactctacacgctactcaaaacaaagcttagcgaagaacgcgtgaaatcaatcgtctgcgacgcggtcgaaatcgagagagagtttgtgtgcgacgcgcttccgtgcgcgttggttgggatgaaccgtgatttgatgagtcagtatattgagtttgttgcggataggcttttgggtgcgcttgggtacgggaaggtgtacggtgttactaatccgtttgattggatggaacttatttcgcttcaagggaaaacgaatttcttcgagaaacgtgttggtgattaccaaaaggcttccgttatgtctagcgttaatggtaacggcgcgtttgataaccatgtcttctctctcgacgaagatttttaaagagcgtttgttttgatgctataattacgattctactcttgtattattaccgtgtattatccttggtttttgaattaatgaataattagttgctttt

SEQ ID NO: 27094 - protein, 195 aa, Arabidopsis thaliana
  peptide (1)..(195): Ceres Seq. ID no. 12394302
IPCVAKKAQWAMKWIDGSQTFAERIIAFACVEGIFFSGSFCSIFWLKKRGLMPGLTFSNELISRDEGLHCDFACLLYTLLKTKLSEERVKSIVCDAVEIEREFVCDALPCALVGMNRDLMSQYIEFVADRLLGALGYGKVYGVTNPFDWMELISLQGKTNFFEKRVGDYQKASVMSSVNGNGAFDNHVFSLDEDF

SEQ ID NO: 27095 - protein, 184 aa, Arabidopsis thaliana
  peptide (1)..(184): Ceres Seq. ID no. 12394303
MKWIDGSQTFAERIIAFACVEGIFFSGSFCSIFWLKKRGLMPGLTFSNELISRDEGLHCDFACLLYTLLKTKLSEERVKSIVCDAVEIEREFVCDALPCALVGMNRDLMSQYIEFVADRLLGALGYGKVYGVTNPFDWMELISLQGKTNFFEKRVGDYQKASVMSSVNGNGAFDNHVFSLDEDF

SEQ ID NO: 27096 - protein, 144 aa, Arabidopsis thaliana
  peptide (1)..(144): Ceres Seq. ID no. 12394304
MPGLTFSNELISRDEGLHCDFACLLYTLLKTKLSEERVKSIVCDAVEIEREFVCDALPCALVGMNRDLMSQYIEFVADRLLGALGYGKVYGVTNPFDWMELISLQGKTNFFEKRVGDYQKASVMSSVNGNGAFDNHVFSLDEDF

SEQ ID NO: 27097 - DNA, 930 bp, Arabidopsis thaliana
  misc_feature (1)..(930): Ceres Seq. ID no. 12647740
  misc_feature (1)..(930): Ortholog of  Ceres SEQ ID NO 14314442 as cited in SEQ ID NO 52358
  misc_feature (1)..(930): Ortholog of  Ceres SEQ ID NO 12610442 as cited in SEQ ID NO 56281
  misc_feature (1)..(930): Ortholog of  Ceres SEQ ID NO 12610713 as cited in SEQ ID NO 56591
  misc_feature (1)..(930): Ortholog of  Ceres SEQ ID NO 12587345 as cited in SEQ ID NO 62844
  misc_feature (1)..(930): Ortholog of  Ceres SEQ ID NO 13597357 as cited in SEQ ID NO 68961
  misc_feature (1)..(930): Ortholog of  Ceres SEQ ID NO 13587656 as cited in SEQ ID NO 0
  misc_feature (1)..(930): Ortholog of  Ceres SEQ ID NO 14309353 as cited in SEQ ID NO 0
  misc_feature (1)..(930): Ortholog of  Ceres SEQ ID NO 15177686 as cited in SEQ ID NO 0
ataacacatttcaagcattggattaatcaaagacaaagaaaacgaaaatgttggcaatatttcagaaagcttttgctcacccaccggaagaactcaacagtccggcttctcatttctccggcaaaactcctaaacttcccggcgaaactctctccgacttcctctctcatcaccaaaacaatgctttctctatgaacttcggcgactccgccgtcttagcttacgctcgccaagaaacctctcttcgtcaaaggttgttctgtggactagatgggatctactgtatgtttctagggagattgaataatctctgtacattgaatcgacaatacggtttatctgggaagaactcaaacgaggcaatgtttgtgatcgaagcttatcgaacacttcgtgatcgtggtccttacccagcagatcaagttcttagaggtcttgagggaagcttcgctttcgttgtctacgatactcaaacttcctctgttttctcagctctgagttctgatggaggagagagtctttactggggaatttctggagacggatctgttgtaatgtctgatgatattcagatcataaagcaaggctgtgctaaatcgtttgctcctttccctaatggatgtatgtttcatagtgagacagggcttaagagctttgaccatccgactaatatgatgaaggcaatgccgaggattgatagtgaaggtgttctttgtggagctagtttcaaagttgatgcttgttctaagatcaatagtatccctagaagaggaagtgaagctaactgggcgctggctaattctcgttgattttgcttctagtttcgttaactcttgcttctttgttgcgttttctttttatgtactcttgtttatgtaaatatagccttatgaagacgataaagaaataaaattgatttgcttcttcgtg

SEQ ID NO: 27098 - protein, 253 aa, Arabidopsis thaliana
  peptide (1)..(253): Ceres Seq. ID no. 12647741
MLAIFQKAFAHPPEELNSPASHFSGKTPKLPGETLSDFLSHHQNNAFSMNFGDSAVLAYARQETSLRQRLFCGLDGIYCMFLGRLNNLCTLNRQYGLSGKNSNEAMFVIEAYRTLRDRGPYPADQVLRGLEGSFAFVVYDTQTSSVFSALSSDGGESLYWGISGDGSVVMSDDIQIIKQGCAKSFAPFPNGCMFHSETGLKSFDHPTNMMKAMPRIDSEGVLCGASFKVDACSKINSIPRRGSEANWALANSR

SEQ ID NO: 27099 - protein, 205 aa, Arabidopsis thaliana
  peptide (1)..(205): Ceres Seq. ID no. 12647742
MNFGDSAVLAYARQETSLRQRLFCGLDGIYCMFLGRLNNLCTLNRQYGLSGKNSNEAMFVIEAYRTLRDRGPYPADQVLRGLEGSFAFVVYDTQTSSVFSALSSDGGESLYWGISGDGSVVMSDDIQIIKQGCAKSFAPFPNGCMFHSETGLKSFDHPTNMMKAMPRIDSEGVLCGASFKVDACSKINSIPRRGSEANWALANSR

SEQ ID NO: 27100 - protein, 174 aa, Arabidopsis thaliana
  peptide (1)..(174): Ceres Seq. ID no. 12647743
MFLGRLNNLCTLNRQYGLSGKNSNEAMFVIEAYRTLRDRGPYPADQVLRGLEGSFAFVVYDTQTSSVFSALSSDGGESLYWGISGDGSVVMSDDIQIIKQGCAKSFAPFPNGCMFHSETGLKSFDHPTNMMKAMPRIDSEGVLCGASFKVDACSKINSIPRRGSEANWALANSR

SEQ ID NO: 27101 - DNA, 1883 bp, Arabidopsis thaliana
  misc_feature (1)..(1883): Ceres Seq. ID no. 12482898
  misc_feature (1)..(1883): Ortholog of  Ceres SEQ ID NO 15179918 as cited in SEQ ID NO 57077
gcacaaagcaaaaaaatctctgtaaaagcagaacgataatggagtcacaattatggaattggatcttacctcttttgatctcttctctcctcatctccttcgtcgctttctatggattcttcgtcaaaccgaagcggaacggtctccgtcacgatcggaaaactgtttctaccgtcacctccgacgtcggatctgttaatattaccggagatactgtcgctgatgtcattgttgttggagctggtgttgctggttctgctcttgcttatactcttggaaaggataaacgccgagttcatgtgattgaaagagatttatcggagcctgatcgtattgttggggagttgttacagcctgggggttacctcaagttactggagttgggaattgaagattgtgtggaagaaatagatgctcagcgtgtgtatggttatgcactttttaaaaatgggaaacgcattcgcttagcttatcctttggagaagtttcacgaagatgtatctggaaggagctttcacaatggacgttttattcaaagaatgcgggagaaagctgcttcacttcccaatgttcagctagagcaaggaacagttctttctcttctagaagagaatgggactatcaaaggtgtgagatataagaataaagcaggagaggaacaaaccgcatttgcagctttgactatagtttgtgatggttgtttctcaaacctgcgtcgctctttgtgcaatcctcaggtcgaggtgccttcttgttttgtcgggttggtcctagagaactgcaatctcccatatgcaaaccatggacatgtcgtcttagcagatccatcaccaattttgatgtatccaattagtagcacagaggtgcggtgcctagttgatgttcccggccagaaagtgccgtccattgcaaatggtgaaatgaaaaactatttgaagactgttgtggctcctcagatgcctcatgaggtctatgactctttcattgctgcggttgataaaggaaatattaagtccatgccaaacagaagcatgccagcttctccttatcctactccaggggctctgttaatgggagatgcatttaacatgcgtcatcctttgacgggtggaggaatgacggttgcattagctgacattgttgtcctgcgtaatctccttagaccgctgcgtgatcttagtgacggcgctagtctctgcaaatatcttgaatcattttacactctgcgaaagccagttgcagcaacaatcaacacccttgcgaatgctctttaccaagtgttctgttcatcagaaaatgaagcaagaaacgagatgagggaagcttgcttcgattatctgggcctcgggggtatgtgcacaagtggaccagtatctttgctttcgggtttgaaccctcgaccattaacacttgtctgccatttctttgcggttgcggtttatggagtcatacggttgttaatcccattcccttccccaaaacgaatctggcttggagccaaattaatctcgggagcatcggggataatatttccgataataaaagcggaaggagttaggcagatgtttttcccagcaactgtacctgcatactactacaaagctcctacagttggagaaaccaaatgttcatagttccaaataattctgtcacgagaaatgccatacaaaagaaaatgaaagttgtggattgcatttggtgtgtttgttgtgtaagtgttctttaaacctataaaagtgatgatactacgatgattatctctgtttttttttgtttttatatataggtatatgatggttgtatcttagttgcaaacggtataccattcttttacatatccaagtctctgcgttataaaatttgttttttaatccgctgtttcg

SEQ ID NO: 27102 - protein, 543 aa, Arabidopsis thaliana
  peptide (1)..(543): Ceres Seq. ID no. 12482899
TKQKNLCKSRTIMESQLWNWILPLLISSLLISFVAFYGFFVKPKRNGLRHDRKTVSTVTSDVGSVNITGDTVADVIVVGAGVAGSALAYTLGKDKRRVHVIERDLSEPDRIVGELLQPGGYLKLLELGIEDCVEEIDAQRVYGYALFKNGKRIRLAYPLEKFHEDVSGRSFHNGRFIQRMREKAASLPNVQLEQGTVLSLLEENGTIKGVRYKNKAGEEQTAFAALTIVCDGCFSNLRRSLCNPQVEVPSCFVGLVLENCNLPYANHGHVVLADPSPILMYPISSTEVRCLVDVPGQKVPSIANGEMKNYLKTVVAPQMPHEVYDSFIAAVDKGNIKSMPNRSMPASPYPTPGALLMGDAFNMRHPLTGGGMTVALADIVVLRNLLRPLRDLSDGASLCKYLESFYTLRKPVAATINTLANALYQVFCSSENEARNEMREACFDYLGLGGMCTSGPVSLLSGLNPRPLTLVCHFFAVAVYGVIRLLIPFPSPKRIWLGAKLISGASGIIFPIIKAEGVRQMFFPATVPAYYYKAPTVGETKCS

SEQ ID NO: 27103 - protein, 531 aa, Arabidopsis thaliana
  peptide (1)..(531): Ceres Seq. ID no. 12482900
MESQLWNWILPLLISSLLISFVAFYGFFVKPKRNGLRHDRKTVSTVTSDVGSVNITGDTVADVIVVGAGVAGSALAYTLGKDKRRVHVIERDLSEPDRIVGELLQPGGYLKLLELGIEDCVEEIDAQRVYGYALFKNGKRIRLAYPLEKFHEDVSGRSFHNGRFIQRMREKAASLPNVQLEQGTVLSLLEENGTIKGVRYKNKAGEEQTAFAALTIVCDGCFSNLRRSLCNPQVEVPSCFVGLVLENCNLPYANHGHVVLADPSPILMYPISSTEVRCLVDVPGQKVPSIANGEMKNYLKTVVAPQMPHEVYDSFIAAVDKGNIKSMPNRSMPASPYPTPGALLMGDAFNMRHPLTGGGMTVALADIVVLRNLLRPLRDLSDGASLCKYLESFYTLRKPVAATINTLANALYQVFCSSENEARNEMREACFDYLGLGGMCTSGPVSLLSGLNPRPLTLVCHFFAVAVYGVIRLLIPFPSPKRIWLGAKLISGASGIIFPIIKAEGVRQMFFPATVPAYYYKAPTVGETKCS

SEQ ID NO: 27104 - protein, 364 aa, Arabidopsis thaliana
  peptide (1)..(364): Ceres Seq. ID no. 12482901
MREKAASLPNVQLEQGTVLSLLEENGTIKGVRYKNKAGEEQTAFAALTIVCDGCFSNLRRSLCNPQVEVPSCFVGLVLENCNLPYANHGHVVLADPSPILMYPISSTEVRCLVDVPGQKVPSIANGEMKNYLKTVVAPQMPHEVYDSFIAAVDKGNIKSMPNRSMPASPYPTPGALLMGDAFNMRHPLTGGGMTVALADIVVLRNLLRPLRDLSDGASLCKYLESFYTLRKPVAATINTLANALYQVFCSSENEARNEMREACFDYLGLGGMCTSGPVSLLSGLNPRPLTLVCHFFAVAVYGVIRLLIPFPSPKRIWLGAKLISGASGIIFPIIKAEGVRQMFFPATVPAYYYKAPTVGETKCS

SEQ ID NO: 27105 - DNA, 665 bp, Arabidopsis thaliana
  misc_feature (1)..(665): Ceres Seq. ID no. 12323305
  misc_feature (1)..(665): Ortholog of  Ceres SEQ ID NO 15172660 as cited in SEQ ID NO 68708
aacttaactccggcacgagtctcgttctcttctctttaccgccgtcatctaggtctgctaatatcaagtgaaggagctcgaaatggccacagttccaggacagttgatctgggagatcgtgaagagaaacaactgtttcttggtgaagcaattcggtagaggtaatgccaaggttcagttcagcaaagagagcaacaacctcgtcaacatcaactcgtacaagcactctggtttggccaacaaaaagacagtgaccattcaggcggctggcaaggaccaaggtgttgtactcggaaccaccaagactaagagacaaaacaagcctaagctctctgttaacaagtctatcctcaagaaggagttctcgaggatgagtaaagttgttgccaatcaggtagtggacaactactacaggcctgatttgaagaaagcagcacttgctaggcttagcgctatcagcaaaggtcttagagtagccaagtcgggtcccaagaggagaaacagacaggcttgaagaatccactactgaatatcttgtttactttttctaaaaagcttgttgtgagccattaagagtttctgacagcagcttgtaggttaagatttttcctgaacagctcaaggattgtaccaccatccttttttcactaaatgatattaaaact

SEQ ID NO: 27106 - protein, 143 aa, Arabidopsis thaliana
  peptide (1)..(143): Ceres Seq. ID no. 12323306
MATVPGQLIWEIVKRNNCFLVKQFGRGNAKVQFSKESNNLVNINSYKHSGLANKKTVTIQAAGKDQGVVLGTTKTKRQNKPKLSVNKSILKKEFSRMSKVVANQVVDNYYRPDLKKAALARLSAISKGLRVAKSGPKRRNRQA

SEQ ID NO: 27107 - DNA, 1636 bp, Arabidopsis thaliana
  misc_feature (1)..(1636): Ceres Seq. ID no. 13500074
  misc_feature (1)..(1636): Ortholog of  Ceres SEQ ID NO 15176317 as cited in SEQ ID NO 52865
  misc_feature (1)..(1636): Ortholog of  Ceres SEQ ID NO 13518893 as cited in SEQ ID NO 58108
  misc_feature (1)..(1636): Ortholog of  Ceres SEQ ID NO 12617152 as cited in SEQ ID NO 63555
ataattacttgtgattcttatttgtcttcttcaatatggcgagaagttctgttttgctatgtttaattctattggttacgttaggagttgtgataagtgtcacatttgccgacaacgttgaattgaaatcaaaagatctagagagcagtaagaaagataagaaggttgatcatgatagtacacacaaagagaagggaggtgaaaaggtagatggtgccggttctgatgatgaagacaacgataaaaaagaaaaaaagaaagagcatgatgtgcaaaaaaaggataaacaacatgaaaacaaagacaaggatgacgagaagaagcatgttgataagaagaagagcggtggtcatgataaagatgatgatgatgaaaagaagcacaaggataaaaagaaggatggacacaatgatgatgatgatagtgatgatgatacggatgatgacgatgacgatgatgatgatgatgatgatgatgatgaagttgatggagatgataatgagaaggagaaaattgggttatacgagctcaagaagggaaatctaactgtcaaattcacaaattggggtgcttcaatcatatctctccatttcccagacaaaaatggtaaaatggacgatattgttcttggctatgatagcgtcaaaacctacaagaccgacaaggtttatttcggagcaaccgttggccgagtagcaaatagaataggaaagggcaaattcaagttgaatggtaaagagtacaagacaagtgtcaacgatggaaaaaacacactccatggtggcaagaaagggtttggggatgttgtgtgggcagttgcaaaacaccagtacgatggcaagaaaccacacattgtcttcactcacacaagtcctgacggcgatcaagggtttccgggagaactcagtgtcacggtgacatataaacttgtcaaagacaatgaattgagtgtggtgatggaggcaaagcctaaggataaagcaactccggtgaacttagctcatcatagttattggaatcttggtggtcataattccggagatattttgtctgaagaaattcaaatcctcggctcgggttatacccccgtcgacggtgagctcattcccaccgggaaaatcaatccggtgaaaggaacagcatacgattttctccaactccgtcctattaaagataatatgaaggatcttaaaacaggatatgatataaattattgcttagatggtaaggcaaaaaagatgagaaaaatagttgaactcgtagataagaaatcagggaggaaaatggagttatccggaaaccaagcgggtttgcaattctataccggagggatgttaaaggatgtcaaagggaagaatggggcagtttaccaagctttcgggggattatgtttagaaacacaaagttatccagacgcattgaaccatcccaaatttccttcacagattgtcgagccagggaaaaaatacaaacacactatgctcttcaagttttctattgtttcatagattgttttagatgttgttacatgaacacccttggaaccatgtccaatgttcatgaacaagaaactaaatacattgtaatattttgtaacaatgcttaaattatcaaattatataaacctaacgtgaac

SEQ ID NO: 27108 - protein, 490 aa, Arabidopsis thaliana
  peptide (1)..(490): Ceres Seq. ID no. 13500075
MARSSVLLCLILLVTLGVVISVTFADNVELKSKDLESSKKDKKVDHDSTHKEKGGEKVDGAGSDDEDNDKKEKKKEHDVQKKDKQHENKDKDDEKKHVDKKKSGGHDKDDDDEKKHKDKKKDGHNDDDDSDDDTDDDDDDDDDDDDDDEVDGDDNEKEKIGLYELKKGNLTVKFTNWGASIISLHFPDKNGKMDDIVLGYDSVKTYKTDKVYFGATVGRVANRIGKGKFKLNGKEYKTSVNDGKNTLHGGKKGFGDVVWAVAKHQYDGKKPHIVFTHTSPDGDQGFPGELSVTVTYKLVKDNELSVVMEAKPKDKATPVNLAHHSYWNLGGHNSGDILSEEIQILGSGYTPVDGELIPTGKINPVKGTAYDFLQLRPIKDNMKDLKTGYDINYCLDGKAKKMRKIVELVDKKSGRKMELSGNQAGLQFYTGGMLKDVKGKNGAVYQAFGGLCLETQSYPDALNHPKFPSQIVEPGKKYKHTMLFKFSIVS

SEQ ID NO: 27109 - protein, 298 aa, Arabidopsis thaliana
  peptide (1)..(298): Ceres Seq. ID no. 13500076
MDDIVLGYDSVKTYKTDKVYFGATVGRVANRIGKGKFKLNGKEYKTSVNDGKNTLHGGKKGFGDVVWAVAKHQYDGKKPHIVFTHTSPDGDQGFPGELSVTVTYKLVKDNELSVVMEAKPKDKATPVNLAHHSYWNLGGHNSGDILSEEIQILGSGYTPVDGELIPTGKINPVKGTAYDFLQLRPIKDNMKDLKTGYDINYCLDGKAKKMRKIVELVDKKSGRKMELSGNQAGLQFYTGGMLKDVKGKNGAVYQAFGGLCLETQSYPDALNHPKFPSQIVEPGKKYKHTMLFKFSIVS

SEQ ID NO: 27110 - DNA, 967 bp, Arabidopsis thaliana
  misc_feature (1)..(967): Ceres Seq. ID no. 12482309
  misc_feature (1)..(967): Ortholog of  Ceres SEQ ID NO 13581800 as cited in SEQ ID NO 51508
ttgattttaatcggaagttcaggtttgctcatcaatcgcagtgaagaaggaaggaacctaaatcggaatttgggtgctccatcaatggcttcgattttggctcgcaggtcactgaatactctccgtgctcgacatctcgttttgtcagggcaagctttacagggatctcatctgtctagactgcagtcccgtggtatatcttatggcagcaacaaagatgatgaagaagcagagcaactttctaaggaaatctccaaggactggaatactgtctttgaacggagcataaacaccctgttcctcacagaaatggtccgcggtttgtcgctgaccctcaagtacttctttgatccaaaagttactatcaattatccatttgagaagggtcctctgagccctcgcttccgtggtgaacatgctcttcgaagatatcctaccggggaagaacgctgcattgcctgcaaactctgtgaagctgtatgtccagctcaagcaatcacaatagaggcagaagagagggaagatggaagccgcagaaccactaggtacgatatcgacatgacaaaatgcatctactgtggtttctgccaagaagcttgccccgttgatgcaatcgttgaaggacctaactttgaattcgcaaccgagacacacgaggaacttctctatgacaaagagaagcttcttgagaatggagatcgatgggagacagagattgctgagaatctgaggtcggagagtctctaccgctgaaccattctacaacagtctctgcttcattcaacttgtttttcccggggaaacattttcgttgcttctgtttgaaaataaagacgagatcatatgcgtgtgaaaactcttttgtaatccagattttgtgctgtgtaattgaattgtttgtaaccaacctgactttgattttcggttcatgagttccggttattaggtgttttcggttcggagaaag

SEQ ID NO: 27111 - protein, 250 aa, Arabidopsis thaliana
  peptide (1)..(250): Ceres Seq. ID no. 12482310
LILIGSSGLLINRSEEGRNLNRNLGAPSMASILARRSLNTLRARHLVLSGQALQGSHLSRLQSRGISYGSNKDDEEAEQLSKEISKDWNTVFERSINTLFLTEMVRGLSLTLKYFFDPKVTINYPFEKGPLSPRFRGEHALRRYPTGEERCIACKLCEAVCPAQAITIEAEEREDGSRRTTRYDIDMTKCIYCGFCQEACPVDAIVEGPNFEFATETHEELLYDKEKLLENGDRWETEIAENLRSESLYR

SEQ ID NO: 27112 - protein, 222 aa, Arabidopsis thaliana
  peptide (1)..(222): Ceres Seq. ID no. 12482311
MASILARRSLNTLRARHLVLSGQALQGSHLSRLQSRGISYGSNKDDEEAEQLSKEISKDWNTVFERSINTLFLTEMVRGLSLTLKYFFDPKVTINYPFEKGPLSPRFRGEHALRRYPTGEERCIACKLCEAVCPAQAITIEAEEREDGSRRTTRYDIDMTKCIYCGFCQEACPVDAIVEGPNFEFATETHEELLYDKEKLLENGDRWETEIAENLRSESLYR

SEQ ID NO: 27113 - protein, 147 aa, Arabidopsis thaliana; identical to SEQ ID NO: 26053
  peptide (1)..(147): Ceres Seq. ID no. 12482312

SEQ ID NO: 27114 - DNA, 1294 bp, Arabidopsis thaliana
  misc_feature (1)..(1294): Ceres Seq. ID no. 13580484
  misc_feature (1)..(1294): Ortholog of  Ceres SEQ ID NO 13581804 as cited in SEQ ID NO 51424
  misc_feature (1)..(1294): Ortholog of  Ceres SEQ ID NO 13663874 as cited in SEQ ID NO 67003
aaaaagaaaatatatatggtttcacaaacaccattaccataactacaacgagaagaggatcttttttaaggagaaaagcagagagagaagagacgagtgtgtgaagtttttttgtcttttgtttcttttattacacacaaatagatgaaacgaggaaagctacttcttttgctacttccataaaaaggttcttcctttcgcagagaatcaactttgatcatcttcttccttctctttctttcttcttctccctccagtaatgcttatatagtctcctcctatatctctacctatacatacacaaaccctttatcctcgaaagcttcctcctggttaggtttttatcaaacccttttagccaatcgggaaattaactaaagaagaagatatggtgaggggcaaaactcagatgaagagaatagagaatgcaacaagcagacaagtgactttctccaaaagaaggaatggtttgttgaagaaagcctttgagctctcagtgctttgtgatgctgaagtttctcttatcatcttctctcctaaaggcaaactttatgaattcgccagctccaatatgcaagataccatagatcgttatctgaggcatactaaggatcgagtcagcaccaaaccggtttctgaagaaaatatgcagcatttgaaatatgaagcagcaaacatgatgaagaaaattgaacaactcgaagcttctaaacgtaaactcttgggagaaggcataggaacatgctcaatcgaggagctgcaacagattgagcaacagcttgagaaaagtgtcaaatgtattcgagcaagaaagactcaagtgtttaaggaacaaattgagcagctcaagcaaaaggagaaagctctagctgcagaaaacgagaagctctctgaaaagtggggatctcatgaaagcgaagtttggtcaaataagaatcaagaaagtactggaagaggtgatgaagagagtagcccaagttctgaagtagagacgcaattgttcattgggttaccttgttcttcaagaaagtgatctccactcaacaaaaaaaacaaaaaaacaaactaagtaaaaacaggtttagcagtactgagagtgtataaggacaagtaacaaaactctaaagctgcttctctcttgttgtcttatttctctctcactctctctctctcagtcacttctttaatgattctgaactgcttgtgttatgtatctatgttcttacacttgcctctctagaatgtaattttgattatgttttgttttcatgtatcaatttagctttcttccccc

SEQ ID NO: 27115 - protein, 214 aa, Arabidopsis thaliana
  peptide (1)..(214): Ceres Seq. ID no. 13580485
MVRGKTQMKRIENATSRQVTFSKRRNGLLKKAFELSVLCDAEVSLIIFSPKGKLYEFASSNMQDTIDRYLRHTKDRVSTKPVSEENMQHLKYEAANMMKKIEQLEASKRKLLGEGIGTCSIEELQQIEQQLEKSVKCIRARKTQVFKEQIEQLKQKEKALAAENEKLSEKWGSHESEVWSNKNQESTGRGDEESSPSSEVETQLFIGLPCSSRK

SEQ ID NO: 27116 - protein, 207 aa, Arabidopsis thaliana
  peptide (1)..(207): Ceres Seq. ID no. 13580486
MKRIENATSRQVTFSKRRNGLLKKAFELSVLCDAEVSLIIFSPKGKLYEFASSNMQDTIDRYLRHTKDRVSTKPVSEENMQHLKYEAANMMKKIEQLEASKRKLLGEGIGTCSIEELQQIEQQLEKSVKCIRARKTQVFKEQIEQLKQKEKALAAENEKLSEKWGSHESEVWSNKNQESTGRGDEESSPSSEVETQLFIGLPCSSRK

SEQ ID NO: 27117 - protein, 153 aa, Arabidopsis thaliana
  peptide (1)..(153): Ceres Seq. ID no. 13580487
MQDTIDRYLRHTKDRVSTKPVSEENMQHLKYEAANMMKKIEQLEASKRKLLGEGIGTCSIEELQQIEQQLEKSVKCIRARKTQVFKEQIEQLKQKEKALAAENEKLSEKWGSHESEVWSNKNQESTGRGDEESSPSSEVETQLFIGLPCSSRK

SEQ ID NO: 27118 - DNA, 1442 bp, Arabidopsis thaliana
  misc_feature (1)..(1442): Ceres Seq. ID no. 12369960
  misc_feature (1)..(1442): Ortholog of  Ceres SEQ ID NO 15178131 as cited in SEQ ID NO 52639
  misc_feature (1)..(1442): Ortholog of  Ceres SEQ ID NO 14312605 as cited in SEQ ID NO 0
aattagatgaagagacatcagatcttatcaaaaccctagctttcggtgtctctctcgatcctttagctcaatcgaaaactgaatttaggagctgcgatgggttccagatctcgtaatgataatttccagtccggcgatggcgctagtcctgggaaaatattcattggaggattgcacaaagacacgactaatactgtgttcaataagcactttggcaagtacggggagattacagattctgtcattatgcgagatcgacatactggacaacctaggggtttcggtttcatcaccttcgctgacccttctgttgttgacaaagttatcgaagatactcatgtcatcaatggcaaacaggttgagatcaaaaggactattccgaaaggtgctggtggcaatcagtcaaaggacatcaaaacaaagaagattttcgttggtggtataccctcaacggttacagaagatgaacttaaggacttctttgccaagtatgggaacgtggtggagcaccaggttattcgagaccatgaaacaaacaggtccagaggttttggttttgtaatttttgatagcgaagaagtcgtagatgaattattgtccaaaggaaacatgatcgatatggcagacactcaggtggagatcaagaaagctgaaccaaagaaatctctaaaccgttcacctccttcttacggtagtcaccctagaggtcgttcttctaacgatagttatgcaagttatggtggaccttacggaggttttgatggagggtatggtcatcctccaggtcccattaggtcacatggaggtcctgctagtagatatgctgggggatatgggtatggtcgtggcagtgtaggccctgaatttggaggaggttataataattatgggggtggtagtttaggaggttaccggaatgaaccaccccttggctattctagtcgttttggaccctatgggagtgggtttggtggtgagggatatggccgtggaggagaaggagcctatttgggatatcctcgtggaggaggggaaggctatgggggatatggtgggcctggttacggcggtgcatatgaatctggtggcccaggtggcagttatgaaggagcaggtggtccatatgggaggggttatagtagcagtagtcgataccatccgtatgcaaggtagggtcgaggtaatagcaatcagttggagctatagaagcttctctcacaggttcctctagattgttccaattgctctaggtgcattctagagttatcatgtagcgccaacatcaggaagggttgctaaggacaggaagagcatcaaaaagcttttattagtcatcttttagttgtgtgtttacctaatttaagtgttgtcttatctctataacttagattgtgttatgtagactttagcatatttgggcttggagtttgtttctcactggc

SEQ ID NO: 27119 - protein, 358 aa, Arabidopsis thaliana
  peptide (1)..(358): Ceres Seq. ID no. 12369961
MGSRSRNDNFQSGDGASPGKIFIGGLHKDTTNTVFNKHFGKYGEITDSVIMRDRHTGQPRGFGFITFADPSVVDKVIEDTHVINGKQVEIKRTIPKGAGGNQSKDIKTKKIFVGGIPSTVTEDELKDFFAKYGNVVEHQVIRDHETNRSRGFGFVIFDSEEVVDELLSKGNMIDMADTQVEIKKAEPKKSLNRSPPSYGSHPRGRSSNDSYASYGGPYGGFDGGYGHPPGPIRSHGGPASRYAGGYGYGRGSVGPEFGGGYNNYGGGSLGGYRNEPPLGYSSRFGPYGSGFGGEGYGRGGEGAYLGYPRGGGEGYGGYGGPGYGGAYESGGPGGSYEGAGGPYGRGYSSSSRYHPYAR

SEQ ID NO: 27120 - protein, 308 aa, Arabidopsis thaliana
  peptide (1)..(308): Ceres Seq. ID no. 12369962
MRDRHTGQPRGFGFITFADPSVVDKVIEDTHVINGKQVEIKRTIPKGAGGNQSKDIKTKKIFVGGIPSTVTEDELKDFFAKYGNVVEHQVIRDHETNRSRGFGFVIFDSEEVVDELLSKGNMIDMADTQVEIKKAEPKKSLNRSPPSYGSHPRGRSSNDSYASYGGPYGGFDGGYGHPPGPIRSHGGPASRYAGGYGYGRGSVGPEFGGGYNNYGGGSLGGYRNEPPLGYSSRFGPYGSGFGGEGYGRGGEGAYLGYPRGGGEGYGGYGGPGYGGAYESGGPGGSYEGAGGPYGRGYSSSSRYHPYAR

SEQ ID NO: 27121 - protein, 187 aa, Arabidopsis thaliana
  peptide (1)..(187): Ceres Seq. ID no. 12369963
MIDMADTQVEIKKAEPKKSLNRSPPSYGSHPRGRSSNDSYASYGGPYGGFDGGYGHPPGPIRSHGGPASRYAGGYGYGRGSVGPEFGGGYNNYGGGSLGGYRNEPPLGYSSRFGPYGSGFGGEGYGRGGEGAYLGYPRGGGEGYGGYGGPGYGGAYESGGPGGSYEGAGGPYGRGYSSSSRYHPYAR

SEQ ID NO: 27122 - DNA, 727 bp, Arabidopsis thaliana
  misc_feature (1)..(727): Ceres Seq. ID no. 12393028
  misc_feature (1)..(727): Ortholog of  Ceres SEQ ID NO 12610954 as cited in SEQ ID NO 55930
  misc_feature (1)..(727): Ortholog of  Ceres SEQ ID NO 12625335 as cited in SEQ ID NO 63326
  misc_feature (1)..(727): Ortholog of  Ceres SEQ ID NO 12566590 as cited in SEQ ID NO 0
  misc_feature (1)..(727): Ortholog of  Ceres SEQ ID NO 15179949 as cited in SEQ ID NO 0
aagtccaaacactttcatttgtctcctttcgtcaactccacagagatctcctcatggctccaattgctgtcggcgatgtcgttccagacggaaccatttccttcttcgatgagaatgatcaacttcagactgtctccgttcactctctcgccgccggtaaaaaagtcatcctctttggtgttcctggtgctttcactcccacctgcagcatgaagcatgttcctggtttcattgagaaagcagaggagctgaagtcaaagggtgttgatgacatcatttgctttagtgtgaacgatccttttttgatgaaagcatggggaaagacatacccagagaacaagcatgtgaagtttgtagctgatgggtctggagaatacacacaccttcttggacttgagcttgaccttaaggacaagggtcttggtattaggtcaaggagattcgctttgttgcttgataaccttaaggtgactgtagccaatctcgaatctggtggcgggttcacagtttccagcgccgatgatatcctcgaggctctctaagaaacgtaccacttgtgttgtctatgtaaaccgctgtatgtgaagtagaggattctatagcctgttctcagacattaagcaaggttgtaataaagcggtgtcattgtgacttgtttggcataacaaagtatttgcttttggtgtttttgtgcgttgattaatgaaagatgtgactcattgacgtg

SEQ ID NO: 27123 - protein, 179 aa, Arabidopsis thaliana
  peptide (1)..(179): Ceres Seq. ID no. 12393029
VQTLSFVSFRQLHRDLLMAPIAVGDVVPDGTISFFDENDQLQTVSVHSLAAGKKVILFGVPGAFTPTCSMKHVPGFIEKAEELKSKGVDDIICFSVNDPFLMKAWGKTYPENKHVKFVADGSGEYTHLLGLELDLKDKGLGIRSRRFALLLDNLKVTVANLESGGGFTVSSADDILEAL

SEQ ID NO: 27124 - protein, 162 aa, Arabidopsis thaliana
  peptide (1)..(162): Ceres Seq. ID no. 12393030
MAPIAVGDVVPDGTISFFDENDQLQTVSVHSLAAGKKVILFGVPGAFTPTCSMKHVPGFIEKAEELKSKGVDDIICFSVNDPFLMKAWGKTYPENKHVKFVADGSGEYTHLLGLELDLKDKGLGIRSRRFALLLDNLKVTVANLESGGGFTVSSADDILEAL

SEQ ID NO: 27125 - protein, 110 aa, Arabidopsis thaliana
  peptide (1)..(110): Ceres Seq. ID no. 12393031
MKHVPGFIEKAEELKSKGVDDIICFSVNDPFLMKAWGKTYPENKHVKFVADGSGEYTHLLGLELDLKDKGLGIRSRRFALLLDNLKVTVANLESGGGFTVSSADDILEAL

SEQ ID NO: 27126 - DNA, 2071 bp, Arabidopsis thaliana
  misc_feature (1)..(2071): Ceres Seq. ID no. 13491829
  misc_feature (1)..(2071): Ortholog of  Ceres SEQ ID NO 15176057 as cited in SEQ ID NO 56363
  misc_feature (1)..(2071): Ortholog of  Ceres SEQ ID NO 14316269 as cited in SEQ ID NO 60082
gcctcttcttcttcttcttcttcttcatcttcttctatatattggtgtttcatttgttctgctttaaaagtacacaaagattcatcttttttcggtcctctgattgggcaaaagactagctcggtcgtgttttgaacaagagatacatgttttgaaaaattcctcgcaaaagaagagaaagaaagactcaaacttttgtttgaatttgataccattttttatatatataccaaaagtccaagactggtttcatttttgggtttggtctgaaacctctcttcgtgttgtttgttcatggtatgtcttaattagggtaaaaaaatacttgattgttttctctcaatcatcgtgcatagagtacgcaataaaccggttaaatccaccgctactgcttccgtcaagcatttaatcaaacagagaggcggcgacggagctacggcggcttccaagtcggcgaatgattataataataatgatagtctcttgacggatatgcaggaaccaagcatcgatacagataaactcagctacgagattttctctattcttgagagcaaatttcttttcgggtacgacgactcgaaacccgaacccgcgaattcggttgttgctgggtcgattaagaaccagagaggtaaaatctgtattctgagtatcgatggaggtggaatgagagggatcttacccggtaaggctttggcttatctagaacacgctctgaaatctaaatcgggtgacccgaatgcccgaatcgccgattactttgacgtagccgccgggtccggtataggtgggatttacacagccatgttgttcgggtcaagagacggtaaccgccccatcttcaaagcagatgacacgtggcagttcttaacgagaaacgccaagggtctttacggaggagcaggaatcttgaaacgggtcttgagaaccgggtcgggttgttgttccgggacggctaagttaaagaaagtgatgaaagagtctttctcggagctaaccttaaaggacacgcttaaaccggtgcttataccttgctacgacctcaaaagctctggcccgtttctgttctcacgggccgatgcgcttgagacggacggctatgattttaggctctcggaggtttgtagagcgacttgggctgagccgggtgtgtttgagcccgtggagatgaagtcggttgatgggcagaccaagtgtgtggctgttggtggaggattagccatgagcaatcccacagcggctgcaatcacgcatgtcctgcacaacaagcaggagtttccgtttgtgcgaggtgttgaggatttgcttgtgttgtctcttggtatgggtcagttgcttgatgttagctatgagtatgatcggattatcaagtggaaggctaagcattgggctcgccccgcagctcttatttctaatgacggtgctgctgacactgtcgatcaagctgtggccatggcttttggtcactgccgcagtagtaactatgtccggattcaggcgaatgggtcgaacttaggaccttggagtcctaacatggacacagaccctagtgggagcaatgtgaatatgctgatgggagtagcagaggagatgcttaaacaaaagaatgttgaatctgttttgtttggaggtaaaagaatcgatgaacagagcaacttcgagaagcttgactggttagctggggaacttgttctcgagcatcaaaggagaaatagcagaatcgctccaaccgtagcgttcaagcaatccgtgcatagagcagatcaaaagacaagtgataaagatatcggtgtgaccgcaagagaacgatgaaataagaaatggtttgcttagatgatttttttaagataaggtttttatttctttcttcttaggttatgatttgttgtatagatttgtgtttttgagattgagtttctgagacatgatgagaaaaggggaaacacctatcatcttgcaaagagggctcaagctccttaatccatgctgcccaaaaaaaaaaaaaaaaatatgattcctgtaatttcggtttgtctttgttttcctatgtagtcatcatgatttcttc

SEQ ID NO: 27127 - protein, 440 aa, Arabidopsis thaliana
  peptide (1)..(440): Ceres Seq. ID no. 13491830
MQEPSIDTDKLSYEIFSILESKFLFGYDDSKPEPANSVVAGSIKNQRGKICILSIDGGGMRGILPGKALAYLEHALKSKSGDPNARIADYFDVAAGSGIGGIYTAMLFGSRDGNRPIFKADDTWQFLTRNAKGLYGGAGILKRVLRTGSGCCSGTAKLKKVMKESFSELTLKDTLKPVLIPCYDLKSSGPFLFSRADALETDGYDFRLSEVCRATWAEPGVFEPVEMKSVDGQTKCVAVGGGLAMSNPTAAAITHVLHNKQEFPFVRGVEDLLVLSLGMGQLLDVSYEYDRIIKWKAKHWARPAALISNDGAADTVDQAVAMAFGHCRSSNYVRIQANGSNLGPWSPNMDTDPSGSNVNMLMGVAEEMLKQKNVESVLFGGKRIDEQSNFEKLDWLAGELVLEHQRRNSRIAPTVAFKQSVHRADQKTSDKDIGVTARER

SEQ ID NO: 27128 - protein, 381 aa, Arabidopsis thaliana
  peptide (1)..(381): Ceres Seq. ID no. 13491831
MRGILPGKALAYLEHALKSKSGDPNARIADYFDVAAGSGIGGIYTAMLFGSRDGNRPIFKADDTWQFLTRNAKGLYGGAGILKRVLRTGSGCCSGTAKLKKVMKESFSELTLKDTLKPVLIPCYDLKSSGPFLFSRADALETDGYDFRLSEVCRATWAEPGVFEPVEMKSVDGQTKCVAVGGGLAMSNPTAAAITHVLHNKQEFPFVRGVEDLLVLSLGMGQLLDVSYEYDRIIKWKAKHWARPAALISNDGAADTVDQAVAMAFGHCRSSNYVRIQANGSNLGPWSPNMDTDPSGSNVNMLMGVAEEMLKQKNVESVLFGGKRIDEQSNFEKLDWLAGELVLEHQRRNSRIAPTVAFKQSVHRADQKTSDKDIGVTARER

SEQ ID NO: 27129 - protein, 335 aa, Arabidopsis thaliana
  peptide (1)..(335): Ceres Seq. ID no. 13491832
MLFGSRDGNRPIFKADDTWQFLTRNAKGLYGGAGILKRVLRTGSGCCSGTAKLKKVMKESFSELTLKDTLKPVLIPCYDLKSSGPFLFSRADALETDGYDFRLSEVCRATWAEPGVFEPVEMKSVDGQTKCVAVGGGLAMSNPTAAAITHVLHNKQEFPFVRGVEDLLVLSLGMGQLLDVSYEYDRIIKWKAKHWARPAALISNDGAADTVDQAVAMAFGHCRSSNYVRIQANGSNLGPWSPNMDTDPSGSNVNMLMGVAEEMLKQKNVESVLFGGKRIDEQSNFEKLDWLAGELVLEHQRRNSRIAPTVAFKQSVHRADQKTSDKDIGVTARER

SEQ ID NO: 27130 - DNA, 1361 bp, Arabidopsis thaliana
  misc_feature (1)..(1361): Ceres Seq. ID no. 13489671
  misc_feature (1)..(1361): Ortholog of  Ceres SEQ ID NO 14307233 as cited in SEQ ID NO 54395
  misc_feature (1)..(1361): Ortholog of  Ceres SEQ ID NO 14306986 as cited in SEQ ID NO 54853
gaacttctgaagcgaaaaaaagagagaattaaagtcattcattatttggggaatggagaagaagctcctttcctacagacgccatcattaacaacatcctcttaagcttctgcgattctctccgtttgtcggaagatttcacgacgattcttcaatccttatccgaaccggagaaatcatgtcggacgctttgatcaatggattggctggagctggtggtgggatcattgctcagcttctcacttatcctcttcaaactgtaaatacgcgccaacagacggagcgggatctgaagagggagaagaggaaacttggaactatcgaacacatgtgtcaggttgtcaaacaagaaggatgggagaggttatatggtggattggcgccgtctcttgctggaacggctgcatcacagggtgtgtactactacttctaccaagtgtttcggaatcgagctgaagccacagctcttgcacggaagaagaaaggtttgggtgacggatcagttgggatgtttgcttcacttttagtggctgcctttgccggatcggttaatgttcttatgacgaatccgatttgggtgattgttacgcgtatgcagacccacagaaaaatgacaaaagatcaaacagcggcccccgagtcaccttcttctaatgcagaagctctggttgctgttgagccgcgtccatatgggacctttaatacgattcgagaggtttacgatgaagctggaataactggcttctggaaaggtgtaattccaacattgatcatggtaagtaatccgtcaatgcaatttatgttgtacgagacaatgctaaccaagctgaagaaaaagcgtgccttgaagggtagcaacaacgttaccgctttggagacatttcttctcggagctgtggcgaaactcggagctactgtcacaacttaccctctcttggttgtaaagtcgcgacttcaagccaaacaggtcacaacaggggacaaaagacaacaatacaaaggaacattggacgcgattctgaaaatgattcgatatgaagggctttacgggttttataaagggatgagcacaaagattgtgcagagcgttttagctgctgcggttctgttcatgatcaaggaagagcttgtcaagggagctaagctgttgctctcaaacgctacctctagctaagtcaagtccaagccttcttgaatgaacgctagtagttagaaataaataaaaatagattaaatttccaatagttttcttgattaattattacactattgggattgttgttcatttcctgatgattgcaattgattattgtaatttctgcaagattctttagtaatgaaatctgaataaagtttggcag

SEQ ID NO: 27131 - protein, 331 aa, Arabidopsis thaliana
  peptide (1)..(331): Ceres Seq. ID no. 13489672
MSDALINGLAGAGGGIIAQLLTYPLQTVNTRQQTERDLKREKRKLGTIEHMCQVVKQEGWERLYGGLAPSLAGTAASQGVYYYFYQVFRNRAEATALARKKKGLGDGSVGMFASLLVAAFAGSVNVLMTNPIWVIVTRMQTHRKMTKDQTAAPESPSSNAEALVAVEPRPYGTFNTIREVYDEAGITGFWKGVIPTLIMVSNPSMQFMLYETMLTKLKKKRALKGSNNVTALETFLLGAVAKLGATVTTYPLLVVKSRLQAKQVTTGDKRQQYKGTLDAILKMIRYEGLYGFYKGMSTKIVQSVLAAAVLFMIKEELVKGAKLLLSNATSS

SEQ ID NO: 27132 - protein, 281 aa, Arabidopsis thaliana
  peptide (1)..(281): Ceres Seq. ID no. 13489673
MCQVVKQEGWERLYGGLAPSLAGTAASQGVYYYFYQVFRNRAEATALARKKKGLGDGSVGMFASLLVAAFAGSVNVLMTNPIWVIVTRMQTHRKMTKDQTAAPESPSSNAEALVAVEPRPYGTFNTIREVYDEAGITGFWKGVIPTLIMVSNPSMQFMLYETMLTKLKKKRALKGSNNVTALETFLLGAVAKLGATVTTYPLLVVKSRLQAKQVTTGDKRQQYKGTLDAILKMIRYEGLYGFYKGMSTKIVQSVLAAAVLFMIKEELVKGAKLLLSNATSS

SEQ ID NO: 27133 - protein, 221 aa, Arabidopsis thaliana
  peptide (1)..(221): Ceres Seq. ID no. 13489674
MFASLLVAAFAGSVNVLMTNPIWVIVTRMQTHRKMTKDQTAAPESPSSNAEALVAVEPRPYGTFNTIREVYDEAGITGFWKGVIPTLIMVSNPSMQFMLYETMLTKLKKKRALKGSNNVTALETFLLGAVAKLGATVTTYPLLVVKSRLQAKQVTTGDKRQQYKGTLDAILKMIRYEGLYGFYKGMSTKIVQSVLAAAVLFMIKEELVKGAKLLLSNATSS

SEQ ID NO: 27134 - DNA, 1311 bp, Arabidopsis thaliana
  misc_feature (1)..(1311): Ceres Seq. ID no. 12393125
  misc_feature (1)..(1311): Ortholog of  Ceres SEQ ID NO 14310524 as cited in SEQ ID NO 58840
  misc_feature (1)..(1311): Ortholog of  Ceres SEQ ID NO 15169541 as cited in SEQ ID NO 67500
actctataaacacacactctcaggagagaagttgtattgatcgtcttctctttccctaaacacactgattattttctctccgacgccgccatgtctctgctctcagatctcgttaacctcaacctcaccgatgccaccgggaaaatcatcgccgaatacatatggatcggtggatctggaatggatatcagaagcaaagccaggacactaccaggaccagtgactgatccatcaaagcttcccaagtggaactacgacggatccagcaccggtcaggctgctggagaagacagtgaagtcattctataccctcaggcaatattcaaggatcccttcaggaaaggcaacaacatcctggtgatgtgtgatgcttacacaccagctggtgatcctattccaaccaacaagaggcacaacgctgctaagatcttcagccaccccgacgttgccaaggaggagccttggtatgggattgagcaagaatacactttgatgcaaaaggatgtgaactggccaattggttggcctgttggtggctaccctggccctcagggaccttactactgtggtgtgggagctgacaaagccattggtcgtgacattgtggatgctcactacaaggcctgtctttacgccggtattggtatttctggtatcaatggagaagtcatgccaggccagtgggagttccaagtcggccctgttgagggtattagttctggtgatcaagtctgggttgctcgataccttctcgagaggatcactgagatctctggtgtaattgtcagcttcgacccgaaaccagtcccgggtgactggaatggagctggagctcactgcaactacagcactaagacaatgagaaacgatggaggattagaagtgatcaagaaagcgatagggaagctttcagctgaaacacaaagaacacattgctgcttacggtgaaggaaacgagcgtcgtctcactggaaagcacgaaaccgcagacatcaacacattctcttggggagtcgcgaaccgtggagcgtcagtgagagtgggacgtgacacagagaaggaaggtaaagggtacttcgaagacagaaggccagcttctaacatggatccttacgttgtcacctccatgatcgctgagacgaccatactcggttgatgacacatttcatgatttgatttctctccaatttggtttgttttttttcccttgtgattgcacttttcgataataaaaaaataattcttattatggcgtattgttgtgacattttgttatttgtttcgaataattaaataagcgcttcttaaggt

SEQ ID NO: 27135 - protein, 285 aa, Arabidopsis thaliana
  peptide (1)..(285): Ceres Seq. ID no. 12393126
MSLLSDLVNLNLTDATGKIIAEYIWIGGSGMDIRSKARTLPGPVTDPSKLPKWNYDGSSTGQAAGEDSEVILYPQAIFKDPFRKGNNILVMCDAYTPAGDPIPTNKRHNAAKIFSHPDVAKEEPWYGIEQEYTLMQKDVNWPIGWPVGGYPGPQGPYYCGVGADKAIGRDIVDAHYKACLYAGIGISGINGEVMPGQWEFQVGPVEGISSGDQVWVARYLLERITEISGVIVSFDPKPVPGDWNGAGAHCNYSTKTMRNDGGLEVIKKAIGKLSAETQRTHCCLR

SEQ ID NO: 27136 - protein, 255 aa, Arabidopsis thaliana
  peptide (1)..(255): Ceres Seq. ID no. 12393127
MDIRSKARTLPGPVTDPSKLPKWNYDGSSTGQAAGEDSEVILYPQAIFKDPFRKGNNILVMCDAYTPAGDPIPTNKRHNAAKIFSHPDVAKEEPWYGIEQEYTLMQKDVNWPIGWPVGGYPGPQGPYYCGVGADKAIGRDIVDAHYKACLYAGIGISGINGEVMPGQWEFQVGPVEGISSGDQVWVARYLLERITEISGVIVSFDPKPVPGDWNGAGAHCNYSTKTMRNDGGLEVIKKAIGKLSAETQRTHCCLR

SEQ ID NO: 27137 - protein, 195 aa, Arabidopsis thaliana
  peptide (1)..(195): Ceres Seq. ID no. 12393128
MCDAYTPAGDPIPTNKRHNAAKIFSHPDVAKEEPWYGIEQEYTLMQKDVNWPIGWPVGGYPGPQGPYYCGVGADKAIGRDIVDAHYKACLYAGIGISGINGEVMPGQWEFQVGPVEGISSGDQVWVARYLLERITEISGVIVSFDPKPVPGDWNGAGAHCNYSTKTMRNDGGLEVIKKAIGKLSAETQRTHCCLR

SEQ ID NO: 27138 - DNA, 1733 bp, Arabidopsis thaliana
  misc_feature (1)..(1733): Ceres Seq. ID no. 12726090
  misc_feature (1)..(1733): Ortholog of  Ceres SEQ ID NO 13596021 as cited in SEQ ID NO 62020
gtgcccacaactcctagtaatgactttctcaggcattgttgacacaaattttgctctgagtaaaacttgggaatagagagagactctgagtgagagagagattctgagtgagagacggagatggaggcagacgaaagcggcatctctctgccgtcgggacccgacggacgtaagcggcgagtcagttacttctacgagccgacgatcggagactactactacggtcaaggccacccgatgaagcctcaccggatccgtatggctcatagcctaatcattcactatcacctccaccgtcgcttagaaatcagtcgccctagcctcgctgacgcctccgatatcggccgattccattcgccggagtatgttgacttcctcgcttccgtttcgccggaatctatgggcgatccttccgctgcacgaaacctaaggcgattcaatgtcggtgaggattgtcctgtcttcgacggactttttgatttttgccgtgcttccgccggaggttctattggtgctgccgtcaaattaaacagacaggacgctgatatcgctatcaattggggcggtgggcttcaccatgctaagaaaagcgaggcttctgggttttgctatgtaaacgacatcgtgctagggattctggagttgctcaagatgtttaagcgggttctctacatagatattgatgtccaccatggagatggagtggaagaagcgttttacaccactgatagagttatgactgtttctttccacaaatttggggactttttcccaggaactggtcacataagagatgttggcgctgaaaaagggaaatactatgctctaaatgttccactaaacgatggtatggacgatgaaagtttccgcagcttgtttagacctcttatccagaaggttatggaagtgtatcagccagaggcagttgttcttcagtgtggtgctgactccttaagtggtgatcggttgggttgcttcaacttatcagtcaagggtcacgctgattgccttcggttcttaagatcttacaacgttcctctcatggtgttgggtggtggagggtatactattcgaaatgttgcccgttgctggtgttatgagactgcagttgctgttggagtagagccggacaacaaactcccttacaatgagtattttgagtatttcggcccagattatacgcttcatgtcgacccaagtcctatggagaatttaaacacgcccaaagatatggagaggataaggaacacgttgctggaacaactttcgggactaatacacgcacctagcgtccagtttcagcacacaccaccagtcaatcgagttttggacgagccggaagatgacatggagacaagaccaaaacctcgcatctggagtggaactgcgacttatgaatcagacagtgacgatgatgataaacctcttcatggttactcatgtcgtggtggcgcaactacggacagggactctaccggtgaagatgaaatggatgacgataacccagagccagacgtgaatcctccatcgtcttaaaccagcttgatggtttggtgtctcttttgccatatgataatgtcggcagatttaagaaacaagttaggggaatgaatgattctttgatgttttttcagcaaccttttgagttctgtgaaaacgctgcattgattagaacagtgacaactgactagtattttggcccaagttagaaaatcagaatatgtgaaaaatgc

SEQ ID NO: 27139 - protein, 471 aa, Arabidopsis thaliana
  peptide (1)..(471): Ceres Seq. ID no. 12726091
MEADESGISLPSGPDGRKRRVSYFYEPTIGDYYYGQGHPMKPHRIRMAHSLIIHYHLHRRLEISRPSLADASDIGRFHSPEYVDFLASVSPESMGDPSAARNLRRFNVGEDCPVFDGLFDFCRASAGGSIGAAVKLNRQDADIAINWGGGLHHAKKSEASGFCYVNDIVLGILELLKMFKRVLYIDIDVHHGDGVEEAFYTTDRVMTVSFHKFGDFFPGTGHIRDVGAEKGKYYALNVPLNDGMDDESFRSLFRPLIQKVMEVYQPEAVVLQCGADSLSGDRLGCFNLSVKGHADCLRFLRSYNVPLMVLGGGGYTIRNVARCWCYETAVAVGVEPDNKLPYNEYFEYFGPDYTLHVDPSPMENLNTPKDMERIRNTLLEQLSGLIHAPSVQFQHTPPVNRVLDEPEDDMETRPKPRIWSGTATYESDSDDDDKPLHGYSCRGGATTDRDSTGEDEMDDDNPEPDVNPPSS

SEQ ID NO: 27140 - protein, 432 aa, Arabidopsis thaliana
  peptide (1)..(432): Ceres Seq. ID no. 12726092
MKPHRIRMAHSLIIHYHLHRRLEISRPSLADASDIGRFHSPEYVDFLASVSPESMGDPSAARNLRRFNVGEDCPVFDGLFDFCRASAGGSIGAAVKLNRQDADIAINWGGGLHHAKKSEASGFCYVNDIVLGILELLKMFKRVLYIDIDVHHGDGVEEAFYTTDRVMTVSFHKFGDFFPGTGHIRDVGAEKGKYYALNVPLNDGMDDESFRSLFRPLIQKVMEVYQPEAVVLQCGADSLSGDRLGCFNLSVKGHADCLRFLRSYNVPLMVLGGGGYTIRNVARCWCYETAVAVGVEPDNKLPYNEYFEYFGPDYTLHVDPSPMENLNTPKDMERIRNTLLEQLSGLIHAPSVQFQHTPPVNRVLDEPEDDMETRPKPRIWSGTATYESDSDDDDKPLHGYSCRGGATTDRDSTGEDEMDDDNPEPDVNPPSS

SEQ ID NO: 27141 - protein, 425 aa, Arabidopsis thaliana
  peptide (1)..(425): Ceres Seq. ID no. 12726093
MAHSLIIHYHLHRRLEISRPSLADASDIGRFHSPEYVDFLASVSPESMGDPSAARNLRRFNVGEDCPVFDGLFDFCRASAGGSIGAAVKLNRQDADIAINWGGGLHHAKKSEASGFCYVNDIVLGILELLKMFKRVLYIDIDVHHGDGVEEAFYTTDRVMTVSFHKFGDFFPGTGHIRDVGAEKGKYYALNVPLNDGMDDESFRSLFRPLIQKVMEVYQPEAVVLQCGADSLSGDRLGCFNLSVKGHADCLRFLRSYNVPLMVLGGGGYTIRNVARCWCYETAVAVGVEPDNKLPYNEYFEYFGPDYTLHVDPSPMENLNTPKDMERIRNTLLEQLSGLIHAPSVQFQHTPPVNRVLDEPEDDMETRPKPRIWSGTATYESDSDDDDKPLHGYSCRGGATTDRDSTGEDEMDDDNPEPDVNPPSS

SEQ ID NO: 27142 - DNA, 896 bp, Arabidopsis thaliana
  misc_feature (1)..(896): Ceres Seq. ID no. 12331402
  misc_feature (1)..(896): Ortholog of  Ceres SEQ ID NO 12610385 as cited in SEQ ID NO 55938
  misc_feature (1)..(896): Ortholog of  Ceres SEQ ID NO 13661939 as cited in SEQ ID NO 61170
  misc_feature (1)..(896): Ortholog of  Ceres SEQ ID NO 15178805 as cited in SEQ ID NO 0
atcgatcactgaatcttcttcttcttcttcttcttcttcttccttctctcaagaacagattttttttaaacgagcttgatcaataaattctctcaagatctatggcggaagagcatcgatgtcagacaccagaaagcaaccgtctctgtgttaacaactgtggcttcctcggcagctccgccaccatgaatctctgttctaattgttacggcgatctttgtctcaaacaacaacaacaatcctcctccatcaaatccaccgttgaatcttccctctctttatctcctccgtcgtcatcatcatcggagatctcttctccgatcatccctcctctccttaaaaatccatcagtcaagctagaggtaccggagaaaaaggcggtgatttcgctgccgacgacggagcagaatcagcaacagaggccgaatcggtgcacgacgtgtaggaaacgggtcgggttaaccggattcaagtgccggtgcggtacgatgttttgcggggttcataggtacccggagatccatggatgcagctacgatttcaaatcggccggacgtgaagagatcgcgaaagcgaatccgttggtgaaagcagcgaagcttcagaagatatgatcagagccgttcgatgcgttgacttttcctctcgtaatcttcatttctacgcgtatgtgtgtcctccgtcccccgagaaatacggatggtgtcgatttgattgatctcagccgttggatcaaaaatggtttattattgtaaaagattgattatgtattaatcaaagggacacgtgtcacgtggttttaggatggagacgctttcgctttctctccttcattttattttctttttcctttcagaaagaaataagattattcgcgttggctttttctttttatc

SEQ ID NO: 27143 - protein, 170 aa, Arabidopsis thaliana
  peptide (1)..(170): Ceres Seq. ID no. 12331403
MAEEHRCQTPESNRLCVNNCGFLGSSATMNLCSNCYGDLCLKQQQQSSSIKSTVESSLSLSPPSSSSSEISSPIIPPLLKNPSVKLEVPEKKAVISLPTTEQNQQQRPNRCTTCRKRVGLTGFKCRCGTMFCGVHRYPEIHGCSYDFKSAGREEIAKANPLVKAAKLQKI

SEQ ID NO: 27144 - protein, 142 aa, Arabidopsis thaliana
  peptide (1)..(142): Ceres Seq. ID no. 12331404
MNLCSNCYGDLCLKQQQQSSSIKSTVESSLSLSPPSSSSSEISSPIIPPLLKNPSVKLEVPEKKAVISLPTTEQNQQQRPNRCTTCRKRVGLTGFKCRCGTMFCGVHRYPEIHGCSYDFKSAGREEIAKANPLVKAAKLQKI

SEQ ID NO: 27145 - DNA, 784 bp, Arabidopsis thaliana
  misc_feature (1)..(784): Ceres Seq. ID no. 12323441
  misc_feature (1)..(784): Ortholog of  Ceres SEQ ID NO 13582876 as cited in SEQ ID NO 68251
  misc_feature (1)..(784): Ortholog of  Ceres SEQ ID NO 15179090 as cited in SEQ ID NO 0
gagctgagatgctgaacctgcaagtaaccgggaagacgatcttatctagtattcgttgtcagagaaagatgtcgtctacttgttcttcgtacgcatttgggccgtacaaaatcgatccccgtgaagtgttctacgcaacgcctctctcttatgccatggttaatctccgtccgcttcttcctggtcatgttcttgtctgcccgagacgccttgtgccacgatttactgatcttacagctgatgagaccagtgacctgtggcttactgctcagaaggttggctctaagcttgagaccttccataatgcgtcttctctcacattagccatccaagatggccctcaagcgggacagactgttccccatgtacacattcatatcttgcctcgtaaaggtggtgactttgagaagaatgatgaaatctatgatgctcttgatgagaaggagaaggaactgaagcagaagcttgatctagataaagaccgggttgataggagcattcaggagatggctgacgaggcttcccaatacagatctcttttcgattgctagttatcatttatcaatatcaaatcaaaccaagctatccagtagctttaataaggaccattgtgacaagtgactttcagtttgaaattttatgtcagagactttgattcaaatttgtaatttctttctaatgtcgcccaatctgggtataaactaagagttatagctttggttgacactacttagtgagattagaatcaactccttcatgttataaagaaaaattcccacttgct

SEQ ID NO: 27146 - protein, 182 aa, Arabidopsis thaliana
  peptide (1)..(182): Ceres Seq. ID no. 12323442
AEMLNLQVTGKTILSSIRCQRKMSSTCSSYAFGPYKIDPREVFYATPLSYAMVNLRPLLPGHVLVCPRRLVPRFTDLTADETSDLWLTAQKVGSKLETFHNASSLTLAIQDGPQAGQTVPHVHIHILPRKGGDFEKNDEIYDALDEKEKELKQKLDLDKDRVDRSIQEMADEASQYRSLFDC

SEQ ID NO: 27147 - protein, 180 aa, Arabidopsis thaliana
  peptide (1)..(180): Ceres Seq. ID no. 12323443
MLNLQVTGKTILSSIRCQRKMSSTCSSYAFGPYKIDPREVFYATPLSYAMVNLRPLLPGHVLVCPRRLVPRFTDLTADETSDLWLTAQKVGSKLETFHNASSLTLAIQDGPQAGQTVPHVHIHILPRKGGDFEKNDEIYDALDEKEKELKQKLDLDKDRVDRSIQEMADEASQYRSLFDC

SEQ ID NO: 27148 - protein, 160 aa, Arabidopsis thaliana
  peptide (1)..(160): Ceres Seq. ID no. 12323444
MSSTCSSYAFGPYKIDPREVFYATPLSYAMVNLRPLLPGHVLVCPRRLVPRFTDLTADETSDLWLTAQKVGSKLETFHNASSLTLAIQDGPQAGQTVPHVHIHILPRKGGDFEKNDEIYDALDEKEKELKQKLDLDKDRVDRSIQEMADEASQYRSLFDC

SEQ ID NO: 27149 - DNA, 935 bp, Arabidopsis thaliana
  misc_feature (1)..(935): Ceres Seq. ID no. 12394305
  misc_feature (1)..(935): Ortholog of  Ceres SEQ ID NO 15179570 as cited in SEQ ID NO 0
gttaaaaggtgagatagtgtaaaagcattgatcaagattcatgcaatgggaggagaaggtggtgctgagcccgttattcactttgtgtttgttcatggagccagtcacggagcttggtgttggtataaactcaccactcttctcgacgccgccgggttcaaatcaacctccgtagatctcaccggcgctggcatcagcctcatagactctaacatcgtcttcgactccgatcaatataaccgtcctctcttctctctcttgtccgatctccctcctcaccacaaagtcatactcgttggacatagcatcggtggaggaagtgtcaccgaagctctttgcaagttcactgacaaaatctccatggccatttacctcgcggcttccatggttcaacccggatccatcccttctccgcatctttcaaacatacatgtgggagaagaagatatatgggagtacacatatggtgaaggtaccgataaaccacccaccgggagtcctcatgaaaccggagtttatacgccattattactatagccaaagccctcttgaggacgtaactttgtcatctaagctgttgcgtcctgctcctatgagggcctttcaagatcttgataagctacctccaaatcccgaggccgagaaagttcctcgagtttacatcaagactgctaaggataatctatttgattctgtgcgacaagaccttttggtggagaattggccaccttctcagctgtatgtcttggaggatagtgaccattcggctttcttctctgtcccaactaccttattcgcgtatctcctccgtgcggtttcttttcttcaacgataaacttaaacttcatccttcctaaattccgatctgataacaaactaattgggaataattagatgatttgtttggaaggtgataggtatgatattatgatttt

SEQ ID NO: 27150 - protein, 163 aa, Arabidopsis thaliana
  peptide (1)..(163): Ceres Seq. ID no. 12394306
MGGEGGAEPVIHFVFVHGASHGAWCWYKLTTLLDAAGFKSTSVDLTGAGISLIDSNIVFDSDQYNRPLFSLLSDLPPHHKVILVGHSIGGGSVTEALCKFTDKISMAIYLAASMVQPGSIPSPHLSNIHVGEEDIWEYTYGEGTDKPPTGSPHETGVYTPLLL

SEQ ID NO: 27151 - protein, 134 aa, Arabidopsis thaliana
  peptide (1)..(134): Ceres Seq. ID no. 12394307
MWEKKIYGSTHMVKVPINHPPGVLMKPEFIRHYYYSQSPLEDVTLSSKLLRPAPMRAFQDLDKLPPNPEAEKVPRVYIKTAKDNLFDSVRQDLLVENWPPSQLYVLEDSDHSAFFSVPTTLFAYLLRAVSFLQR

SEQ ID NO: 27152 - protein, 123 aa, Arabidopsis thaliana
  peptide (1)..(123): Ceres Seq. ID no. 12394308
MVKVPINHPPGVLMKPEFIRHYYYSQSPLEDVTLSSKLLRPAPMRAFQDLDKLPPNPEAEKVPRVYIKTAKDNLFDSVRQDLLVENWPPSQLYVLEDSDHSAFFSVPTTLFAYLLRAVSFLQR

SEQ ID NO: 27153 - DNA, 843 bp, Arabidopsis thaliana
  misc_feature (1)..(843): Ceres Seq. ID no. 12323614
  misc_feature (1)..(843): Ortholog of  Ceres SEQ ID NO 15226220 as cited in SEQ ID NO 59278
  misc_feature (1)..(843): Ortholog of  Ceres SEQ ID NO 13596975 as cited in SEQ ID NO 63097
aaaccctttccgccgcgaacttcatctctctgctttttcttctccatcgcgaaaataaaaaatcagtgagagagatggcgaggtcgagaagaaagtacaggaactctagggctaaagttcgcgttgctcttcctaagaagaaccctaatatctttaaaccagctttcaacttccctcccaagctccgcgctctcatgggagacgatgtccctgaatgggacgatcaagctagcgttatccagaactacaaatcctttggcgtcatctctaaccctaatttgcttggtatccgagctcgtaccgaccatatgattcaggatgattccctcaacgttcctccacctgtagagccaccgactgatgatcctattgctaaggagttcgagcccattgattctggaagcgaacttgaggaagacgatcttaagacagcattggggaagcaaagaaaagatggaaagagtgctcctttacagccgcttaccactatgcaacgcacacatataaggcgtttggtggagaaacatggtgatgacattgagggcatgtaccgagacaggaagctaaactcgatgcagcattcggttgcaacacttcgaaagctatgtacgagatatcagatttacaaagacaagaacccgattttagtttcatgatgatgatgatgatctctgtatcctttgttcaattttgttataaacttgcaacaacactacaatggttatgaagtttctataaatcagaattcagtattttttctattcagaagcatctttatgaggtgaagaggacatatgcaaacttataaaccatatttaatgcttaagagttttcagttttttc

SEQ ID NO: 27154 - protein, 217 aa, Arabidopsis thaliana
  peptide (1)..(217): Ceres Seq. ID no. 12323615
TLSAANFISLLFLLHRENKKSVREMARSRRKYRNSRAKVRVALPKKNPNIFKPAFNFPPKLRALMGDDVPEWDDQASVIQNYKSFGVISNPNLLGIRARTDHMIQDDSLNVPPPVEPPTDDPIAKEFEPIDSGSELEEDDLKTALGKQRKDGKSAPLQPLTTMQRTHIRRLVEKHGDDIEGMYRDRKLNSMQHSVATLRKLCTRYQIYKDKNPILVS

SEQ ID NO: 27155 - protein, 193 aa, Arabidopsis thaliana
  peptide (1)..(193): Ceres Seq. ID no. 12323616
MARSRRKYRNSRAKVRVALPKKNPNIFKPAFNFPPKLRALMGDDVPEWDDQASVIQNYKSFGVISNPNLLGIRARTDHMIQDDSLNVPPPVEPPTDDPIAKEFEPIDSGSELEEDDLKTALGKQRKDGKSAPLQPLTTMQRTHIRRLVEKHGDDIEGMYRDRKLNSMQHSVATLRKLCTRYQIYKDKNPILVS

SEQ ID NO: 27156 - protein, 153 aa, Arabidopsis thaliana
  peptide (1)..(153): Ceres Seq. ID no. 12323617
MGDDVPEWDDQASVIQNYKSFGVISNPNLLGIRARTDHMIQDDSLNVPPPVEPPTDDPIAKEFEPIDSGSELEEDDLKTALGKQRKDGKSAPLQPLTTMQRTHIRRLVEKHGDDIEGMYRDRKLNSMQHSVATLRKLCTRYQIYKDKNPILVS

SEQ ID NO: 27157 - DNA, 989 bp, Arabidopsis thaliana
  misc_feature (1)..(989): Ceres Seq. ID no. 13493806
  misc_feature (1)..(989): Ortholog of  Ceres SEQ ID NO 12608730 as cited in SEQ ID NO 58313
acataataaaccaaacccaacaaagaaaatcaaattttcaaaccaaaaaaaaaaaaaatgagaactttagaagaatcgaagatctctattgtcttcttgttgcttcttctcttctcaatcttcatcagttccagtcaccaggcaaatgaggtattaccagctgaaggagataatgagatgatgatggtgccattgggggaggagaagtttatggtaatgaatgaaacaagaaggaaacttggaagttttcagatatgttcagtttgtacttgttgtggtggtgctaaaggtctttgcttgccttctccttgttgctatgctattaactgcaatatccctaatagaccctttggttactgttctttcactcccaaaacttgcaattgctttggttgccatatctgagatcttctacttcattgtaatttgggagagaaacaagtgaatctaaatcttgattcatcttcaagtgtgaaagggaggaaaaaaagaagaatatctgttcttggtttgagtcttctacttattttttgtctataatttatttttcagtcttcattaaatttcattacctactatctcagcaacatcatcatcctcattaattaattgtctttttgcatttgccattttttcataattttctagggttttttttgttttgagaatcttgttcacacttcaagcaagatttgtttcttcttctctgttcaatcaattctctctatctgtctttctctctctcttttttttttttttcattctcttgtttacttcatcattttgtttcttatgtgttttaagaaagttaaaagttagaatttagcatattttggaaaagagtcattgtttggttaagctggcaattggaagagtatttaatatgatgatgatgatggtattgatggtgatggtggtgatagtgaagctgttaaagttaagtctttgtaatgagtgacatgttaagaaaatggatcaagtttagtgcc

SEQ ID NO: 27158 - protein, 115 aa, Arabidopsis thaliana
  peptide (1)..(115): Ceres Seq. ID no. 13493807
MRTLEESKISIVFLLLLLFSIFISSSHQANEVLPAEGDNEMMMVPLGEEKFMVMNETRRKLGSFQICSVCTCCGGAKGLCLPSPCCYAINCNIPNRPFGYCSFTPKTCNCFGCHI

SEQ ID NO: 27159 - protein, 75 aa, Arabidopsis thaliana
  peptide (1)..(75): Ceres Seq. ID no. 13493808
MMMVPLGEEKFMVMNETRRKLGSFQICSVCTCCGGAKGLCLPSPCCYAINCNIPNRPFGYCSFTPKTCNCFGCHI

SEQ ID NO: 27160 - protein, 74 aa, Arabidopsis thaliana
  peptide (1)..(74): Ceres Seq. ID no. 13493809
MMVPLGEEKFMVMNETRRKLGSFQICSVCTCCGGAKGLCLPSPCCYAINCNIPNRPFGYCSFTPKTCNCFGCHI

SEQ ID NO: 27161 - DNA, 531 bp, Arabidopsis thaliana
  misc_feature (1)..(531): Ceres Seq. ID no. 12323348
  misc_feature (1)..(531): Ortholog of  Ceres SEQ ID NO 13581866 as cited in SEQ ID NO 52179
aagtgttagcttttgatctttcttatattcttctctgaaatagtaacacactgtgaagagtttttcctacatctgaattttgtctgatccaggaaaaagaagaaaatggcgtttgtgacaactgcggaagtttgtgacgcgaatcaagagctgattcggagtggtcagctacgagctttgcaacccattttccagatttatggccgtcgacaaatattctcaggaccagttgtcactgtcaaagtttttgaagacaatggcttaatccgtcaattcatcgaggagaaaggaaacggtagagttcttgtggtggatggtggagggagtcaacgatgtgcaatactcggatttgtgatggtgaatggctttatgcagatactgatgggattcttgtctcccaaattgagttatccgtttaataaaaaaggctttgatcagttaccaaaaaaaaaaaacagaacgtggtttgtgttcatcttcttgttacttaagagattgttgaattataatggaaaataaatttttgttttg

SEQ ID NO: 27162 - protein, 137 aa, Arabidopsis thaliana
  peptide (1)..(137): Ceres Seq. ID no. 12323349
MAFVTTAEVCDANQELIRSGQLRALQPIFQIYGRRQIFSGPVVTVKVFEDNGLIRQFIEEKGNGRVLVVDGGGSQRCAILGFVMVNGFMQILMGFLSPKLSYPFNKKGFDQLPKKKNRTWFVFIFLLLKRLLNYNGK

SEQ ID NO: 27163 - DNA, 606 bp, Arabidopsis thaliana
  misc_feature (1)..(606): Ceres Seq. ID no. 12394295
  misc_feature (1)..(606): Ortholog of  Ceres SEQ ID NO 12610253 as cited in SEQ ID NO 56230
atcttcaccaaattctctcaatcactcaatggcgatttctcaagctcagcctctgcttcttctcctcttatcagtcttcttcttacctgctttgcacgccacttctttcacctactgcgataagaggctcgatcccgttaaggtcacgggtgtgaagatctcccctgaccctgttgtgagtggtgcagccgcaacatttaagatttttggttctactggcgaagacatctctggaggaaaagtagtgatcagggttttatacgttgggattcctgtccataccgaaactcatgacctctgcgatgagacggcatgtccggttgcacctggcagctttgtgctttctcattctcaaacactcccttcaattacaccacctggtacttacacgctaaagatgacaatcaacgacaagaatggcggaagactaacgtgtatcagcttcaaattcaagatcacagtaggttctgcggtctttgctagttaagttttatggtgtaaattgtgtctttgtgaatctctctctcgtttacttttgtggtgtccaaataaagaatgctctttagagacttgagttgatctacatgaaacaaagagtcacaaacc

SEQ ID NO: 27164 - protein, 161 aa, Arabidopsis thaliana
  peptide (1)..(161): Ceres Seq. ID no. 12394296
SSPNSLNHSMAISQAQPLLLLLLSVFFLPALHATSFTYCDKRLDPVKVTGVKISPDPVVSGAAATFKIFGSTGEDISGGKVVIRVLYVGIPVHTETHDLCDETACPVAPGSFVLSHSQTLPSITPPGTYTLKMTINDKNGGRLTCISFKFKITVGSAVFAS

SEQ ID NO: 27165 - protein, 152 aa, Arabidopsis thaliana
  peptide (1)..(152): Ceres Seq. ID no. 12394297
MAISQAQPLLLLLLSVFFLPALHATSFTYCDKRLDPVKVTGVKISPDPVVSGAAATFKIFGSTGEDISGGKVVIRVLYVGIPVHTETHDLCDETACPVAPGSFVLSHSQTLPSITPPGTYTLKMTINDKNGGRLTCISFKFKITVGSAVFAS

SEQ ID NO: 27166 - DNA, 723 bp, Arabidopsis thaliana
  misc_feature (1)..(723): Ceres Seq. ID no. 12370198
  misc_feature (1)..(723): Ortholog of  Ceres SEQ ID NO 13594121 as cited in SEQ ID NO 57058
atatccttaagaaaaacaaaaacaaaaatcaaatgagctccttcaccaccaccaacactccgccaccgtatctcctccggaaaatttatcatcgccgtgtaaaccaaccgttctccgtcgtatgttgcaccggagaaccccaacaagacatcttcacccgccggagaaccttgacttcactaataacattcacggtcatcggcggtgctacgtcatcagcattagcacaggagaaatgggggacaaggtcattcataaaggagaaatattttatgccgggactatcacctgaggatgcggcggcgcgtataaaacagacggctgaaggattaagagacatgagggagatgttggaccacatgtcgtggaggtacgttatattctacataagattgaaacaggcttatctgtctcaggatctcaccaacgccatgaacatcttgccggagagtcgccggaatgattacgttcaggcggcaaacgagcttgtcgaaaacatgagtgagttggatttctatgtacggacgccaaaggtgtacgagtcctatctttactacgagaagacattgaaatcgatagacaatgttgtggagtttcttgcttaattcagttgtattgtatatatgtctttcttcattcttcacatgaaatctctggactcgttacattagatataaaattaaaagacttaataatgtatattcaagaaacatttcgtttgcg

SEQ ID NO: 27167 - protein, 200 aa, Arabidopsis thaliana
  peptide (1)..(200): Ceres Seq. ID no. 12370199
ILKKNKNKNQMSSFTTTNTPPPYLLRKIYHRRVNQPFSVVCCTGEPQQDIFTRRRTLTSLITFTVIGGATSSALAQEKWGTRSFIKEKYFMPGLSPEDAAARIKQTAEGLRDMREMLDHMSWRYVIFYIRLKQAYLSQDLTNAMNILPESRRNDYVQAANELVENMSELDFYVRTPKVYESYLYYEKTLKSIDNVVEFLA

SEQ ID NO: 27168 - protein, 190 aa, Arabidopsis thaliana
  peptide (1)..(190): Ceres Seq. ID no. 12370200
MSSFTTTNTPPPYLLRKIYHRRVNQPFSVVCCTGEPQQDIFTRRRTLTSLITFTVIGGATSSALAQEKWGTRSFIKEKYFMPGLSPEDAAARIKQTAEGLRDMREMLDHMSWRYVIFYIRLKQAYLSQDLTNAMNILPESRRNDYVQAANELVENMSELDFYVRTPKVYESYLYYEKTLKSIDNVVEFLA

SEQ ID NO: 27169 - protein, 110 aa, Arabidopsis thaliana
  peptide (1)..(110): Ceres Seq. ID no. 12370201
MPGLSPEDAAARIKQTAEGLRDMREMLDHMSWRYVIFYIRLKQAYLSQDLTNAMNILPESRRNDYVQAANELVENMSELDFYVRTPKVYESYLYYEKTLKSIDNVVEFLA

SEQ ID NO: 27170 - DNA, 858 bp, Arabidopsis thaliana
  misc_feature (1)..(858): Ceres Seq. ID no. 12323629
  misc_feature (1)..(858): Ortholog of  Ceres SEQ ID NO 12610554 as cited in SEQ ID NO 59805
  misc_feature (1)..(858): Ortholog of  Ceres SEQ ID NO 12614051 as cited in SEQ ID NO 67827
cgcaacggaaaacaaatccgccaatggaagcggctctgagcatcttcaagctctcgttccttctcacccttctctccggcggttcagaccttatcgactcgttgccgccgaattgtaaccgagccgagtgtccgagttatgaggttgtccacgccgggaatggctacgagattcatcgctacaacaccaccgtttggatttctaccgaaccaattcaagatatctctctcaacgaagcttctggcaacggttggaaccaattgtctgattacatgaacgggaacaacgattatcaccagaggatagagatagcacttccttatatcacccaagtctctcagaacttgagcaccttcatagtctctttcttcgttcccaaggcattccaacctgatccacctccgggaaacaacctccacgtacagagatgggactcgaggtacgtggcggtgaagcaaattagtggatatgttgcggatcatagaattggaaaacaagtggctgagctgaaggccagcctacaaggtaccgtatgggccaaggcaattgagaaaagcagagaaaccggcggtgtccgatcggcttgggcttacacggtggcgcaatttagctggccgttccagtggagtcagcgggtcaatgagatttggtttccgtttgaaatggaagatgaagaaactgttagtatcgttactcagtgaaaaaaaaaatgaacactttttatctttttatggtgtagtgacaaagcaaagccattgagataagcctatctcctaaaagttgttaaataactgtccattgtcttactctcgtcagcacattccctaaagaaaagaaaatcaaaagagtactttttcc

SEQ ID NO: 27171 - protein, 232 aa, Arabidopsis thaliana
  peptide (1)..(232): Ceres Seq. ID no. 12323630
QRKTNPPMEAALSIFKLSFLLTLLSGGSDLIDSLPPNCNRAECPSYEVVHAGNGYEIHRYNTTVWISTEPIQDISLNEASGNGWNQLSDYMNGNNDYHQRIEIALPYITQVSQNLSTFIVSFFVPKAFQPDPPPGNNLHVQRWDSRYVAVKQISGYVADHRIGKQVAELKASLQGTVWAKAIEKSRETGGVRSAWAYTVAQFSWPFQWSQRVNEIWFPFEMEDEETVSIVTQ

SEQ ID NO: 27172 - protein, 225 aa, Arabidopsis thaliana
  peptide (1)..(225): Ceres Seq. ID no. 12323631
MEAALSIFKLSFLLTLLSGGSDLIDSLPPNCNRAECPSYEVVHAGNGYEIHRYNTTVWISTEPIQDISLNEASGNGWNQLSDYMNGNNDYHQRIEIALPYITQVSQNLSTFIVSFFVPKAFQPDPPPGNNLHVQRWDSRYVAVKQISGYVADHRIGKQVAELKASLQGTVWAKAIEKSRETGGVRSAWAYTVAQFSWPFQWSQRVNEIWFPFEMEDEETVSIVTQ

SEQ ID NO: 27173 - protein, 142 aa, Arabidopsis thaliana
  peptide (1)..(142): Ceres Seq. ID no. 12323632
MNGNNDYHQRIEIALPYITQVSQNLSTFIVSFFVPKAFQPDPPPGNNLHVQRWDSRYVAVKQISGYVADHRIGKQVAELKASLQGTVWAKAIEKSRETGGVRSAWAYTVAQFSWPFQWSQRVNEIWFPFEMEDEETVSIVTQ

SEQ ID NO: 27174 - DNA, 952 bp, Arabidopsis thaliana
  misc_feature (1)..(952): Ceres Seq. ID no. 13487348
  misc_feature (1)..(952): Ortholog of  Ceres SEQ ID NO 13593932 as cited in SEQ ID NO 54078
  misc_feature (1)..(952): Ortholog of  Ceres SEQ ID NO 12635231 as cited in SEQ ID NO 0
gcgaaagaataaaagtgtgacaaattaagaagagagaaatggggaaagacggagaaggagacaagaagcgagaaacaatggcggtgatgagcttaatgaaggatcaacagaatccaattcaacagtttcaagtcaaattcaaggagattgagactggtttcaagtcgtggttatcaaaacagaagttaccggtggaagccgccgttgtcacggccatgggtggtgttcagggagcttttatcggtggtttaatgggaactttatctcctgaaatgcctcaggctggtattgaccctcaagctatggcttcgctaaagcaaactcaggctcttgttggtgggcctttggttcaagctcggaactttgctgctataactggtgttaatgctggtattgcttgtgttatgaaacggattagaggcaaggaggatttagaatctgctgtggtcgcagcattcggatctggagttgcatattctcttgtgagcgcaggattacaaggacagcctatgaatgcaatcaccactgctgctggtttcgctgtttttcaaggagtgtttttcaagttgggtgaaaggttctctaaaccaagtgttgaagatccatattacacccggggaagatctatgttgttgaaactgggtctagagaagtatgagaagaacttcaagaaaggtttattagctgacccaactctgccattgctcactgatagcgcgctaagagacgtgagcatcccgcctggaccaaggctactgatacttgatcacatccaaagggaccctgagctaaagggcaagcggggaagtcgtggttgagacttgagagcctctctccttcttctgcagaatctttgttgttgtaagatgttataaggatctcaagcacctattattcttaaatattattggttgatgttgctagcaagaaaaattgaatacaaccttaaaag

SEQ ID NO: 27175 - protein, 259 aa, Arabidopsis thaliana
  peptide (1)..(259): Ceres Seq. ID no. 13487349
MGKDGEGDKKRETMAVMSLMKDQQNPIQQFQVKFKEIETGFKSWLSKQKLPVEAAVVTAMGGVQGAFIGGLMGTLSPEMPQAGIDPQAMASLKQTQALVGGPLVQARNFAAITGVNAGIACVMKRIRGKEDLESAVVAAFGSGVAYSLVSAGLQGQPMNAITTAAGFAVFQGVFFKLGERFSKPSVEDPYYTRGRSMLLKLGLEKYEKNFKKGLLADPTLPLLTDSALRDVSIPPGPRLLILDHIQRDPELKGKRGSRG

SEQ ID NO: 27176 - protein, 246 aa, Arabidopsis thaliana
  peptide (1)..(246): Ceres Seq. ID no. 13487350
MAVMSLMKDQQNPIQQFQVKFKEIETGFKSWLSKQKLPVEAAVVTAMGGVQGAFIGGLMGTLSPEMPQAGIDPQAMASLKQTQALVGGPLVQARNFAAITGVNAGIACVMKRIRGKEDLESAVVAAFGSGVAYSLVSAGLQGQPMNAITTAAGFAVFQGVFFKLGERFSKPSVEDPYYTRGRSMLLKLGLEKYEKNFKKGLLADPTLPLLTDSALRDVSIPPGPRLLILDHIQRDPELKGKRGSRG

SEQ ID NO: 27177 - protein, 243 aa, Arabidopsis thaliana
  peptide (1)..(243): Ceres Seq. ID no. 13487351
MSLMKDQQNPIQQFQVKFKEIETGFKSWLSKQKLPVEAAVVTAMGGVQGAFIGGLMGTLSPEMPQAGIDPQAMASLKQTQALVGGPLVQARNFAAITGVNAGIACVMKRIRGKEDLESAVVAAFGSGVAYSLVSAGLQGQPMNAITTAAGFAVFQGVFFKLGERFSKPSVEDPYYTRGRSMLLKLGLEKYEKNFKKGLLADPTLPLLTDSALRDVSIPPGPRLLILDHIQRDPELKGKRGSRG

SEQ ID NO: 27178 - DNA, 1060 bp, Arabidopsis thaliana
  misc_feature (1)..(1060): Ceres Seq. ID no. 12389200
  misc_feature (1)..(1060): Ortholog of  Ceres SEQ ID NO 12476493 as cited in SEQ ID NO 58163
  misc_feature (1)..(1060): Ortholog of  Ceres SEQ ID NO 13598527 as cited in SEQ ID NO 64914
aaatttcgaaacagagtgactattacgagaagcgaaatggatacgtcgcttctacttccgatcatcgacctttcttcgccgggaaaaatttccactgctaaattgattcgtcaggcatgtcttgaacatggattcttctatgtaaagaatcatggaatctcggaagaattaatggaaggggtttttaaggagagcaaaggcttctttaatctcccattagaggaaaagatggctttactccgccgtgatttgctcggttatactccgttgtatgctgagaaacttgacccgtccttgagctccataggtgattccaaggaaagcttctattttggctctttggaaggtgttctagctcaacgttacccaaatcaatggccttctgaaggtatcttgccatcatggaggcaaaccatggaaacttactacaagaatgtcctgtccgtgggtagaaaattgcttggcttgattgccttagcattggatttagatgaggacttcttcgaaaaagttggagccttgaatgatcctacagcagttgttcgcctcttacgctatccaggtgaagtgatttcgtcagatgttgaaacgtatggtgcctcagctcactcagattatggaatggtcactcttcttttgactgatggagttccaggacttcaggtttgtagagacaaatcgaaacaaccacacatttgggaagatgtccctggaattaaaggggcgtttatcgtcaacattggtgatatgatggagagatggaccaatggattgttccggtctacattgcatagagtgatgccggtgggaaaagaacgttactcggtggtgttcttcttagatcccaatccagattgtaatgtgaaatgcttggagagttgttgcagcgaaacttgtccccctagattcccgcctatcctcgccggtgactatattaaggagcgtttcaggctaacatacgccacttcctagtctatgtttgttacgaaatgtaagaaaataataatgttcaaacttctacgtaccataatgtttaattagtggaaacttatggaacttg

SEQ ID NO: 27179 - protein, 323 aa, Arabidopsis thaliana
  peptide (1)..(323): Ceres Seq. ID no. 12389201
KFRNRVTITRSEMDTSLLLPIIDLSSPGKISTAKLIRQACLEHGFFYVKNHGISEELMEGVFKESKGFFNLPLEEKMALLRRDLLGYTPLYAEKLDPSLSSIGDSKESFYFGSLEGVLAQRYPNQWPSEGILPSWRQTMETYYKNVLSVGRKLLGLIALALDLDEDFFEKVGALNDPTAVVRLLRYPGEVISSDVETYGASAHSDYGMVTLLLTDGVPGLQVCRDKSKQPHIWEDVPGIKGAFIVNIGDMMERWTNGLFRSTLHRVMPVGKERYSVVFFLDPNPDCNVKCLESCCSETCPPRFPPILAGDYIKERFRLTYATS

SEQ ID NO: 27180 - protein, 311 aa, Arabidopsis thaliana
  peptide (1)..(311): Ceres Seq. ID no. 12389202
MDTSLLLPIIDLSSPGKISTAKLIRQACLEHGFFYVKNHGISEELMEGVFKESKGFFNLPLEEKMALLRRDLLGYTPLYAEKLDPSLSSIGDSKESFYFGSLEGVLAQRYPNQWPSEGILPSWRQTMETYYKNVLSVGRKLLGLIALALDLDEDFFEKVGALNDPTAVVRLLRYPGEVISSDVETYGASAHSDYGMVTLLLTDGVPGLQVCRDKSKQPHIWEDVPGIKGAFIVNIGDMMERWTNGLFRSTLHRVMPVGKERYSVVFFLDPNPDCNVKCLESCCSETCPPRFPPILAGDYIKERFRLTYATS

SEQ ID NO: 27181 - protein, 266 aa, Arabidopsis thaliana
  peptide (1)..(266): Ceres Seq. ID no. 12389203
MEGVFKESKGFFNLPLEEKMALLRRDLLGYTPLYAEKLDPSLSSIGDSKESFYFGSLEGVLAQRYPNQWPSEGILPSWRQTMETYYKNVLSVGRKLLGLIALALDLDEDFFEKVGALNDPTAVVRLLRYPGEVISSDVETYGASAHSDYGMVTLLLTDGVPGLQVCRDKSKQPHIWEDVPGIKGAFIVNIGDMMERWTNGLFRSTLHRVMPVGKERYSVVFFLDPNPDCNVKCLESCCSETCPPRFPPILAGDYIKERFRLTYATS

SEQ ID NO: 27182 - DNA, 851 bp, Arabidopsis thaliana
  misc_feature (1)..(851): Ceres Seq. ID no. 12323350
  misc_feature (1)..(851): Ortholog of  Ceres SEQ ID NO 13594762 as cited in SEQ ID NO 51909
aataatcatcggcttcaattttcgtcttgagaaagaaaaacaaaatggcttcgatgggtggattacacggtgcatctccggcggttcttgaaggaagcttaaagatcaatggctccagccgtctgaatggctctggaagagtggcggtggctcaaaggtctagacttgtcgtcagagctcagcagagtgaggagacttctcgccggtccgtgattgggcttgttgctgctggtttagctggtggctcgtttgttcaggctgtcctcgccgatgctatttcgatcaaagttggccctcctccagctccttccggtggccttcctgggacagataactcagaccaagcaagagactttgcattggcattgaaagacaggttttacttacagccattgccaccaacagaagctgcagctagagccaaagaatctgcaaaggatatcataaatgtgaagccattgatcgacaggaaagcttggccatatgttcaaaacgatcttcgttccaaggcttcttatcttcgttatgatcttaacacaatcatttcctccaaacccaaggatgagaagaagtcactcaaggatctcaccaccaagctcttcgataccatcgacaatctggattatgcggcgaagaagaagagtccttcgcaggctgagaagtactatgctgagacagtctctgctttgaacgaagttcttgccaagcttggttaagcattttaatttctgcatttttcttgtaaattattattcttggtttttgttcttgagtactttagactcaaattcgtgaatctgaatttatgtttcacgttttcaccaagtaatggcaatttcttgagtatgcgt

SEQ ID NO: 27183 - protein, 223 aa, Arabidopsis thaliana
  peptide (1)..(223): Ceres Seq. ID no. 12323351
MASMGGLHGASPAVLEGSLKINGSSRLNGSGRVAVAQRSRLVVRAQQSEETSRRSVIGLVAAGLAGGSFVQAVLADAISIKVGPPPAPSGGLPGTDNSDQARDFALALKDRFYLQPLPPTEAAARAKESAKDIINVKPLIDRKAWPYVQNDLRSKASYLRYDLNTIISSKPKDEKKSLKDLTTKLFDTIDNLDYAAKKKSPSQAEKYYAETVSALNEVLAKLG

SEQ ID NO: 27184 - protein, 220 aa, Arabidopsis thaliana
  peptide (1)..(220): Ceres Seq. ID no. 12323352
MGGLHGASPAVLEGSLKINGSSRLNGSGRVAVAQRSRLVVRAQQSEETSRRSVIGLVAAGLAGGSFVQAVLADAISIKVGPPPAPSGGLPGTDNSDQARDFALALKDRFYLQPLPPTEAAARAKESAKDIINVKPLIDRKAWPYVQNDLRSKASYLRYDLNTIISSKPKDEKKSLKDLTTKLFDTIDNLDYAAKKKSPSQAEKYYAETVSALNEVLAKLG

SEQ ID NO: 27185 - DNA, 867 bp, Arabidopsis thaliana
  misc_feature (1)..(867): Ceres Seq. ID no. 12323768
  misc_feature (1)..(867): Ortholog of  Ceres SEQ ID NO 13589868 as cited in SEQ ID NO 55521
  misc_feature (1)..(867): Ortholog of  Ceres SEQ ID NO 12617659 as cited in SEQ ID NO 65286
acaattttctgttaaaatgtttggcccattgtcgccgtagattgtcttctccgttcgaaatcgcatccatcgccgtcgtcgtcggtgacgaaaaccaccgcgtaaaaccgtttcctaaatcagatgttcaatcttagaagtatctcttagaagctctcttgtatgaaaaaatgggactgttaagcataatccggaagatcaagaagaaagagaaggagatgcgtattcttatggttggacttgataattctgggaagacgacgattgttctgaaaataaacggagaagacacaagtgtgattagtccaactcttggattcaacatcaaaaccattatctaccaaaagtatacgctaaatatatgggatgttggtgggcaaaagactataagatcgtattggaggaattactttgagcagactgatggtttggtttgggtggttgatagttctgatcttaggaggttagatgattgcaagatggaacttgacaatctcttgaaagaagagaggctagctggttcatctttgctgatactagcaaataagcaggatattcaaggtgcactaacacctgatgaaattggcaaggtgctaaacttagagtccatggataaaagccggcactggaagatagtgggttgcagcgcatacacgggtgaaggtttgttggaaggattcgattggttggttcaagacattgcctccaggatttacatgcttgactaatcgactactgcattgcacaatcaatggcttgttatactcaactatatgcagtgactttgtattggctctaagtttttccttcagttctattgtaacgatgattagacaaaacataaatatttccaagacgaactcttct

SEQ ID NO: 27186 - protein, 185 aa, Arabidopsis thaliana
  peptide (1)..(185): Ceres Seq. ID no. 12323769
MGLLSIIRKIKKKEKEMRILMVGLDNSGKTTIVLKINGEDTSVISPTLGFNIKTIIYQKYTLNIWDVGGQKTIRSYWRNYFEQTDGLVWVVDSSDLRRLDDCKMELDNLLKEERLAGSSLLILANKQDIQGALTPDEIGKVLNLESMDKSRHWKIVGCSAYTGEGLLEGFDWLVQDIASRIYMLD

SEQ ID NO: 27187 - protein, 169 aa, Arabidopsis thaliana
  peptide (1)..(169): Ceres Seq. ID no. 12323770
MRILMVGLDNSGKTTIVLKINGEDTSVISPTLGFNIKTIIYQKYTLNIWDVGGQKTIRSYWRNYFEQTDGLVWVVDSSDLRRLDDCKMELDNLLKEERLAGSSLLILANKQDIQGALTPDEIGKVLNLESMDKSRHWKIVGCSAYTGEGLLEGFDWLVQDIASRIYMLD

SEQ ID NO: 27188 - protein, 165 aa, Arabidopsis thaliana
  peptide (1)..(165): Ceres Seq. ID no. 12323771
MVGLDNSGKTTIVLKINGEDTSVISPTLGFNIKTIIYQKYTLNIWDVGGQKTIRSYWRNYFEQTDGLVWVVDSSDLRRLDDCKMELDNLLKEERLAGSSLLILANKQDIQGALTPDEIGKVLNLESMDKSRHWKIVGCSAYTGEGLLEGFDWLVQDIASRIYMLD

SEQ ID NO: 27189 - DNA, 605 bp, Arabidopsis thaliana
  misc_feature (1)..(605): Ceres Seq. ID no. 12338302
  misc_feature (1)..(605): Ortholog of  Ceres SEQ ID NO 12597253 as cited in SEQ ID NO 62959
ccataacaacaaattcgattcttataactgtttccctctcatctttacacaaaagtattctaatcgatttcaatggcgggtcgtggtaaaacactcggatctgggtctgcgaagaaggcaacaacaagaagcagcaaagccggtctccaattccctgtgggtcgtatcgctcgtttcttgaagaaaggtaaatacgccgaacgtgttggtgccggagctccggtttacttagccgccgttctctaatacctcccgccgaggtattggaattggctggaaacgcagcgagggataacaagaagacgaggattgttccaaggcatattcaattggcggtgaggaacgatgaagaattgagcaaattgcttggagatgtgactattgctaatggaggtgtgatgcctaacattcacaatcttcttcttcctaagaagaccggtgcttccaagccatctgctgaagacgattgattaatcaaccaaatccactctcttgtgttttttgagtttttaaggctttttaagagtaatttagattagatctatggtgaagaaagaatctatcttttgtgttttttgaattgaattgaatgttcatatgctttc

SEQ ID NO: 27190 - protein, 59 aa, Arabidopsis thaliana
  peptide (1)..(59): Ceres Seq. ID no. 12338303
HNNKFDSYNCFPLIFTQKYSNRFQWRVVVKHSDLGLRRRQQQEAAKPVSNSLWVVSLVS

SEQ ID NO: 27191 - protein, 57 aa, Arabidopsis thaliana
  peptide (1)..(57): Ceres Seq. ID no. 12338304
MAGRGKTLGSGSAKKATTRSSKAGLQFPVGRIARFLKKGKYAERVGAGAPVYLAAVL

SEQ ID NO: 27192 - DNA, 982 bp, Arabidopsis thaliana
  misc_feature (1)..(982): Ceres Seq. ID no. 12394298
  misc_feature (1)..(982): Ortholog of  Ceres SEQ ID NO 15170807 as cited in SEQ ID NO 52723
  misc_feature (1)..(982): Ortholog of  Ceres SEQ ID NO 12611846 as cited in SEQ ID NO 59904
  misc_feature (1)..(982): Ortholog of  Ceres SEQ ID NO 14303535 as cited in SEQ ID NO 68728
  misc_feature (1)..(982): Ortholog of  Ceres SEQ ID NO 12635196 as cited in SEQ ID NO 0
  misc_feature (1)..(982): Ortholog of  Ceres SEQ ID NO 15179463 as cited in SEQ ID NO 0
aaagcccaaatgttgctcaaggcttctcccgctctctctctcttgagctccggctccaccggcggtggaaatctgtttcctccgtcgagaaattcgtcgaatcgtctgttttctccgagtggatctaagttttctgttcaggcggcgaaaggaacgaacacgaagtcgttaaccggagttgtattcgaaccttttgaggaagtgaagaaagaactggacctcgttcccactaccccttttgtttctctcgctcgccacaagttctccgacgatgctgaatctgccatcaacgatcagatcaacgtggagtacaacgtctcgtatgtctaccatgccctgtatgcctactttgacagagacaatgtcggcttgaaaggtttcgccaagttttttaacgattcgagtcttgaagaacgaggtcatgctgagatgtttatggagtatcagaacaagcgtggtgggagagtgaagctgcagtctattttgatgcccgtctctgagtttgatcacgaggagaagggagatgcattgcatgcgatggagcttgcattgtctttggagaaacttacaaatgaaaagcttctgaagttacaaagtgttggtgtgaagaacaatgatgttcagctggttgattttgtagaatctgagtttctaggcgagcaggtcgaagctatcaagaaaatctcagagtacgttgcacagctaagaagaataggaaagggtcatggagtgtggcattttgatcaaatgcttctcaatgatgaggtttaaggaaggagagttcagcttctgagtttgatgacaatcttccttgtgctatatggcaccgttctatctctataacgacgtctctaagtttggtcggagaaaagtgttcttgctcgttctttcttttctttgtttttggttaaccgaatgcttgtgagtgtgtacttaataatgtaactcgtagtctgataataaatgcaagtcccactgtttc

SEQ ID NO: 27193 - protein, 256 aa, Arabidopsis thaliana
  peptide (1)..(256): Ceres Seq. ID no. 12394299
KAQMLLKASPALSLLSSGSTGGGNLFPPSRNSSNRLFSPSGSKFSVQAAKGTNTKSLTGVVFEPFEEVKKELDLVPTTPFVSLARHKFSDDAESAINDQINVEYNVSYVYHALYAYFDRDNVGLKGFAKFFNDSSLEERGHAEMFMEYQNKRGGRVKLQSILMPVSEFDHEEKGDALHAMELALSLEKLTNEKLLKLQSVGVKNNDVQLVDFVESEFLGEQVEAIKKISEYVAQLRRIGKGHGVWHFDQMLLNDEV

SEQ ID NO: 27194 - protein, 253 aa, Arabidopsis thaliana
  peptide (1)..(253): Ceres Seq. ID no. 12394300
MLLKASPALSLLSSGSTGGGNLFPPSRNSSNRLFSPSGSKFSVQAAKGTNTKSLTGVVFEPFEEVKKELDLVPTTPFVSLARHKFSDDAESAINDQINVEYNVSYVYHALYAYFDRDNVGLKGFAKFFNDSSLEERGHAEMFMEYQNKRGGRVKLQSILMPVSEFDHEEKGDALHAMELALSLEKLTNEKLLKLQSVGVKNNDVQLVDFVESEFLGEQVEAIKKISEYVAQLRRIGKGHGVWHFDQMLLNDEV

SEQ ID NO: 27195 - DNA, 782 bp, Arabidopsis thaliana
  misc_feature (1)..(782): Ceres Seq. ID no. 12338783
  misc_feature (1)..(782): Ortholog of  Ceres SEQ ID NO 13599506 as cited in SEQ ID NO 334
  misc_feature (1)..(782): Ortholog of  Ceres SEQ ID NO 15172970 as cited in SEQ ID NO 51736
  misc_feature (1)..(782): Ortholog of  Ceres SEQ ID NO 13598157 as cited in SEQ ID NO 61570
  misc_feature (1)..(782): Ortholog of  Ceres SEQ ID NO 15173774 as cited in SEQ ID NO 61771
atatatcttatggatcggacgctcttgggcttttcttgaaaccactataaaacctatctcaattctttcattttctccacacccaattcactcacaacctagctagctagtgaacagtattttctatataccaaaaatggcttcaagttccatagctcttttcttggctctcaatcttctctttttcacaacaatctccgcctgtggtagctgtactccgtgcggcggaggttgcccctctcccaagccaaagccaactcctaaaccaaccccaagccctagctctggctcgagcaagtgccctaaagacaccctcaagctcggtgtctgcgctaatgtgctcaacggcctcctggacttgacccttggcaagccaccggtagccatgctgcagcctcatccaaggactcgctgatgttgaggcagccgtttgtctctgcaccgctcttaaggctaacattcttggaatcaacttgaacctcccaatatctttaagtctactccttaatgtttgcagcaaacaacttcctcctggcttccaatgctaaaaaccatattgatatataatttaaatacacttatgtgtgtattaatttatcttcttgttttaaagagacagggtgattctctatactcttatattgtgtctttatatatcttgatctgtggtttcttctactctgcttgctctggtgttcattggggtgatccgtaagattcctgaagtttacagtttcattatttcctattatatatactcttaccattgggggtattgttgc

SEQ ID NO: 27196 - protein, 92 aa, Arabidopsis thaliana
  peptide (1)..(92): Ceres Seq. ID no. 12338784
MASSSIALFLALNLLFFTTISACGSCTPCGGGCPSPKPKPTPKPTPSPSSGSSKCPKDTLKLGVCANVLNGLLDLTLGKPPVAMLQPHPRTR

SEQ ID NO: 27197 - protein, 57 aa, Arabidopsis thaliana
  peptide (1)..(57): Ceres Seq. ID no. 12338785
MLKTILIYNLNTLMCVLIYLLVLKRQGDSLYSYIVSLYILICGFFYSACSGVHWGDP

SEQ ID NO: 27198 - DNA, 667 bp, Arabidopsis thaliana
  misc_feature (1)..(667): Ceres Seq. ID no. 12389191
  misc_feature (1)..(667): Ortholog of  Ceres SEQ ID NO 13655287 as cited in SEQ ID NO 63004
  misc_feature (1)..(667): Ortholog of  Ceres SEQ ID NO 15173178 as cited in SEQ ID NO 64574
ctcttcttcctctaattgcttttctccgtcactgagtaccttgcctctcgagctcccaatcttaagtagaggattgagcttaaggcaagatggtaagaatcagtgttcttaacgatgctctcaagagcatgtacaatgctgagaaacgaggcaagaggcaggtcatgatcaggccttcctccaaagtgattatcaagtttctgattgtcatgcagaagcacggttacattggtgagtttgagtatgtcgatgaccacagatctggcaagatcgtcgttgaattgaacggaaggttgaacaagtgtggtgttatcagcccacgttttgatgttggtgtcaaggaaattgaaggttggactgcccgtttgctcccttctagacagtttggttacatcgtgctgactacatctgctggcattatggaccatgaagaagctagaaggaagaatgttggaggcaaggttctcggcttcttctattgaagttttattttatgcggaaacagattttcattgagttatttttaacttttgtcctccattttctctgaaactacctttctctttctttcgaattttgtgataactttgatggatagtgttctgaaatcactctttttggtttggagcccttttttagacttcggatgcactcgtaaaattattct

SEQ ID NO: 27199 - protein, 130 aa, Arabidopsis thaliana; identical to SEQ ID NO: 23618
  peptide (1)..(130): Ceres Seq. ID no. 12389192

SEQ ID NO: 27200 - protein, 117 aa, Arabidopsis thaliana; identical to SEQ ID NO: 23619
  peptide (1)..(117): Ceres Seq. ID no. 12389193

SEQ ID NO: 27201 - protein, 105 aa, Arabidopsis thaliana; identical to SEQ ID NO: 23620
  peptide (1)..(105): Ceres Seq. ID no. 12389194

SEQ ID NO: 27202 - DNA, 782 bp, Arabidopsis thaliana
  misc_feature (1)..(782): Ceres Seq. ID no. 12393279
  misc_feature (1)..(782): Ortholog of  Ceres SEQ ID NO 14306299 as cited in SEQ ID NO 56895
  misc_feature (1)..(782): Ortholog of  Ceres SEQ ID NO 13663631 as cited in SEQ ID NO 67073
atatatataacgtgttcaatcctcacttcaaaaacccacaaaaactttagaacgaaaaaagatgaaaatctttaactcatctcaaaacctattcttggccataacctttttccttgttctcatagttcatctaaaagcccaagacagtcctcaagactttttggcagttcacaaccgagcacgagccgaggttggggtgggacccttaagatgggacgagaaggtggctgcttatgcccgtaactatgctaaccagcgtaaaggtgactgcgctatgaaacactcgagcgggtcctatggagagaacatcgcttggagcagcggtagcatgacaggcgtagcagcagttgacatgtgggtggacgagcaatttgactacgattatgattccaatacatgtgcatgggacaaacagtgtggccactatactcaggttgtgtggagaaactcggagaggttgggatgtgcaaaagtgagatgcaacaatggtcaaacctttatcacttgcaactacgatcctcccggtaactgggttggcgagtggccttactaaaagaaaactccatttaaatgttttcgaatatatgttatccacatgtatatatgtattgtttccatgttgttcagttataccaatcatctatcgtcagctaataaagattggtttgtgtggtcctggtccggtccggtcttcttttgtaccacatgtataatgtatgcgtggatttttataatggaataagaaaaatgcaatgctacggcttgcacttgctttgtttgcc

SEQ ID NO: 27203 - protein, 163 aa, Arabidopsis thaliana
  peptide (1)..(163): Ceres Seq. ID no. 12393280
MKIFNSSQNLFLAITFFLVLIVHLKAQDSPQDFLAVHNRARAEVGVGPLRWDEKVAAYARNYANQRKGDCAMKHSSGSYGENIAWSSGSMTGVAAVDMWVDEQFDYDYDSNTCAWDKQCGHYTQVVWRNSERLGCAKVRCNNGQTFITCNYDPPGNWVGEWPY

SEQ ID NO: 27204 - protein, 92 aa, Arabidopsis thaliana
  peptide (1)..(92): Ceres Seq. ID no. 12393281
MKHSSGSYGENIAWSSGSMTGVAAVDMWVDEQFDYDYDSNTCAWDKQCGHYTQVVWRNSERLGCAKVRCNNGQTFITCNYDPPGNWVGEWPY

SEQ ID NO: 27205 - DNA, 524 bp, Arabidopsis thaliana
  misc_feature (1)..(524): Ceres Seq. ID no. 12336485
  misc_feature (1)..(524): Ortholog of  Ceres SEQ ID NO 12606011 as cited in SEQ ID NO 20354
aaacgatcagattacagattcttcaattcctctttcccttctcctccatttcctgattaaggcttcacatctctgagagagaaatgggtcagatccaatactccgagaaatacttcgatgacactttcgaatacaggcacgtcgttcttcctcctgaagtcgctaaacttcttccaaagaatcgtcttctctccgaaaacgaatggcgagcgataggagtgcagcaaagccgcggatgggtacattacgcggttcatcgacctgagccgcacataatgctattcaggaggcctcttaactatcagcagcagcaggagaatcaagctcagaacatgcttgttaagtgaatcattatcatcacctgagtaagaatgttatatgcaacaattctatgagtattggtttatgtttcttgtaaacatggtttgaatctttgtggttatggatgaatatgtgagagttggtttgttgaacaacttctatgtaatgttagtcttggttctaatgtcatcttctgcttctta

SEQ ID NO: 27206 - protein, 87 aa, Arabidopsis thaliana
  peptide (1)..(87): Ceres Seq. ID no. 12336486
MGQIQYSEKYFDDTFEYRHVVLPPEVAKLLPKNRLLSENEWRAIGVQQSRGWVHYAVHRPEPHIMLFRRPLNYQQQQENQAQNMLVK

SEQ ID NO: 27207 - DNA, 803 bp, Arabidopsis thaliana
  misc_feature (1)..(803): Ceres Seq. ID no. 13489702
  misc_feature (1)..(803): Ortholog of  Ceres SEQ ID NO 12609890 as cited in SEQ ID NO 51792
  misc_feature (1)..(803): Ortholog of  Ceres SEQ ID NO 12597253 as cited in SEQ ID NO 62959
  misc_feature (1)..(803): Ortholog of  Ceres SEQ ID NO 15173341 as cited in SEQ ID NO 63800
  misc_feature (1)..(803): Ortholog of  Ceres SEQ ID NO 12635416 as cited in SEQ ID NO 0
  misc_feature (1)..(803): Ortholog of  Ceres SEQ ID NO 12635564 as cited in SEQ ID NO 0
  misc_feature (1)..(803): Ortholog of  Ceres SEQ ID NO 12636917 as cited in SEQ ID NO 0
  misc_feature (1)..(803): Ortholog of  Ceres SEQ ID NO 14309430 as cited in SEQ ID NO 0
gcaaatcgtaaaccgccacaaaaccgaaaaaaacactaattgtgctttccctttagatccatttgtattttcttttggagcttttgaacaatggagtcatcacaagcaacgacgaagccaacgagaggagcaggaggaaggaaaggtggagataggaagaagagtgttagtaaatctgttaaagctggtcttcaatttcccgttggtcgtatcgctcgttacttgaagaaaggtcgttacgctctccgatacggttccggtgctccggtttacctcgccgccgttctcgaatacctagccgccgaggtacttgagctagctgggaacgcagcgagagataataagaagaacaggataaaccctaggcatctatgtttagcgataaggaacgatgaagaattggggagattgcttcatggagttactattgcaagtggtggtgttcttccaaacattaatccagttcttcttcctaagaaatcaacagcttcttcttctcaagctgagaaagcttctgctaccaaatctcctaagaaggcttgataaagaatagtatcgatgttgctttttggttatattcggatcttagatgaagaagaagaagaagaagaaacaacttttttttttttttttttagtttttagaggatttgtgtaggtatctgaaatcttcttctctttgttttggtttgtcttatgtaaaaaccatgggaagatgattatgtttcttacgcaatttgtaatggaaaataagtaatttctgggattagtaacatcatcatctgtctaattaatttctgggtc

SEQ ID NO: 27208 - protein, 150 aa, Arabidopsis thaliana
  peptide (1)..(150): Ceres Seq. ID no. 13489703
MESSQATTKPTRGAGGRKGGDRKKSVSKSVKAGLQFPVGRIARYLKKGRYALRYGSGAPVYLAAVLEYLAAEVLELAGNAARDNKKNRINPRHLCLAIRNDEELGRLLHGVTIASGGVLPNINPVLLPKKSTASSSQAEKASATKSPKKA

SEQ ID NO: 27209 - DNA, 613 bp, Arabidopsis thaliana
  misc_feature (1)..(613): Ceres Seq. ID no. 13593322
  misc_feature (1)..(613): Ortholog of  Ceres SEQ ID NO 12635643 as cited in SEQ ID NO 340
  misc_feature (1)..(613): Ortholog of  Ceres SEQ ID NO 13661877 as cited in SEQ ID NO 61689
ataatcagtgacttagagatcgaagacgatgatgagctctgcatccgccatgaaagctgttggatttttgcttctgcttaccattctaacattagcttatgcgaagaagtcaggtgatgtgacagagttgcagattggtgttaagtacaagcctcagaaatgtgatctccaggctcacaaaggggataagatcaaggttcactatcggggaaagttaactgatggaactgtctttgattcaagttttgagagaggtgaccctattgagtttgagcttggaactggtcaagtcatcccagaatgggaccagggtttattgggagcttgtgtaggtgagaagagaaagttgaaaatcccatccaagcttggttatggtgataacggctcaccaccaaaaatcccgggtggggcgacactgatattcgacaccgagcttgttgctgtgaacggagaaccatccagcgaagcgaaatcaaagaatgagctttgattacaccataattgtttttcatttaaaaggaaaccttgagtagtcatcgatgttggcatttgaatcttaaacagcctagaatcatttactttgctagttgaagacaataattatattttggtc

SEQ ID NO: 27210 - protein, 153 aa, Arabidopsis thaliana
  peptide (1)..(153): Ceres Seq. ID no. 13593323
MMSSASAMKAVGFLLLLTILTLAYAKKSGDVTELQIGVKYKPQKCDLQAHKGDKIKVHYRGKLTDGTVFDSSFERGDPIEFELGTGQVIPEWDQGLLGACVGEKRKLKIPSKLGYGDNGSPPKIPGGATLIFDTELVAVNGEPSSEAKSKNEL

SEQ ID NO: 27211 - protein, 152 aa, Arabidopsis thaliana
  peptide (1)..(152): Ceres Seq. ID no. 13593324
MSSASAMKAVGFLLLLTILTLAYAKKSGDVTELQIGVKYKPQKCDLQAHKGDKIKVHYRGKLTDGTVFDSSFERGDPIEFELGTGQVIPEWDQGLLGACVGEKRKLKIPSKLGYGDNGSPPKIPGGATLIFDTELVAVNGEPSSEAKSKNEL

SEQ ID NO: 27212 - protein, 146 aa, Arabidopsis thaliana
  peptide (1)..(146): Ceres Seq. ID no. 13593325
MKAVGFLLLLTILTLAYAKKSGDVTELQIGVKYKPQKCDLQAHKGDKIKVHYRGKLTDGTVFDSSFERGDPIEFELGTGQVIPEWDQGLLGACVGEKRKLKIPSKLGYGDNGSPPKIPGGATLIFDTELVAVNGEPSSEAKSKNEL

SEQ ID NO: 27213 - DNA, 619 bp, Arabidopsis thaliana
  misc_feature (1)..(619): Ceres Seq. ID no. 12331610
  misc_feature (1)..(619): Ortholog of  Ceres SEQ ID NO 15225657 as cited in SEQ ID NO 329
aatcctctcaatcctctgctgctcaatctctcatcatcggcatcgctctctctaaaaatgtctcagatggatcccgacgctgtatctaaggccttcgtcgaacattactattccaccttcgacaccaaccgtgtcggtctcgctggtctctatcaggaagcttctatgctcaccttcgaaggtcaaaagatccaaggagtccagagcatcgtcgctaagctcacctctcttcctttccagcagtgcaagcatcacatctccaccgttgattgtcagccttctggtcctgcttccggtatgctcgttttcgtttccggtaatctccagctcgccggagaaaaacacgctctcaagttcagccagatgtttcatttgatgccgacgccacaaggaagcttttacgtgttcaacgatatattcagttggagattgcttcaagttttcaataatttatttacttgataagcattgcaagtgtcaagcacaaaagttgcagattcccacaaaccaaataagaaagatcaattttgatgtagaattttgcttctttttcagaagaaaagtctcagcttcactgattcgaccgttgattcaatttctatggcagttcataattttc

SEQ ID NO: 27214 - protein, 153 aa, Arabidopsis thaliana
  peptide (1)..(153): Ceres Seq. ID no. 12331611
NPLNPLLLNLSSSASLSLKMSQMDPDAVSKAFVEHYYSTFDTNRVGLAGLYQEASMLTFEGQKIQGVQSIVAKLTSLPFQQCKHHISTVDCQPSGPASGMLVFVSGNLQLAGEKHALKFSQMFHLMPTPQGSFYVFNDIFSWRLLQVFNNLFT

SEQ ID NO: 27215 - protein, 134 aa, Arabidopsis thaliana
  peptide (1)..(134): Ceres Seq. ID no. 12331612
MSQMDPDAVSKAFVEHYYSTFDTNRVGLAGLYQEASMLTFEGQKIQGVQSIVAKLTSLPFQQCKHHISTVDCQPSGPASGMLVFVSGNLQLAGEKHALKFSQMFHLMPTPQGSFYVFNDIFSWRLLQVFNNLFT

SEQ ID NO: 27216 - protein, 131 aa, Arabidopsis thaliana
  peptide (1)..(131): Ceres Seq. ID no. 12331613
MDPDAVSKAFVEHYYSTFDTNRVGLAGLYQEASMLTFEGQKIQGVQSIVAKLTSLPFQQCKHHISTVDCQPSGPASGMLVFVSGNLQLAGEKHALKFSQMFHLMPTPQGSFYVFNDIFSWRLLQVFNNLFT

SEQ ID NO: 27217 - DNA, 658 bp, Arabidopsis thaliana
  misc_feature (1)..(658): Ceres Seq. ID no. 13487329
  misc_feature (1)..(658): Ortholog of  Ceres SEQ ID NO 13599249 as cited in SEQ ID NO 0
aggaatcggacaaaaaccaagtgaaaccagaaaccctcagactgaaattggtattggccggtggaggatgggagcagagacaaacggagttgcagagaaagtcgacgacttgctggaggctgctagatacaatgatattgatgatctcagaaccttggcctctgatggtctctctcttcactctcgtgattcacaaggccgaacagccctgcatatggccgcagcgaatggacatatgactatagtggagtatcttatcagtgaaggagtggatatcaacgctcttaacgatgagaacaatgctcctctacattgggcatgcttgaatggccatgtcgaggtggtaaagagattgatcttggctggagcaagtctaagtcttttgaatcggtacgagagaactccaatggatgaagctattggtgcggagaagatggagattatagatgctattaacacaactgttgcccaaatggaacttgaaaataccagtatgacatgacttttcagacaacttcatcctcagcatcctaaatgttttctctctgtctctctgaattaaagatgagtttttgtattgtgggattgttgatttgatacctagtctagttgttagaactggaatcatatgaattcaaaatctttggttgcaatatcc

SEQ ID NO: 27218 - protein, 166 aa, Arabidopsis thaliana
  peptide (1)..(166): Ceres Seq. ID no. 13487330
GIGQKPSETRNPQTEIGIGRWRMGAETNGVAEKVDDLLEAARYNDIDDLRTLASDGLSLHSRDSQGRTALHMAAANGHMTIVEYLISEGVDINALNDENNAPLHWACLNGHVEVVKRLILAGASLSLLNRYERTPMDEAIGAEKMEIIDAINTTVAQMELENTSMT

SEQ ID NO: 27219 - protein, 144 aa, Arabidopsis thaliana
  peptide (1)..(144): Ceres Seq. ID no. 13487331
MGAETNGVAEKVDDLLEAARYNDIDDLRTLASDGLSLHSRDSQGRTALHMAAANGHMTIVEYLISEGVDINALNDENNAPLHWACLNGHVEVVKRLILAGASLSLLNRYERTPMDEAIGAEKMEIIDAINTTVAQMELENTSMT

SEQ ID NO: 27220 - protein, 95 aa, Arabidopsis thaliana
  peptide (1)..(95): Ceres Seq. ID no. 13487332
MAAANGHMTIVEYLISEGVDINALNDENNAPLHWACLNGHVEVVKRLILAGASLSLLNRYERTPMDEAIGAEKMEIIDAINTTVAQMELENTSMT

SEQ ID NO: 27221 - DNA, 1083 bp, Arabidopsis thaliana
  misc_feature (1)..(1083): Ceres Seq. ID no. 12394055
  misc_feature (1)..(1083): Ortholog of  Ceres SEQ ID NO 13656177 as cited in SEQ ID NO 64997
caacattaaaattcacaaagacttgctgaagaatgaatgtcctcacattgttgttggtacccctggtcgggtgcttgcacttgccagggagaaagatctctctttgaagaatgtgaggcattttattcttgatgaatgtgataaaatgctcgagtcacttgacatgcgaagggatgtgcaggagattttcaagatgactcctcatgacaaacaagtaatgatgttctcagcaacgctcagcaaagagatacgcccagtctgcaaaaaatttatgcaagatccaatggaaatatatgtcgatgatgaagccaagttgactcttcatgggcttgtccagcactacatcaaactgagcgagatggagaaaaaccggaagttgaatgaccttcttgatgcgttggacttcaatcaagttgtcatttttgtgaagagcgtgagcagggctgctgagctgaacaagttactggtggaatacaatttcccctcaatatgcatccactctggaatgtctcaagaagagaggttgactcgatacaaaagtttcaaggaagggcacaaaaggatccttgtggcgactgacttggtaggaagagggattgacattgagcgtgtcaacattgtcatcaactatgacatgccagattctgctgatacctatcttcacagggttggcagagctggtagatttggaaccaagggtctttcaatcacatttgttgcatctgcttcagattcagaggttcttaaccaggtacaagagaggtttgaggttgatataaaggaacttccggagcagattgatacttcaacctacatgccttcttaaacaagtagcacgtccctcaggaaagaagctcttcagatttcaaccttgtaggtgttcgaagggtgatgggggttcacaactatctctcgctccgtttgttttagtgttttctatgacgacatttttttccatatgtttagaacgtctgttgtactctttaaaggagattcgagtcactctccaaatcgcacagttaaaagctgtccagttttttgtacaagagattattatgtttgaaatatcaggatttagtctcc

SEQ ID NO: 27222 - protein, 274 aa, Arabidopsis thaliana
  peptide (1)..(274): Ceres Seq. ID no. 12394056
NIKIHKDLLKNECPHIVVGTPGRVLALAREKDLSLKNVRHFILDECDKMLESLDMRRDVQEIFKMTPHDKQVMMFSATLSKEIRPVCKKFMQDPMEIYVDDEAKLTLHGLVQHYIKLSEMEKNRKLNDLLDALDFNQVVIFVKSVSRAAELNKLLVEYNFPSICIHSGMSQEERLTRYKSFKEGHKRILVATDLVGRGIDIERVNIVINYDMPDSADTYLHRVGRAGRFGTKGLSITFVASASDSEVLNQVQERFEVDIKELPEQIDTSTYMPS

SEQ ID NO: 27223 - protein, 226 aa, Arabidopsis thaliana
  peptide (1)..(226): Ceres Seq. ID no. 12394057
MLESLDMRRDVQEIFKMTPHDKQVMMFSATLSKEIRPVCKKFMQDPMEIYVDDEAKLTLHGLVQHYIKLSEMEKNRKLNDLLDALDFNQVVIFVKSVSRAAELNKLLVEYNFPSICIHSGMSQEERLTRYKSFKEGHKRILVATDLVGRGIDIERVNIVINYDMPDSADTYLHRVGRAGRFGTKGLSITFVASASDSEVLNQVQERFEVDIKELPEQIDTSTYMPS

SEQ ID NO: 27224 - protein, 220 aa, Arabidopsis thaliana
  peptide (1)..(220): Ceres Seq. ID no. 12394058
MRRDVQEIFKMTPHDKQVMMFSATLSKEIRPVCKKFMQDPMEIYVDDEAKLTLHGLVQHYIKLSEMEKNRKLNDLLDALDFNQVVIFVKSVSRAAELNKLLVEYNFPSICIHSGMSQEERLTRYKSFKEGHKRILVATDLVGRGIDIERVNIVINYDMPDSADTYLHRVGRAGRFGTKGLSITFVASASDSEVLNQVQERFEVDIKELPEQIDTSTYMPS

SEQ ID NO: 27225 - DNA, 968 bp, Arabidopsis thaliana
  misc_feature (1)..(968): Ceres Seq. ID no. 13493775
  misc_feature (1)..(968): Ortholog of  Ceres SEQ ID NO 15226909 as cited in SEQ ID NO 61336
  misc_feature (1)..(968): Ortholog of  Ceres SEQ ID NO 15179474 as cited in SEQ ID NO 0
aaactgatataggaaaatccaacaatggattcatcggcggacatagcaatattagtggcagatgaatgtaaccaaaaggtgaatacaacggcagagaaagcatcgaatacagcggaggttgggtggttgatgatgtttgggattgaggagaagaagattgaaagtctgatgaggaaatttgaagctaaatctcagtttgctgtggcggtttctagtggcttttttctgcttaactatgtttcatccttgtactataagtcacgtttgaacctcatgctggaaatctagtttaggcatgatgttactttcatttgcttctctaatcaccagagggcatgttgctttaagtttcgagttctacaagctttggttttatactcttttgggttagtttttaagtacagtttcttgtaagttaatggaaacggtgtcgtagtaagaaaaaacaaatcatcgtagtaattaagcctaatccgatgcattaattaatctctgaaatttgttggtttgcacaaaaaaaaaaatttccattgttgttgttccacggaactctaaaatggagagtggcgatgagagtccggtggttctaattacgggatgttctcagggaggaattggtcacgcgctggcccgtgagttcactgagaagggatgtcgagtggtggcgacgagtcgatcacggagtacgatgacggatctggagcaagattcgaggttattcgtgaaggagcttgatgtgcaatcggaccagaatgtgagtaaggttttgtcggaggttattgataagttcggtaagatcgacgttcttgttaataacgccggagttcagtgcgttggacctctggcggagactccaatttccgccatggaaaacacattcaacaccaatgtttttggtaataaagatttgatttttagtttcaattattacattgattggagcttcaacagttctggtttttttgctt

SEQ ID NO: 27226 - protein, 137 aa, Arabidopsis thaliana
  peptide (1)..(137): Ceres Seq. ID no. 13493776
MESGDESPVVLITGCSQGGIGHALAREFTEKGCRVVATSRSRSTMTDLEQDSRLFVKELDVQSDQNVSKVLSEVIDKFGKIDVLVNNAGVQCVGPLAETPISAMENTFNTNVFGNKDLIFSFNYYIDWSFNSSGFFA

SEQ ID NO: 27227 - protein, 93 aa, Arabidopsis thaliana
  peptide (1)..(93): Ceres Seq. ID no. 13493777
MTDLEQDSRLFVKELDVQSDQNVSKVLSEVIDKFGKIDVLVNNAGVQCVGPLAETPISAMENTFNTNVFGNKDLIFSFNYYIDWSFNSSGFFA

SEQ ID NO: 27228 - protein, 87 aa, Arabidopsis thaliana
  peptide (1)..(87): Ceres Seq. ID no. 13493778
MDSSADIAILVADECNQKVNTTAEKASNTAEVGWLMMFGIEEKKIESLMRKFEAKSQFAVAVSSGFFLLNYVSSLYYKSRLNLMLEI

SEQ ID NO: 27229 - DNA, 781 bp, Arabidopsis thaliana
  misc_feature (1)..(781): Ceres Seq. ID no. 13489663
  misc_feature (1)..(781): Ortholog of  Ceres SEQ ID NO 15176955 as cited in SEQ ID NO 52770
  misc_feature (1)..(781): Ortholog of  Ceres SEQ ID NO 13661162 as cited in SEQ ID NO 60996
gagcttcttctctgcatcgaaatcggcgacgacgatgatgatctctcgtcgattggtttcaaaattccttaaacccttgtcttctccatctttccacgtctctcgccgtcatctccaatcttcctcatctctcataagaaaccatctgatccacggatcagtaactaaggagcttggtctcttaagatccttttctgttttcaatatcgacaaacttagatctgaaacatggtcaccgaggtatttctcgacaccaagcggagagaccgagccgaagaagccagaggaatcgaaggaagaggagctgcagaagatgaagcaccaggagatcgaaggaccaactgtggaacgcgatttgtcagcgttaggaaatgagacgagacaagtgttggaagggatgatgaagaatatgtatagtctaagtggagctatgggtgctttgggtttaactcaattgattcttggagcggcgattttatacgccactcgagcagatccgatgaaggaaatgacaattcagagctgtatagctttcggattcccgtttgcgatggcgttgatggtgagaagatcgttgaagccaatgtacttcttcaagaagatggaagagttaggtaggctgcagattcttactttgacacttcaagttgctaagaatctcaatctgttgttcgttagagctcgtgttgtttccatcttgtgcgttgttgccttgtgtttcggtaacttgttcctcttgttatcaccatgagagcttgaaatacaatattttttgtctttc

SEQ ID NO: 27230 - protein, 249 aa, Arabidopsis thaliana
  peptide (1)..(249): Ceres Seq. ID no. 13489664
SFFSASKSATTMMISRRLVSKFLKPLSSPSFHVSRRHLQSSSSLIRNHLIHGSVTKELGLLRSFSVFNIDKLRSETWSPRYFSTPSGETEPKKPEESKEEELQKMKHQEIEGPTVERDLSALGNETRQVLEGMMKNMYSLSGAMGALGLTQLILGAAILYATRADPMKEMTIQSCIAFGFPFAMALMVRRSLKPMYFFKKMEELGRLQILTLTLQVAKNLNLLFVRARVVSILCVVALCFGNLFLLLSP

SEQ ID NO: 27231 - protein, 238 aa, Arabidopsis thaliana
  peptide (1)..(238): Ceres Seq. ID no. 13489665
MMISRRLVSKFLKPLSSPSFHVSRRHLQSSSSLIRNHLIHGSVTKELGLLRSFSVFNIDKLRSETWSPRYFSTPSGETEPKKPEESKEEELQKMKHQEIEGPTVERDLSALGNETRQVLEGMMKNMYSLSGAMGALGLTQLILGAAILYATRADPMKEMTIQSCIAFGFPFAMALMVRRSLKPMYFFKKMEELGRLQILTLTLQVAKNLNLLFVRARVVSILCVVALCFGNLFLLLSP

SEQ ID NO: 27232 - protein, 237 aa, Arabidopsis thaliana
  peptide (1)..(237): Ceres Seq. ID no. 13489666
MISRRLVSKFLKPLSSPSFHVSRRHLQSSSSLIRNHLIHGSVTKELGLLRSFSVFNIDKLRSETWSPRYFSTPSGETEPKKPEESKEEELQKMKHQEIEGPTVERDLSALGNETRQVLEGMMKNMYSLSGAMGALGLTQLILGAAILYATRADPMKEMTIQSCIAFGFPFAMALMVRRSLKPMYFFKKMEELGRLQILTLTLQVAKNLNLLFVRARVVSILCVVALCFGNLFLLLSP

SEQ ID NO: 27233 - DNA, 823 bp, Arabidopsis thaliana
  misc_feature (1)..(823): Ceres Seq. ID no. 13487333
  misc_feature (1)..(823): Ortholog of  Ceres SEQ ID NO 15170072 as cited in SEQ ID NO 55533
  misc_feature (1)..(823): Ortholog of  Ceres SEQ ID NO 15173959 as cited in SEQ ID NO 63398
  misc_feature (1)..(823): Ortholog of  Ceres SEQ ID NO 13663564 as cited in SEQ ID NO 66903
attttttcacaattcatatcctgtctgatgaacagtagctgttagactctctctctttctctcttctctgttcttcttcatcttctctagccgaatccatccttcagatactactctgtaatttcactacaatcatctcagccaaatgggttcggaagaagagaaggtcgttgttcccagaaactttagattattggaagagctagaaagaggtgagaaaggaattggagatgggacagtgagttatggaatggatgatgctgatgatattttgatgcaatcttggactggtaccattcttggtcctcataatactgcgtatgaagggaaaatctttcagctgaagctattctgtggaaaggattatccggaaagtccacctactgtgaggtttcagagtcgtataaacatggcttgtgtcaatcctgagaatggagtggttgatccgagtcacttccctatgctttccaactggagaagagaattcacaatggaggatctactgattcagcttaaaaaagaaatgatgtcatcgcagaaccgcaagttagctcaacccttggaaggtaatgaggaaggcaggacagacccaaagggactagtggtgaaatgttgcgtgatgtgaaaagaggtaatgaggaatttataagaatttaagagacaaaacaatgtatataaacagcatttgaagggctttgagattggcctaagaaccctttcttctataggccttcttaatcctaccatttgattatgtattatgtaatatttgagaatatattcaccaaaaacaggtgcccttaataaacctccactcttcttc

SEQ ID NO: 27234 - protein, 159 aa, Arabidopsis thaliana
  peptide (1)..(159): Ceres Seq. ID no. 13487334
MGSEEEKVVVPRNFRLLEELERGEKGIGDGTVSYGMDDADDILMQSWTGTILGPHNTAYEGKIFQLKLFCGKDYPESPPTVRFQSRINMACVNPENGVVDPSHFPMLSNWRREFTMEDLLIQLKKEMMSSQNRKLAQPLEGNEEGRTDPKGLVVKCCVM

SEQ ID NO: 27235 - protein, 124 aa, Arabidopsis thaliana
  peptide (1)..(124): Ceres Seq. ID no. 13487335
MDDADDILMQSWTGTILGPHNTAYEGKIFQLKLFCGKDYPESPPTVRFQSRINMACVNPENGVVDPSHFPMLSNWRREFTMEDLLIQLKKEMMSSQNRKLAQPLEGNEEGRTDPKGLVVKCCVM

SEQ ID NO: 27236 - protein, 116 aa, Arabidopsis thaliana
  peptide (1)..(116): Ceres Seq. ID no. 13487336
MQSWTGTILGPHNTAYEGKIFQLKLFCGKDYPESPPTVRFQSRINMACVNPENGVVDPSHFPMLSNWRREFTMEDLLIQLKKEMMSSQNRKLAQPLEGNEEGRTDPKGLVVKCCVM

SEQ ID NO: 27237 - DNA, 1083 bp, Arabidopsis thaliana
  misc_feature (1)..(1083): Ceres Seq. ID no. 12348423
  misc_feature (1)..(1083): Ortholog of  Ceres SEQ ID NO 15171228 as cited in SEQ ID NO 56948
  misc_feature (1)..(1083): Ortholog of  Ceres SEQ ID NO 13654728 as cited in SEQ ID NO 62302
  misc_feature (1)..(1083): Ortholog of  Ceres SEQ ID NO 13597134 as cited in SEQ ID NO 64501
gacgacggctgggctgttcaaaatcatttcttctctcttccgtcaaaattattattctctcgcagtcgtcaagagcttcttctacaacaatgcagacgacgagaagtgttcaagtaaataatgtctcagatctagccacagagagagagattcacgagtttttctccttctcaggcgacatagaacacattgaaatccaaaaagaatttggacagtctcgaatcgcatttgttacatttactgatcccaaagccctcgaaattgccttgttattatcgggtgcgacgattgtggaccagattgttacaataacacgagctgaaaactatgttcagaggcgtgagacacaggaagtaagaatgttggacaacgcgatgcctcttggtcttcaagagagtactacacagactaaaacgaacatggatggtaatagtagagcatacgttagcaaagcacaagatgtggtggcaacggttttggcaaaagggtctgctcttggacaagatgcagtgaataaagccaaggctttcgacgaaaagcaccaattaagagccaatgcttctgctaaagtttcatcttttgacaagcgagttggtcttactgagaagttatctgttggtatttctgctgttaatgagaaagttaaatctgttgatcaaaagcttcaagtctccgataaaactatggcagcaatatttgcagccgagaggaagttaaacgacacgggttcagctgtcaaatcaagcaggtacgtgactgctggagctgcttggtttagtggcgcttttagtaaagtggcgagagtaggtcaggttgctggctcaaaaaccaaagagaagttcaatctagccgtctcaaatatgagttccaaggatacaccgattgctgtataataaagagcttggaatcaagtaagcgttgaagtcaggatcaacgaaagttgctatactagccttgtgtaaacaacatttttgtgatatagcttatcctcattcttttagtgtttcctcatattctgtgtgtgctgcattgtcctcaaatctacttcatgtttctcattagtgcaagtgttttttgatttcc

SEQ ID NO: 27238 - protein, 296 aa, Arabidopsis thaliana
  peptide (1)..(296): Ceres Seq. ID no. 12348424
RRLGCSKSFLLSSVKIIILSQSSRASSTTMQTTRSVQVNNVSDLATEREIHEFFSFSGDIEHIEIQKEFGQSRIAFVTFTDPKALEIALLLSGATIVDQIVTITRAENYVQRRETQEVRMLDNAMPLGLQESTTQTKTNMDGNSRAYVSKAQDVVATVLAKGSALGQDAVNKAKAFDEKHQLRANASAKVSSFDKRVGLTEKLSVGISAVNEKVKSVDQKLQVSDKTMAAIFAAERKLNDTGSAVKSSRYVTAGAAWFSGAFSKVARVGQVAGSKTKEKFNLAVSNMSSKDTPIAV

SEQ ID NO: 27239 - protein, 267 aa, Arabidopsis thaliana
  peptide (1)..(267): Ceres Seq. ID no. 12348425
MQTTRSVQVNNVSDLATEREIHEFFSFSGDIEHIEIQKEFGQSRIAFVTFTDPKALEIALLLSGATIVDQIVTITRAENYVQRRETQEVRMLDNAMPLGLQESTTQTKTNMDGNSRAYVSKAQDVVATVLAKGSALGQDAVNKAKAFDEKHQLRANASAKVSSFDKRVGLTEKLSVGISAVNEKVKSVDQKLQVSDKTMAAIFAAERKLNDTGSAVKSSRYVTAGAAWFSGAFSKVARVGQVAGSKTKEKFNLAVSNMSSKDTPIAV

SEQ ID NO: 27240 - protein, 177 aa, Arabidopsis thaliana
  peptide (1)..(177): Ceres Seq. ID no. 12348426
MLDNAMPLGLQESTTQTKTNMDGNSRAYVSKAQDVVATVLAKGSALGQDAVNKAKAFDEKHQLRANASAKVSSFDKRVGLTEKLSVGISAVNEKVKSVDQKLQVSDKTMAAIFAAERKLNDTGSAVKSSRYVTAGAAWFSGAFSKVARVGQVAGSKTKEKFNLAVSNMSSKDTPIAV

SEQ ID NO: 27241 - DNA, 1005 bp, Arabidopsis thaliana
  misc_feature (1)..(1005): Ceres Seq. ID no. 13592440
  misc_feature (1)..(1005): Ortholog of  Ceres SEQ ID NO 13638651 as cited in SEQ ID NO 52216
  misc_feature (1)..(1005): Ortholog of  Ceres SEQ ID NO 15171460 as cited in SEQ ID NO 58412
gaggatgtctctattgtttcttcttcactctttttgccacaatctctgttccaagaatcgcgagtatggcgaccacacttcattgtctctccacactccatcttcttcctcgcactcatcaccctaaaaccctaaactctctcaaaccaatcaccaccaaatcacaaccatgtaaaaccccagaaataccctccactcccaacgctcttcagctccttaaatcatcctctctccctctcgcagtcatcgcattgcctttcttcctcgacccacaggatgcagcagcagctggaggagaattcggaatattagaagggagatcatttgcgttgatacacccaattgtgatgggaggtttatttgcatacactctttggactggttacttaggttggcaatggagacgtgtccgtacgatacagagtgagattagtgatctcaagaaacagcttaaaccaactcctgtttcccctgatggttccacagccgttgattcttcgtcgcctccttctacgactgagcttcagatccaacggctaactgaagagaggaaagagttggtcaaagggtcttacagagacaaacactttgacgctggctctgttttgttaggtttcggtgttttggaagctgtctttggtggtgttaacacttatcttcgtactggtaaactcttccccggtcctcatctttacgccggtgcaggaataacggtgttgtgggcggcggcggcagcattggtgccggcaatgcagaaagggaacgatacggcgaggagtctacatatagcgttgaatgcagtaaatgttcttcttttcatttggcaaatcccaacaggtcttgatatcgttcttaaggtctttgagttcactaaatggccatagatattaatatttggatgtgttatttatgagtttgtgactctatatatgcaaatattcttcaactttttttgaggtttgtagatgatgaattgtaaaaatcatgcaattagagtggatattg

SEQ ID NO: 27242 - protein, 293 aa, Arabidopsis thaliana
  peptide (1)..(293): Ceres Seq. ID no. 13592441
GCLYCFFFTLFATISVPRIASMATTLHCLSTLHLLPRTHHPKTLNSLKPITTKSQPCKTPEIPSTPNALQLLKSSSLPLAVIALPFFLDPQDAAAAGGEFGILEGRSFALIHPIVMGGLFAYTLWTGYLGWQWRRVRTIQSEISDLKKQLKPTPVSPDGSTAVDSSSPPSTTELQIQRLTEERKELVKGSYRDKHFDAGSVLLGFGVLEAVFGGVNTYLRTGKLFPGPHLYAGAGITVLWAAAAALVPAMQKGNDTARSLHIALNAVNVLLFIWQIPTGLDIVLKVFEFTKWP

SEQ ID NO: 27243 - protein, 272 aa, Arabidopsis thaliana
  peptide (1)..(272): Ceres Seq. ID no. 13592442
MATTLHCLSTLHLLPRTHHPKTLNSLKPITTKSQPCKTPEIPSTPNALQLLKSSSLPLAVIALPFFLDPQDAAAAGGEFGILEGRSFALIHPIVMGGLFAYTLWTGYLGWQWRRVRTIQSEISDLKKQLKPTPVSPDGSTAVDSSSPPSTTELQIQRLTEERKELVKGSYRDKHFDAGSVLLGFGVLEAVFGGVNTYLRTGKLFPGPHLYAGAGITVLWAAAAALVPAMQKGNDTARSLHIALNAVNVLLFIWQIPTGLDIVLKVFEFTKWP

SEQ ID NO: 27244 - protein, 178 aa, Arabidopsis thaliana
  peptide (1)..(178): Ceres Seq. ID no. 13592443
MGGLFAYTLWTGYLGWQWRRVRTIQSEISDLKKQLKPTPVSPDGSTAVDSSSPPSTTELQIQRLTEERKELVKGSYRDKHFDAGSVLLGFGVLEAVFGGVNTYLRTGKLFPGPHLYAGAGITVLWAAAAALVPAMQKGNDTARSLHIALNAVNVLLFIWQIPTGLDIVLKVFEFTKWP

SEQ ID NO: 27245 - DNA, 678 bp, Arabidopsis thaliana
  misc_feature (1)..(678): Ceres Seq. ID no. 13496842
  misc_feature (1)..(678): Ortholog of  Ceres SEQ ID NO 13583412 as cited in SEQ ID NO 62624
aagagaaaaaatacaaatcgttcaccggaaaaaaacaaaatggctcgtcgcgatgttctcctccctttcctcctccttctcgccaccgtctccgccgtagctttcgccgaagatgatccagactgtgtatacacattctacctcagaaccggatcgatctggaaagccggaaccgattcgatcatcagcgcaagaatctacgataaggacggtgactacatcggaatcaaaaaccttcaagcttgggctggattaatgggacctgattacaattacttcgagaggggtaatctcgacattttcagtggaagagcaccgtgtttacctagtccgatctgtgccttaaacctaacctccgatggctccggcgatcaccatggttggtacgttaattacgttgagatcacgacggctggtgttcacgcacagtgctcgacgcaggattttgagattgagcaatggctcgctactgatacttctccttatgagctcaccgccgtacggaacaattgtccggtcaagcttagggatagtgttagtcgggtcgggtctgagattcggaaaaagctttcttgggtcgtttaagtgatgtgttgtgattcgtgagacttgtctgtattgtttgtattctcgttgttcttgtgagtgtaatgtggcgttaatgaaatatgattcaac

SEQ ID NO: 27246 - protein, 194 aa, Arabidopsis thaliana
  peptide (1)..(194): Ceres Seq. ID no. 13496843
KRKNTNRSPEKNKMARRDVLLPFLLLLATVSAVAFAEDDPDCVYTFYLRTGSIWKAGTDSIISARIYDKDGDYIGIKNLQAWAGLMGPDYNYFERGNLDIFSGRAPCLPSPICALNLTSDGSGDHHGWYVNYVEITTAGVHAQCSTQDFEIEQWLATDTSPYELTAVRNNCPVKLRDSVSRVGSEIRKKLSWVV

SEQ ID NO: 27247 - protein, 181 aa, Arabidopsis thaliana
  peptide (1)..(181): Ceres Seq. ID no. 13496844
MARRDVLLPFLLLLATVSAVAFAEDDPDCVYTFYLRTGSIWKAGTDSIISARIYDKDGDYIGIKNLQAWAGLMGPDYNYFERGNLDIFSGRAPCLPSPICALNLTSDGSGDHHGWYVNYVEITTAGVHAQCSTQDFEIEQWLATDTSPYELTAVRNNCPVKLRDSVSRVGSEIRKKLSWVV

SEQ ID NO: 27248 - protein, 109 aa, Arabidopsis thaliana
  peptide (1)..(109): Ceres Seq. ID no. 13496845
MGPDYNYFERGNLDIFSGRAPCLPSPICALNLTSDGSGDHHGWYVNYVEITTAGVHAQCSTQDFEIEQWLATDTSPYELTAVRNNCPVKLRDSVSRVGSEIRKKLSWVV

SEQ ID NO: 27249 - DNA, 1684 bp, Arabidopsis thaliana
  misc_feature (1)..(1684): Ceres Seq. ID no. 12739003
  misc_feature (1)..(1684): Ortholog of  Ceres SEQ ID NO 13597407 as cited in SEQ ID NO 64106
gcttttccattttactcttcttgtatgtttctgtcttcttactcaacttttgcttcaggcttcgtctcttttgcaatttttgagttagccaagtgctcaagggagatacataatacctgaagatgtccaaggcaagtgatgccgtcagagaaccattggtggacaagaatatggctggatcaaaaccagaccagccgtggatggtttatctcagcacattcgttgcggtctgtggttcttttgcgttcggttcttgtgcgggatactcttcacctgctcaggctgcaattaggaatgacctttcattgactatagctgagttttcactctttggttctttactaacttttggcgcaatgatcggtgctataacaagcgggcctatagctgatttagttggaagaaagggggcgatgaggagtttcctctgcattttgtgtagtcgggtggctagcaatcatctttgccaagggagtagtggctctggacctcggaagactggcaacgggatatggaatgggagcattttcctatgtcgtgccaatctttatagcagaaattgcacctaaaactttcagaggggctctaaccacactgaaccagattctgatctgcactggagtgtcggtttccttcatcataggcacactagtgacgtggagagtcttggcattaataggaatcatcccatgcgctgcctccttccttggcctcttttttatccctgagtctccaagatggctggcaaaagtggggcgtgatacggagtttgaagctgcactgaggaagctccgtgggaagaaggctgatatttcggaggaggcagcagagatccaggattatatcgaaactctggaaaggctaccgaaagccaagatgctggatttgtttcagaggagatacatacgctctgttcttatagctttcgggttgatggtgtttcagcagtttggaggaatcaacggaatatgtttctacacaagctcgatatttgagcaagcaggttttcccacaagacttgggatgataatatatgctgttcttcaggtggtaatcactgcgcttaatgcaccgatagttgacagagccggaagaaaaccattgctactggtttctgcaacagggttagtgataggctgtttgatagcagcggtttctttctatctcaaggttcacgacatggcgcacgaagcagtcccagtcctggctgttgttggtataatggtgtacataggatcgttttcagcaggaatgggagcaatgccgtgggtggtcatgtctgagatatttcccataaacataaaaggagtagcaggaggcatggcgacgctggtgaactggtttggagcgtgggctgtttcttacactttcaacttcctcatgtcctggagctcttacggaactttcctcatttacgctgccatcaacgcgctggccattgtcttcgtcattgccatcgtgcctgagacaaaagggaagacattggagcagatccaagctgtagtcaatccatagctcaaacacttcctagatgttcgtttctattagccagctgggacataaattgcaatcttggatctctttgcttttatgattctttactgagttcaattgttatcactctctctatttctaatctcttcttaatgaactttggacttcaatttgatgtttttccatagtt

SEQ ID NO: 27250 - protein, 332 aa, Arabidopsis thaliana
  peptide (1)..(332): Ceres Seq. ID no. 12739004
MGAFSYVVPIFIAEIAPKTFRGALTTLNQILICTGVSVSFIIGTLVTWRVLALIGIIPCAASFLGLFFIPESPRWLAKVGRDTEFEAALRKLRGKKADISEEAAEIQDYIETLERLPKAKMLDLFQRRYIRSVLIAFGLMVFQQFGGINGICFYTSSIFEQAGFPTRLGMIIYAVLQVVITALNAPIVDRAGRKPLLLVSATGLVIGCLIAAVSFYLKVHDMAHEAVPVLAVVGIMVYIGSFSAGMGAMPWVVMSEIFPINIKGVAGGMATLVNWFGAWAVSYTFNFLMSWSSYGTFLIYAAINALAIVFVIAIVPETKGKTLEQIQAVVNP

SEQ ID NO: 27251 - protein, 212 aa, Arabidopsis thaliana
  peptide (1)..(212): Ceres Seq. ID no. 12739005
MLDLFQRRYIRSVLIAFGLMVFQQFGGINGICFYTSSIFEQAGFPTRLGMIIYAVLQVVITALNAPIVDRAGRKPLLLVSATGLVIGCLIAAVSFYLKVHDMAHEAVPVLAVVGIMVYIGSFSAGMGAMPWVVMSEIFPINIKGVAGGMATLVNWFGAWAVSYTFNFLMSWSSYGTFLIYAAINALAIVFVIAIVPETKGKTLEQIQAVVNP

SEQ ID NO: 27252 - protein, 193 aa, Arabidopsis thaliana
  peptide (1)..(193): Ceres Seq. ID no. 12739006
MVFQQFGGINGICFYTSSIFEQAGFPTRLGMIIYAVLQVVITALNAPIVDRAGRKPLLLVSATGLVIGCLIAAVSFYLKVHDMAHEAVPVLAVVGIMVYIGSFSAGMGAMPWVVMSEIFPINIKGVAGGMATLVNWFGAWAVSYTFNFLMSWSSYGTFLIYAAINALAIVFVIAIVPETKGKTLEQIQAVVNP

SEQ ID NO: 27253 - DNA, 674 bp, Arabidopsis thaliana
  misc_feature (1)..(674): Ceres Seq. ID no. 12580263
  misc_feature (1)..(674): Ortholog of  Ceres SEQ ID NO 13655108 as cited in SEQ ID NO 62996
aaaaccttacattgctttccatttaaaactctcttcttcttttttgttctctctctctcttcatggaagctcaacaccttcatgccaagcctcatgctgaaggagaatggtccacaggcttctgtgattgcttttctgactgcaaaaattgttgtatcacattctggtgtccatgtatcacctttggccaagtcgccgagattgtagatcgaggatccacatcgtgtggtactgctggagctctatacgcgttgatagccgtagtaactggttgtgcatgtatatactcatgtttctatcgtggaaagatgagagctcaatataatattaaaggagatgattgtactgattgccttaaacatttctgctgtgagctttgttctttgacccaacaataccgtgaactcaagcaccgcggttacgatatgagtcttggatgggcggggaacgtggagagacaacagaatcaaggaggtgtggccatgggtgctccggtcttccaaggcggcatgacccgctaagaattatttctttatgtaattcatttgtcttttatatgtagtaataaaacgaggtttaatcctctgtttgtgttgttaatatgcttgttgtgatttgaaccaaaaaaaatgcttgttgtgaaagtttagatatatatgaatgttcttcaatgt

SEQ ID NO: 27254 - protein, 152 aa, Arabidopsis thaliana
  peptide (1)..(152): Ceres Seq. ID no. 12580264
MEAQHLHAKPHAEGEWSTGFCDCFSDCKNCCITFWCPCITFGQVAEIVDRGSTSCGTAGALYALIAVVTGCACIYSCFYRGKMRAQYNIKGDDCTDCLKHFCCELCSLTQQYRELKHRGYDMSLGWAGNVERQQNQGGVAMGAPVFQGGMTR

SEQ ID NO: 27255 - DNA, 966 bp, Arabidopsis thaliana
  misc_feature (1)..(966): Ceres Seq. ID no. 12335471
  misc_feature (1)..(966): Ortholog of  Ceres SEQ ID NO 14302764 as cited in SEQ ID NO 67753
  misc_feature (1)..(966): Ortholog of  Ceres SEQ ID NO 14302291 as cited in SEQ ID NO 68180
attcacaccggacattttgaaatctcaacaagaaccaaaccaaacaacaaaaaaacattcttaataattatctttctgttatgtcgatgacggcggattctcaatctgattatgcttttcttgagtccatacgacgacacttactaggagaatcggagccgatactcagtgagtcgacagcgagttcggttactcaatcttgtgtaaccggtcagagcattaaaccggtgtacggacgaaaccctagctttagcaaactgtatccttgcttcaccgagagctggggagatttgccgttgaaagaaaacgattctgaggatatgttagtttacggtatcctcaacgacgcctttcacggcggttgggagccgtcttcttcgtcttccgacgaagatcgtagctctttcccgagtgttaagatcgagactccggagagtttcgcggcggtggattctgttccggtcaagaaggagaagacgagtcctgtttcggcggcggtgacggcggcgaagggaaagcattatagaggagtgagacaaaggccgtgggggaaatttgcggcggagattagagacccggcgaagaacggagctagggtttggttaggaacgtttgagacggcggaggacgcggcgttggcttacgacagagctgctttcaggatgcgtggttcccgcgctttgttgaattttccgttgagagttaattcaggagaacccgacccggttcgaatcaagtccaagagatcttctttttcttcttctaacgagaacggagctccgaagaagaggagaacggtggccgccggtggtggaatggataagggattgacggtgaagtgcgaggttgttgaagtggcacgtggcgatcgtttattggttttataattttgatttttctttgttggatgattatatgattcttcaaaaaagaagaacgttaataaaaaaattcgtttattattat

SEQ ID NO: 27256 - protein, 268 aa, Arabidopsis thaliana
  peptide (1)..(268): Ceres Seq. ID no. 12335472
MSMTADSQSDYAFLESIRRHLLGESEPILSESTASSVTQSCVTGQSIKPVYGRNPSFSKLYPCFTESWGDLPLKENDSEDMLVYGILNDAFHGGWEPSSSSSDEDRSSFPSVKIETPESFAAVDSVPVKKEKTSPVSAAVTAAKGKHYRGVRQRPWGKFAAEIRDPAKNGARVWLGTFETAEDAALAYDRAAFRMRGSRALLNFPLRVNSGEPDPVRIKSKRSSFSSSNENGAPKKRRTVAAGGGMDKGLTVKCEVVEVARGDRLLVL

SEQ ID NO: 27257 - protein, 266 aa, Arabidopsis thaliana
  peptide (1)..(266): Ceres Seq. ID no. 12335473
MTADSQSDYAFLESIRRHLLGESEPILSESTASSVTQSCVTGQSIKPVYGRNPSFSKLYPCFTESWGDLPLKENDSEDMLVYGILNDAFHGGWEPSSSSSDEDRSSFPSVKIETPESFAAVDSVPVKKEKTSPVSAAVTAAKGKHYRGVRQRPWGKFAAEIRDPAKNGARVWLGTFETAEDAALAYDRAAFRMRGSRALLNFPLRVNSGEPDPVRIKSKRSSFSSSNENGAPKKRRTVAAGGGMDKGLTVKCEVVEVARGDRLLVL

SEQ ID NO: 27258 - protein, 188 aa, Arabidopsis thaliana
  peptide (1)..(188): Ceres Seq. ID no. 12335474
MLVYGILNDAFHGGWEPSSSSSDEDRSSFPSVKIETPESFAAVDSVPVKKEKTSPVSAAVTAAKGKHYRGVRQRPWGKFAAEIRDPAKNGARVWLGTFETAEDAALAYDRAAFRMRGSRALLNFPLRVNSGEPDPVRIKSKRSSFSSSNENGAPKKRRTVAAGGGMDKGLTVKCEVVEVARGDRLLVL

SEQ ID NO: 27259 - DNA, 958 bp, Arabidopsis thaliana
  misc_feature (1)..(958): Ceres Seq. ID no. 13575744
  misc_feature (1)..(958): Ortholog of  Ceres SEQ ID NO 13502973 as cited in SEQ ID NO 68052
aattgcaaatcaaatggatcgtcttaagctttatttctccgttttcgttttgtctttctttatcgtctcggtttcgtcgtctgatgtcaacgacggcgatgatctcgtgatccgtcaggtggttggtggagccgagcctcaggttttgacctcagaggatcacttttctctctttggaaggtgctaacttcctcgctaccggcaaactcgtcagcctcagcgaacaacagctcgtcgactgtgatcacgagtgtgatcccgaggaggcagattcctgcgactctggttgcaatggtgggctaatgaacagcgcttttgaatacaccctcaaaaccggagggctcatgaaagaagaagactatccttacaccggaaaggacggcaagacctgcaagctagacaagtccaagatcgttgcctctgtctccaacttcagtgttatctccattgatgaagaacagattgctgcaaaccttgtcaagaacggacctcttgctgtagccatcaacgctggctatatgcagacttacattggaggagtctcatgcccttacatatgcaccaggaggctcaaccacggtgtcttattggttggctatggagcggcaggttacgctccggctaggttcaaggagaagccttactggatcatcaagaactcgtggggagagacttggggtgaaaatggtttctacaaaatctgcaaaggccgtaacatttgtggtgttgacagtatggtctccactgttgcagccaccgtctcaaccaccgcccattaagcatctcgtcaataagttttaattactttggtgatttgtatgagcgagctctctttgcgctgctgactctctctatttatctctgcttcttgcttgtaaataaaatgcgttctattgagcaaaaccgtacaatgctcattagcaatgagcccactttaacaagtatcagtttatggctc

SEQ ID NO: 27260 - protein, 158 aa, Arabidopsis thaliana
  peptide (1)..(158): Ceres Seq. ID no. 13575745
MNSAFEYTLKTGGLMKEEDYPYTGKDGKTCKLDKSKIVASVSNFSVISIDEEQIAANLVKNGPLAVAINAGYMQTYIGGVSCPYICTRRLNHGVLLVGYGAAGYAPARFKEKPYWIIKNSWGETWGENGFYKICKGRNICGVDSMVSTVAATVSTTAH

SEQ ID NO: 27261 - protein, 144 aa, Arabidopsis thaliana
  peptide (1)..(144): Ceres Seq. ID no. 13575746
MKEEDYPYTGKDGKTCKLDKSKIVASVSNFSVISIDEEQIAANLVKNGPLAVAINAGYMQTYIGGVSCPYICTRRLNHGVLLVGYGAAGYAPARFKEKPYWIIKNSWGETWGENGFYKICKGRNICGVDSMVSTVAATVSTTAH

SEQ ID NO: 27262 - protein, 86 aa, Arabidopsis thaliana
  peptide (1)..(86): Ceres Seq. ID no. 13575747
MQTYIGGVSCPYICTRRLNHGVLLVGYGAAGYAPARFKEKPYWIIKNSWGETWGENGFYKICKGRNICGVDSMVSTVAATVSTTAH

SEQ ID NO: 27263 - DNA, 1071 bp, Arabidopsis thaliana
  misc_feature (1)..(1071): Ceres Seq. ID no. 12331353
  misc_feature (1)..(1071): Ortholog of  Ceres SEQ ID NO 13596762 as cited in SEQ ID NO 63019
aaaacccaaacacataaaaaaatgagtcaacacaacatcttagaagctctaaatgtccgggtcgtgggtacgggtgatcggatcctgtttttggcccatggattcggtactgaccaatcagcttggcacttgatccttccttacttcactcaaaactacagagtcgtcctctatgacctagtttgcgccggcagtgtcaaccccgattacttcgatttcaatcgttacacaactctcgatccttacgtcgatgatcttctcaacatcgttgattcactcggaatccaaaactgtgcttacgttggtcactctgtttccgctatgatcggaatcatcgcttcgattcgtcggccggagcttttctccaagcttatcttgatcggattttcgcctaggtttctcaacgacgaggattatcatggaggattcgaagaaggtgagattgagaaagttttctcagctatggaagctaattacgaagcttgggttcatggatttgctccgcttgctgttggagctgatgttccggcggcggttagagaatttagccggactttgtttaatatgcgtccggatatatctctgtttgtttcgaggacggttttcaacagcgatctgagaggtgtgcttgggttagttagagttccgacgtgtgtgattcagacggcgaaggatgtttctgtgccggcttcggtggcggagtatcttaggtctcatctcggtggagatactactgtggagactcttaaaactgaaggacatttgccgcagcttagtgctccggcgcagcttgctcagtttctccggcgagctcttcctcggtgacttttttttatagatataaaaagagaacaataaaatataattggtggaatatgggtttagtggggtccacgtatcgaagaaaagaagggcctctatttgtggaggacagtttggcattgtcacaaatctagtaagataagattgttcacttgacacgtgactttcgcttttttatcactttttttcttgctctcttcattagtttataatcacaagtttatttcataaaataattggagaataacc

SEQ ID NO: 27264 - protein, 274 aa, Arabidopsis thaliana
  peptide (1)..(274): Ceres Seq. ID no. 12331354
KTQTHKKMSQHNILEALNVRVVGTGDRILFLAHGFGTDQSAWHLILPYFTQNYRVVLYDLVCAGSVNPDYFDFNRYTTLDPYVDDLLNIVDSLGIQNCAYVGHSVSAMIGIIASIRRPELFSKLILIGFSPRFLNDEDYHGGFEEGEIEKVFSAMEANYEAWVHGFAPLAVGADVPAAVREFSRTLFNMRPDISLFVSRTVFNSDLRGVLGLVRVPTCVIQTAKDVSVPASVAEYLRSHLGGDTTVETLKTEGHLPQLSAPAQLAQFLRRALPR

SEQ ID NO: 27265 - protein, 267 aa, Arabidopsis thaliana
  peptide (1)..(267): Ceres Seq. ID no. 12331355
MSQHNILEALNVRVVGTGDRILFLAHGFGTDQSAWHLILPYFTQNYRVVLYDLVCAGSVNPDYFDFNRYTTLDPYVDDLLNIVDSLGIQNCAYVGHSVSAMIGIIASIRRPELFSKLILIGFSPRFLNDEDYHGGFEEGEIEKVFSAMEANYEAWVHGFAPLAVGADVPAAVREFSRTLFNMRPDISLFVSRTVFNSDLRGVLGLVRVPTCVIQTAKDVSVPASVAEYLRSHLGGDTTVETLKTEGHLPQLSAPAQLAQFLRRALPR

SEQ ID NO: 27266 - protein, 167 aa, Arabidopsis thaliana
  peptide (1)..(167): Ceres Seq. ID no. 12331356
MIGIIASIRRPELFSKLILIGFSPRFLNDEDYHGGFEEGEIEKVFSAMEANYEAWVHGFAPLAVGADVPAAVREFSRTLFNMRPDISLFVSRTVFNSDLRGVLGLVRVPTCVIQTAKDVSVPASVAEYLRSHLGGDTTVETLKTEGHLPQLSAPAQLAQFLRRALPR

SEQ ID NO: 27267 - DNA, 1635 bp, Arabidopsis thaliana; identical to SEQ ID NO: 24867
  misc_feature (1)..(1635): Ceres Seq. ID no. 12336117
  misc_feature (1)..(1635): Ortholog of  Ceres SEQ ID NO 14315241 as cited in SEQ ID NO 52516
  misc_feature (1)..(1635): Ortholog of  Ceres SEQ ID NO 13594349 as cited in SEQ ID NO 58161
  misc_feature (1)..(1635): Ortholog of  Ceres SEQ ID NO 13663419 as cited in SEQ ID NO 66561
  misc_feature (1)..(1635): Ortholog of  Ceres SEQ ID NO 15177892 as cited in SEQ ID NO 0

SEQ ID NO: 27268 - protein, 480 aa, Arabidopsis thaliana; identical to SEQ ID NO: 24868
  peptide (1)..(480): Ceres Seq. ID no. 12336118

SEQ ID NO: 27269 - protein, 350 aa, Arabidopsis thaliana; identical to SEQ ID NO: 24869
  peptide (1)..(350): Ceres Seq. ID no. 12336119

SEQ ID NO: 27270 - protein, 332 aa, Arabidopsis thaliana; identical to SEQ ID NO: 24870
  peptide (1)..(332): Ceres Seq. ID no. 12336120

SEQ ID NO: 27271 - DNA, 1885 bp, Arabidopsis thaliana
  misc_feature (1)..(1885): Ceres Seq. ID no. 12324092
  misc_feature (1)..(1885): Ortholog of  Ceres SEQ ID NO 13596816 as cited in SEQ ID NO 62287
gagtgaagtttaaagcttgagaaagacagaggaaagaaaaatgggtcaaagactgaatctagtcttctggatttttgtctccattcttgcctttttgaattttggtatggctagcaagattgggatatgttatggaagaaatgctgataatcttccaagtcctaacagagtctctgagctaatccaacatctcaacatcaaatttgttcgaatctatgacgccaacattgatgttcttaaagcttttgcaaacactggaatcgagcttatgattggtgtccctaacgctgatctacttgcatttgctcagtttcaatccaatgtagatacttggcttagcaacaacatccttccttattatccatctaccaaaatcacttcgatttcagttggtcttgaagtaactgaagcaccagacaatgccactggtctagtcttacctgcgatgcgaaacattcacacagctcttaagaagtctggtttggataaaaagatcaagatctcgagctcacattcccttgctatcttgtcacgctccttcccgccttcgtcagcttctttcagcaagaagcattcagcgttcttgaaaccaatgcttgagttcttggttgagaatgagtctccctttatgatagacctgtatccgtattatgcttacagagattccactgaaaaagttccgttggagtatgctctattcgagtcatcttcgcaggttgttgatcctgccacgggtttgctttactccaacatgtttgatgctcagcttgacgctatctatttcgctttgactgctatgagctttaagaccgttaaggttatggtcactgagtccgggtggccgagtaaaggctcgcctaaagagacagctgcaactcctgagaacgctctggcttacaataccaacctcatccgccatgtcattggtgatccaggtactcctgcaaagcctggagaagagatagatgtgtacttattctcgttgttcaatgagaaccggaagcctgggatagaatccgagagaaactggggaatgttctacgcgaacggaactaatgtttacgctttagacttcactggggaaaacactacgcctgtttctccaacaaattcaaccacaggtaccagtccaagtccaagttcaagtccaattatcaacggtaactcgacagtaaccatcggaggaggaggaggaggaggaaccaagaaatggtgtattgcttcttcacaagcttcggtaacggaactgcagactgcattggactgggcttgtggtcctggaaatgttgattgttcagctgttcaaccagaccaaccttgctttgaaccagatactgttctctcacacgcatcttatgcattcaacacttattaccaacagagcggagcaagcagcatagattgcagctttaatggagccagcgttgaagttgacaaggatccaagtaagtatttgtatacatacactttccaaaacacatccattaagagtaatgtgaagccatagtagtctcatttgagctctcgaaattgcaggttatggtaactgtttgtacatgattgctccggctaccgacggattcaacagaacaatggcgggtaatatcactggaaacataactgccattgattcccccttggcttcgccttcgtcaaccaatgaagcattcagacaaatggtggttgcagtctctgttttgttgccgtgttttgtagtttgttcgagtatttggtgacaagtgtgtacatgaatgcactgtcgccttcttttgtatgaagttttgagtagtgagcgaacttaaactagaatttagcccaactgttgaacttggtaatttctttcaccacgtaaccgaaatgtcaagcttggtgatgtatttgtgac

SEQ ID NO: 27272 - protein, 488 aa, Arabidopsis thaliana
  peptide (1)..(488): Ceres Seq. ID no. 12324093
MGQRLNLVFWIFVSILAFLNFGMASKIGICYGRNADNLPSPNRVSELIQHLNIKFVRIYDANIDVLKAFANTGIELMIGVPNADLLAFAQFQSNVDTWLSNNILPYYPSTKITSISVGLEVTEAPDNATGLVLPAMRNIHTALKKSGLDKKIKISSSHSLAILSRSFPPSSASFSKKHSAFLKPMLEFLVENESPFMIDLYPYYAYRDSTEKVPLEYALFESSSQVVDPATGLLYSNMFDAQLDAIYFALTAMSFKTVKVMVTESGWPSKGSPKETAATPENALAYNTNLIRHVIGDPGTPAKPGEEIDVYLFSLFNENRKPGIESERNWGMFYANGTNVYALDFTGENTTPVSPTNSTTGTSPSPSSSPIINGNSTVTIGGGGGGGTKKWCIASSQASVTELQTALDWACGPGNVDCSAVQPDQPCFEPDTVLSHASYAFNTYYQQSGASSIDCSFNGASVEVDKDPSKYLYTYTFQNTSIKSNVKP

SEQ ID NO: 27273 - protein, 466 aa, Arabidopsis thaliana
  peptide (1)..(466): Ceres Seq. ID no. 12324094
MASKIGICYGRNADNLPSPNRVSELIQHLNIKFVRIYDANIDVLKAFANTGIELMIGVPNADLLAFAQFQSNVDTWLSNNILPYYPSTKITSISVGLEVTEAPDNATGLVLPAMRNIHTALKKSGLDKKIKISSSHSLAILSRSFPPSSASFSKKHSAFLKPMLEFLVENESPFMIDLYPYYAYRDSTEKVPLEYALFESSSQVVDPATGLLYSNMFDAQLDAIYFALTAMSFKTVKVMVTESGWPSKGSPKETAATPENALAYNTNLIRHVIGDPGTPAKPGEEIDVYLFSLFNENRKPGIESERNWGMFYANGTNVYALDFTGENTTPVSPTNSTTGTSPSPSSSPIINGNSTVTIGGGGGGGTKKWCIASSQASVTELQTALDWACGPGNVDCSAVQPDQPCFEPDTVLSHASYAFNTYYQQSGASSIDCSFNGASVEVDKDPSKYLYTYTFQNTSIKSNVKP

SEQ ID NO: 27274 - protein, 412 aa, Arabidopsis thaliana
  peptide (1)..(412): Ceres Seq. ID no. 12324095
MIGVPNADLLAFAQFQSNVDTWLSNNILPYYPSTKITSISVGLEVTEAPDNATGLVLPAMRNIHTALKKSGLDKKIKISSSHSLAILSRSFPPSSASFSKKHSAFLKPMLEFLVENESPFMIDLYPYYAYRDSTEKVPLEYALFESSSQVVDPATGLLYSNMFDAQLDAIYFALTAMSFKTVKVMVTESGWPSKGSPKETAATPENALAYNTNLIRHVIGDPGTPAKPGEEIDVYLFSLFNENRKPGIESERNWGMFYANGTNVYALDFTGENTTPVSPTNSTTGTSPSPSSSPIINGNSTVTIGGGGGGGTKKWCIASSQASVTELQTALDWACGPGNVDCSAVQPDQPCFEPDTVLSHASYAFNTYYQQSGASSIDCSFNGASVEVDKDPSKYLYTYTFQNTSIKSNVKP

SEQ ID NO: 27275 - DNA, 1171 bp, Arabidopsis thaliana
  misc_feature (1)..(1171): Ceres Seq. ID no. 13490191
  misc_feature (1)..(1171): Ortholog of  Ceres SEQ ID NO 14303612 as cited in SEQ ID NO 63208
aaaggtcagaagatttgatttttcttattcctcttcaaaggcaaacaatttacacagctatatatatatttttagggtttttgagtatctcgcgaggttttacatagatttctccattatggattcgatgatgaatcagaagactgttttggctgtgacggatgatgtggtgttacctgttagctctgttttagctataatgaaagagcttggaaaggaagtgattgagagttttgatcctctgattattactcaagcatccacaataaatcagtttcctttggatgcttcctctgtggaggcggtattagccatttccaaaacatctgatttcccaagtgataaaatatgtggtgagttctcaagaatcttgaagcctggcggcacggtttctgtgtgcaaagttttggagggtgaaacgggagaaattcaacagaccattcaaaggagagtgacattggctggttttcttgagccacagtgtcttgatttgaaatcaattaaattgtctacgttcagtttatcctttgggattaaggcaaagaaaccttcttggaagattggttcatcatttgctctcaaaaagcctgtaacaaatctctttaagattgatctagatgacgacgtggatcttattgatgaagattctcttttaacagaggaggacttgatgaagccacagcttcctgttgccagcggttgtgagaccactaaaaaagcttgcaagaactgcgtctgtggtagagctgaaattgaggagaaagctgtgaagctgggcctcacagaggatcaaatcgagaatccacaatcatcatgcggcagctgtgggctcggtgatgccttccgctgcggtacatgcccttacaagggtctgccacccttcaaattaggcgagaaggtaaccctatctcaaaacttccttgaagctgacatataagcatgtgaaaggcatcttcatacatgggtgtttctcgccgaggccaaaaccttttgctaatcgcagagtagtttcatcatttactttgtgccctttcgtataatttgtttgttggtacttcttttattttgtggctctaaaagcttgtagaatattgtttgggttgcccacaaagcacacaccttagtatcaatgaagaacggttttgcattggttaaataattatttctctgt

SEQ ID NO: 27276 - protein, 311 aa, Arabidopsis thaliana
  peptide (1)..(311): Ceres Seq. ID no. 13490192
KVRRFDFSYSSSKANNLHSYIYIFRVFEYLARFYIDFSIMDSMMNQKTVLAVTDDVVLPVSSVLAIMKELGKEVIESFDPLIITQASTINQFPLDASSVEAVLAISKTSDFPSDKICGEFSRILKPGGTVSVCKVLEGETGEIQQTIQRRVTLAGFLEPQCLDLKSIKLSTFSLSFGIKAKKPSWKIGSSFALKKPVTNLFKIDLDDDVDLIDEDSLLTEEDLMKPQLPVASGCETTKKACKNCVCGRAEIEEKAVKLGLTEDQIENPQSSCGSCGLGDAFRCGTCPYKGLPPFKLGEKVTLSQNFLEADI

SEQ ID NO: 27277 - protein, 272 aa, Arabidopsis thaliana
  peptide (1)..(272): Ceres Seq. ID no. 13490193
MDSMMNQKTVLAVTDDVVLPVSSVLAIMKELGKEVIESFDPLIITQASTINQFPLDASSVEAVLAISKTSDFPSDKICGEFSRILKPGGTVSVCKVLEGETGEIQQTIQRRVTLAGFLEPQCLDLKSIKLSTFSLSFGIKAKKPSWKIGSSFALKKPVTNLFKIDLDDDVDLIDEDSLLTEEDLMKPQLPVASGCETTKKACKNCVCGRAEIEEKAVKLGLTEDQIENPQSSCGSCGLGDAFRCGTCPYKGLPPFKLGEKVTLSQNFLEADI

SEQ ID NO: 27278 - protein, 269 aa, Arabidopsis thaliana
  peptide (1)..(269): Ceres Seq. ID no. 13490194
MMNQKTVLAVTDDVVLPVSSVLAIMKELGKEVIESFDPLIITQASTINQFPLDASSVEAVLAISKTSDFPSDKICGEFSRILKPGGTVSVCKVLEGETGEIQQTIQRRVTLAGFLEPQCLDLKSIKLSTFSLSFGIKAKKPSWKIGSSFALKKPVTNLFKIDLDDDVDLIDEDSLLTEEDLMKPQLPVASGCETTKKACKNCVCGRAEIEEKAVKLGLTEDQIENPQSSCGSCGLGDAFRCGTCPYKGLPPFKLGEKVTLSQNFLEADI

SEQ ID NO: 27279 - DNA, 2276 bp, Arabidopsis thaliana
  misc_feature (1)..(2276): Ceres Seq. ID no. 13491218
  misc_feature (1)..(2276): Ortholog of  Ceres SEQ ID NO 15176302 as cited in SEQ ID NO 58592
gtgagagagagagagagacagataggaatctttgagcgattcgtcttcctcctctatcgccctctactcttcaccggaactgtgatctcaccggaatatccctcctttatttatcctctactcatccgttttactctctccctccgtcgatcttctctttctcttgatcgcctccgtccattctttatcatttcttaattcagaattgtgatcgatggatgattattttagcgcggaggaagaggcttgctattactcctccgatcaagattctttggatggaattgataatgaagagtctgaattgcagcctctgtcctctaaaagatcaaacactcaggtcatcactcaggaatcgcttctagcagcacagagagaagatttgctaagggtgatggaattgttatcaataaaggagcaccatgcacggactcttcttattcattaccagtgggatgtggagaagttgtttgctgtgtttgttgagaaaggaaaagatagcttgttttctggagctggtgtcactgtcttcgattatcaatatggcaactcttcctttcctcagtcttcacagatgagttgtgatgtttgcatggaggatttaccaggtgatcacatgacaagaatggactgtggccattgcttttgcaataattgttggacggagcattttactgtgcagataaatgaaggtcagagcaaaaggattagatgcatggctcatcaatgtaatgctatttgtgatgaagatattgtcaggagtctagtcagtaaaaagcgtccagatctagctgcgaagtttgatcgttaccttcttgagtcgtacatcgaagataacagaatggtcaagtggtgtcctagcactccgcattgtgggaatgctatacgagctgaggatgacaagttgtgcgaagttgaatgttcttgtggtcttcagttctgtttcagttgtctgtgtcaagcccactccccttgctcttgtttgatgtgggagttatggagaaagaagtgtcgagatgagtctgagacaatcaactggataaccgttcacacaaagctgtgtcccaaatgttacaaacctgtggaaaagaatggtggatgcaatctcgtgaggtgtatttgtgggcagtgtttttgttggctatgtggtggagctactggaagtgatcacacttataggagtatcgctggtcacagttgtggtcggtaccaagatgacaaagagaagcagatggaaagagcgaagagagatttaaacaggtatacgcattatcatcaccgatacaaagctcatacagattcatcaaagctagaagataaacttagggatactatccatgagaaagtgtcgaaatcagaaaagagggagttgaagcttaaagacttcagctgggtcaccaatggactcgaccggttattcagatcaaggcgagttctttcatattcgtatgcttttgcatattatatgtttggtgaagagatgtttaaagatgagatgacccctgaggagagagagataaagaagaatttgtttgaggatcagcagcaacaacttgaaagtaatgtggagaaactttcgcagttccttgaggagccctttgatgaatttagtaatgataaagttatggcgataaggattcaaatcatcaatttgtctgtcgccgtcgatacactctgcaagaaaatgtacgagtgcattgagaatgacttactcggatctctccaacttggcatccacaacatctcaccttacagatcgaagggaatcgaacaagcagctcagttttatgcttcctggaattccaaagatgctgacaaattccaacctttggatagtggtacaagcggagtgacatcgaggcctgagcaagcttcaggatcaaggagctcggaagacaccatttgctcatcttcacagaaacgtcccaaaaaagaaggaagtttcttaaacaacaaagtcactttattggatttgaacttgccagctgatttcgtcgaccagaactgaactcaaatcctctcttgcttagtccaaatgagatatgatgacatagcaaaaggtgtttgactatatatctatcaccttcaagactcgtgactctggactgattaatttgtctttcttatagtttttctggttttcgtacaactataattatgactaccccttacttttgcttctttagttatagatctttaattcagcctctttaaactctgctgcttctcaatgtctatgatgtcaaaagagttattttattagtaactaatttaat

SEQ ID NO: 27280 - protein, 597 aa, Arabidopsis thaliana
  peptide (1)..(597): Ceres Seq. ID no. 13491219
MDDYFSAEEEACYYSSDQDSLDGIDNEESELQPLSSKRSNTQVITQESLLAAQREDLLRVMELLSIKEHHARTLLIHYQWDVEKLFAVFVEKGKDSLFSGAGVTVFDYQYGNSSFPQSSQMSCDVCMEDLPGDHMTRMDCGHCFCNNCWTEHFTVQINEGQSKRIRCMAHQCNAICDEDIVRSLVSKKRPDLAAKFDRYLLESYIEDNRMVKWCPSTPHCGNAIRAEDDKLCEVECSCGLQFCFSCLCQAHSPCSCLMWELWRKKCRDESETINWITVHTKLCPKCYKPVEKNGGCNLVRCICGQCFCWLCGGATGSDHTYRSIAGHSCGRYQDDKEKQMERAKRDLNRYTHYHHRYKAHTDSSKLEDKLRDTIHEKVSKSEKRELKLKDFSWVTNGLDRLFRSRRVLSYSYAFAYYMFGEEMFKDEMTPEEREIKKNLFEDQQQQLESNVEKLSQFLEEPFDEFSNDKVMAIRIQIINLSVAVDTLCKKMYECIENDLLGSLQLGIHNISPYRSKGIEQAAQFYASWNSKDADKFQPLDSGTSGVTSRPEQASGSRSSEDTICSSSQKRPKKEGSFLNNKVTLLDLNLPADFVDQN

SEQ ID NO: 27281 - protein, 537 aa, Arabidopsis thaliana
  peptide (1)..(537): Ceres Seq. ID no. 13491220
MELLSIKEHHARTLLIHYQWDVEKLFAVFVEKGKDSLFSGAGVTVFDYQYGNSSFPQSSQMSCDVCMEDLPGDHMTRMDCGHCFCNNCWTEHFTVQINEGQSKRIRCMAHQCNAICDEDIVRSLVSKKRPDLAAKFDRYLLESYIEDNRMVKWCPSTPHCGNAIRAEDDKLCEVECSCGLQFCFSCLCQAHSPCSCLMWELWRKKCRDESETINWITVHTKLCPKCYKPVEKNGGCNLVRCICGQCFCWLCGGATGSDHTYRSIAGHSCGRYQDDKEKQMERAKRDLNRYTHYHHRYKAHTDSSKLEDKLRDTIHEKVSKSEKRELKLKDFSWVTNGLDRLFRSRRVLSYSYAFAYYMFGEEMFKDEMTPEEREIKKNLFEDQQQQLESNVEKLSQFLEEPFDEFSNDKVMAIRIQIINLSVAVDTLCKKMYECIENDLLGSLQLGIHNISPYRSKGIEQAAQFYASWNSKDADKFQPLDSGTSGVTSRPEQASGSRSSEDTICSSSQKRPKKEGSFLNNKVTLLDLNLPADFVDQN

SEQ ID NO: 27282 - protein, 477 aa, Arabidopsis thaliana
  peptide (1)..(477): Ceres Seq. ID no. 13491221
MSCDVCMEDLPGDHMTRMDCGHCFCNNCWTEHFTVQINEGQSKRIRCMAHQCNAICDEDIVRSLVSKKRPDLAAKFDRYLLESYIEDNRMVKWCPSTPHCGNAIRAEDDKLCEVECSCGLQFCFSCLCQAHSPCSCLMWELWRKKCRDESETINWITVHTKLCPKCYKPVEKNGGCNLVRCICGQCFCWLCGGATGSDHTYRSIAGHSCGRYQDDKEKQMERAKRDLNRYTHYHHRYKAHTDSSKLEDKLRDTIHEKVSKSEKRELKLKDFSWVTNGLDRLFRSRRVLSYSYAFAYYMFGEEMFKDEMTPEEREIKKNLFEDQQQQLESNVEKLSQFLEEPFDEFSNDKVMAIRIQIINLSVAVDTLCKKMYECIENDLLGSLQLGIHNISPYRSKGIEQAAQFYASWNSKDADKFQPLDSGTSGVTSRPEQASGSRSSEDTICSSSQKRPKKEGSFLNNKVTLLDLNLPADFVDQN

SEQ ID NO: 27283 - DNA, 1704 bp, Arabidopsis thaliana
  misc_feature (1)..(1704): Ceres Seq. ID no. 13499852
  misc_feature (1)..(1704): Ortholog of  Ceres SEQ ID NO 14314896 as cited in SEQ ID NO 54010
attccttgcttcatttttcgtcaccctagccgctttactctcttgcgatatctctgagatttgtttgacagtctctaaccatgggtaaagagaagtttcacatcaacattgtggtcattggccacgtcgattctggaaagtcgaccaccactggacacttgatctacaagttgggtggtattgacaagcgtgtcattgagaggttcgagaaggaggctgctgagatgaacaagaggtccttcaagtacgcatgggttttggacaaacttaaggctgagcgtgagcgtggtatcaccattgacattgctctctggaagttcgagaccaccaagtactactgcactgtcattgatgctcctggccatcgtgatttcatcaagaacatgatcactggtacctcccaggctgattgtgctgtccttatcattgactccaccactggtggttttgaggctggtatctccaaggatggtcagacccgtgagcacgctctacttgctttcacccttggtgtcaagcagatgatctgctgttgtaacaagatggatgccactacccccaagtactccaaggccaggtacgatgaaatcatcaaggaggtgtcttcctacttgaagaaggttggttacaaccccgacaaaatcccatttgtgcccatctctggatttgagggtgacaacatgattgagaggtccaccaaccttgactggtacaagggaccaactctccttgaggctcttgaccagatcaacgagcccaagaggccgtcagacaagccccttcgtctcccacttcaggatgtctacaagattggtggtattggaacggtgccagtgggacgtgttgagactggtatgatcaagcctggtatggttgtgacctttgctcccacaggattgaccactgaggtcaagtctgttgagatgcaccacgagtctcttcttgaggcacttccaggtgacaacgttgggttcaatgttaagaatgttgctgtcaaggatcttaagagagggtacgtcgcatccaactccaaggatgaccctgccaagggtgctgctaacttcacctcccaggtcatcatcatgaaccaccctggtcagattggtaacggttacgccccagtcctggattgccacacctctcacattgcagtcaagttctctgagatcttgaccaagattgacaggcgttctggtaaggagattgagaaggagcccaagttcttgaagaatggtgatgctggtatggtgaagatgactccaaccaagcccatggttgtggagaccttctctgagtacccaccacttggacgtttcgctgtgagggacatgaggcagactgttgcagtcggtgttatcaagagtgttgacaagaaggacccaaccggagccaaggttaccaaggctgccgtcaagaagggtgcgaagtgaaccatcctcaaaactctatctgccgcaggtgaatcaaaggacagtgttagttttattacaatagtttggtatttggtcgcgtgtctgtgttcttgtttcgttttctccccgtcagagcgttgttctcgtaattgggttcttgatcggaggtggcggatctacacacacattcttcctgttttttgctttttatttgttttctcattttgaactgttttaaaatttctgttatatgaatgaatgttttccctgcggttattatcttctttactct

SEQ ID NO: 27284 - protein, 449 aa, Arabidopsis thaliana
  peptide (1)..(449): Ceres Seq. ID no. 13499853
MGKEKFHINIVVIGHVDSGKSTTTGHLIYKLGGIDKRVIERFEKEAAEMNKRSFKYAWVLDKLKAERERGITIDIALWKFETTKYYCTVIDAPGHRDFIKNMITGTSQADCAVLIIDSTTGGFEAGISKDGQTREHALLAFTLGVKQMICCCNKMDATTPKYSKARYDEIIKEVSSYLKKVGYNPDKIPFVPISGFEGDNMIERSTNLDWYKGPTLLEALDQINEPKRPSDKPLRLPLQDVYKIGGIGTVPVGRVETGMIKPGMVVTFAPTGLTTEVKSVEMHHESLLEALPGDNVGFNVKNVAVKDLKRGYVASNSKDDPAKGAANFTSQVIIMNHPGQIGNGYAPVLDCHTSHIAVKFSEILTKIDRRSGKEIEKEPKFLKNGDAGMVKMTPTKPMVVETFSEYPPLGRFAVRDMRQTVAVGVIKSVDKKDPTGAKVTKAAVKKGAK

SEQ ID NO: 27285 - protein, 401 aa, Arabidopsis thaliana; identical to SEQ ID NO: 21437
  peptide (1)..(401): Ceres Seq. ID no. 13499854

SEQ ID NO: 27286 - protein, 348 aa, Arabidopsis thaliana; identical to SEQ ID NO: 21438
  peptide (1)..(348): Ceres Seq. ID no. 13499855

SEQ ID NO: 27287 - DNA, 1016 bp, Arabidopsis thaliana
  misc_feature (1)..(1016): Ceres Seq. ID no. 12389155
  misc_feature (1)..(1016): Ortholog of  Ceres SEQ ID NO 14302008 as cited in SEQ ID NO 56021
aaagtctcaacctttcttctctaatggagatctgcacttacttcaaatcacaacccacttggctcctcattctcttcgttctggggtcaatctcaatcttcaaattcatcttcaccctcctcagatctttctacatctacttcctccgaccatccaaaaacctccgccgatacggttcatgggcaatcatcaccggaccaacagacggaatcggtaaagctttcgcctttcagttagcccagaaaggtcttaaccttatactcgttgctcgtaacccagacaagctcaaagatgtctctgattccatcagatctaagtattttcatgaggttgatgaagagttgatcaataacttgattaagatcaatgttgaaggaactactaaagttactcaagctgtgttgcctaatatgcttaagaggaagaaaggtgctattattaatatgggttctggtgctgctgctcttattccttcttatcctttttactctgtttatgctggtgctaaaacgtacgtggatcagttcacaaagtgtctacatgttgagtataagaagagtgggattgatgttcaatgccaggttcccttgtatgttgcaacaaagatgacaaaaataagaagagcatccttcttagttgcatcaccagagggttacgcaaaggcagcactgcgttttgtaggctatgaagcgcaatgcacaccgtactggcctcacgctctcatgggtgcagttgtctctgcattgcccgaaagcgtttttgaatcatttaacatcaagagatgcctccagatccggaagaagggtctccaaaaagactccatgaagaaagaatgaatcttccaggtttaagttactaccaagaatttccttcttctgaagttgttggtttcttgaaaagcttctgttctgaatcttttgtaagacttgtactctttagttttctaagttttttatattttaagattaaaaaccctaacgtacacgaataatttacttcctctgtttctatttatt

SEQ ID NO: 27288 - protein, 277 aa, Arabidopsis thaliana
  peptide (1)..(277): Ceres Seq. ID no. 12389156
SLNLSSLMEICTYFKSQPTWLLILFVLGSISIFKFIFTLLRSFYIYFLRPSKNLRRYGSWAIITGPTDGIGKAFAFQLAQKGLNLILVARNPDKLKDVSDSIRSKYFHEVDEELINNLIKINVEGTTKVTQAVLPNMLKRKKGAIINMGSGAAALIPSYPFYSVYAGAKTYVDQFTKCLHVEYKKSGIDVQCQVPLYVATKMTKIRRASFLVASPEGYAKAALRFVGYEAQCTPYWPHALMGAVVSALPESVFESFNIKRCLQIRKKGLQKDSMKKE

SEQ ID NO: 27289 - protein, 270 aa, Arabidopsis thaliana
  peptide (1)..(270): Ceres Seq. ID no. 12389157
MEICTYFKSQPTWLLILFVLGSISIFKFIFTLLRSFYIYFLRPSKNLRRYGSWAIITGPTDGIGKAFAFQLAQKGLNLILVARNPDKLKDVSDSIRSKYFHEVDEELINNLIKINVEGTTKVTQAVLPNMLKRKKGAIINMGSGAAALIPSYPFYSVYAGAKTYVDQFTKCLHVEYKKSGIDVQCQVPLYVATKMTKIRRASFLVASPEGYAKAALRFVGYEAQCTPYWPHALMGAVVSALPESVFESFNIKRCLQIRKKGLQKDSMKKE

SEQ ID NO: 27290 - protein, 141 aa, Arabidopsis thaliana
  peptide (1)..(141): Ceres Seq. ID no. 12389158
MLKRKKGAIINMGSGAAALIPSYPFYSVYAGAKTYVDQFTKCLHVEYKKSGIDVQCQVPLYVATKMTKIRRASFLVASPEGYAKAALRFVGYEAQCTPYWPHALMGAVVSALPESVFESFNIKRCLQIRKKGLQKDSMKKE

SEQ ID NO: 27291 - DNA, 1388 bp, Arabidopsis thaliana
  misc_feature (1)..(1388): Ceres Seq. ID no. 12371745
  misc_feature (1)..(1388): Ortholog of  Ceres SEQ ID NO 13598351 as cited in SEQ ID NO 68715
  misc_feature (1)..(1388): Ortholog of  Ceres SEQ ID NO 13584744 as cited in SEQ ID NO 69137
gtttatcaatctcacatcgagacgaaattagagctactcagacttgttctattaaactgttaccttctccagacaaagcgttaccttttttttttggtccgtacgaggaaaaatctaggagacagagctatttgttcgaaagatgcaactttttaatagctgttgtggaaaaggatttgatgggaagaagaaagaaaaggaagagccatcttggagggtattttcactgaaggaacttcatgcagccaccaacagtttcaattacgataacaaactcggtgaaggtcgatttggtagtgtctattggggtcagctatgggatggctcacaaattgcagtcaagaggttgaaggaatggagtaatagagaagagatagattttgctgtggaagtcgagattcttgctcgtattcgtcacaagaatttgttgagtgttcgtggctactgtgctgaaggacaagaacgtcttcttgtgtacgagtacatgcagaatttgagcttggtttcacatcttcatggccagcattcagctgaatgtcttctagattggaccaagcgaatgaagatcgccatgagctctgctcaggccattgcctacctacacgaccacgcaaccccacatatagtccatggagatgtgagagctagcaatgtgttgttagactctgaatttgaagctcgcgttacagattttggttatggtaagctgatgccagatgatgatactggagatggagctaccaaagccaaaagtaataatggatatatctcgccagaatgtgatgcatcaggaaaagaatcagaaactagcgatgtgtacagttttggtatccttttgatggtactggttagtggcaagagaccactcgagaggctaaatccaacaacaacgcggtgtataacagagtgggttttaccacttgtttacgaaagaaattttggtgaaatcgttgataagaggctgagcgaggagcatgtggcagagaaactgaagaaagtagtcttggtggggcttatgtgtgctcagacagatccagacaagagaccaacaatgtctgaagtggtggagatgctggtgaatgaatcaaaggagaaaatatctgaacttgaagctaatcccctcttcaagaatccatatagcagcaacgaaaacaatagagagcatgttgcagaggaaagctcagatgtgatcttagaagataaagatcatcaacaacaacaagaatagcaatggttaggcacagtaattcgtttggcagattatttttagaggtcttgcttatttttttagtgtgtttcttggttcataaaattgatttgatcattactgatactggagtttgtaaggtgtggtattggcacatataagattgaaacttttattctgg

SEQ ID NO: 27292 - protein, 361 aa, Arabidopsis thaliana
  peptide (1)..(361): Ceres Seq. ID no. 12371746
MQLFNSCCGKGFDGKKKEKEEPSWRVFSLKELHAATNSFNYDNKLGEGRFGSVYWGQLWDGSQIAVKRLKEWSNREEIDFAVEVEILARIRHKNLLSVRGYCAEGQERLLVYEYMQNLSLVSHLHGQHSAECLLDWTKRMKIAMSSAQAIAYLHDHATPHIVHGDVRASNVLLDSEFEARVTDFGYGKLMPDDDTGDGATKAKSNNGYISPECDASGKESETSDVYSFGILLMVLVSGKRPLERLNPTTTRCITEWVLPLVYERNFGEIVDKRLSEEHVAEKLKKVVLVGLMCAQTDPDKRPTMSEVVEMLVNESKEKISELEANPLFKNPYSSNENNREHVAEESSDVILEDKDHQQQQE

SEQ ID NO: 27293 - protein, 247 aa, Arabidopsis thaliana
  peptide (1)..(247): Ceres Seq. ID no. 12371747
MQNLSLVSHLHGQHSAECLLDWTKRMKIAMSSAQAIAYLHDHATPHIVHGDVRASNVLLDSEFEARVTDFGYGKLMPDDDTGDGATKAKSNNGYISPECDASGKESETSDVYSFGILLMVLVSGKRPLERLNPTTTRCITEWVLPLVYERNFGEIVDKRLSEEHVAEKLKKVVLVGLMCAQTDPDKRPTMSEVVEMLVNESKEKISELEANPLFKNPYSSNENNREHVAEESSDVILEDKDHQQQQE

SEQ ID NO: 27294 - protein, 222 aa, Arabidopsis thaliana
  peptide (1)..(222): Ceres Seq. ID no. 12371748
MKIAMSSAQAIAYLHDHATPHIVHGDVRASNVLLDSEFEARVTDFGYGKLMPDDDTGDGATKAKSNNGYISPECDASGKESETSDVYSFGILLMVLVSGKRPLERLNPTTTRCITEWVLPLVYERNFGEIVDKRLSEEHVAEKLKKVVLVGLMCAQTDPDKRPTMSEVVEMLVNESKEKISELEANPLFKNPYSSNENNREHVAEESSDVILEDKDHQQQQE

SEQ ID NO: 27295 - DNA, 973 bp, Arabidopsis thaliana
  misc_feature (1)..(973): Ceres Seq. ID no. 12395015
  misc_feature (1)..(973): Ortholog of  Ceres SEQ ID NO 13638441 as cited in SEQ ID NO 58066
acaaaaaactttcccaagaataaaaaccagaagaatccgtataaattatcctaacagtttcttccaatatccaacaaatttcagatttttgtttttgttttcttcttctctacttgagtaatcatcaacgattatggcgtcaagtcagtggacgaggtcggaggataagatgtttgagcaagctttggttctttttcctgaaggatctcctaatcggtgggagagaatcgctgatcagcttcataaatctgctggtgaagttagggagcattacgaggtcttggttcatgatgttttcgagattgattctggtcgagttgatgtccctgattacatggatgactcggcggctgcggcggcgggttgggattccgctggtcagatctcttttgggtctaaacatggcgagagtgaacgcaaaagaggaactccttggacagagaacgaacacaaattgtttctgatcggattaaagagatatggtaagggagattggaggagtatctcgagaaacgttgtggtgacgaggacaccgacgcaagtcgcgagtcacgctcagaagtattttctgagacagaactcggtgaagaaggagaggaaaaggtcgagcatccatgatataactacggttgatgctactttggctatgcctgggtctaacatggactggactggccaacacgggagtcctgttcaggcgccgcagcagcaacagattatgtctgagttcggtcagcaattgaatcctggtcatttcgaggattttgggtttcggatgtgatgaagaaagggggagacaaattgggatggctttagtttaatagggttttactcattttatgtgaatagggaaagaaataggattgggtattttcttatacagatgatgatgatgatgatcaaagaataaaaataatgtatagggaagctttttgtaaacacaaatatgtttggtaaccattttggtattttg

SEQ ID NO: 27296 - protein, 215 aa, Arabidopsis thaliana
  peptide (1)..(215): Ceres Seq. ID no. 12395016
MASSQWTRSEDKMFEQALVLFPEGSPNRWERIADQLHKSAGEVREHYEVLVHDVFEIDSGRVDVPDYMDDSAAAAAGWDSAGQISFGSKHGESERKRGTPWTENEHKLFLIGLKRYGKGDWRSISRNVVVTRTPTQVASHAQKYFLRQNSVKKERKRSSIHDITTVDATLAMPGSNMDWTGQHGSPVQAPQQQQIMSEFGQQLNPGHFEDFGFRM

SEQ ID NO: 27297 - protein, 203 aa, Arabidopsis thaliana
  peptide (1)..(203): Ceres Seq. ID no. 12395017
MFEQALVLFPEGSPNRWERIADQLHKSAGEVREHYEVLVHDVFEIDSGRVDVPDYMDDSAAAAAGWDSAGQISFGSKHGESERKRGTPWTENEHKLFLIGLKRYGKGDWRSISRNVVVTRTPTQVASHAQKYFLRQNSVKKERKRSSIHDITTVDATLAMPGSNMDWTGQHGSPVQAPQQQQIMSEFGQQLNPGHFEDFGFRM

SEQ ID NO: 27298 - protein, 148 aa, Arabidopsis thaliana
  peptide (1)..(148): Ceres Seq. ID no. 12395018
MDDSAAAAAGWDSAGQISFGSKHGESERKRGTPWTENEHKLFLIGLKRYGKGDWRSISRNVVVTRTPTQVASHAQKYFLRQNSVKKERKRSSIHDITTVDATLAMPGSNMDWTGQHGSPVQAPQQQQIMSEFGQQLNPGHFEDFGFRM

SEQ ID NO: 27299 - DNA, 1119 bp, Arabidopsis thaliana
  misc_feature (1)..(1119): Ceres Seq. ID no. 12482785
  misc_feature (1)..(1119): Ortholog of  Ceres SEQ ID NO 13599444 as cited in SEQ ID NO 517
  misc_feature (1)..(1119): Ortholog of  Ceres SEQ ID NO 15169431 as cited in SEQ ID NO 60449
  misc_feature (1)..(1119): Ortholog of  Ceres SEQ ID NO 12615444 as cited in SEQ ID NO 62593
aaaatcctgatttctgagctttaaaccctaacccctctcttctctcttctccacgccatttccagaattttcaggtgttcgtgaaaagatgaattttaagaatgtcaaagttcccaaaggtcctggtggtggtgttatagctgcggtggttattggggggctcagtctttacggtgctacgcacactctctacaatgtcgatggaggtcatcgagccattgtctttaaccggcttgttggtatcaaagacaaggtctaccctgagggtactcaccttatgattccatggttcgaaaggccaatcatctatgacgttcgtgcaaagccttatctagttgagagcacatctgggagccgtgatctccagatggttaagattgggcttcgggttctcacccgtcctatggctgaccaattaccagaggtataccggtcccttggtgagaattaccgcgagagagtcttgccttctatcatccacgagaccttgaaagctgtggttgctcagtacaacgcaagccaacttattactcagagagagtcggtgagtagagaaatcaggaaaatcctaactctaagagccgcaaacttccacattgcactggatgatgtgtccatcacaggcttgacattcggaaaggagttcacggcagccatagaaggaaagcaggtcgctgctcaagaggccgaacgggctaagttcattgtcgagaaagctgaacaggacaagagaagtgctgttatccgcgccgagggagaagccaagagtgctcagctcattggtcaagcaatcgcaaacaaccaagcgttcttaacactgaggaagatcgaagcagctagagagatcgcacagaccatctctaggtcggcgaacaaggtttacttgagctctaacgatctgttgcttaacctacaggctatggaccttgatgtgaagccgaagaagtagagaatgatatgattaaaccacaccagagctcttcttccataatcgtattttcaattcacggattcttagaccaaaagctatgagttctatcttgtgaatttcagacactatcgtgcgtttgtagtctttcttttgtgagatcaagaagaaaagaaaagatttatgttttt

SEQ ID NO: 27300 - protein, 286 aa, Arabidopsis thaliana
  peptide (1)..(286): Ceres Seq. ID no. 12482786
MNFKNVKVPKGPGGGVIAAVVIGGLSLYGATHTLYNVDGGHRAIVFNRLVGIKDKVYPEGTHLMIPWFERPIIYDVRAKPYLVESTSGSRDLQMVKIGLRVLTRPMADQLPEVYRSLGENYRERVLPSIIHETLKAVVAQYNASQLITQRESVSREIRKILTLRAANFHIALDDVSITGLTFGKEFTAAIEGKQVAAQEAERAKFIVEKAEQDKRSAVIRAEGEAKSAQLIGQAIANNQAFLTLRKIEAAREIAQTISRSANKVYLSSNDLLLNLQAMDLDVKPKK

SEQ ID NO: 27301 - protein, 223 aa, Arabidopsis thaliana
  peptide (1)..(223): Ceres Seq. ID no. 12482787
MIPWFERPIIYDVRAKPYLVESTSGSRDLQMVKIGLRVLTRPMADQLPEVYRSLGENYRERVLPSIIHETLKAVVAQYNASQLITQRESVSREIRKILTLRAANFHIALDDVSITGLTFGKEFTAAIEGKQVAAQEAERAKFIVEKAEQDKRSAVIRAEGEAKSAQLIGQAIANNQAFLTLRKIEAAREIAQTISRSANKVYLSSNDLLLNLQAMDLDVKPKK

SEQ ID NO: 27302 - protein, 193 aa, Arabidopsis thaliana
  peptide (1)..(193): Ceres Seq. ID no. 12482788
MVKIGLRVLTRPMADQLPEVYRSLGENYRERVLPSIIHETLKAVVAQYNASQLITQRESVSREIRKILTLRAANFHIALDDVSITGLTFGKEFTAAIEGKQVAAQEAERAKFIVEKAEQDKRSAVIRAEGEAKSAQLIGQAIANNQAFLTLRKIEAAREIAQTISRSANKVYLSSNDLLLNLQAMDLDVKPKK

SEQ ID NO: 27303 - DNA, 1206 bp, Arabidopsis thaliana
  misc_feature (1)..(1206): Ceres Seq. ID no. 12422623
  misc_feature (1)..(1206): Ortholog of  Ceres SEQ ID NO 13593955 as cited in SEQ ID NO 54278
  misc_feature (1)..(1206): Ortholog of  Ceres SEQ ID NO 13597380 as cited in SEQ ID NO 64054
  misc_feature (1)..(1206): Ortholog of  Ceres SEQ ID NO 12625474 as cited in SEQ ID NO 64169
  misc_feature (1)..(1206): Ortholog of  Ceres SEQ ID NO 13597502 as cited in SEQ ID NO 64681
attcagaaaaattttggacttattttcgatatgtttaggggaaaaatatttgtgttatcattattttctatttacgtcctctcatcagcggctgaaaaaaatacatcattttctgcgctttttgcttttggtgattcagtcttagatacgggaaacaataattttcttcttactcttctcaaaggaaattattggccatatggtttgagttttgactataaatttccgacgggaagattcggaaatggaagagttttcaccgatatagttgccgaaggtttacagatcaaaagacttgtaccagcttatagcaagattcgtcgcatcagttctgaagaccttaagactggcgtttgttttgcatcaggtggttcaggaattgacgatcttacatcccgaacactgagagttttatcggcaggtgaccaagtaaaagactttaaagactatttgaagaaactaagaagagtagtgaaacgtatgaaaaaagtaaaagaaatagtttcaaacgctgtgtttcttatttctgaaggaaataatgatcttggatactttgtcgctcccgctcttcttcgattacagtccacaacaacatacaccagtaaaatggttgtttggaccagaaagtttctaaaagatttatatgatcttggagcgagaaaatttgcggtgatgggagtgatgcctgtgggatgtttgcctatccatcgagcctcattcggtggggtattcggatggtgtaacttcctcttgaatagagttacggaggacttcaacatgaaattgcagaaaggtcttacaagttacgcagtagaatatgatttcaaagatgcaaagtttgtttacgtcgacatatacggtactcttatggatcttgtcaaaaatcctatggcctatgggtttacagaagcgaaaaaagcttgttgttgtatgccgaatgcaataataccatgcttccatccagataaatacgtcttctatgactttgctcacccttcccagaaagcctacgaagtaatatctaaacctattgtctatcagatagcgaaaggccttgcctagctaattccttatttcctacaatgttttattataatctttgaaaattatcaccatatcgataaatatatgtaaatgtataagattcatgacaatctattcgtttttcttattgtaaacaatgtataattcaaattacaggctttc

SEQ ID NO: 27304 - protein, 353 aa, Arabidopsis thaliana
  peptide (1)..(353): Ceres Seq. ID no. 12422624
IQKNFGLIFDMFRGKIFVLSLFSIYVLSSAAEKNTSFSALFAFGDSVLDTGNNNFLLTLLKGNYWPYGLSFDYKFPTGRFGNGRVFTDIVAEGLQIKRLVPAYSKIRRISSEDLKTGVCFASGGSGIDDLTSRTLRVLSAGDQVKDFKDYLKKLRRVVKRMKKVKEIVSNAVFLISEGNNDLGYFVAPALLRLQSTTTYTSKMVVWTRKFLKDLYDLGARKFAVMGVMPVGCLPIHRASFGGVFGWCNFLLNRVTEDFNMKLQKGLTSYAVEYDFKDAKFVYVDIYGTLMDLVKNPMAYGFTEAKKACCCMPNAIIPCFHPDKYVFYDFAHPSQKAYEVISKPIVYQIAKGLA

SEQ ID NO: 27305 - protein, 343 aa, Arabidopsis thaliana
  peptide (1)..(343): Ceres Seq. ID no. 12422625
MFRGKIFVLSLFSIYVLSSAAEKNTSFSALFAFGDSVLDTGNNNFLLTLLKGNYWPYGLSFDYKFPTGRFGNGRVFTDIVAEGLQIKRLVPAYSKIRRISSEDLKTGVCFASGGSGIDDLTSRTLRVLSAGDQVKDFKDYLKKLRRVVKRMKKVKEIVSNAVFLISEGNNDLGYFVAPALLRLQSTTTYTSKMVVWTRKFLKDLYDLGARKFAVMGVMPVGCLPIHRASFGGVFGWCNFLLNRVTEDFNMKLQKGLTSYAVEYDFKDAKFVYVDIYGTLMDLVKNPMAYGFTEAKKACCCMPNAIIPCFHPDKYVFYDFAHPSQKAYEVISKPIVYQIAKGLA

SEQ ID NO: 27306 - protein, 193 aa, Arabidopsis thaliana
  peptide (1)..(193): Ceres Seq. ID no. 12422626
MKKVKEIVSNAVFLISEGNNDLGYFVAPALLRLQSTTTYTSKMVVWTRKFLKDLYDLGARKFAVMGVMPVGCLPIHRASFGGVFGWCNFLLNRVTEDFNMKLQKGLTSYAVEYDFKDAKFVYVDIYGTLMDLVKNPMAYGFTEAKKACCCMPNAIIPCFHPDKYVFYDFAHPSQKAYEVISKPIVYQIAKGLA

SEQ ID NO: 27307 - DNA, 749 bp, Arabidopsis thaliana
  misc_feature (1)..(749): Ceres Seq. ID no. 13487384
  misc_feature (1)..(749): Ortholog of  Ceres SEQ ID NO 13581670 as cited in SEQ ID NO 57766
aaaaagaggagacgacacgatttttgtctgaattatcagattcagatttcgtttaatcgccagattcatttcgaaaaatcttgcactagattctcttatcttcgggaaattgaagatctgggtcataagcaatagcttaaagcatggacgaaaattctaaatttgtatctggaaacggtagaaccgagctggttaaattcattgctgataggcatgccaaactcatgaaacaagcctctcgacattattccgcaattaaagatgctatggctcgtgggaaaaaaagatatacacttgtaaaagatgtagacgacatggaaacaggagcatatgacaaacctcttccatgctttggttgtggaatcggatggttttccttcctcctaggatttatgttcccatttttgtggtactatgctgcattcctttatttcgggaactattatcgtaaagatcctagagaaagagccggtcttgctgcttccgcaatcactgcgatgggcttctctcttgtcttactcgtgatttttgctttccggtggttttactatccttgagataaagaagtaactatgttaactatcattcatacctataagctccgtgttcatcaaggaatagtctcggaacttgatgtctcatgtacattcacataaaccaaatgaatttcacttcgatatttttctcaagttgtatattttttttgttgaatgaaagtttttcagtcccttactaaggtggaccaaact

SEQ ID NO: 27308 - protein, 137 aa, Arabidopsis thaliana
  peptide (1)..(137): Ceres Seq. ID no. 13487385
MDENSKFVSGNGRTELVKFIADRHAKLMKQASRHYSAIKDAMARGKKRYTLVKDVDDMETGAYDKPLPCFGCGIGWFSFLLGFMFPFLWYYAAFLYFGNYYRKDPRERAGLAASAITAMGFSLVLLVIFAFRWFYYP

SEQ ID NO: 27309 - protein, 110 aa, Arabidopsis thaliana
  peptide (1)..(110): Ceres Seq. ID no. 13487386
MKQASRHYSAIKDAMARGKKRYTLVKDVDDMETGAYDKPLPCFGCGIGWFSFLLGFMFPFLWYYAAFLYFGNYYRKDPRERAGLAASAITAMGFSLVLLVIFAFRWFYYP

SEQ ID NO: 27310 - protein, 96 aa, Arabidopsis thaliana
  peptide (1)..(96): Ceres Seq. ID no. 13487387
MARGKKRYTLVKDVDDMETGAYDKPLPCFGCGIGWFSFLLGFMFPFLWYYAAFLYFGNYYRKDPRERAGLAASAITAMGFSLVLLVIFAFRWFYYP

SEQ ID NO: 27311 - DNA, 1255 bp, Arabidopsis thaliana
  misc_feature (1)..(1255): Ceres Seq. ID no. 12334051
  misc_feature (1)..(1255): Ortholog of  Ceres SEQ ID NO 13599444 as cited in SEQ ID NO 517
  misc_feature (1)..(1255): Ortholog of  Ceres SEQ ID NO 15169431 as cited in SEQ ID NO 60449
  misc_feature (1)..(1255): Ortholog of  Ceres SEQ ID NO 12615444 as cited in SEQ ID NO 62593
  misc_feature (1)..(1255): Ortholog of  Ceres SEQ ID NO 14302204 as cited in SEQ ID NO 63150
gccaatgcatatctgaccgatttctcatttctaaaaccctaagcttcgccggcagctccgatcgtgatctttcataaatcctaccatcgccgtcgattaagagctgagctcaggaaatgagtttcaacaaagttcccaacattcctggagctcctgctctctctgcccttcttaaggtcagcgttattggtgggctcggtgtctatgcccttactaatagtctctacaatgtcgatggaggacaccgtgctgtcatgttcaaccgattaactggtatcaaggaaaaggtgtacccagaaggcacacattttatggtgccatggtttgaaaggccaatcatctatgacgttcgtgcacgaccttaccttgtagagagcaccactggtagtcatgatcttcagatggtgaaaattggattaagggttctcacacgtcccatgggtgaccgtttgcctcagatttaccgaacccttggcgagaactacagcgaaagggttcttccttccatcatccatgaaaccctaaaagcagtggtagctcagtacaatgcaagccagctcattacccagagagaagctgtgagcagagagatacgcaagattctgacagagcgggcttctaactttgacattgctcttgatgatgtctccatcacgactctgacattcggcaaagagttcaccgcagctatcgaggcaaaacaagttgctgctcaggaagctgaacgggctaagttcattgtggagaaagccgaacaagacaggagaagtgcggttatccgtgcgcagggagaagctaaaagtgctcagcttatcggacaagcaattgcgaacaatcaggcattcatcactctgagaaagattgaagctgcgagagagattgcacagaccattgcacaatctgctaacaaggtttacctgagctccaacgatctgttgcttaaccttcaagaaatgaacttggagcctaagaagtaaaagagaaggaacgagtaagtttcttcatttcatattcatttcatttaaaagatctctccgccttggaagtaaaggatgggttggtgtttgaccaaatgaccctttctcgtgactgattctgaaaatagtctttaagaggacatattgagagagacgcagattggctttggtcagtattattcatcattttcaatgaaactttttgttgatattttcctgtgtttccccggacaattgatgaagttgaatttaaaactcaataatattcatatgatctg

SEQ ID NO: 27312 - protein, 286 aa, Arabidopsis thaliana
  peptide (1)..(286): Ceres Seq. ID no. 12334052
MSFNKVPNIPGAPALSALLKVSVIGGLGVYALTNSLYNVDGGHRAVMFNRLTGIKEKVYPEGTHFMVPWFERPIIYDVRARPYLVESTTGSHDLQMVKIGLRVLTRPMGDRLPQIYRTLGENYSERVLPSIIHETLKAVVAQYNASQLITQREAVSREIRKILTERASNFDIALDDVSITTLTFGKEFTAAIEAKQVAAQEAERAKFIVEKAEQDRRSAVIRAQGEAKSAQLIGQAIANNQAFITLRKIEAAREIAQTIAQSANKVYLSSNDLLLNLQEMNLEPKK

SEQ ID NO: 27313 - protein, 240 aa, Arabidopsis thaliana
  peptide (1)..(240): Ceres Seq. ID no. 12334053
MFNRLTGIKEKVYPEGTHFMVPWFERPIIYDVRARPYLVESTTGSHDLQMVKIGLRVLTRPMGDRLPQIYRTLGENYSERVLPSIIHETLKAVVAQYNASQLITQREAVSREIRKILTERASNFDIALDDVSITTLTFGKEFTAAIEAKQVAAQEAERAKFIVEKAEQDRRSAVIRAQGEAKSAQLIGQAIANNQAFITLRKIEAAREIAQTIAQSANKVYLSSNDLLLNLQEMNLEPKK

SEQ ID NO: 27314 - protein, 221 aa, Arabidopsis thaliana
  peptide (1)..(221): Ceres Seq. ID no. 12334054
MVPWFERPIIYDVRARPYLVESTTGSHDLQMVKIGLRVLTRPMGDRLPQIYRTLGENYSERVLPSIIHETLKAVVAQYNASQLITQREAVSREIRKILTERASNFDIALDDVSITTLTFGKEFTAAIEAKQVAAQEAERAKFIVEKAEQDRRSAVIRAQGEAKSAQLIGQAIANNQAFITLRKIEAAREIAQTIAQSANKVYLSSNDLLLNLQEMNLEPKK

SEQ ID NO: 27315 - DNA, 1357 bp, Arabidopsis thaliana
  misc_feature (1)..(1357): Ceres Seq. ID no. 12581242
  misc_feature (1)..(1357): Ortholog of  Ceres SEQ ID NO 15169316 as cited in SEQ ID NO 54821
  misc_feature (1)..(1357): Ortholog of  Ceres SEQ ID NO 13598294 as cited in SEQ ID NO 61982
gagtttataaaatacacgataatatcaaagttaaacacacaccaaccaagtaaacaagatacaacacaattggaatctttcttctttgacaaaaaaaaaaggaatctctctctttctctgattctctcatgtccatgcaacaagaaacgtctcacatgacggcggctccacagaccaacggccatcaaatcttccctgagattgacatgtccgccggcgattcctcctccatcgtacgagctacagtcgtccaagcctctacagtcttctacgatactcccgccacgctagataaggcagagagactgctttctgaggcagcggagaatggatctcagctagtggtgttcccggaggctttcatcggtggatatccacgtggctctacctttgaattggctattggttctcgtaccgctaaaggacgagatgactttcgcaagtaccatgcttctgccattgatgttcctggccctgaagtggaacgattagcgttaatggccaagaagtacaaagtatacttggttatgggtgtgatagagagggaaggctacacgctatactgcaccgttcttttcttcgattcacaaggtctgttcttaggtaagcaccgcaaactcatgcctacagctcttgaacgttgcatttggggatttggagatggatcaaccatccctgtgttcgatactcctattgggaaaatcggtgctgctatttgttgggaaaataggatgccttctttgagaaccgcaatgtatgccaaaggcattgagatttattgtgcacctactgctgattcaagagaaacttggctagcatcaatgactcatattgcacttgagggtggatgttttgttttgtcagctaaccagttttgtcgtcggaaagactatccttctccgccggaatacatgttttccggttcagaagagagcctaacaccggactctgttgtctgcgctggtggaagctctatcatttcacctttgggaattgttttagctggaccaaactatagaggagaagctcttatcacagctgatctagatcttggggacatagcacgagccaagtttgattttgatgtggtcggacattactcgaggcctgaagtgtttagcttgaacataagggagcatccgagaaaagcggtcagcttcaagacgtcaaaggtaatggaagatgaatccgtctaacaaatgatcatttgttagacccaaactttctctgtaatttgatgaagtttatctgtagtaaacttcaagacttgtgttgtaattgaaatcgataaaaaatctaaaccgttagattgagtgttgtcttctattcctcgtttatactatgcttggttctgctc

SEQ ID NO: 27316 - protein, 355 aa, Arabidopsis thaliana
  peptide (1)..(355): Ceres Seq. ID no. 12581243
MSMQQETSHMTAAPQTNGHQIFPEIDMSAGDSSSIVRATVVQASTVFYDTPATLDKAERLLSEAAENGSQLVVFPEAFIGGYPRGSTFELAIGSRTAKGRDDFRKYHASAIDVPGPEVERLALMAKKYKVYLVMGVIEREGYTLYCTVLFFDSQGLFLGKHRKLMPTALERCIWGFGDGSTIPVFDTPIGKIGAAICWENRMPSLRTAMYAKGIEIYCAPTADSRETWLASMTHIALEGGCFVLSANQFCRRKDYPSPPEYMFSGSEESLTPDSVVCAGGSSIISPLGIVLAGPNYRGEALITADLDLGDIARAKFDFDVVGHYSRPEVFSLNIREHPRKAVSFKTSKVMEDESV

SEQ ID NO: 27317 - protein, 353 aa, Arabidopsis thaliana
  peptide (1)..(353): Ceres Seq. ID no. 12581244
MQQETSHMTAAPQTNGHQIFPEIDMSAGDSSSIVRATVVQASTVFYDTPATLDKAERLLSEAAENGSQLVVFPEAFIGGYPRGSTFELAIGSRTAKGRDDFRKYHASAIDVPGPEVERLALMAKKYKVYLVMGVIEREGYTLYCTVLFFDSQGLFLGKHRKLMPTALERCIWGFGDGSTIPVFDTPIGKIGAAICWENRMPSLRTAMYAKGIEIYCAPTADSRETWLASMTHIALEGGCFVLSANQFCRRKDYPSPPEYMFSGSEESLTPDSVVCAGGSSIISPLGIVLAGPNYRGEALITADLDLGDIARAKFDFDVVGHYSRPEVFSLNIREHPRKAVSFKTSKVMEDESV

SEQ ID NO: 27318 - protein, 346 aa, Arabidopsis thaliana
  peptide (1)..(346): Ceres Seq. ID no. 12581245
MTAAPQTNGHQIFPEIDMSAGDSSSIVRATVVQASTVFYDTPATLDKAERLLSEAAENGSQLVVFPEAFIGGYPRGSTFELAIGSRTAKGRDDFRKYHASAIDVPGPEVERLALMAKKYKVYLVMGVIEREGYTLYCTVLFFDSQGLFLGKHRKLMPTALERCIWGFGDGSTIPVFDTPIGKIGAAICWENRMPSLRTAMYAKGIEIYCAPTADSRETWLASMTHIALEGGCFVLSANQFCRRKDYPSPPEYMFSGSEESLTPDSVVCAGGSSIISPLGIVLAGPNYRGEALITADLDLGDIARAKFDFDVVGHYSRPEVFSLNIREHPRKAVSFKTSKVMEDESV

SEQ ID NO: 27319 - DNA, 1089 bp, Arabidopsis thaliana
  misc_feature (1)..(1089): Ceres Seq. ID no. 12339514
  misc_feature (1)..(1089): Ortholog of  Ceres SEQ ID NO 15169419 as cited in SEQ ID NO 58491
  misc_feature (1)..(1089): Ortholog of  Ceres SEQ ID NO 15179026 as cited in SEQ ID NO 0
ataatatatacaagaatggacagtcattagctcttgttctgattaggtaagtatcgttcatggactaaaaatttcagagagaaatgagtgtaattctggattagtggctggatttaatcaaaatatgcaacagtctcctaaggccgagttcaagaaatctgagaataatagatctaagtcagtgtcagagatgaatactaataatgtcgacgatgaggtgatggagcaaggaaaactttggagagatgcagagaagaaatatccatggtatgatgcccctcctaaagtcaaggtgacaacaaaaaagggtctttgccatatgtacatagaattgacatttggattgcctccacgatcagtcttcgagcttttcactaatccagacaacttaccactcttcagtgacaagtcttggcgccaacttctggtaaacaaaaaaaggaaggttttgaagagggatggaccaaggcagatagtggaggtagaaaaagttgtggcctgggatttcctgtggtggtctggaggtatgccaataaatctaattgcggatgaaaatgagaaagatcttagaggaaaatataagaaacagaaaatgaagttcatgaaagtgttcgagggtagctataacgtggagccaatttatgtagactccgaacgcttttgcaagcataaggagccaaagagtccagaagaatacaaaaaatgtagcggtgggcaaggaaagattgcatcaaaagtgacaatggaccaatattttcagccatatcctatttttaatttgccgccgctttcttggtacattcgtaggaccaccatcaagaccaccacgactctgctcaaaatgcttcaagatatgggtgccaagatgcgagtagacccgtacgaaagttctaattagcacaagggtgaattaggagatttgttcctaattgttacggttgtctttgtcgtcgtttctagatttagttttcgtatgtgtatataaagtttggatatacttttcttcgttttttagtttgtataaaatctataccaaaatgactataatgtttgtctctatgtaaatcaataaatttatatgaaaaatgc

SEQ ID NO: 27320 - protein, 257 aa, Arabidopsis thaliana
  peptide (1)..(257): Ceres Seq. ID no. 12339515
MQQSPKAEFKKSENNRSKSVSEMNTNNVDDEVMEQGKLWRDAEKKYPWYDAPPKVKVTTKKGLCHMYIELTFGLPPRSVFELFTNPDNLPLFSDKSWRQLLVNKKRKVLKRDGPRQIVEVEKVVAWDFLWWSGGMPINLIADENEKDLRGKYKKQKMKFMKVFEGSYNVEPIYVDSERFCKHKEPKSPEEYKKCSGGQGKIASKVTMDQYFQPYPIFNLPPLSWYIRRTTIKTTTTLLKMLQDMGAKMRVDPYESSN

SEQ ID NO: 27321 - protein, 235 aa, Arabidopsis thaliana
  peptide (1)..(235): Ceres Seq. ID no. 12339517
MNTNNVDDEVMEQGKLWRDAEKKYPWYDAPPKVKVTTKKGLCHMYIELTFGLPPRSVFELFTNPDNLPLFSDKSWRQLLVNKKRKVLKRDGPRQIVEVEKVVAWDFLWWSGGMPINLIADENEKDLRGKYKKQKMKFMKVFEGSYNVEPIYVDSERFCKHKEPKSPEEYKKCSGGQGKIASKVTMDQYFQPYPIFNLPPLSWYIRRTTIKTTTTLLKMLQDMGAKMRVDPYESSN

SEQ ID NO: 27322 - protein, 225 aa, Arabidopsis thaliana
  peptide (1)..(225): Ceres Seq. ID no. 12339518
MEQGKLWRDAEKKYPWYDAPPKVKVTTKKGLCHMYIELTFGLPPRSVFELFTNPDNLPLFSDKSWRQLLVNKKRKVLKRDGPRQIVEVEKVVAWDFLWWSGGMPINLIADENEKDLRGKYKKQKMKFMKVFEGSYNVEPIYVDSERFCKHKEPKSPEEYKKCSGGQGKIASKVTMDQYFQPYPIFNLPPLSWYIRRTTIKTTTTLLKMLQDMGAKMRVDPYESSN

SEQ ID NO: 27323 - DNA, 707 bp, Arabidopsis thaliana; identical to SEQ ID NO: 22622
  misc_feature (1)..(707): Ceres Seq. ID no. 12322487
  misc_feature (1)..(707): Ortholog of  Ceres SEQ ID NO 15174240 as cited in SEQ ID NO 61866
  misc_feature (1)..(707): Ortholog of  Ceres SEQ ID NO 13596039 as cited in SEQ ID NO 62117

SEQ ID NO: 27324 - protein, 157 aa, Arabidopsis thaliana; identical to SEQ ID NO: 22623
  peptide (1)..(157): Ceres Seq. ID no. 12322488

SEQ ID NO: 27325 - DNA, 1155 bp, Arabidopsis thaliana
  misc_feature (1)..(1155): Ceres Seq. ID no. 12561559
  misc_feature (1)..(1155): Ortholog of  Ceres SEQ ID NO 13648488 as cited in SEQ ID NO 20419
attttctattttctcctccgaggtcgtctctcgaccaaaccacaaaaaccagaacaaaaataactaaaaaacaatcagatctgagatcgaacaaaacaacatgaacacgttaatcccatcggagaaaagatggatcatcaccggcgttttactagccggtttagttggcggtgctttgcttttcacaagcttcatacgagccgctgacgaaacgctcttcctctgttccacagcaagcgccaaaagcagagcggtggctgcggcagctgattacgaagcgactccgattcagcttcaagcgatcgtccactacgcgacatctaacgttgtcccacaacagaatcttgctgagatctcgatctctttcaacatcttgaaaaagctagctccggctaactttctcgtgttcggtctcggtcgtgactcgctcatgtgggcttctttaaatccacgtggcaaaaccttgttcttggaagaagatcttgaatggtttcagaaagtgaccaaagactctcctttcttacgtgcgcatcacgtgcgttacaggacgcagcttcaacaagccgattcgcttctacggttcgtacaaaacggagcctaactggtttccggcgaaatcttatctccagggaaacgagaagtgtaagctagctctcacgggactgcccgatgagttctacgatacagagtgggatctgctgatggtcgatgctcctaaaggttacttcgcagaagctccgggaagaatggcggcgattttctcggcggctgttatggctaggaaccggaagaaaccgggagttacgcacgtgttcttgcacgatgttaatcggagggtggagaagacttttgccgaggagtttttatgccggaagtatagagtcaacgccgccgggaggttatggcattttgctattcctccggcggctgcgaacgctacgattgactctggtgattataggttttgctaagattgcgacacgatttatcttcttatttcctcttttgcccttttattttacttttttgaggaattttattacagcattgggttcacttactatctgatttagtgccgacagttttggatctgcatctcgtgtttcgttatttttagttacaggctttccaaaatttcatggggcattatatttc

SEQ ID NO: 27326 - protein, 166 aa, Arabidopsis thaliana
  peptide (1)..(166): Ceres Seq. ID no. 12561560
MNTLIPSEKRWIITGVLLAGLVGGALLFTSFIRAADETLFLCSTASAKSRAVAAAADYEATPIQLQAIVHYATSNVVPQQNLAEISISFNILKKLAPANFLVFGLGRDSLMWASLNPRGKTLFLEEDLEWFQKVTKDSPFLRAHHVRYRTQLQQADSLLRFVQNGA

SEQ ID NO: 27327 - protein, 119 aa, Arabidopsis thaliana
  peptide (1)..(119): Ceres Seq. ID no. 12561561
MLLKVTSQKLREEWRRFSRRLLWLGTGRNRELRTCSCTMLIGGWRRLLPRSFYAGSIESTPPGGYGILLFLRRLRTLRLTLVIIGFAKIATRFIFLFPLLPFYFTFLRNFITALGSLTI

SEQ ID NO: 27328 - protein, 89 aa, Arabidopsis thaliana
  peptide (1)..(89): Ceres Seq. ID no. 12561562
MVDAPKGYFAEAPGRMAAIFSAAVMARNRKKPGVTHVFLHDVNRRVEKTFAEEFLCRKYRVNAAGRLWHFAIPPAAANATIDSGDYRFC

SEQ ID NO: 27329 - DNA, 1410 bp, Arabidopsis thaliana
  misc_feature (1)..(1410): Ceres Seq. ID no. 13495787
  misc_feature (1)..(1410): Ortholog of  Ceres SEQ ID NO 14313743 as cited in SEQ ID NO 59555
attatagtctcgatgaagatgctgagacttagaaagaagcaacatttggtgtttctactatgcgtgtggtgtttggtggtggattggagcaaagcagaaacagaggaaagtgatggaagtcccatggagaaaacagagcaagctgctctatactctaccattcaaggctttgttggtgaatcttggaatggctcttatctttatcctgacccttgtggctggactcctatccagggtgtgacttgtgatatctatgatgagctttggtatgtaactgctctaagctttgggactatgaaagacaactctcttgcttgttctgaaagtccagtgatcagaccacaactctttgagctcaagcacctcaagtctctctctcttttcaactgcttcacaacgcctaaccgatatctagcttcaatctccgatgaaaagtggttggatctctctaaaagcttggagagacttgagatcagatcaaacccgggactgataggtgaactcccttctgtcatcactaacctcaccaaccttcaatctctggtggtgctagaaaacaagttaacaggtccattgccagtgaatttggccaagttaaccagattgagacgtttagtactgtctggaaaccggttcacagggagaatacctgaggtctacgggttaaccggattgttgatattggatgtgagcaggaatttcttatctggggcgttgcctttaagcgttggaggattgtattctctgctgaaacttgatcttagtaacaattacttggaaggaaagttacctagagagctagagtccttgaagaatctcactctattggacttgagaaacaacagattatcaggtgggttgagtaaagagatccaagagatgacttctttggtagaactggttctgtccaataatcgcctagccggggacttgacaggaataaagtggagaaatctgaagaatttagtggttcttgatctctccaacacaggcttaaaaggggagattcctggttcaatcttggagctcaagaaactgaggtttttgggtttgagcaacaacaatctcggaggcaaactcattccacaaatggaaaccgaaatgcctagtctcagcgcgctttacgtgaatggaaataacatcagcggagagttggaattctctaggtacttttatgagagaatgggaaggatacttggtgtttgggggaaccctaatctgtgttacaacggagatgagaccaagaaccttagcgatcatgttcctttcggagttaaccaatgtaagagaattaaggcagataaatattagaaccctcgttctgaatcaaagggtttgtgataacaaaaacttggaatgatacaaagctgtggtcttttcaattttgttattgcatcttatttctatagc

SEQ ID NO: 27330 - protein, 436 aa, Arabidopsis thaliana
  peptide (1)..(436): Ceres Seq. ID no. 13495788
IIVSMKMLRLRKKQHLVFLLCVWCLVVDWSKAETEESDGSPMEKTEQAALYSTIQGFVGESWNGSYLYPDPCGWTPIQGVTCDIYDELWYVTALSFGTMKDNSLACSESPVIRPQLFELKHLKSLSLFNCFTTPNRYLASISDEKWLDLSKSLERLEIRSNPGLIGELPSVITNLTNLQSLVVLENKLTGPLPVNLAKLTRLRRLVLSGNRFTGRIPEVYGLTGLLILDVSRNFLSGALPLSVGGLYSLLKLDLSNNYLEGKLPRELESLKNLTLLDLRNNRLSGGLSKEIQEMTSLVELVLSNNRLAGDLTGIKWRNLKNLVVLDLSNTGLKGEIPGSILELKKLRFLGLSNNNLGGKLIPQMETEMPSLSALYVNGNNISGELEFSRYFYERMGRILGVWGNPNLCYNGDETKNLSDHVPFGVNQCKRIKADKY

SEQ ID NO: 27331 - protein, 432 aa, Arabidopsis thaliana
  peptide (1)..(432): Ceres Seq. ID no. 13495789
MKMLRLRKKQHLVFLLCVWCLVVDWSKAETEESDGSPMEKTEQAALYSTIQGFVGESWNGSYLYPDPCGWTPIQGVTCDIYDELWYVTALSFGTMKDNSLACSESPVIRPQLFELKHLKSLSLFNCFTTPNRYLASISDEKWLDLSKSLERLEIRSNPGLIGELPSVITNLTNLQSLVVLENKLTGPLPVNLAKLTRLRRLVLSGNRFTGRIPEVYGLTGLLILDVSRNFLSGALPLSVGGLYSLLKLDLSNNYLEGKLPRELESLKNLTLLDLRNNRLSGGLSKEIQEMTSLVELVLSNNRLAGDLTGIKWRNLKNLVVLDLSNTGLKGEIPGSILELKKLRFLGLSNNNLGGKLIPQMETEMPSLSALYVNGNNISGELEFSRYFYERMGRILGVWGNPNLCYNGDETKNLSDHVPFGVNQCKRIKADKY

SEQ ID NO: 27332 - protein, 430 aa, Arabidopsis thaliana
  peptide (1)..(430): Ceres Seq. ID no. 13495790
MLRLRKKQHLVFLLCVWCLVVDWSKAETEESDGSPMEKTEQAALYSTIQGFVGESWNGSYLYPDPCGWTPIQGVTCDIYDELWYVTALSFGTMKDNSLACSESPVIRPQLFELKHLKSLSLFNCFTTPNRYLASISDEKWLDLSKSLERLEIRSNPGLIGELPSVITNLTNLQSLVVLENKLTGPLPVNLAKLTRLRRLVLSGNRFTGRIPEVYGLTGLLILDVSRNFLSGALPLSVGGLYSLLKLDLSNNYLEGKLPRELESLKNLTLLDLRNNRLSGGLSKEIQEMTSLVELVLSNNRLAGDLTGIKWRNLKNLVVLDLSNTGLKGEIPGSILELKKLRFLGLSNNNLGGKLIPQMETEMPSLSALYVNGNNISGELEFSRYFYERMGRILGVWGNPNLCYNGDETKNLSDHVPFGVNQCKRIKADKY

SEQ ID NO: 27333 - DNA, 1283 bp, Arabidopsis thaliana
  misc_feature (1)..(1283): Ceres Seq. ID no. 13493966
  misc_feature (1)..(1283): Ortholog of  Ceres SEQ ID NO 13584217 as cited in SEQ ID NO 64024
  misc_feature (1)..(1283): Ortholog of  Ceres SEQ ID NO 14316021 as cited in SEQ ID NO 67130
tgacaaccactttttatatgatataccgcttttaccccttaagcctctccgcgtaaaaccgagaacaaaatcttaagcaccgttgttccgattcagagatcatcgtcgtcgtcgttcagaaaccttcaaaaatggctggaaaactcatgcacgctcttcagtacaactcttacggtggtggcgccgccggattagagcatgttcaagttccggttccaacaccaaagagtaatgaggtttgcctgaaattagaagctactagtctaaaccctgttgattggaaaattcagaaaggaatgatccgcccatttctgccccgcaagttcccctgcattccagctactgatgttgctggagaggtcgttgaggttggatcaggagtaaaaaattttaaggctggtgacaaagttgtagcggttcttagccatctaggtggaggtggacttgctgagttcgctgttgcaaccgagaagctgactgtcaaaagacctcaagaagtgggagcagctgaagcagcagctttacctgtggcgggtctaaccgctctccaagctcttactaatcctgcggggttgaagctggatggtacaggcaagaaggcgaacatcctggtcacagcagcatctggtggggttggtcactatgcagtccagctggcaaaacttgcaaatgctcacgtaaccgctacatgtggtgcccggaacatagagtttgtcaaatcgttgggagcggatgaggttctcgactacaagactcccgagggagccgccctcaagagtccgtcgggtaaaaaatatgacgctgtggtccattgtgcaaacgggattccattttcggtattcgaaccaaatttgtcggaaaacgggaaggtgatagacatcacaccggggcctaatgcaatgtggacttatgcggttaagaaaataaccatgtcaaagaagcagttagtgccactcttgttgatcccaaaagctgagaatttggagtttatggtgaatctagtgaaagaagggaaagtgaagacagtgattgactcaaagcatcctttgagcaaagcggaggatgcttgggccaaaagtatcgatggtcatgctactgggaagatcattgtcgagccataagagcgttgtagccatctttgactgtctgtgaatgtgataatagatgttaaaagtttgcgtaccgtttacagaatgttttatgttgttttgtttaatatacccgagtatgtcgaaagttacatgaaaagaaaatttggatgaaataaataatacttgttaggt

SEQ ID NO: 27334 - protein, 329 aa, Arabidopsis thaliana
  peptide (1)..(329): Ceres Seq. ID no. 13493967
MAGKLMHALQYNSYGGGAAGLEHVQVPVPTPKSNEVCLKLEATSLNPVDWKIQKGMIRPFLPRKFPCIPATDVAGEVVEVGSGVKNFKAGDKVVAVLSHLGGGGLAEFAVATEKLTVKRPQEVGAAEAAALPVAGLTALQALTNPAGLKLDGTGKKANILVTAASGGVGHYAVQLAKLANAHVTATCGARNIEFVKSLGADEVLDYKTPEGAALKSPSGKKYDAVVHCANGIPFSVFEPNLSENGKVIDITPGPNAMWTYAVKKITMSKKQLVPLLLIPKAENLEFMVNLVKEGKVKTVIDSKHPLSKAEDAWAKSIDGHATGKIIVEP

SEQ ID NO: 27335 - protein, 324 aa, Arabidopsis thaliana
  peptide (1)..(324): Ceres Seq. ID no. 13493968
MHALQYNSYGGGAAGLEHVQVPVPTPKSNEVCLKLEATSLNPVDWKIQKGMIRPFLPRKFPCIPATDVAGEVVEVGSGVKNFKAGDKVVAVLSHLGGGGLAEFAVATEKLTVKRPQEVGAAEAAALPVAGLTALQALTNPAGLKLDGTGKKANILVTAASGGVGHYAVQLAKLANAHVTATCGARNIEFVKSLGADEVLDYKTPEGAALKSPSGKKYDAVVHCANGIPFSVFEPNLSENGKVIDITPGPNAMWTYAVKKITMSKKQLVPLLLIPKAENLEFMVNLVKEGKVKTVIDSKHPLSKAEDAWAKSIDGHATGKIIVEP

SEQ ID NO: 27336 - protein, 274 aa, Arabidopsis thaliana
  peptide (1)..(274): Ceres Seq. ID no. 13493969
MIRPFLPRKFPCIPATDVAGEVVEVGSGVKNFKAGDKVVAVLSHLGGGGLAEFAVATEKLTVKRPQEVGAAEAAALPVAGLTALQALTNPAGLKLDGTGKKANILVTAASGGVGHYAVQLAKLANAHVTATCGARNIEFVKSLGADEVLDYKTPEGAALKSPSGKKYDAVVHCANGIPFSVFEPNLSENGKVIDITPGPNAMWTYAVKKITMSKKQLVPLLLIPKAENLEFMVNLVKEGKVKTVIDSKHPLSKAEDAWAKSIDGHATGKIIVEP

SEQ ID NO: 27337 - DNA, 1288 bp, Arabidopsis thaliana
  misc_feature (1)..(1288): Ceres Seq. ID no. 12421695
  misc_feature (1)..(1288): Ortholog of  Ceres SEQ ID NO 14307022 as cited in SEQ ID NO 54437
tcaaaaagtcctctctcggtcaactttcttcttggtccccatcttcacaaatcacaactctttttatttccaaagaccaaaaacctgagaacacaccggcgacctgaaaatggaaacttcctgttttacccttctcggtctccttgtctccctctccttcttcctcactctctccgcccaaatgaccggaaacttcaactgcagtggctcaacctcgacgtgtcaatctctcgttggttactcaagcaagaacgcaacaacgttgcgcaatatccaaaccctttttgccgtcaagaacctccgctcgatcctcggagctaacaatctcccactcaacacctcacgtgaccaacgcgtgaacccgaatcaagtcgtacgtgtcccaatccattgctcttgctccaatggaaccggtgtctcgaaccgggacatcgaatacaccatcaagaaagacgacatactctctttcgtcgcaactgagattttcggtggtctcgttacgtacgagaagatcagtgaggttaacaaaatccctgacccgaacaaaatcgaaatcggtcaaaagttttggatccctttgccttgtagctgtgataaattgaacggtgaggatgttgttcactacgcacatgtagtcaaactagggagctctctcggtgagatcgctgctcagtttggaacggacaacacgacgttggctcagctcaatggaatcattggtgactctcagcttcttgctgataaacctctcgacgtccctctcaaagcttgtagctcttctgtgaggaaggactcgttggatgctcctctgcttctgtctaacaactcatacgtcttcactgcaaacaattgcgtcaagtgtacttgtgacgctttgaagaattggactttaagctgtcaatcatcatctgagattaagccttcgaactggcaaacctgcccaccattttcacaatgtgatggagctttgcttaacgcctcttgcagacaacctcgtgattgcgtctatgctggttactccaaccaaaccatcttcaccacagcttccccagcttgtccagattctgctggtcctgataactatgcatcaacgctcagctcaagcttcaatttcgtgattgtgttgattcagtgtgctctgctttgtctctgccttctctagtaatgttttgttgtgtgtttatgagtgtgtatctaagtacagttcggattaaaataaagacattgtttcacctgaagcatcacgtccttgtaccatttttatattggaaacatttcagcttttggc

SEQ ID NO: 27338 - protein, 350 aa, Arabidopsis thaliana
  peptide (1)..(350): Ceres Seq. ID no. 12421696
METSCFTLLGLLVSLSFFLTLSAQMTGNFNCSGSTSTCQSLVGYSSKNATTLRNIQTLFAVKNLRSILGANNLPLNTSRDQRVNPNQVVRVPIHCSCSNGTGVSNRDIEYTIKKDDILSFVATEIFGGLVTYEKISEVNKIPDPNKIEIGQKFWIPLPCSCDKLNGEDVVHYAHVVKLGSSLGEIAAQFGTDNTTLAQLNGIIGDSQLLADKPLDVPLKACSSSVRKDSLDAPLLLSNNSYVFTANNCVKCTCDALKNWTLSCQSSSEIKPSNWQTCPPFSQCDGALLNASCRQPRDCVYAGYSNQTIFTTASPACPDSAGPDNYASTLSSSFNFVIVLIQCALLCLCLL

SEQ ID NO: 27339 - protein, 326 aa, Arabidopsis thaliana
  peptide (1)..(326): Ceres Seq. ID no. 12421697
MTGNFNCSGSTSTCQSLVGYSSKNATTLRNIQTLFAVKNLRSILGANNLPLNTSRDQRVNPNQVVRVPIHCSCSNGTGVSNRDIEYTIKKDDILSFVATEIFGGLVTYEKISEVNKIPDPNKIEIGQKFWIPLPCSCDKLNGEDVVHYAHVVKLGSSLGEIAAQFGTDNTTLAQLNGIIGDSQLLADKPLDVPLKACSSSVRKDSLDAPLLLSNNSYVFTANNCVKCTCDALKNWTLSCQSSSEIKPSNWQTCPPFSQCDGALLNASCRQPRDCVYAGYSNQTIFTTASPACPDSAGPDNYASTLSSSFNFVIVLIQCALLCLCLL

SEQ ID NO: 27340 - DNA, 829 bp, Arabidopsis thaliana
  misc_feature (1)..(829): Ceres Seq. ID no. 12337764
  misc_feature (1)..(829): Ortholog of  Ceres SEQ ID NO 13654557 as cited in SEQ ID NO 68444
attcgtcctggtaaaggtaaaatgaggaatcgtcgttacatttctaggaaaggtcctcttgttgtgtttggaactgaaggagccaagattgtgaaagcttttaggaatcttcctggtgttgagctttgtcacgttgagaggcttaacttgttgaaattagcccctggtggtcaccttcgtaggtttgtgatttggactaagtctgcttttgagaagcttgaatctatctatggctcgtttgagaaaccatcagagaagaagaagggttacgtcttgcctcgtgcgaagatggtgaatgctgatcttgctaggattattaactccgatgaggtacagagtgtggtgaacccgattaaggatggttccaagagagcggttctgaagaagaatccattgaagaaccttaatgtgatgttcaagttgaatccttatgctaagaccgcaaagagaatgtctctgttggctgaagcttcaagggttaaggctaagaaggagaagctcgagaagaagaggaaagtcgtcactaaggaggaggcccaagcgatcaaagcagcaggcaaggcttggtatcagactatgatttcagacagtgactacaccgagttcgataacttcaccaagtggcttggcgctagtcagtaatgatgctctcgtcatcgcaaagtctcttatatctaggcaaagattttggttttctgatttatgttcttcgtttgtattggatttatctgggattttatgttgttgagttggtaagacgatttttaagaactatgatggtgtttttcaaactcttttcaatctgtttcccttagtgctctttactcgc

SEQ ID NO: 27341 - protein, 213 aa, Arabidopsis thaliana
  peptide (1)..(213): Ceres Seq. ID no. 12337765
IRPGKGKMRNRRYISRKGPLVVFGTEGAKIVKAFRNLPGVELCHVERLNLLKLAPGGHLRRFVIWTKSAFEKLESIYGSFEKPSEKKKGYVLPRAKMVNADLARIINSDEVQSVVNPIKDGSKRAVLKKNPLKNLNVMFKLNPYAKTAKRMSLLAEASRVKAKKEKLEKKRKVVTKEEAQAIKAAGKAWYQTMISDSDYTEFDNFTKWLGASQ

SEQ ID NO: 27342 - protein, 206 aa, Arabidopsis thaliana
  peptide (1)..(206): Ceres Seq. ID no. 12337766
MRNRRYISRKGPLVVFGTEGAKIVKAFRNLPGVELCHVERLNLLKLAPGGHLRRFVIWTKSAFEKLESIYGSFEKPSEKKKGYVLPRAKMVNADLARIINSDEVQSVVNPIKDGSKRAVLKKNPLKNLNVMFKLNPYAKTAKRMSLLAEASRVKAKKEKLEKKRKVVTKEEAQAIKAAGKAWYQTMISDSDYTEFDNFTKWLGASQ

SEQ ID NO: 27343 - protein, 117 aa, Arabidopsis thaliana
  peptide (1)..(117): Ceres Seq. ID no. 12337767
MVNADLARIINSDEVQSVVNPIKDGSKRAVLKKNPLKNLNVMFKLNPYAKTAKRMSLLAEASRVKAKKEKLEKKRKVVTKEEAQAIKAAGKAWYQTMISDSDYTEFDNFTKWLGASQ

SEQ ID NO: 27344 - DNA, 1574 bp, Arabidopsis thaliana
  misc_feature (1)..(1574): Ceres Seq. ID no. 12331591
  misc_feature (1)..(1574): Ortholog of  Ceres SEQ ID NO 13662245 as cited in SEQ ID NO 62708
attatctaaatatctctacacaatcacattagccaaaaccatggcctcctcaagtctccatttcttcttcttcttgacacttctcttgccattcactttcaccaccgccacacgtgacacatgtgcgaccgccgctcccgatggttccgacgacctctcaatcatccccattaacgccaaatgctcacctttcgcacccactcacgtctctgcctccgtgatagacacggtccttcacatggcctcctcagactcccatcgactcacctacctctcaagcctcgtcgccggcaaaccaaaacccacctccgtccccgtcgcctccggtaatcagctccacatcggaaactacgtggtccgagccaaactcggcactcctccacagctaatgttcatggtcctagacacaagtaacgacgccgtttggctcccttgctccggctgctccggttgttccaacgcctcaacttctttcaatacaaactcctcatccacttactcaaccgtctcttgctccaccgcacaatgcacccaagcacgtggcctcacgtgcccatcctcctcaccacaaccgtccgtctgctccttcaaccaatcctacggcggagattcatccttctctgccagtctcgtccaagacacgctaacgttagcccctgacgtcatcccaaatttctccttcggctgcatcaactccgcctcaggcaattctctaccaccgcaaggactaatgggcctaggacgcgggcctatgtcattggtctctcaaactacgtcgctttactcaggagtgttctcatactgcctccctagcttcaggtccttctacttctccgggtcgttgaaactgggtctcttgggtcaacccaaatccatcagatacactccactcctccgtaaccctcgccgtccatcactttactatgtgaatctcaccggagtgagtgtcggttccgtccaggtacccgttgacccagtgtatttgacgtttgacgcaaattccggcgccggtacgatcatcgattccggtactgttatcacccgttttgctcaacccgtgtacgaagccattagagacgagtttaggaagcaggtgaatgtgtcgtcattctcaacattgggagcgtttgacacgtgtttctcagcggataacgagaatgtggcgccaaagataacgctgcacatgacgtcactcgacttgaagctgccgatggagaatacgcttatccacagcagcgcgggaacgctgacgtgtctatccatggccgggatacggcagaacgcaaacgctgttctaaacgtgatcgcgaatctccaacagcagaacttaaggatcttgtttgacgttcctaattctcgcataggaattgctcctgagccctgcaactaagagaggacatatgaatgatctctctctccctctctttttattttacgttcttcgtacgttttgatttgaagaggtgcttaatggcgcttgaccttctacatatactttgtatgaacggctatcttcactacgcataacatggcctgcagtttcatctcttgcttcagcgatgtgatttcttttc

SEQ ID NO: 27345 - protein, 462 aa, Arabidopsis thaliana
  peptide (1)..(462): Ceres Seq. ID no. 12331592
LSKYLYTITLAKTMASSSLHFFFFLTLLLPFTFTTATRDTCATAAPDGSDDLSIIPINAKCSPFAPTHVSASVIDTVLHMASSDSHRLTYLSSLVAGKPKPTSVPVASGNQLHIGNYVVRAKLGTPPQLMFMVLDTSNDAVWLPCSGCSGCSNASTSFNTNSSSTYSTVSCSTAQCTQARGLTCPSSSPQPSVCSFNQSYGGDSSFSASLVQDTLTLAPDVIPNFSFGCINSASGNSLPPQGLMGLGRGPMSLVSQTTSLYSGVFSYCLPSFRSFYFSGSLKLGLLGQPKSIRYTPLLRNPRRPSLYYVNLTGVSVGSVQVPVDPVYLTFDANSGAGTIIDSGTVITRFAQPVYEAIRDEFRKQVNVSSFSTLGAFDTCFSADNENVAPKITLHMTSLDLKLPMENTLIHSSAGTLTCLSMAGIRQNANAVLNVIANLQQQNLRILFDVPNSRIGIAPEPCN

SEQ ID NO: 27346 - protein, 449 aa, Arabidopsis thaliana
  peptide (1)..(449): Ceres Seq. ID no. 12331593
MASSSLHFFFFLTLLLPFTFTTATRDTCATAAPDGSDDLSIIPINAKCSPFAPTHVSASVIDTVLHMASSDSHRLTYLSSLVAGKPKPTSVPVASGNQLHIGNYVVRAKLGTPPQLMFMVLDTSNDAVWLPCSGCSGCSNASTSFNTNSSSTYSTVSCSTAQCTQARGLTCPSSSPQPSVCSFNQSYGGDSSFSASLVQDTLTLAPDVIPNFSFGCINSASGNSLPPQGLMGLGRGPMSLVSQTTSLYSGVFSYCLPSFRSFYFSGSLKLGLLGQPKSIRYTPLLRNPRRPSLYYVNLTGVSVGSVQVPVDPVYLTFDANSGAGTIIDSGTVITRFAQPVYEAIRDEFRKQVNVSSFSTLGAFDTCFSADNENVAPKITLHMTSLDLKLPMENTLIHSSAGTLTCLSMAGIRQNANAVLNVIANLQQQNLRILFDVPNSRIGIAPEPCN

SEQ ID NO: 27347 - protein, 383 aa, Arabidopsis thaliana
  peptide (1)..(383): Ceres Seq. ID no. 12331594
MASSDSHRLTYLSSLVAGKPKPTSVPVASGNQLHIGNYVVRAKLGTPPQLMFMVLDTSNDAVWLPCSGCSGCSNASTSFNTNSSSTYSTVSCSTAQCTQARGLTCPSSSPQPSVCSFNQSYGGDSSFSASLVQDTLTLAPDVIPNFSFGCINSASGNSLPPQGLMGLGRGPMSLVSQTTSLYSGVFSYCLPSFRSFYFSGSLKLGLLGQPKSIRYTPLLRNPRRPSLYYVNLTGVSVGSVQVPVDPVYLTFDANSGAGTIIDSGTVITRFAQPVYEAIRDEFRKQVNVSSFSTLGAFDTCFSADNENVAPKITLHMTSLDLKLPMENTLIHSSAGTLTCLSMAGIRQNANAVLNVIANLQQQNLRILFDVPNSRIGIAPEPCN

SEQ ID NO: 27348 - DNA, 1370 bp, Arabidopsis thaliana
  misc_feature (1)..(1370): Ceres Seq. ID no. 12331434
  misc_feature (1)..(1370): Ortholog of  Ceres SEQ ID NO 13502952 as cited in SEQ ID NO 62271
  misc_feature (1)..(1370): Ortholog of  Ceres SEQ ID NO 13502973 as cited in SEQ ID NO 68052
  misc_feature (1)..(1370): Ortholog of  Ceres SEQ ID NO 13596000 as cited in SEQ ID NO 68188
aataacacaaaatcctcttctcttctttaataacttttagaaacacaaataaaagtttaattacttttaagcccaacaaaaatgggttatgctaaatcagccatgctgatcttcttactagcattggtcatcgcatcttgtgccacggccatggacatgtccgttgtttcctccaacgataaccaccacgtgaccgccggtcccggccgccgtcagggtattttcgacgctgaagccaccttgatgttcgagtcatggatggtcaaacatgggaaagtgtacgactccgttaccgagaaggaacggcgtttaactatttttgaggacaacctccgttttatcactaaccggaacgctgagaatctcagttaccggcttggtttgaatcggtttgcggatttatctctccatgaatacggagaaatttgccatggggctgatccaagacctcctaggaaccacgtcttcatgactagcagcaaccgatacaagactagtgatggtgatgttcttcctaagtccgttgactggagaagaaggcgcagtgactgaagtcaaagatcaaggcctttgcaggagttgttgggctttctccactgtgggagcagtggaaggtttaaacaagattgtgactggagagctagtaactttgtctgagcaagatttgatcaattgtaacaaagaaaacaatggttgcggaggaggcaaagtcgagacagcctatgagttcatcatgaacaatggtggtcttggtaccgacaacgattatccttacaaagctctcaatggagtctgcgacggccgcctcaaggaaaacaacaagaatgttatgattgatgggtatgagaatttgcctgcaaacgatgaatccgctcttatgaaagcggttgctcaccagcctgtgactgccgttgtcgattccagcagccgagagtttcagctttatgaatcgggagtgtttgatggaacttgcggaacaaacctaaaccatggtgttgttgtggtcgggtatggaaccgagaatggtcgtgactactggattgtgaaaaactcgaggggcgacacatggggggaggctggctacatgaagatggctcgcaacattgccaatccaagaggcctatgtggcatcgcaatgcgagcttcataccctctcaagaactcgttttctacggataaagtttcggttgcctaataatatgaactaaatgtatgccatggaacggatcggttaagccattatcgttattcgactttgaaggaaactaaaaagtaatgtggtcgattggtttggttttgttatatattatgcatttgtatgggggtcagtcaatgtttgaactttgtataatatttctttgggtctagtg

SEQ ID NO: 27349 - protein, 231 aa, Arabidopsis thaliana
  peptide (1)..(231): Ceres Seq. ID no. 12331435
MVMFFLSPLTGEEGAVTEVKDQGLCRSCWAFSTVGAVEGLNKIVTGELVTLSEQDLINCNKENNGCGGGKVETAYEFIMNNGGLGTDNDYPYKALNGVCDGRLKENNKNVMIDGYENLPANDESALMKAVAHQPVTAVVDSSSREFQLYESGVFDGTCGTNLNHGVVVVGYGTENGRDYWIVKNSRGDTWGEAGYMKMARNIANPRGLCGIAMRASYPLKNSFSTDKVSVA

SEQ ID NO: 27350 - protein, 229 aa, Arabidopsis thaliana
  peptide (1)..(229): Ceres Seq. ID no. 12331436
MFFLSPLTGEEGAVTEVKDQGLCRSCWAFSTVGAVEGLNKIVTGELVTLSEQDLINCNKENNGCGGGKVETAYEFIMNNGGLGTDNDYPYKALNGVCDGRLKENNKNVMIDGYENLPANDESALMKAVAHQPVTAVVDSSSREFQLYESGVFDGTCGTNLNHGVVVVGYGTENGRDYWIVKNSRGDTWGEAGYMKMARNIANPRGLCGIAMRASYPLKNSFSTDKVSVA

SEQ ID NO: 27351 - protein, 156 aa, Arabidopsis thaliana
  peptide (1)..(156): Ceres Seq. ID no. 12331437
MGYAKSAMLIFLLALVIASCATAMDMSVVSSNDNHHVTAGPGRRQGIFDAEATLMFESWMVKHGKVYDSVTEKERRLTIFEDNLRFITNRNAENLSYRLGLNRFADLSLHEYGEICHGADPRPPRNHVFMTSSNRYKTSDGDVLPKSVDWRRRRSD

SEQ ID NO: 27352 - DNA, 1461 bp, Arabidopsis thaliana
  misc_feature (1)..(1461): Ceres Seq. ID no. 12389071
  misc_feature (1)..(1461): Ortholog of  Ceres SEQ ID NO 15171382 as cited in SEQ ID NO 51642
  misc_feature (1)..(1461): Ortholog of  Ceres SEQ ID NO 15179784 as cited in SEQ ID NO 64755
  misc_feature (1)..(1461): Ortholog of  Ceres SEQ ID NO 13596440 as cited in SEQ ID NO 68769
  misc_feature (1)..(1461): Ortholog of  Ceres SEQ ID NO 15180012 as cited in SEQ ID NO 0
agattgtccctaggagtcactgttatcgctctttcaattactgtaatgttgaatttgggtttcatctactaactaagatgaagtttctttgataggatggctcgcttcagttttccttgttttccaaattttgggggttttaatcaggtccaagtaattaggtgaagtttgcctctctctttttttggatctcattggtctgcaatagtctcaattaaaccttctagtttgcatattaccagttgagtgactcttggttccagattcgtttttggtggtcatagtcgcgagctgtgacaaatcgggggcctgagatttcagaaactgctgataattgggtctcaccatctgacattccactcatagaacctaatagtaaagaggatgagagaggcacagctaggcggtcacactctgaggtcccatggaatgactgttgcaaggactcacatgcatgattggatcattctcgtgttacttgttattctcgagtgtgtactccttataatccacccattttatcgctttgtaggtaaagatatgatgactgatctaagttacccgttaaagagtaacaccgtaccaatttggtctgtcccggtatatgcgatgctgttacctttggtaatcttcatctttatctacttccgtcgaagagatgtttatgatcttcatcacgcggtgctaggtctcttatactctgttctggtgacagcagtacttaccgatgcaataaagaatgcagttggtcgaccacgtcctgacttcttctggcgttgttttccagatggcaaagctctttatgatagccttggagatgttatatgccatggtgataaaagcgtcataagggaaggtcacaaaagctttccaagtggacacacgtcatggtctttttcgggtctcggatttctttcgctttacttatcgggaaagattcaagcatttgacggtaaaggccacgttgcaaagctatgcatagtcatactccctttgctatttgcagctcttgtcggcatttcccgtgttgatgactattggcatcattggcaagacgtctttgcaggaggcttgctaggtcttgcgatctctacaatctgttatcttcaatttttcccgccaccatatcacaccgaaggttggggaccatatgcttacttccaagtgttggaggctgcgagagtgcaaggagcagcgaatggagcagtgcagcagccgccgccccaagttaacaacggtgaagaagaagacggtgggtttatgggtttacatttggtggataatccgactatgaggagagaagaggatgtagaaactggtagaggctgagatgaagaaactctgaagctggtttggttacttgttaggacactttctcttgttcttttgattctttgttggacaactttagtagatttctctaagataactaatagagtcgtttggttttggttttggttt

SEQ ID NO: 27353 - protein, 314 aa, Arabidopsis thaliana
  peptide (1)..(314): Ceres Seq. ID no. 12389072
MREAQLGGHTLRSHGMTVARTHMHDWIILVLLVILECVLLIIHPFYRFVGKDMMTDLSYPLKSNTVPIWSVPVYAMLLPLVIFIFIYFRRRDVYDLHHAVLGLLYSVLVTAVLTDAIKNAVGRPRPDFFWRCFPDGKALYDSLGDVICHGDKSVIREGHKSFPSGHTSWSFSGLGFLSLYLSGKIQAFDGKGHVAKLCIVILPLLFAALVGISRVDDYWHHWQDVFAGGLLGLAISTICYLQFFPPPYHTEGWGPYAYFQVLEAARVQGAANGAVQQPPPQVNNGEEEDGGFMGLHLVDNPTMRREEDVETGRG

SEQ ID NO: 27354 - protein, 299 aa, Arabidopsis thaliana
  peptide (1)..(299): Ceres Seq. ID no. 12389073
MTVARTHMHDWIILVLLVILECVLLIIHPFYRFVGKDMMTDLSYPLKSNTVPIWSVPVYAMLLPLVIFIFIYFRRRDVYDLHHAVLGLLYSVLVTAVLTDAIKNAVGRPRPDFFWRCFPDGKALYDSLGDVICHGDKSVIREGHKSFPSGHTSWSFSGLGFLSLYLSGKIQAFDGKGHVAKLCIVILPLLFAALVGISRVDDYWHHWQDVFAGGLLGLAISTICYLQFFPPPYHTEGWGPYAYFQVLEAARVQGAANGAVQQPPPQVNNGEEEDGGFMGLHLVDNPTMRREEDVETGRG

SEQ ID NO: 27355 - protein, 292 aa, Arabidopsis thaliana
  peptide (1)..(292): Ceres Seq. ID no. 12389074
MHDWIILVLLVILECVLLIIHPFYRFVGKDMMTDLSYPLKSNTVPIWSVPVYAMLLPLVIFIFIYFRRRDVYDLHHAVLGLLYSVLVTAVLTDAIKNAVGRPRPDFFWRCFPDGKALYDSLGDVICHGDKSVIREGHKSFPSGHTSWSFSGLGFLSLYLSGKIQAFDGKGHVAKLCIVILPLLFAALVGISRVDDYWHHWQDVFAGGLLGLAISTICYLQFFPPPYHTEGWGPYAYFQVLEAARVQGAANGAVQQPPPQVNNGEEEDGGFMGLHLVDNPTMRREEDVETGRG

SEQ ID NO: 27356 - DNA, 1258 bp, Arabidopsis thaliana
  misc_feature (1)..(1258): Ceres Seq. ID no. 13495791
  misc_feature (1)..(1258): Ortholog of  Ceres SEQ ID NO 15171297 as cited in SEQ ID NO 51458
accagaaaaaggaacaaaacaaaaataaagcgcgaaattagttttcaccggcgagattttttatcctctctacgagataacacttagaagaagaggcagttaaaacagagagacgacgtcgtgttatttttccaaattccggtgatctgagaatgacgtcggggactagaacgccgacttggaaagagagagagaacaacaaacggcgagagcggcgaagacgagcgattgcggctaagatcttcgcaggactaaggattcatggaaacttcaagctccctaaacactgcgacaacaatgaagtcctcaaagctttatgcaatgaagctggttggactgtagaagacgacggaactacttaccgcaagggatgcaaaccaatggatcgaatggacctcatgaatggttctacttcagctagtccatgctcatcgtatcaacatagccctcgtgcttcctacaatccaagcccttcgtcttcatcattcccgagtcctacaaacccatttggtgatgctaactcactaatcccatggctcaagaacctctcttcaaactcaccttccaagcttcccttcttccatggaaattcaataagcgctcccgtgactccgccattggctcgaagccctactcgtgatcaagtaaccatccctgactctggatggctctcaggaatgcaaactccgcagagcggaccgtcttctcctactttcagtttagtttcaagaaacccgtttttcgacaaagaggcttttaaaatgggagattgtaattcaccaatgtggactcctggacaaagtggaaactgctctccagctattcctgctggtgttgatcagaactctgatgtgccaatggctgatggaatgacggctgagtttgcgtttggttgtaacgcaatggctgcgaatggaatggtgaagccttgggaaggagaaaggatacatggagaatgtgtttcagatgatttagaacttacacttggaaactcaagaaccagatgatcatttcagagaagaatcaaagtcgtttgctatcattaagtcttcttttttgtctgtcttttttttccagtgtgatgtttaaaggtgactcagaggaaaaaaaggagaatagaaagagaaacaaaaaaagaacattttgagctctgttttcttttttttttttctttttttttttgttggcttttgactaaagttgtagttagaatctattttatatcttgaagcttctttaaaaaaaaagttatttgtgg

SEQ ID NO: 27357 - protein, 284 aa, Arabidopsis thaliana
  peptide (1)..(284): Ceres Seq. ID no. 13495792
MTSGTRTPTWKERENNKRRERRRRAIAAKIFAGLRIHGNFKLPKHCDNNEVLKALCNEAGWTVEDDGTTYRKGCKPMDRMDLMNGSTSASPCSSYQHSPRASYNPSPSSSSFPSPTNPFGDANSLIPWLKNLSSNSPSKLPFFHGNSISAPVTPPLARSPTRDQVTIPDSGWLSGMQTPQSGPSSPTFSLVSRNPFFDKEAFKMGDCNSPMWTPGQSGNCSPAIPAGVDQNSDVPMADGMTAEFAFGCNAMAANGMVKPWEGERIHGECVSDDLELTLGNSRTR

SEQ ID NO: 27358 - protein, 208 aa, Arabidopsis thaliana
  peptide (1)..(208): Ceres Seq. ID no. 13495793
MDRMDLMNGSTSASPCSSYQHSPRASYNPSPSSSSFPSPTNPFGDANSLIPWLKNLSSNSPSKLPFFHGNSISAPVTPPLARSPTRDQVTIPDSGWLSGMQTPQSGPSSPTFSLVSRNPFFDKEAFKMGDCNSPMWTPGQSGNCSPAIPAGVDQNSDVPMADGMTAEFAFGCNAMAANGMVKPWEGERIHGECVSDDLELTLGNSRTR

SEQ ID NO: 27359 - protein, 205 aa, Arabidopsis thaliana
  peptide (1)..(205): Ceres Seq. ID no. 13495794
MDLMNGSTSASPCSSYQHSPRASYNPSPSSSSFPSPTNPFGDANSLIPWLKNLSSNSPSKLPFFHGNSISAPVTPPLARSPTRDQVTIPDSGWLSGMQTPQSGPSSPTFSLVSRNPFFDKEAFKMGDCNSPMWTPGQSGNCSPAIPAGVDQNSDVPMADGMTAEFAFGCNAMAANGMVKPWEGERIHGECVSDDLELTLGNSRTR

SEQ ID NO: 27360 - DNA, 751 bp, Arabidopsis thaliana
  misc_feature (1)..(751): Ceres Seq. ID no. 12421235
  misc_feature (1)..(751): Ortholog of  Ceres SEQ ID NO 14303280 as cited in SEQ ID NO 1250
aaacaactacaaacaacatttctgagattgcgccggagtcaaggagagggagagagcgatccaacggttgagatgtttctacgggcaatcggacggccattattggctaaagtgaagcagacgacggggatcgtcgggcttgacgttgttcccaacgcgagagcggtgctgatcgatctctacagcaaaaccctaaaggagatccaagctgtgccggaggatgaagggtaccgtaaagcggtggaatcattcacgcgccaacgtctcaatgtgtgcaaggaagaagaagattgggagatgattgagaagcggcttggttgtggtcaagtcgaagagcttatcgaagaggctcgcgatgagctcacactcattgggaaaatgattgagtgggatccttggggtgtaccagatgattacgagtgtgaagtgattgagaatgatgcgccgattccaaagcatgttcctcagcaccgacctggtcctcttcctgagcagttctataaaacgcttgaaggtctaattgcagagtctaaaacagagatcccagctgctacacccagcgatccgcagttgaaggagtaacttccagtttttacatattgtgtgcttgttgcttttttggctagagttgtttccgaatcagtggtcaagcctctgaataaattgcttaataattttcataacgataacaatgtctgttcacaaatgttttatcactcttattaaacaaatgatgtttcttcccttttgc

SEQ ID NO: 27361 - protein, 193 aa, Arabidopsis thaliana
  peptide (1)..(193): Ceres Seq. ID no. 12421236
KQLQTTFLRLRRSQGEGESDPTVEMFLRAIGRPLLAKVKQTTGIVGLDVVPNARAVLIDLYSKTLKEIQAVPEDEGYRKAVESFTRQRLNVCKEEEDWEMIEKRLGCGQVEELIEEARDELTLIGKMIEWDPWGVPDDYECEVIENDAPIPKHVPQHRPGPLPEQFYKTLEGLIAESKTEIPAATPSDPQLKE

SEQ ID NO: 27362 - protein, 169 aa, Arabidopsis thaliana
  peptide (1)..(169): Ceres Seq. ID no. 12421237
MFLRAIGRPLLAKVKQTTGIVGLDVVPNARAVLIDLYSKTLKEIQAVPEDEGYRKAVESFTRQRLNVCKEEEDWEMIEKRLGCGQVEELIEEARDELTLIGKMIEWDPWGVPDDYECEVIENDAPIPKHVPQHRPGPLPEQFYKTLEGLIAESKTEIPAATPSDPQLKE

SEQ ID NO: 27363 - DNA, 1291 bp, Arabidopsis thaliana
  misc_feature (1)..(1291): Ceres Seq. ID no. 12337912
  misc_feature (1)..(1291): Ortholog of  Ceres SEQ ID NO 14312711 as cited in SEQ ID NO 1401
  misc_feature (1)..(1291): Ortholog of  Ceres SEQ ID NO 13586635 as cited in SEQ ID NO 14217
  misc_feature (1)..(1291): Ortholog of  Ceres SEQ ID NO 15170220 as cited in SEQ ID NO 55383
  misc_feature (1)..(1291): Ortholog of  Ceres SEQ ID NO 14304198 as cited in SEQ ID NO 56479
  misc_feature (1)..(1291): Ortholog of  Ceres SEQ ID NO 14316543 as cited in SEQ ID NO 57118
  misc_feature (1)..(1291): Ortholog of  Ceres SEQ ID NO 12616285 as cited in SEQ ID NO 63483
acatcttaaaaagtaaaaacacattcatctatccaacaaaaaaaaaaaaaaaaggagaaatggaaggaatcgatcatagaatggtgagtgtcaatggcataactatgcacattgccgagaaaggtcccaaagaaggacctgtggtgcttctcctccatggattccctgatctctggtacacgtggcgtcaccagattagtgggttatcatctctaggttaccgcgctgtagctccagacctccgaggctacggagactctgattcgccagagtctttctccgagtacacgtgtcttaacgtcgttggggacctcgtagctcttctggacagtgttgctggaaatcaagagaaggtgtttctggtcggtcatgattggggagccattatcggatggtttctctgtttgtttcgacctgaaaagattaacggctttgtgtgtttgagtgtgccgtatagatcaagaaaccctaaagtcaagcccgttcaagggttcaaggctgtatttggagatgattactacatttgtagatttcaggaaccggggaagattgaaggagagattgcaagtgcagatccaagaatatttctgaggaacctcttcacagggaggacactcggtccgccgattttacctaaggataatccctttggggaaaaacctaaccctaatagcgaaaacattgaattgcctgaatggttttctaagaaagatctcgatttctatgtctccaaattcgagaaggcaggatttaccggtggattgaactactacagagccatggatctgaattgggagctcactgcaccatggaccggagctaagattcaagttccagtgaagttcatgacaggtgacttcgacatggtttacaccacaccagggatgaaagagtacattcacggtggtggatttgctgcagatgttccaactcttcaagagatagtggtgattgaagatgctggtcacttcgttaaccaagagaaacctcaagaggtcactgctcacatcaatgacttcttcaccaagcttcgggacaacaacaaaagcttttagagttctcgtttggttctattatgttggctctcaaaacaagttggttcttgcatgtgttgtttcgacaagattttgaataagacttggcattatgaagctcaacgtgtgtaggaacaatcgattctggcgaaaatagttagaaggctggattgaagatttcaaaagaaaaccaattttttttatagatttcacaatgattttataagcaaactaaatgaaccagaaataaccaagtg

SEQ ID NO: 27364 - protein, 350 aa, Arabidopsis thaliana
  peptide (1)..(350): Ceres Seq. ID no. 12337913
ILKSKNTFIYPTKKKKKGEMEGIDHRMVSVNGITMHIAEKGPKEGPVVLLLHGFPDLWYTWRHQISGLSSLGYRAVAPDLRGYGDSDSPESFSEYTCLNVVGDLVALLDSVAGNQEKVFLVGHDWGAIIGWFLCLFRPEKINGFVCLSVPYRSRNPKVKPVQGFKAVFGDDYYICRFQEPGKIEGEIASADPRIFLRNLFTGRTLGPPILPKDNPFGEKPNPNSENIELPEWFSKKDLDFYVSKFEKAGFTGGLNYYRAMDLNWELTAPWTGAKIQVPVKFMTGDFDMVYTTPGMKEYIHGGGFAADVPTLQEIVVIEDAGHFVNQEKPQEVTAHINDFFTKLRDNNKSF

SEQ ID NO: 27365 - protein, 331 aa, Arabidopsis thaliana; identical to SEQ ID NO: 21476
  peptide (1)..(331): Ceres Seq. ID no. 12337914

SEQ ID NO: 27366 - protein, 324 aa, Arabidopsis thaliana; identical to SEQ ID NO: 21477
  peptide (1)..(324): Ceres Seq. ID no. 12337915

SEQ ID NO: 27367 - DNA, 978 bp, Arabidopsis thaliana
  misc_feature (1)..(978): Ceres Seq. ID no. 13488242
  misc_feature (1)..(978): Ortholog of  Ceres SEQ ID NO 14301423 as cited in SEQ ID NO 52204
  misc_feature (1)..(978): Ortholog of  Ceres SEQ ID NO 12621037 as cited in SEQ ID NO 66448
  misc_feature (1)..(978): Ortholog of  Ceres SEQ ID NO 12635639 as cited in SEQ ID NO 0
  misc_feature (1)..(978): Ortholog of  Ceres SEQ ID NO 14305144 as cited in SEQ ID NO 0
gatttcattttatttcttctccaaccattctcaatcctctctctccaatggcttccttatccttcgtttcctcttctcaccttacgctacgcactccttctattgccctacgcagcactggctcttctcctcgaacctccgtttcattctccgtcaaggctcaatccgtcgcgctttcacaggacgatttgaagaagctcgcggcggagaaagctgtggaggcaattaaacctgggatggttctagggctcggaaccggatccaccgcagctttcgctgttgatcagatcgggaaactactctcttccggtgaactctacgatattgtcggtatcccaacgtcgaaacgaacggaggaacaagcacggtcgttagggattcctcttgttgggttagatacacatccgagaatcgatctcgctattgacggagcagacgaggtagatccgaatcttgatttagtcaaaggtcgtggaggtgctcttctccgtgagaaaatggtggaagctgtggctgacaagtttattgttgtggctgatgataccaaactcgttacaggactcggtggaagtggattagctatgccggtggaagttgttcaattctgctggaactttaatttgattagattgcaagacctcttcaaggaatttggatgtgaatcaaagcttagagttgatggtgatggcaagccttatgtgactgataacagtaattacattattgatttgtattttaagactcctttgaaggatggattcgctgcggctaaagagattgggaagtttcaaggagtggtggagcatggtctgtttctcggaatggctacttctgtcattatcgctggaaagaatggcgttgaagttatgaccaagtgaggttaaaagttcaatctttctcttcttctttgattgacaaatttttctcctttgtaaaattatcaattgagtttttatgtgagatcatttcaatttcgtg

SEQ ID NO: 27368 - protein, 291 aa, Arabidopsis thaliana
  peptide (1)..(291): Ceres Seq. ID no. 13488243
FHFISSPTILNPLSPMASLSFVSSSHLTLRTPSIALRSTGSSPRTSVSFSVKAQSVALSQDDLKKLAAEKAVEAIKPGMVLGLGTGSTAAFAVDQIGKLLSSGELYDIVGIPTSKRTEEQARSLGIPLVGLDTHPRIDLAIDGADEVDPNLDLVKGRGGALLREKMVEAVADKFIVVADDTKLVTGLGGSGLAMPVEVVQFCWNFNLIRLQDLFKEFGCESKLRVDGDGKPYVTDNSNYIIDLYFKTPLKDGFAAAKEIGKFQGVVEHGLFLGMATSVIIAGKNGVEVMTK

SEQ ID NO: 27369 - protein, 276 aa, Arabidopsis thaliana
  peptide (1)..(276): Ceres Seq. ID no. 13488244
MASLSFVSSSHLTLRTPSIALRSTGSSPRTSVSFSVKAQSVALSQDDLKKLAAEKAVEAIKPGMVLGLGTGSTAAFAVDQIGKLLSSGELYDIVGIPTSKRTEEQARSLGIPLVGLDTHPRIDLAIDGADEVDPNLDLVKGRGGALLREKMVEAVADKFIVVADDTKLVTGLGGSGLAMPVEVVQFCWNFNLIRLQDLFKEFGCESKLRVDGDGKPYVTDNSNYIIDLYFKTPLKDGFAAAKEIGKFQGVVEHGLFLGMATSVIIAGKNGVEVMTK

SEQ ID NO: 27370 - protein, 213 aa, Arabidopsis thaliana
  peptide (1)..(213): Ceres Seq. ID no. 13488245
MVLGLGTGSTAAFAVDQIGKLLSSGELYDIVGIPTSKRTEEQARSLGIPLVGLDTHPRIDLAIDGADEVDPNLDLVKGRGGALLREKMVEAVADKFIVVADDTKLVTGLGGSGLAMPVEVVQFCWNFNLIRLQDLFKEFGCESKLRVDGDGKPYVTDNSNYIIDLYFKTPLKDGFAAAKEIGKFQGVVEHGLFLGMATSVIIAGKNGVEVMTK

SEQ ID NO: 27371 - DNA, 1216 bp, Arabidopsis thaliana
  misc_feature (1)..(1216): Ceres Seq. ID no. 12332484
  misc_feature (1)..(1216): Ortholog of  Ceres SEQ ID NO 13599444 as cited in SEQ ID NO 517
  misc_feature (1)..(1216): Ortholog of  Ceres SEQ ID NO 15169431 as cited in SEQ ID NO 60449
  misc_feature (1)..(1216): Ortholog of  Ceres SEQ ID NO 12615444 as cited in SEQ ID NO 62593
aaaaatcctgatttctgagctttaaaccctaacccctctcttctctcttctccacgccatttccagaattttcagctaatttgcagattatctttgtctctttttcgtcgatccaagttttccttgggtgttcgtgaaaagatgaattttaagaatgtcaaagttcccaaaggtcctggtggtggtgttatagctgcggtggttattggggggctcagtctttacggtgctacgcacactctctacaatgtcgatggaggtcatcgagccattgtctttaaccggcttgttggtatcaaagacaaggtctaccctgagggtactcaccttatgattccatggttcgaaaggccaatcatctatgacgttcgtgcaaagccttatctagttgagagcacatctgggagccgtgatctccagatggttaagattgggcttcgggttctcacccgtcctatggctgaccaattaccagaggtataccggtcccttggtgagaattaccgcgagagagtcttgccttctatcatccacgagaccttgaaagctgtggttgctcagtacaacgcaagccaacttattactcagagagagtcggtgagtagagaaatcaggaaaatcctaactctaagagccgcaaacttccacattgcactggatgatgtgtccatcacaggcttgacattcggaaaggagttcacggcagccatagaaggaaagcaggtcgctgctcaagaggccgaacgggctaagttcattgtcgagaaagctgaacaggacaagagaagtgctgttatccgcgccgagggagaagccaagagtgctcagctcattggtcaagcaatcgcaaacaaccaagcgttcttaacactgaggaagatcgaagcagctagagagatcgcacagaccatctctaggtcggcgaacaaggtttacttgagctctaacgatctgttgcttaacctacaggctatggaccttgatgtgaagccgaagaagtagagaatgatatgattaaaccacaccagagctcttcttccataatcgtattttcaattcacggattcttagaccaaaagctatgagttctatcttgtgaatttcagacactatcgtgcgtttgtagtctttcttttgtgagatcaagaagaaaagaaaagatttatgtttttacaagttgtttacatttggttataatgttaataatgatgttcac

SEQ ID NO: 27372 - protein, 286 aa, Arabidopsis thaliana; identical to SEQ ID NO: 27300
  peptide (1)..(286): Ceres Seq. ID no. 12332485

SEQ ID NO: 27373 - protein, 223 aa, Arabidopsis thaliana; identical to SEQ ID NO: 27301
  peptide (1)..(223): Ceres Seq. ID no. 12332486

SEQ ID NO: 27374 - protein, 193 aa, Arabidopsis thaliana; identical to SEQ ID NO: 27302
  peptide (1)..(193): Ceres Seq. ID no. 12332487

SEQ ID NO: 27375 - DNA, 1884 bp, Arabidopsis thaliana
  misc_feature (1)..(1884): Ceres Seq. ID no. 12332488
  misc_feature (1)..(1884): Ortholog of  Ceres SEQ ID NO 14314585 as cited in SEQ ID NO 59345
gtaaataaactgagaaaaagcctccgtctcctcctctctctctattcatcagcctcaacctctctttcgtcgtcgactcagtttccgatttagggttacccaatcttcgccatgtatcgcacggcagcttcacgagccagggctcttaagggagttcttactcgtagtttgagaccagcgcgttatgctagttctagtgctgttgcggagacgagttcgtcaacgccggcttacttgagctggttgagtggtgggtctcgtgctgcgcttacttcattggatatgcctctacaaggtgtttctcttcctccgccgcttgctgataaagtcgagccgagcaaacttcagatcactactcttccaaatggtcttaagatagcctcagagacgactccgaatccggcagcttcgattggtttatatgttgattgcggttctatttatgaggcgccttatttccatggagctacacatttgcttgaaagaatggctttcaagagcacgttgaacagaactcattttcgtcttgtgagggaaattgaggctattggaggcaacacatccgcttctgcgtctcgagagcaaatgagttacactattgatgctcttaagacctatgtccctgaaatggttgaagttcttattgacagtgttagaaaccctgctttcttggactgggaagtgaatgaagagctacggaagatgaaggtagagatagcggaacttgcaaagaaccctatgggtttcctcttggaggccattcattctgctggttactctggtccattggcaagtcctctgtacgcaccggagtctgctttagatagattgaatggggagctcttggaagagtttatgactgagaatttcactgctgcacggatggtattggcggcaagtggagtagaacatgaggaacttttaaaagttgctgagccattaacttctgaccttcctaatgtaccaccccaattggctccaaaatctcagtatgtcggtggagattttcgccaacatactggtggagaggctacacactttgcggttgctttcgaggtgcctggctggaataacgagaaagaagcagtcaccgccactgttctccagatgcttatgggaggaggtggctcattctctgcgggaggtcctggaaaaggaatgcactcgtggctttatcgccgtgttctaaacgaatatcaggaggttcagtcatgcactgcattcactagcatctttaacgacaccgggttgtttggaatctatggttgctcgagtcctcaattcgctgcaaaagcaattgaattagcagctaaagaactcaaagatgttgcaggaggaaaagttaaccaggcacatcttgatcgtgccaaggcagccacaaaatctgcagttctgatgaatttggaatctcggatgattgcagcagaagacattggtagacagatacttacatacggagagaggaaaccagttgatcaattcttgaagtcagtagaccaactaaccttgaaagacattgcagacttcaccagcaaggttatttcaaagcctttgacaatgggttcctttggagatgtgttggctgttccgagctatgacacaataagcagcaaatttcgttgaagcaaaacaaacaatttgccaaatcaacaatattttgggacttgtaaaataaagaagatcttggggagaagaagacccaaccaattttaattttaattttttttttacaattacagtttcgtatttttatgaaatggattttgtttccatcgacagatataaatgactggattttgtccggtttgtctctccaattttcaggagtatttgtattccaataaataatcttttactacgtgtaatgcaaacaacttcagtggt

SEQ ID NO: 27376 - protein, 503 aa, Arabidopsis thaliana
  peptide (1)..(503): Ceres Seq. ID no. 12332489
MYRTAASRARALKGVLTRSLRPARYASSSAVAETSSSTPAYLSWLSGGSRAALTSLDMPLQGVSLPPPLADKVEPSKLQITTLPNGLKIASETTPNPAASIGLYVDCGSIYEAPYFHGATHLLERMAFKSTLNRTHFRLVREIEAIGGNTSASASREQMSYTIDALKTYVPEMVEVLIDSVRNPAFLDWEVNEELRKMKVEIAELAKNPMGFLLEAIHSAGYSGPLASPLYAPESALDRLNGELLEEFMTENFTAARMVLAASGVEHEELLKVAEPLTSDLPNVPPQLAPKSQYVGGDFRQHTGGEATHFAVAFEVPGWNNEKEAVTATVLQMLMGGGGSFSAGGPGKGMHSWLYRRVLNEYQEVQSCTAFTSIFNDTGLFGIYGCSSPQFAAKAIELAAKELKDVAGGKVNQAHLDRAKAATKSAVLMNLESRMIAAEDIGRQILTYGERKPVDQFLKSVDQLTLKDIADFTSKVISKPLTMGSFGDVLAVPSYDTISSKFR

SEQ ID NO: 27377 - protein, 446 aa, Arabidopsis thaliana
  peptide (1)..(446): Ceres Seq. ID no. 12332490
MPLQGVSLPPPLADKVEPSKLQITTLPNGLKIASETTPNPAASIGLYVDCGSIYEAPYFHGATHLLERMAFKSTLNRTHFRLVREIEAIGGNTSASASREQMSYTIDALKTYVPEMVEVLIDSVRNPAFLDWEVNEELRKMKVEIAELAKNPMGFLLEAIHSAGYSGPLASPLYAPESALDRLNGELLEEFMTENFTAARMVLAASGVEHEELLKVAEPLTSDLPNVPPQLAPKSQYVGGDFRQHTGGEATHFAVAFEVPGWNNEKEAVTATVLQMLMGGGGSFSAGGPGKGMHSWLYRRVLNEYQEVQSCTAFTSIFNDTGLFGIYGCSSPQFAAKAIELAAKELKDVAGGKVNQAHLDRAKAATKSAVLMNLESRMIAAEDIGRQILTYGERKPVDQFLKSVDQLTLKDIADFTSKVISKPLTMGSFGDVLAVPSYDTISSKFR

SEQ ID NO: 27378 - protein, 378 aa, Arabidopsis thaliana
  peptide (1)..(378): Ceres Seq. ID no. 12332491
MAFKSTLNRTHFRLVREIEAIGGNTSASASREQMSYTIDALKTYVPEMVEVLIDSVRNPAFLDWEVNEELRKMKVEIAELAKNPMGFLLEAIHSAGYSGPLASPLYAPESALDRLNGELLEEFMTENFTAARMVLAASGVEHEELLKVAEPLTSDLPNVPPQLAPKSQYVGGDFRQHTGGEATHFAVAFEVPGWNNEKEAVTATVLQMLMGGGGSFSAGGPGKGMHSWLYRRVLNEYQEVQSCTAFTSIFNDTGLFGIYGCSSPQFAAKAIELAAKELKDVAGGKVNQAHLDRAKAATKSAVLMNLESRMIAAEDIGRQILTYGERKPVDQFLKSVDQLTLKDIADFTSKVISKPLTMGSFGDVLAVPSYDTISSKFR

SEQ ID NO: 27379 - DNA, 1156 bp, Arabidopsis thaliana
  misc_feature (1)..(1156): Ceres Seq. ID no. 12396270
  misc_feature (1)..(1156): Ortholog of  Ceres SEQ ID NO 14304983 as cited in SEQ ID NO 53862
  misc_feature (1)..(1156): Ortholog of  Ceres SEQ ID NO 14310483 as cited in SEQ ID NO 58376
  misc_feature (1)..(1156): Ortholog of  Ceres SEQ ID NO 13597528 as cited in SEQ ID NO 64802
ataacatatatttcttcttcgtttcattcataatcgtcttataaccacagattctaaaacatgggagaagaagtaaaaccagaggcaaaggaggcagcctctgctccacaggccgtccccgctgaggaggaggagaagaagaaagatgtagcggaggagaagaaagtggcggctgaggaggagaaaccaaaggaggaagaggagccgcaaccaccaccaccgcctccacccttcatactctacgtcgacttgcattgtgttggatgcgctaagaagattgaaagatctattctaaaaattagaggtgtggaagaagtggtgatggatatgaatgagaaccaagtgacgataaagggagtgttggatccgcaagcagtgtgcaacaaaatcaagaagaagactaaaagaatggccaaagtcctctcgccgcttccggcagctgagggagagcctctgccaccaatcataacctctcaggtctccggcggcctcaccaccgtcgagctcagcgttaacatgcactgccaagcttgtgctgaccagctcaagaagaagattctcaaaatgagaggggtccaaacaactgtgacagagcacaccacgggaaaagtaatagtgactgggacaatggacgctgagaagcttgtggattacgtctaccgtcggaccaaaaagcaagcccgaatcgtaccccaacctgacccggaacctgaagcccccgcggccgcgcaggaagaaaagaaggaggagagcggtgaaggcaatgaaaaaccaccagagaccggagaggaaaaggaagaagagaagaagaaggagggagaggaaaatggagaggaaggtggtggagaagaggcggcggctacggaggaagagagacgagacaatgaaatgacggctatggcccaagaagaagggatgaagaggatgatgtattactatcaaccttcatacgtcatagagaggattcctccgccgcagctttttagcgacgagaaccctaatgcttgttgcatttcttaattaaatttggtttcgtatatgtctatggaaaatataattagaggaattaataattaggtaagaaaagaaagaaaataggtaaagaatttgtaaactatttattttttaatataatgtacgtgtgtttggtatctct

SEQ ID NO: 27380 - protein, 319 aa, Arabidopsis thaliana
  peptide (1)..(319): Ceres Seq. ID no. 12396271
MGEEVKPEAKEAASAPQAVPAEEEEKKKDVAEEKKVAAEEEKPKEEEEPQPPPPPPPFILYVDLHCVGCAKKIERSILKIRGVEEVVMDMNENQVTIKGVLDPQAVCNKIKKKTKRMAKVLSPLPAAEGEPLPPIITSQVSGGLTTVELSVNMHCQACADQLKKKILKMRGVQTTVTEHTTGKVIVTGTMDAEKLVDYVYRRTKKQARIVPQPDPEPEAPAAAQEEKKEESGEGNEKPPETGEEKEEEKKKEGEENGEEGGGEEAAATEEERRDNEMTAMAQEEGMKRMMYYYQPSYVIERIPPPQLFSDENPNACCIS

SEQ ID NO: 27381 - protein, 232 aa, Arabidopsis thaliana
  peptide (1)..(232): Ceres Seq. ID no. 12396272
MDMNENQVTIKGVLDPQAVCNKIKKKTKRMAKVLSPLPAAEGEPLPPIITSQVSGGLTTVELSVNMHCQACADQLKKKILKMRGVQTTVTEHTTGKVIVTGTMDAEKLVDYVYRRTKKQARIVPQPDPEPEAPAAAQEEKKEESGEGNEKPPETGEEKEEEKKKEGEENGEEGGGEEAAATEEERRDNEMTAMAQEEGMKRMMYYYQPSYVIERIPPPQLFSDENPNACCIS

SEQ ID NO: 27382 - protein, 230 aa, Arabidopsis thaliana
  peptide (1)..(230): Ceres Seq. ID no. 12396273
MNENQVTIKGVLDPQAVCNKIKKKTKRMAKVLSPLPAAEGEPLPPIITSQVSGGLTTVELSVNMHCQACADQLKKKILKMRGVQTTVTEHTTGKVIVTGTMDAEKLVDYVYRRTKKQARIVPQPDPEPEAPAAAQEEKKEESGEGNEKPPETGEEKEEEKKKEGEENGEEGGGEEAAATEEERRDNEMTAMAQEEGMKRMMYYYQPSYVIERIPPPQLFSDENPNACCIS

SEQ ID NO: 27383 - DNA, 1089 bp, Arabidopsis thaliana
  misc_feature (1)..(1089): Ceres Seq. ID no. 12327068
  misc_feature (1)..(1089): Ortholog of  Ceres SEQ ID NO 15172862 as cited in SEQ ID NO 51943
  misc_feature (1)..(1089): Ortholog of  Ceres SEQ ID NO 12784852 as cited in SEQ ID NO 61543
actcttcgactcagccgtcctttcgcagaaaccatttggagttggagctttggacgacgacaatggccccgaagaaaggagtgaaggtagctgctaagaagaagaccgcggagaaagtttcaaaccctctattcgagaggaggcctaagcaattcggtattggtggagctttacctcctaagaaggatctctctcgctacatcaaatggcccaaatccatccgtcttcaaaggcaaaagaggatcctgaagcagaggttgaaggtccctccagctcttaaccaattcaccaagactcttgacaagaatcttgctaccagcctcttcaaggtccttctgaagtacaggccagaagacaaagctgccaagaaggagcgtcttgtaaagaaggcccaagctgaagctgagggaaagccttctgagtctaagaagcccattgtagtcaaatacggcctcaaccatgtgacctacctcattgagcagaacaaggcccaacttgttgttattgctcatgatgtcgacccaattgagttggttgtctggttgcctgctctgtgcaggaagatggaagtcccgtactgcattgtcaagggcaaatctcgtcttggagcggttgttcaccagaagactgcttcttgcttgtgtttgaccactgtcaagaacgaggacaagctagagttcagcaaaatcctggaagctatcaaggccaacttcaatgacaagtacgaggagtacaggaagaaatggggaggaggcataatgggatctaagtctcaggcaaagaccaaggcaaaggaaagagttattgcaaaggaggctgcccaaaggatgaattaagaggctagcttcttttgtttgtggtttgctcggattcgtaaaacttaatagagctttttgtttagctggttcttgaagtacctcttttttagttgaaccctttattatggatgttttgcaatttcttgggacagtttcaatgttattcaagctgctggatcctctttggtctctcaaccacttaaaacttgacagtgtgaaattttagccaaatgcttattgcattctggaaagagttataagtttaattccc

SEQ ID NO: 27384 - protein, 277 aa, Arabidopsis thaliana
  peptide (1)..(277): Ceres Seq. ID no. 12327069
SSTQPSFRRNHLELELWTTTMAPKKGVKVAAKKKTAEKVSNPLFERRPKQFGIGGALPPKKDLSRYIKWPKSIRLQRQKRILKQRLKVPPALNQFTKTLDKNLATSLFKVLLKYRPEDKAAKKERLVKKAQAEAEGKPSESKKPIVVKYGLNHVTYLIEQNKAQLVVIAHDVDPIELVVWLPALCRKMEVPYCIVKGKSRLGAVVHQKTASCLCLTTVKNEDKLEFSKILEAIKANFNDKYEEYRKKWGGGIMGSKSQAKTKAKERVIAKEAAQRMN

SEQ ID NO: 27385 - protein, 257 aa, Arabidopsis thaliana
  peptide (1)..(257): Ceres Seq. ID no. 12327070
MAPKKGVKVAAKKKTAEKVSNPLFERRPKQFGIGGALPPKKDLSRYIKWPKSIRLQRQKRILKQRLKVPPALNQFTKTLDKNLATSLFKVLLKYRPEDKAAKKERLVKKAQAEAEGKPSESKKPIVVKYGLNHVTYLIEQNKAQLVVIAHDVDPIELVVWLPALCRKMEVPYCIVKGKSRLGAVVHQKTASCLCLTTVKNEDKLEFSKILEAIKANFNDKYEEYRKKWGGGIMGSKSQAKTKAKERVIAKEAAQRMN

SEQ ID NO: 27386 - DNA, 914 bp, Arabidopsis thaliana
  misc_feature (1)..(914): Ceres Seq. ID no. 12343471
  misc_feature (1)..(914): Ortholog of  Ceres SEQ ID NO 14302764 as cited in SEQ ID NO 67753
acttcattagtctccaagaagaaaacatctctcactctctaaaatacacactctcatcaaaaaccttctcttcggttcagaagcattcaagaatccattatgagctcatctgattccgttaataacggcgttaactcacggatgtacttccgtaacccgagtttcagcaacgttatcttaaacgataactggagcgacttgccgttaagtgtcgacgattctcaagacatggctatttacaacactctccgtgatgccgttagctccggctggacaccctccgttcctcccgttacctctccggcggaggaaaataagcctccggcgacgaaggcgagtggctcacacgcgccgaggcagaaggggatgcagtacagaggagtgaggaggaggccgtgggggaaattcgcggcggagattagggatccgaagaagaacggagctagggtttggctcgggacttacgagacgccggaggacgcggcggtggcgtacgaccgagcggcgtttcagctcagaggatcgaaagctaagctgaattttccgcatttgattggttcttgtaagtatgagccggttaggattaggcctcgccgtcgctcgccggaaccgtcagtctccgatcagttaacgtcggagcagaagagggaaagccacgtggatgacggcgagtctagtttggttgtaccggagttggatttcacggtggatcagttttacttcgatggtagtttattaatggaccaatcagaatgttcttattctgataatcggatataattagttttaagattaagcaaaatttgtccaacgagttttgctgtatgaaatatctatcgatgactcaacaggttttgatcatgatcatatgtaatgtgatggaaattaaatattgacgtttgtttttttcttcc

SEQ ID NO: 27387 - protein, 226 aa, Arabidopsis thaliana
  peptide (1)..(226): Ceres Seq. ID no. 12343472
MSSSDSVNNGVNSRMYFRNPSFSNVILNDNWSDLPLSVDDSQDMAIYNTLRDAVSSGWTPSVPPVTSPAEENKPPATKASGSHAPRQKGMQYRGVRRRPWGKFAAEIRDPKKNGARVWLGTYETPEDAAVAYDRAAFQLRGSKAKLNFPHLIGSCKYEPVRIRPRRRSPEPSVSDQLTSEQKRESHVDDGESSLVVPELDFTVDQFYFDGSLLMDQSECSYSDNRI

SEQ ID NO: 27388 - protein, 212 aa, Arabidopsis thaliana
  peptide (1)..(212): Ceres Seq. ID no. 12343473
MYFRNPSFSNVILNDNWSDLPLSVDDSQDMAIYNTLRDAVSSGWTPSVPPVTSPAEENKPPATKASGSHAPRQKGMQYRGVRRRPWGKFAAEIRDPKKNGARVWLGTYETPEDAAVAYDRAAFQLRGSKAKLNFPHLIGSCKYEPVRIRPRRRSPEPSVSDQLTSEQKRESHVDDGESSLVVPELDFTVDQFYFDGSLLMDQSECSYSDNRI

SEQ ID NO: 27389 - protein, 183 aa, Arabidopsis thaliana
  peptide (1)..(183): Ceres Seq. ID no. 12343474
MAIYNTLRDAVSSGWTPSVPPVTSPAEENKPPATKASGSHAPRQKGMQYRGVRRRPWGKFAAEIRDPKKNGARVWLGTYETPEDAAVAYDRAAFQLRGSKAKLNFPHLIGSCKYEPVRIRPRRRSPEPSVSDQLTSEQKRESHVDDGESSLVVPELDFTVDQFYFDGSLLMDQSECSYSDNRI

SEQ ID NO: 27390 - DNA, 1767 bp, Arabidopsis thaliana
  misc_feature (1)..(1767): Ceres Seq. ID no. 12326034
  misc_feature (1)..(1767): Ortholog of  Ceres SEQ ID NO 12623695 as cited in SEQ ID NO 61286
atatttatcacatttttcttcaccggctgatttgtttgcccggagattatctctccgtcgtaattaagatctatacacacagaaacacaaagttaaagaatcctcatggaaggagtaaactcttcaagctctatatccgacctagacgaattggctcggttacttgaccggccgagggtaaatattgaacggaaaagatcgtttgacgagaggtccttcagcgaaatgggaatcttcgacaacgttaattctcccggaggatgggaaactccggtgtcttcggctagaaactcgtttgagccacatcctatggttgcagaggcttgggatgctttgagacgatcattggtttactttcgtggccaaccggttggtactatcgctgcttatgaccatgctactgaggaagtcttgaattatgatcaggttttcgtaagagactttgttccaagtgcactagcttttctcatgaacggagaaccagacatagttaaaaactttctcctcaagacaattcaaatccaaggaagggagaaaagaatagaccgattcaagctcggtgaaggcgcaatgccggctagtttcaaggtcattcacgacccgatcaaggaaaccgactctatcaatgctgactttggcgagagcgcgattggaagagtggctccggtggactcaggtttctggtggatcattctccttagagcctacacaaaatccaccggagacacttctctagctgaaacatctgaatgtcaaaagggaatgagactcattctctctctttgtctctccgaaggtttcgatactttccctaccttactttgtgctgatggctgctccatgatcgatcgaagaatgggggtttacgggtatccgatagagatccaagctctcttcttcatggctcttagatcagcaatgtcgatgctaaagcacgacgcggaaggtaaagagttcatggagaggatagtgaagcggctacacgcgcttagcttccacatgagaagttatttctggctcgattttcagcagctcaacgacatttaccgttacaaaacagaagagtactcgcacacagcggttaacaagttcaacgttatccctgactcgatccctgagtgggtcttcgatttcatgcctctacgtggcggttactttataggaaacgttagtccagctcgtatggattttaggtggttcgctctaggcaactgcgtagcgatccttgcttctttagccacgcctgagcagtcggcttcaatcatggacttgatagaggaacggtgggaggagttggtcggagcgatgccggttaaaatttgtcatccggcaatcgagagccatgagtggaggattgttaccggttgcgaccctaagaatactcgttggagttaccataacggtggttcttggccagtattgttgtggctattaacagctgcatgcataaagacgggacggccacaaatagcaagacgggccatagacctggcggaagcacggctgttgaaggatggttggccggagtactacgacgggaaatcaggaaggttcatcggaaaacaggcgaggaagtttcagacatggtctatcgccggttacttggtcgccaagatgttgttggaagatccttctcatcttggaatgatctcattggaagaagacaaacagactaaacctgtcattaagagatcttattcttggacttgataatttgttgtcaattcttttgagaagagcaggctaaaatttgatctaaattttgtt

SEQ ID NO: 27391 - protein, 534 aa, Arabidopsis thaliana
  peptide (1)..(534): Ceres Seq. ID no. 12326035
MEGVNSSSSISDLDELARLLDRPRVNIERKRSFDERSFSEMGIFDNVNSPGGWETPVSSARNSFEPHPMVAEAWDALRRSLVYFRGQPVGTIAAYDHATEEVLNYDQVFVRDFVPSALAFLMNGEPDIVKNFLLKTIQIQGREKRIDRFKLGEGAMPASFKVIHDPIKETDSINADFGESAIGRVAPVDSGFWWIILLRAYTKSTGDTSLAETSECQKGMRLILSLCLSEGFDTFPTLLCADGCSMIDRRMGVYGYPIEIQALFFMALRSAMSMLKHDAEGKEFMERIVKRLHALSFHMRSYFWLDFQQLNDIYRYKTEEYSHTAVNKFNVIPDSIPEWVFDFMPLRGGYFIGNVSPARMDFRWFALGNCVAILASLATPEQSASIMDLIEERWEELVGAMPVKICHPAIESHEWRIVTGCDPKNTRWSYHNGGSWPVLLWLLTAACIKTGRPQIARRAIDLAEARLLKDGWPEYYDGKSGRFIGKQARKFQTWSIAGYLVAKMLLEDPSHLGMISLEEDKQTKPVIKRSYSWT

SEQ ID NO: 27392 - protein, 494 aa, Arabidopsis thaliana
  peptide (1)..(494): Ceres Seq. ID no. 12326036
MGIFDNVNSPGGWETPVSSARNSFEPHPMVAEAWDALRRSLVYFRGQPVGTIAAYDHATEEVLNYDQVFVRDFVPSALAFLMNGEPDIVKNFLLKTIQIQGREKRIDRFKLGEGAMPASFKVIHDPIKETDSINADFGESAIGRVAPVDSGFWWIILLRAYTKSTGDTSLAETSECQKGMRLILSLCLSEGFDTFPTLLCADGCSMIDRRMGVYGYPIEIQALFFMALRSAMSMLKHDAEGKEFMERIVKRLHALSFHMRSYFWLDFQQLNDIYRYKTEEYSHTAVNKFNVIPDSIPEWVFDFMPLRGGYFIGNVSPARMDFRWFALGNCVAILASLATPEQSASIMDLIEERWEELVGAMPVKICHPAIESHEWRIVTGCDPKNTRWSYHNGGSWPVLLWLLTAACIKTGRPQIARRAIDLAEARLLKDGWPEYYDGKSGRFIGKQARKFQTWSIAGYLVAKMLLEDPSHLGMISLEEDKQTKPVIKRSYSWT

SEQ ID NO: 27393 - protein, 466 aa, Arabidopsis thaliana
  peptide (1)..(466): Ceres Seq. ID no. 12326037
MVAEAWDALRRSLVYFRGQPVGTIAAYDHATEEVLNYDQVFVRDFVPSALAFLMNGEPDIVKNFLLKTIQIQGREKRIDRFKLGEGAMPASFKVIHDPIKETDSINADFGESAIGRVAPVDSGFWWIILLRAYTKSTGDTSLAETSECQKGMRLILSLCLSEGFDTFPTLLCADGCSMIDRRMGVYGYPIEIQALFFMALRSAMSMLKHDAEGKEFMERIVKRLHALSFHMRSYFWLDFQQLNDIYRYKTEEYSHTAVNKFNVIPDSIPEWVFDFMPLRGGYFIGNVSPARMDFRWFALGNCVAILASLATPEQSASIMDLIEERWEELVGAMPVKICHPAIESHEWRIVTGCDPKNTRWSYHNGGSWPVLLWLLTAACIKTGRPQIARRAIDLAEARLLKDGWPEYYDGKSGRFIGKQARKFQTWSIAGYLVAKMLLEDPSHLGMISLEEDKQTKPVIKRSYSWT

SEQ ID NO: 27394 - DNA, 1024 bp, Arabidopsis thaliana
  misc_feature (1)..(1024): Ceres Seq. ID no. 12338773
  misc_feature (1)..(1024): Ortholog of  Ceres SEQ ID NO 14305363 as cited in SEQ ID NO 1276
  misc_feature (1)..(1024): Ortholog of  Ceres SEQ ID NO 14314743 as cited in SEQ ID NO 56854
accccaccaaactttactttctattcagacaagacatttcgatagcttatttctatggtctgatcacacgatagtgtattctgatatcatcactctaccaaagagataccaaattatggaaggagaatctatcacttccggtgaagataaaccggagatccaatctccaattccaccaaatcagatcttcatactctctggacaaagcaatatggccggacgcggcggcgtcgtcaaagatcaccaccacaatcgctgggtctgggataaaatcctcccaccggaatgcgcaccaaactcatcgatcctccgcctgtccgcagatctccggtgggaagaagcacacgagccactacacgttgacattgacacaggtaaagtgtgtggagtaggtccaggaatggcgttcgctaacgcggtgaagaatcgcgtggaaacagattcggctgtgatcgggttggtgccgtgcgcttccggtggaacggcgataaaagagtgggagcgtggaagccacttgtacgagaggatggtcaagagaacggaggagagtaggaaatgcggcggagagatcaaggcggtgttgtggtatcaaggagagagtgacgtgttggacatccatgacgccgagagctacgggaacaatatggatcgtttgattaagaacctccgtcatgatctcaaccttccttctcttcccattattcaggtggcaatagcatcgggaggaggatacatagataaggtgagagaagcacagttgggactgaaactgtcgaatgtggtctgtgtagatgctaagggattgccgctaaagtccgacaatcttcacttaaccaccgaggctcaagtccagcttggtctctccttagcacaagcttacctttccaacttctgctagacaatcaagtaagttcgtgataaggttcatgaatctttctgaatgtatgtggtggactagttatatggatatcacaaaactttgtaataatggattggtaaaacattgatgttcatagtgaagaac

SEQ ID NO: 27395 - protein, 298 aa, Arabidopsis thaliana
  peptide (1)..(298): Ceres Seq. ID no. 12338774
PHQTLLSIQTRHFDSLFLWSDHTIVYSDIITLPKRYQIMEGESITSGEDKPEIQSPIPPNQIFILSGQSNMAGRGGVVKDHHHNRWVWDKILPPECAPNSSILRLSADLRWEEAHEPLHVDIDTGKVCGVGPGMAFANAVKNRVETDSAVIGLVPCASGGTAIKEWERGSHLYERMVKRTEESRKCGGEIKAVLWYQGESDVLDIHDAESYGNNMDRLIKNLRHDLNLPSLPIIQVAIASGGGYIDKVREAQLGLKLSNVVCVDAKGLPLKSDNLHLTTEAQVQLGLSLAQAYLSNFC

SEQ ID NO: 27396 - protein, 260 aa, Arabidopsis thaliana
  peptide (1)..(260): Ceres Seq. ID no. 12338775
MEGESITSGEDKPEIQSPIPPNQIFILSGQSNMAGRGGVVKDHHHNRWVWDKILPPECAPNSSILRLSADLRWEEAHEPLHVDIDTGKVCGVGPGMAFANAVKNRVETDSAVIGLVPCASGGTAIKEWERGSHLYERMVKRTEESRKCGGEIKAVLWYQGESDVLDIHDAESYGNNMDRLIKNLRHDLNLPSLPIIQVAIASGGGYIDKVREAQLGLKLSNVVCVDAKGLPLKSDNLHLTTEAQVQLGLSLAQAYLSNFC

SEQ ID NO: 27397 - protein, 228 aa, Arabidopsis thaliana
  peptide (1)..(228): Ceres Seq. ID no. 12338777
MAGRGGVVKDHHHNRWVWDKILPPECAPNSSILRLSADLRWEEAHEPLHVDIDTGKVCGVGPGMAFANAVKNRVETDSAVIGLVPCASGGTAIKEWERGSHLYERMVKRTEESRKCGGEIKAVLWYQGESDVLDIHDAESYGNNMDRLIKNLRHDLNLPSLPIIQVAIASGGGYIDKVREAQLGLKLSNVVCVDAKGLPLKSDNLHLTTEAQVQLGLSLAQAYLSNFC

SEQ ID NO: 27398 - DNA, 2256 bp, Arabidopsis thaliana; identical to SEQ ID NO: 22038
  misc_feature (1)..(2256): Ceres Seq. ID no. 13646318
  misc_feature (1)..(2256): Ortholog of  Ceres SEQ ID NO 14303276 as cited in SEQ ID NO 1264
  misc_feature (1)..(2256): Ortholog of  Ceres SEQ ID NO 15170536 as cited in SEQ ID NO 52791
  misc_feature (1)..(2256): Ortholog of  Ceres SEQ ID NO 15171813 as cited in SEQ ID NO 57309
  misc_feature (1)..(2256): Ortholog of  Ceres SEQ ID NO 14314378 as cited in SEQ ID NO 57601
  misc_feature (1)..(2256): Ortholog of  Ceres SEQ ID NO 12465083 as cited in SEQ ID NO 68239

SEQ ID NO: 27399 - protein, 651 aa, Arabidopsis thaliana; identical to SEQ ID NO: 22039
  peptide (1)..(651): Ceres Seq. ID no. 13646319

SEQ ID NO: 27400 - protein, 588 aa, Arabidopsis thaliana; identical to SEQ ID NO: 22040
  peptide (1)..(588): Ceres Seq. ID no. 13646320

SEQ ID NO: 27401 - protein, 562 aa, Arabidopsis thaliana; identical to SEQ ID NO: 22041
  peptide (1)..(562): Ceres Seq. ID no. 13646321

SEQ ID NO: 27402 - DNA, 988 bp, Arabidopsis thaliana
  misc_feature (1)..(988): Ceres Seq. ID no. 13489274
  misc_feature (1)..(988): Ortholog of  Ceres SEQ ID NO 15169248 as cited in SEQ ID NO 55022
  misc_feature (1)..(988): Ortholog of  Ceres SEQ ID NO 14315042 as cited in SEQ ID NO 56959
  misc_feature (1)..(988): Ortholog of  Ceres SEQ ID NO 12608620 as cited in SEQ ID NO 60192
  misc_feature (1)..(988): Ortholog of  Ceres SEQ ID NO 15173077 as cited in SEQ ID NO 64566
  misc_feature (1)..(988): Ortholog of  Ceres SEQ ID NO 13662898 as cited in SEQ ID NO 66199
  misc_feature (1)..(988): Ortholog of  Ceres SEQ ID NO 13654314 as cited in SEQ ID NO 67914
attttctctcactttctctctcagcttacgaacaagaaaaaaagaagaatctttagccacctttgagatcaaaagatgaacatcgctcacactatcttcggcgttttcggaaatgcaactgctctgtttcttttcttggctccttcgataacattcaagagaatcatcaagaacaaatccactgaacaattctctggtatcccttatccaatgactctcctcaactgtctcctctctgcttggtatggacttccctttgtgtcaaaagacaacacacttgtgagcacaatcaatggcacaggagcagtgatcgaaacagtctacgtgttaatctttcttttctacgcaccaaagaaggagaaaattaagatctttggtatcttctcttgcgttttggctgtattcgcaacagtagctctcgtctctctctttgctcttcaaggaaacggtagaaaactcttttgtggtctcgcagctactgttttctccatcatcatgtacgcttctccactctccatcatgagattggtggtaaagacgaagagtgtagagtttatgccattctttttgtcactctttgtcttcctctgtggtacttcgtggttcgtctatggtctaatcggtcgtgacccttttgttgcaatcccaaatgggtttggatgtgcattagggacactgcaattgatactatacttcatctactgtggaaacaaaggagagaaatctgcagatgctcagaaagatgagaagtcagtggagatgaaagatgatgagaagaagcagaatgtggttaatggaaagcaagaccttcaagtttaaaagagcttttgaggatgatttggttatgtgatttcgtattaactctgcttaactagagttttccttttcgtttcgttggaatgtaaaaaaaatgatgctgaaaaatgtaacgtttcctagtttcgtactgatacactagtgattgatgaagaatgacgatgccttttgt

SEQ ID NO: 27403 - protein, 247 aa, Arabidopsis thaliana
  peptide (1)..(247): Ceres Seq. ID no. 13489275
MNIAHTIFGVFGNATALFLFLAPSITFKRIIKNKSTEQFSGIPYPMTLLNCLLSAWYGLPFVSKDNTLVSTINGTGAVIETVYVLIFLFYAPKKEKIKIFGIFSCVLAVFATVALVSLFALQGNGRKLFCGLAATVFSIIMYASPLSIMRLVVKTKSVEFMPFFLSLFVFLCGTSWFVYGLIGRDPFVAIPNGFGCALGTLQLILYFIYCGNKGEKSADAQKDEKSVEMKDDEKKQNVVNGKQDLQV

SEQ ID NO: 27404 - protein, 202 aa, Arabidopsis thaliana
  peptide (1)..(202): Ceres Seq. ID no. 13489276
MTLLNCLLSAWYGLPFVSKDNTLVSTINGTGAVIETVYVLIFLFYAPKKEKIKIFGIFSCVLAVFATVALVSLFALQGNGRKLFCGLAATVFSIIMYASPLSIMRLVVKTKSVEFMPFFLSLFVFLCGTSWFVYGLIGRDPFVAIPNGFGCALGTLQLILYFIYCGNKGEKSADAQKDEKSVEMKDDEKKQNVVNGKQDLQV

SEQ ID NO: 27405 - DNA, 1174 bp, Arabidopsis thaliana
  misc_feature (1)..(1174): Ceres Seq. ID no. 13489740
  misc_feature (1)..(1174): Ortholog of  Ceres SEQ ID NO 14314823 as cited in SEQ ID NO 52565
  misc_feature (1)..(1174): Ortholog of  Ceres SEQ ID NO 14307324 as cited in SEQ ID NO 54131
  misc_feature (1)..(1174): Ortholog of  Ceres SEQ ID NO 14303336 as cited in SEQ ID NO 54567
  misc_feature (1)..(1174): Ortholog of  Ceres SEQ ID NO 13594940 as cited in SEQ ID NO 55819
  misc_feature (1)..(1174): Ortholog of  Ceres SEQ ID NO 13599083 as cited in SEQ ID NO 0
aaataaaccacattagtcttttcagattttttgtacacttccttcatcccccacccatctctctctctctctctcatccttcctctttcttctttgcttgcccttttctttttattttattcttccaaaatcaaatagttccttctttgatctcattgggataactaaaagtttcaagaagagaaacatatcattgaagagagaacccacacaaaaaaaaatgtctgtagatttctcatctgagcgtgtttgctatgtccactgcagcttctgcaccacgattttagcggtaagtgtaccatacgcaagtttgttcacacttgtgacggtgagatgtggccattgtaccaatttgctatccctcaacattggagtttcacttcatcaaacctcagctcctcccattcaccaagatcttcagcctcatagacagcacacaacctctctggtgacaaggaaagattgtgcatcgtcttctaggagcaccaacaatttatcggaaaacattgatcgtgaggctcctagaatgcctcctattcgcccaccggagaaaagacaacgtgttccttcggcctacaacagattcatcaaggaggaaatccaaaggattaaggcttgcaatccagagattagccaccgtgaggcatttagcactgctgctaaaaattgggcacattttcctcacattcactttggattaaagctggatggcaacaagaaaggcaagcaattagaccagtcagttgcaggccaaaagtctaatggctattactaaagcctttatatatatacacacatatatacacttatacgtatatatatgtgtatagatatatatgcgtgtgtatgatttatgtttatctttgtacgtacgcattaatgaatgtgtaagcagagagctgatgatggaaagagatcaggcgaggaagaagaagatcatataacgttacatatatatacatgtatgtatatatgttcctttcttttttcttgcgtgtgcttcatctataacttcatttctagttttattctcctaataagtgaagtctataaatttgaacctaaaatgtttaggaagaatcttctttctgaagattgtaatataaatttcaactttactcattctgaaaaggtgtggtcacgactttatatatataatccctagttttatggt

SEQ ID NO: 27406 - protein, 184 aa, Arabidopsis thaliana
  peptide (1)..(184): Ceres Seq. ID no. 13489741
MSVDFSSERVCYVHCSFCTTILAVSVPYASLFTLVTVRCGHCTNLLSLNIGVSLHQTSAPPIHQDLQPHRQHTTSLVTRKDCASSSRSTNNLSENIDREAPRMPPIRPPEKRQRVPSAYNRFIKEEIQRIKACNPEISHREAFSTAAKNWAHFPHIHFGLKLDGNKKGKQLDQSVAGQKSNGYY

SEQ ID NO: 27407 - protein, 93 aa, Arabidopsis thaliana
  peptide (1)..(93): Ceres Seq. ID no. 13489742
MCKQRADDGKRSGEEEEDHITLHIYTCMYICSFLFSCVCFIYNFISSFILLISEVYKFEPKMFRKNLLSEDCNINFNFTHSEKVWSRLYIYNP

SEQ ID NO: 27408 - DNA, 1263 bp, Arabidopsis thaliana
  misc_feature (1)..(1263): Ceres Seq. ID no. 12331595
  misc_feature (1)..(1263): Ortholog of  Ceres SEQ ID NO 14307813 as cited in SEQ ID NO 54282
gagagaagcgacagagtgaggccatgcctgtgtccgtacattccgttatcgccacgaacctagccactacactatcatcgaattaccggaatgtttctcgccgtagaactatctccacctctgtgaattgttcggtggagattacggaggctgatcggtcggtgaaactgaagaacgggaacgattcactggagatatgcagagttctcaacgggatgtggcaaacgagcggaggatgggggaagattgatcgaaacgacgccgttgattcaatgcttcgttacgccgatgctggtctctctactttcgatatggctgatcactatggtcctgctgaagatctttacggtatttttatcaatagagttcgtcgagagcgtccaccggagtacttggagaagattaaaggtttgacaaaatgggtgcctcctccaataaagatgacaagtagctatgttcgtcagaacatcgatatatcgaggaagagaatggatgtggctgctcttgatatgcttcagtttcactggtgggattatgcgaatgacggctatcttgatgcactgaaacatctcacagacttgaaggaagaagggaaaatcaagactgttgctttgactaattttgatacagagagacttcagaaaatcttagagaatggaatccctgtcgttagcaatcaggtgcaacactccatcgtagacatgcgtcctcaacagagaatggctcagctttgcgagcttacaggggtcaaacttataacatatgggacagttatgggtggtctcttgtcagagaagtttcttgataccaatctaacaatcccttttgctggccctcgcttgaatactccatctctccaaaaatacaaaaggatggttgatgcatggggagggtggaatctatttcaaggtttacttcgaacaatgaagaccatatccacaaaacatggagtctctataccaacagtggctgtgagatatgtactagatcagcaaggagttggtggatcaatgattggagtgagactcgggttagcggaacacatacaagacgcaaatgctatattctcattggtattggatgaagaagatgttaatagcatacaagaggttaccaagaaaggtaaagatcttctccaagtgattggtgactgcggagacgaataccgacgtatatgatgtgtagctatgtactctatactgtatacaatatcatcaactcatgtaattacacttttatgtgtagaggaatcatttttacatt

SEQ ID NO: 27409 - protein, 391 aa, Arabidopsis thaliana
  peptide (1)..(391): Ceres Seq. ID no. 12331596
EKRQSEAMPVSVHSVIATNLATTLSSNYRNVSRRRTISTSVNCSVEITEADRSVKLKNGNDSLEICRVLNGMWQTSGGWGKIDRNDAVDSMLRYADAGLSTFDMADHYGPAEDLYGIFINRVRRERPPEYLEKIKGLTKWVPPPIKMTSSYVRQNIDISRKRMDVAALDMLQFHWWDYANDGYLDALKHLTDLKEEGKIKTVALTNFDTERLQKILENGIPVVSNQVQHSIVDMRPQQRMAQLCELTGVKLITYGTVMGGLLSEKFLDTNLTIPFAGPRLNTPSLQKYKRMVDAWGGWNLFQGLLRTMKTISTKHGVSIPTVAVRYVLDQQGVGGSMIGVRLGLAEHIQDANAIFSLVLDEEDVNSIQEVTKKGKDLLQVIGDCGDEYRRI

SEQ ID NO: 27410 - protein, 384 aa, Arabidopsis thaliana
  peptide (1)..(384): Ceres Seq. ID no. 12331597
MPVSVHSVIATNLATTLSSNYRNVSRRRTISTSVNCSVEITEADRSVKLKNGNDSLEICRVLNGMWQTSGGWGKIDRNDAVDSMLRYADAGLSTFDMADHYGPAEDLYGIFINRVRRERPPEYLEKIKGLTKWVPPPIKMTSSYVRQNIDISRKRMDVAALDMLQFHWWDYANDGYLDALKHLTDLKEEGKIKTVALTNFDTERLQKILENGIPVVSNQVQHSIVDMRPQQRMAQLCELTGVKLITYGTVMGGLLSEKFLDTNLTIPFAGPRLNTPSLQKYKRMVDAWGGWNLFQGLLRTMKTISTKHGVSIPTVAVRYVLDQQGVGGSMIGVRLGLAEHIQDANAIFSLVLDEEDVNSIQEVTKKGKDLLQVIGDCGDEYRRI

SEQ ID NO: 27411 - protein, 320 aa, Arabidopsis thaliana
  peptide (1)..(320): Ceres Seq. ID no. 12331598
MWQTSGGWGKIDRNDAVDSMLRYADAGLSTFDMADHYGPAEDLYGIFINRVRRERPPEYLEKIKGLTKWVPPPIKMTSSYVRQNIDISRKRMDVAALDMLQFHWWDYANDGYLDALKHLTDLKEEGKIKTVALTNFDTERLQKILENGIPVVSNQVQHSIVDMRPQQRMAQLCELTGVKLITYGTVMGGLLSEKFLDTNLTIPFAGPRLNTPSLQKYKRMVDAWGGWNLFQGLLRTMKTISTKHGVSIPTVAVRYVLDQQGVGGSMIGVRLGLAEHIQDANAIFSLVLDEEDVNSIQEVTKKGKDLLQVIGDCGDEYRRI

SEQ ID NO: 27412 - DNA, 1189 bp, Arabidopsis thaliana
  misc_feature (1)..(1189): Ceres Seq. ID no. 13489927
  misc_feature (1)..(1189): Ortholog of  Ceres SEQ ID NO 14306479 as cited in SEQ ID NO 53033
acaatcccaccattaaaaaagaagaacccaagatcgactcttacttcgaatctctctcaactttcttcctcagcttacgggaacttccacacatatacatccacaagaacccatatcgaagattcatcctacatatatttacatggatcagtactcatcctctttggtcgatacttcattagatctcactattggcgttactcgtatgcgagttgaagaagatccaccgacaagtgctttggtggaagaattaaaccgagttagtgctgagaacaagaagctctcggagatgctaaccttgatgtgtgacaactacaacgtcttgaggaagcaacttatggaatatgttaacaagagcaacataaccgagagggatcaaatcagccctcccaagaaacgcaaatccccggcgagagaggacgcattcagctgcgcggttattggcggagtgtcggagagtagctcaacggatcaagatgagtatttgtgtaagaagcagagagaagagactgtcgtgaaggagaaagtctcaagggtctattacaagaccgaagcttctgacactaccctcgttgtgaaagatgggtatcaatggaggaaatatggacagaaagtgactagagacaatccatctccaagagcttacttcaaatgtgcttgtgctccaagctgttctgtcaaaaagaaggttcagagaagtgtggaggatcagtccgtgttagttgcaacttatgagggtgaacacaaccatccaatgccatcgcagatcgattcaaacaatggcttaaaccgccacatctctcatggtggttcagcttcaacacccgttgcagcaaacagaagaagtagcttgactgtgccggtgactaccgtagatatgattgaatcgaagaaagtgacgagcccaacgtcaagaatcgattttccccaagttcagaaacttttggtggagcaaatggcttcttccttaaccaaagatcctaactttacagcagctttagcagcagctgttaccggaaaattgtatcaacagaatcataccgagaaatagtttagcttcaaattccgttagagtttttagatttgaatttgtcatgagtaagagaaggagagtagattataatccattgtgatactgaaaatgtaacatgtaatcgtttttcatacaatctccaatacattcggcttt

SEQ ID NO: 27413 - protein, 302 aa, Arabidopsis thaliana
  peptide (1)..(302): Ceres Seq. ID no. 13489928
MDQYSSSLVDTSLDLTIGVTRMRVEEDPPTSALVEELNRVSAENKKLSEMLTLMCDNYNVLRKQLMEYVNKSNITERDQISPPKKRKSPAREDAFSCAVIGGVSESSSTDQDEYLCKKQREETVVKEKVSRVYYKTEASDTTLVVKDGYQWRKYGQKVTRDNPSPRAYFKCACAPSCSVKKKVQRSVEDQSVLVATYEGEHNHPMPSQIDSNNGLNRHISHGGSASTPVAANRRSSLTVPVTTVDMIESKKVTSPTSRIDFPQVQKLLVEQMASSLTKDPNFTAALAAAVTGKLYQQNHTEK

SEQ ID NO: 27414 - protein, 281 aa, Arabidopsis thaliana
  peptide (1)..(281): Ceres Seq. ID no. 13489929
MRVEEDPPTSALVEELNRVSAENKKLSEMLTLMCDNYNVLRKQLMEYVNKSNITERDQISPPKKRKSPAREDAFSCAVIGGVSESSSTDQDEYLCKKQREETVVKEKVSRVYYKTEASDTTLVVKDGYQWRKYGQKVTRDNPSPRAYFKCACAPSCSVKKKVQRSVEDQSVLVATYEGEHNHPMPSQIDSNNGLNRHISHGGSASTPVAANRRSSLTVPVTTVDMIESKKVTSPTSRIDFPQVQKLLVEQMASSLTKDPNFTAALAAAVTGKLYQQNHTEK

SEQ ID NO: 27415 - protein, 253 aa, Arabidopsis thaliana
  peptide (1)..(253): Ceres Seq. ID no. 13489930
MLTLMCDNYNVLRKQLMEYVNKSNITERDQISPPKKRKSPAREDAFSCAVIGGVSESSSTDQDEYLCKKQREETVVKEKVSRVYYKTEASDTTLVVKDGYQWRKYGQKVTRDNPSPRAYFKCACAPSCSVKKKVQRSVEDQSVLVATYEGEHNHPMPSQIDSNNGLNRHISHGGSASTPVAANRRSSLTVPVTTVDMIESKKVTSPTSRIDFPQVQKLLVEQMASSLTKDPNFTAALAAAVTGKLYQQNHTEK

SEQ ID NO: 27416 - DNA, 996 bp, Arabidopsis thaliana
  misc_feature (1)..(996): Ceres Seq. ID no. 12421702
  misc_feature (1)..(996): Ortholog of  Ceres SEQ ID NO 12557497 as cited in SEQ ID NO 43
  misc_feature (1)..(996): Ortholog of  Ceres SEQ ID NO 15177850 as cited in SEQ ID NO 51765
  misc_feature (1)..(996): Ortholog of  Ceres SEQ ID NO 12635723 as cited in SEQ ID NO 0
aaaaaaaactatatgttataacattggaatcatcagtctctaagcagtatcacaccaactcaatatggctaccaccactgcagcagcagcctcaggtatttttgggatccggattcaagatcctagacctggaaccggtagggtccaagcccggttcgggttcagtttcggaaaaaagaaaccggctccaccgccaaagaaatcaaggcaggtccaagacgatggagacagactagtttggttccccggcgcaaacccgccggaatggttggacggatcgatgatcggagaccgtggatttgatccgtttggtttaggtaaaaccggctgagtatcttcagtacgatttcgatggacttgaccaaaaccttgccaagaacgtggcgggtgacatcatcgggatcatccaagaatcttcggagatcaaaccgacgccgtttcagccgtacactgaagtctttgggatccaacggttcagagaatgtgagctgatccatggaaggtgggccatgcttggcactctaggcgccatcgccgtagaggctcttacaggaattgcatggcaagacgccggaaaggtggaattggtggaaggatcatcgtatttgggacaaccattgccgttctcgttgacgacgttgatatggatagaggtgctagtggtcggatacattgagttccaacgtaactctgaactggatccagagaaacggatttacccgggtgggtattttgacccgttgggactcgcggctgatccagagaagttggatactttgaagctggctgagataaagcactctcgtctcgctatggtcgcatttctcatctttgctcttcaggcggcctttaccggcaaaggccctgtcagcttccttgccacctttaacaattagttaatgaacctttctatctttattttatcaaaataaaattatacttcaaaaactgtataatgcatgttacgctatacttataaagaagtcttttattttt

SEQ ID NO: 27417 - protein, 128 aa, Arabidopsis thaliana
  peptide (1)..(128): Ceres Seq. ID no. 12421703
MLGTLGAIAVEALTGIAWQDAGKVELVEGSSYLGQPLPFSLTTLIWIEVLVVGYIEFQRNSELDPEKRIYPGGYFDPLGLAADPEKLDTLKLAEIKHSRLAMVAFLIFALQAAFTGKGPVSFLATFNN

SEQ ID NO: 27418 - protein, 88 aa, Arabidopsis thaliana
  peptide (1)..(88): Ceres Seq. ID no. 12421704
MATTTAAAASGIFGIRIQDPRPGTGRVQARFGFSFGKKKPAPPPKKSRQVQDDGDRLVWFPGANPPEWLDGSMIGDRGFDPFGLGKTG

SEQ ID NO: 27419 - protein, 77 aa, Arabidopsis thaliana
  peptide (1)..(77): Ceres Seq. ID no. 12421705
KKLYVITLESSVSKQYHTNSIWLPPLQQQPQVFLGSGFKILDLEPVGSKPGSGSVSEKRNRLHRQRNQGRSKTMETD

SEQ ID NO: 27420 - DNA, 2019 bp, Arabidopsis thaliana
  misc_feature (1)..(2019): Ceres Seq. ID no. 13491461
  misc_feature (1)..(2019): Ortholog of  Ceres SEQ ID NO 13594037 as cited in SEQ ID NO 55666
  misc_feature (1)..(2019): Ortholog of  Ceres SEQ ID NO 13657707 as cited in SEQ ID NO 66407
aaaatcaaaagagaactaaaccaagaaacaaaatgggatacgaaaggctcggaccatccggagcaactggttcggtcaccacctccactactacagctccaatccttaaccaagtctccacgtcagagcaaccggagaacaacaaccgaagaagcaaaaagaagcttgtcgtatcatcaatcgtcttagccatctcacttatcctcgccgccgcgatcttcgccggagtcagatcacgtctcaagttaaaccaatcagtcccaggcctagctcgtaaaccgagtcaagcaatctctaaagcttgtgagttaactcgtttccccgagttatgcgttgactcactcatggactttcccggctcactcgccgcttcctcctctaaagatctcatccacgtgactgtgaacatgacgctccaccacttcagccacgctctctactcctctgcttccctctccttcgtcgacatgccgccacgtgctcgctcagcttacgactcttgcgtcgagctacttgacgattccgttgacgcgctatcacgcgctctttcctccgtcgtatcctcctccgctaagccgcaagatgttacaacgtggcttagcgcggctttaacaaaccatgacacgtgtactgaaggattcgacggcgtcgacgacggtggagtgaaggatcatatgacggcggcgttacagaatctttctgagcttgttagtaactgtcttgctatattctcggcgagtcacgacggtgacgatttcgccggagttccaatacagaacaggaggctgctgggagtggaggaacgagaagagaaattcccgagatggatgagaccaaaagaacgcgagatactggaaatgccggtatctcagatacaagctgatattatcgtatcgaaagacggtaacggcacgtgcaaaactatatcggaagctatcaagaaagctcctcagaacagtactcgccggataattatctacgtcaaggccggaagatatgaagagaacaacctcaaggtcggtaggaaaaaaattaatttgatgttcgttggagatggcaagggtaaaactgttatttcgggaggcaaaagtatatttgacaacatcactactttccacacggcgtcatttgctgcgaccggagctggatttattgcaagggacatcacattcgaaaactgggccggtccagcgaagcaccaagccgtggctctccgcatcggagctgaccacgcagtgatctaccgatgcaatataatcggttaccaagacacactctacgtccattcaaaccgccaattctttcgtgaatgcgatatctacggtacagtcgattttatctttggtaacgcagccgtcgtactacaaaactgtagcatctacgcacggaagccaatggattttcagaaaaatacaatcacggctcaaaacagaaaagatccgaaccaaaacaccggaatatcaatacatgcgtctagggttcttgcagcatccgatctccaagcgacaaacggtagtacacagacgtatctaggccgaccttggaagctattctctaggacagtgtatatgatgtcgtatatcggtggtcatgtacacacgagaggttggctcgagtggaacacaacatttgctttagatactttgtattatggagagtatttgaacagtggacctgggtcgggtctcgggcaacgtgtgagctggccgggttatcgggtcatcaattcgacggccgaggcaaaccggttcactgtggcagaatttatatacggttcctcgtggttgccatcgaccggagtttcgttcttggccggattaagcatataggtagagaaaaaattgaaatgcttatttttccgatgaattgtttcattcttacggtccttatattaatggacatatcagtattccaatatatatgagtatattttaacttttaattgtaatgtctccactctccagaggtattatttaataatagatgaacactcgaggataattttcccttgttttcttg

SEQ ID NO: 27421 - protein, 608 aa, Arabidopsis thaliana
  peptide (1)..(608): Ceres Seq. ID no. 13491462
NQKRTKPRNKMGYERLGPSGATGSVTTSTTTAPILNQVSTSEQPENNNRRSKKKLVVSSIVLAISLILAAAIFAGVRSRLKLNQSVPGLARKPSQAISKACELTRFPELCVDSLMDFPGSLAASSSKDLIHVTVNMTLHHFSHALYSSASLSFVDMPPRARSAYDSCVELLDDSVDALSRALSSVVSSSAKPQDVTTWLSAALTNHDTCTEGFDGVDDGGVKDHMTAALQNLSELVSNCLAIFSASHDGDDFAGVPIQNRRLLGVEEREEKFPRWMRPKEREILEMPVSQIQADIIVSKDGNGTCKTISEAIKKAPQNSTRRIIIYVKAGRYEENNLKVGRKKINLMFVGDGKGKTVISGGKSIFDNITTFHTASFAATGAGFIARDITFENWAGPAKHQAVALRIGADHAVIYRCNIIGYQDTLYVHSNRQFFRECDIYGTVDFIFGNAAVVLQNCSIYARKPMDFQKNTITAQNRKDPNQNTGISIHASRVLAASDLQATNGSTQTYLGRPWKLFSRTVYMMSYIGGHVHTRGWLEWNTTFALDTLYYGEYLNSGPGSGLGQRVSWPGYRVINSTAEANRFTVAEFIYGSSWLPSTGVSFLAGLSI

SEQ ID NO: 27422 - protein, 598 aa, Arabidopsis thaliana
  peptide (1)..(598): Ceres Seq. ID no. 13491463
MGYERLGPSGATGSVTTSTTTAPILNQVSTSEQPENNNRRSKKKLVVSSIVLAISLILAAAIFAGVRSRLKLNQSVPGLARKPSQAISKACELTRFPELCVDSLMDFPGSLAASSSKDLIHVTVNMTLHHFSHALYSSASLSFVDMPPRARSAYDSCVELLDDSVDALSRALSSVVSSSAKPQDVTTWLSAALTNHDTCTEGFDGVDDGGVKDHMTAALQNLSELVSNCLAIFSASHDGDDFAGVPIQNRRLLGVEEREEKFPRWMRPKEREILEMPVSQIQADIIVSKDGNGTCKTISEAIKKAPQNSTRRIIIYVKAGRYEENNLKVGRKKINLMFVGDGKGKTVISGGKSIFDNITTFHTASFAATGAGFIARDITFENWAGPAKHQAVALRIGADHAVIYRCNIIGYQDTLYVHSNRQFFRECDIYGTVDFIFGNAAVVLQNCSIYARKPMDFQKNTITAQNRKDPNQNTGISIHASRVLAASDLQATNGSTQTYLGRPWKLFSRTVYMMSYIGGHVHTRGWLEWNTTFALDTLYYGEYLNSGPGSGLGQRVSWPGYRVINSTAEANRFTVAEFIYGSSWLPSTGVSFLAGLSI

SEQ ID NO: 27423 - protein, 494 aa, Arabidopsis thaliana
  peptide (1)..(494): Ceres Seq. ID no. 13491464
MDFPGSLAASSSKDLIHVTVNMTLHHFSHALYSSASLSFVDMPPRARSAYDSCVELLDDSVDALSRALSSVVSSSAKPQDVTTWLSAALTNHDTCTEGFDGVDDGGVKDHMTAALQNLSELVSNCLAIFSASHDGDDFAGVPIQNRRLLGVEEREEKFPRWMRPKEREILEMPVSQIQADIIVSKDGNGTCKTISEAIKKAPQNSTRRIIIYVKAGRYEENNLKVGRKKINLMFVGDGKGKTVISGGKSIFDNITTFHTASFAATGAGFIARDITFENWAGPAKHQAVALRIGADHAVIYRCNIIGYQDTLYVHSNRQFFRECDIYGTVDFIFGNAAVVLQNCSIYARKPMDFQKNTITAQNRKDPNQNTGISIHASRVLAASDLQATNGSTQTYLGRPWKLFSRTVYMMSYIGGHVHTRGWLEWNTTFALDTLYYGEYLNSGPGSGLGQRVSWPGYRVINSTAEANRFTVAEFIYGSSWLPSTGVSFLAGLSI

SEQ ID NO: 27424 - DNA, 1261 bp, Arabidopsis thaliana
  misc_feature (1)..(1261): Ceres Seq. ID no. 13493945
  misc_feature (1)..(1261): Ortholog of  Ceres SEQ ID NO 14306439 as cited in SEQ ID NO 53628
  misc_feature (1)..(1261): Ortholog of  Ceres SEQ ID NO 12611235 as cited in SEQ ID NO 56101
  misc_feature (1)..(1261): Ortholog of  Ceres SEQ ID NO 15226202 as cited in SEQ ID NO 65001
  misc_feature (1)..(1261): Ortholog of  Ceres SEQ ID NO 15177896 as cited in SEQ ID NO 0
aataacaagaagtgagtctccggtctgaaactaattaaggagacggcaagagaaacaagacatacgtttgctgtcccacgttgatcttgttgtttactctctctctctcctccatcggcgacgaccaccggagatcagcgtcaccgtaccaaaacatcatttaccttcttttagatttgttgttttttaatcagttgaatcggaataaaatatcgcatcagagatgagtaacgagcttctcaccatcgatcctgtcgaccttcaattcccttttgaattgaagaagcagatctcttgttctctctatttgggtaacaagaccgataattatgtcgccttcaaggttaagacgacgaatccaaagaagtactgcgttaggcctaatactggtgttgttcatcccagatcctcttctgaagttttagtgaccatgcaagctcaaaaggaagctcctgctgatctgcagtgtaaagataagttcttgcttcaatgtgtagtcgctagtcccggagccacccccaaggatgttacacatgagatgtttagcaaagaggcagggcatcgagttgaagagactaaattgagagttgtctatgttgctccaccacgaccaccatcaccggttcgagaaggatctgaagagggctcttcaccgagggcttctgtctctgataatgggaatgcttctgattttactgctgctccaagatttagcgcagacagggttgatgctcaggataattcatctgaggcaagagctctggtcacaaaactcaccgaggaaaagaactctgcggttcaactgaacaacaggcttcaacaagaattggaccagttgaggcgcgaaagcaagagaagtaagagtggtggaatccctttcatgtacgttcttctggtcggcctaatcggtttaatcctgggatacattatgaagaggacatgatcagatcccttcaacaaaatactccaaaagtctcaaagtgcttaaaaaagcattgaaaaggaaagaaatcaaattgtgtgaggaggacaatcttctcttctgccttatcgtcgtcatgcacctttggttaaaatctgaacttagtgcgttagaggatttgtattacggtttccataagacttagaattgtcacaaaatctcctttttcctctctcttattacaactttgtgtagtcttaaacacttttgtttcttcgtcttctctcatcttaactttttctctccatctctcatagaataaagggatgaaacatgtcg

SEQ ID NO: 27425 - protein, 239 aa, Arabidopsis thaliana
  peptide (1)..(239): Ceres Seq. ID no. 13493946
MSNELLTIDPVDLQFPFELKKQISCSLYLGNKTDNYVAFKVKTTNPKKYCVRPNTGVVHPRSSSEVLVTMQAQKEAPADLQCKDKFLLQCVVASPGATPKDVTHEMFSKEAGHRVEETKLRVVYVAPPRPPSPVREGSEEGSSPRASVSDNGNASDFTAAPRFSADRVDAQDNSSEARALVTKLTEEKNSAVQLNNRLQQELDQLRRESKRSKSGGIPFMYVLLVGLIGLILGYIMKRT

SEQ ID NO: 27426 - protein, 170 aa, Arabidopsis thaliana
  peptide (1)..(170): Ceres Seq. ID no. 13493947
MQAQKEAPADLQCKDKFLLQCVVASPGATPKDVTHEMFSKEAGHRVEETKLRVVYVAPPRPPSPVREGSEEGSSPRASVSDNGNASDFTAAPRFSADRVDAQDNSSEARALVTKLTEEKNSAVQLNNRLQQELDQLRRESKRSKSGGIPFMYVLLVGLIGLILGYIMKRT

SEQ ID NO: 27427 - protein, 134 aa, Arabidopsis thaliana
  peptide (1)..(134): Ceres Seq. ID no. 13493948
MFSKEAGHRVEETKLRVVYVAPPRPPSPVREGSEEGSSPRASVSDNGNASDFTAAPRFSADRVDAQDNSSEARALVTKLTEEKNSAVQLNNRLQQELDQLRRESKRSKSGGIPFMYVLLVGLIGLILGYIMKRT

SEQ ID NO: 27428 - DNA, 1281 bp, Arabidopsis thaliana
  misc_feature (1)..(1281): Ceres Seq. ID no. 12332527
  misc_feature (1)..(1281): Ortholog of  Ceres SEQ ID NO 15176611 as cited in SEQ ID NO 52869
  misc_feature (1)..(1281): Ortholog of  Ceres SEQ ID NO 14307408 as cited in SEQ ID NO 59419
  misc_feature (1)..(1281): Ortholog of  Ceres SEQ ID NO 12617729 as cited in SEQ ID NO 65352
agaatcgtaccaattttgaaaaccctaaatctcaatcctcgacgctctctactaagaaactcaatcttactttctctgtaattcgtagcttccgaaatcttttctcaagaatctcataaccatggcgaatcctgctccgaatctagaatgtcgtatgtacgaatcgagataccctgatgtagacatggcggtgatgattcaggtgaagaccatcgctgacatgggagcttacgtatctctccttgaatacaacaacatcgaaggaatgatcctgttctccgagctctctcgccgtcggattcgtagtatcagtagcttaatcaaggtcggtcgtaccgagcctgttatggtccttcgtgtcgatagagagagaggttacattgatctcagtaaacgtagggttagtgatgaggacaaagaggcttgtgaggagaggtataataagagcaagcttgttcactctatcatgcgtcatgttgctgagactgttggtgtcgatttggaggagctatacgtaaacatcggttggccattgtataagaagcatggacatgcttttgaggctttcaaaattgttgtcactgatcctgattcagttttcgatgctcttacccgagaagttaaagaaactggacctgatggtgtggaggtgaccaaagttgtcccggctgtgtctgaagaattgaaagatgcatttttgaaggacattaggaggagaatgacaccacagccaatgaagattcgtgctgatattgaattgaagtgttttcagtttgatggagttctccacatcaaggaagccatgaagaaggcagaggctgtaggtactgatgattgtccagtcaaaatcaagctcgttgctccaccactttatgtactcacaactcacacccattacaaggaaaaaggaatagtgactctgaataaagcaattgaagcatgcattactgcaattgaggaacacaagggtaaacttgtcgttaaagaaggtgctcgtgcggtgagtgagcgtgatgacaaattgcttgctgagcacatggctaagcttagaatggataatgaagaaatgagtggtgatgagggaagcgaagatgaagaagaagacactggaatgggagaagtcgatatcgatggaggtagcgggataattgaatgaacaaaagcaaaagcattgtaactgctgtttctgctttagatcctacaattttgtttccctttgagcaaaaacagtattttttgtttgaccccaaacatggttagtagtacaagcatctcttattc

SEQ ID NO: 27429 - protein, 344 aa, Arabidopsis thaliana
  peptide (1)..(344): Ceres Seq. ID no. 12332528
MANPAPNLECRMYESRYPDVDMAVMIQVKTIADMGAYVSLLEYNNIEGMILFSELSRRRIRSISSLIKVGRTEPVMVLRVDRERGYIDLSKRRVSDEDKEACEERYNKSKLVHSIMRHVAETVGVDLEELYVNIGWPLYKKHGHAFEAFKIVVTDPDSVFDALTREVKETGPDGVEVTKVVPAVSEELKDAFLKDIRRRMTPQPMKIRADIELKCFQFDGVLHIKEAMKKAEAVGTDDCPVKIKLVAPPLYVLTTHTHYKEKGIVTLNKAIEACITAIEEHKGKLVVKEGARAVSERDDKLLAEHMAKLRMDNEEMSGDEGSEDEEEDTGMGEVDIDGGSGIIE

SEQ ID NO: 27430 - protein, 333 aa, Arabidopsis thaliana
  peptide (1)..(333): Ceres Seq. ID no. 12332529
MYESRYPDVDMAVMIQVKTIADMGAYVSLLEYNNIEGMILFSELSRRRIRSISSLIKVGRTEPVMVLRVDRERGYIDLSKRRVSDEDKEACEERYNKSKLVHSIMRHVAETVGVDLEELYVNIGWPLYKKHGHAFEAFKIVVTDPDSVFDALTREVKETGPDGVEVTKVVPAVSEELKDAFLKDIRRRMTPQPMKIRADIELKCFQFDGVLHIKEAMKKAEAVGTDDCPVKIKLVAPPLYVLTTHTHYKEKGIVTLNKAIEACITAIEEHKGKLVVKEGARAVSERDDKLLAEHMAKLRMDNEEMSGDEGSEDEEEDTGMGEVDIDGGSGIIE

SEQ ID NO: 27431 - protein, 323 aa, Arabidopsis thaliana
  peptide (1)..(323): Ceres Seq. ID no. 12332530
MAVMIQVKTIADMGAYVSLLEYNNIEGMILFSELSRRRIRSISSLIKVGRTEPVMVLRVDRERGYIDLSKRRVSDEDKEACEERYNKSKLVHSIMRHVAETVGVDLEELYVNIGWPLYKKHGHAFEAFKIVVTDPDSVFDALTREVKETGPDGVEVTKVVPAVSEELKDAFLKDIRRRMTPQPMKIRADIELKCFQFDGVLHIKEAMKKAEAVGTDDCPVKIKLVAPPLYVLTTHTHYKEKGIVTLNKAIEACITAIEEHKGKLVVKEGARAVSERDDKLLAEHMAKLRMDNEEMSGDEGSEDEEEDTGMGEVDIDGGSGIIE

SEQ ID NO: 27432 - DNA, 593 bp, Arabidopsis thaliana
  misc_feature (1)..(593): Ceres Seq. ID no. 12331398
  misc_feature (1)..(593): Ortholog of  Ceres SEQ ID NO 13661491 as cited in SEQ ID NO 61696
cgaaaaaatcacgaagacgacgagtgaagaagaagaagaagcaatggggagaaagaagggattaccggagttcgaagagtcggcgccggatggctttgatccggaaaatccatacaaggatccggtggcgatggttgaaatgagagagcacatcgttcgagagaaatggatccaaatcgagaaggctaagatcttgcgtgagaaggtcaaatggtgttaccgcgtcgaaggagtcaatcactatcagaaatgtcgtcatcttgttcagcagtatctcgattccactcgcggcgtcggttggggaaaggatcatcgtcctatttcgctccacggtcccaaaccggaggctgttgaagctgaataatgttgtgtgcctcattgagatgtctgaggttttgatatgggacatagaatggaatcatttcacaagctaatggctccctgatatcttccaaactctgtagatttctcttgttcttagaaacttgtcggtctttggaccaacggattcatgtaattgagctttgagtattgttacactccacagtatcagtttctgatgatcaaataagtcccattttcattctcctgtc

SEQ ID NO: 27433 - protein, 120 aa, Arabidopsis thaliana
  peptide (1)..(120): Ceres Seq. ID no. 12331399
EKITKTTSEEEEEAMGRKKGLPEFEESAPDGFDPENPYKDPVAMVEMREHIVREKWIQIEKAKILREKVKWCYRVEGVNHYQKCRHLVQQYLDSTRGVGWGKDHRPISLHGPKPEAVEAE

SEQ ID NO: 27434 - protein, 106 aa, Arabidopsis thaliana
  peptide (1)..(106): Ceres Seq. ID no. 12331400
MGRKKGLPEFEESAPDGFDPENPYKDPVAMVEMREHIVREKWIQIEKAKILREKVKWCYRVEGVNHYQKCRHLVQQYLDSTRGVGWGKDHRPISLHGPKPEAVEAE

SEQ ID NO: 27435 - protein, 77 aa, Arabidopsis thaliana
  peptide (1)..(77): Ceres Seq. ID no. 12331401
MVEMREHIVREKWIQIEKAKILREKVKWCYRVEGVNHYQKCRHLVQQYLDSTRGVGWGKDHRPISLHGPKPEAVEAE

SEQ ID NO: 27436 - DNA, 1289 bp, Arabidopsis thaliana
  misc_feature (1)..(1289): Ceres Seq. ID no. 13491726
  misc_feature (1)..(1289): Ortholog of  Ceres SEQ ID NO 14303440 as cited in SEQ ID NO 59496
atgcaaaaataaacatagtaacaatactttaaactatttacaccactttaatcttattctccactctttgaacgtaatggagaagaaccatagtagtggagagtgggagaagatgaagaacgagatcaacgagctaatgatagaaggaagagactatgcacaccagtttggatcagcttcatctcaagaaacacgtgaacatttagccaaaaagattcttcaatcttaccacaagtctctcaccatcatgaactactccggcgaacttgaccaagtttctcagggtggaggaagccccaagagcgatgattccgatcaagaaccacttgtcatcaagagttcgaagaagtcaatgccaaggtggagttcaaaagtcagaattgcccctggagctggtgttgatagaacgctggacgatggattcagttggagaaagtacggccagaaggatattctcggagccaaatttccaagaggatactatagatgcacgtatagaaagtctcaaggatgtgaagccactaaacaagtccaaagatctgatgaaaatcagatgctccttgagatcagttaccgaggaatacattcttgctctcaagctgcaaatgtcggtacaacaatgccgatacaaaacctcgaaccgaaccagacccaagaacacggaaatcttgacatggtaaaggaaagtgtagacaactacaatcaccaagcacatttgcatcacaaccttcactatccattgtcatctaccccaaatctagagaataacaatgcctatatgcttcaaatgcgagatcaaaacatcgaatattttggatctacgagcttctctagtgatctaggaactagtatcaactacaattttccagcatctggctcggcttctcactcagcatcaaactctccgtccaccgtccctttggaatccccgtttgaaagctatgatccaaatcatccatatggaggatttggtgggttctattcttagttatctacttaagggagggacggaactttttacatgacctcttgattaaagagagagttttcataatagctaatcaatttcctattcaaatatccgagttttttttctaatcatgtttatcaattgtcttattacagaaggcttattttcaggtctatgttgaaataaatggatttgtactcgtaggtatgatccttgttatctagcttatagtccatggtttttactttttgccttatgttgttgtaacacattcgagttcttatattgcaaatttgagtcttcttttagctatacaatt

SEQ ID NO: 27437 - protein, 328 aa, Arabidopsis thaliana
  peptide (1)..(328): Ceres Seq. ID no. 13491727
CKNKHSNNTLNYLHHFNLILHSLNVMEKNHSSGEWEKMKNEINELMIEGRDYAHQFGSASSQETREHLAKKILQSYHKSLTIMNYSGELDQVSQGGGSPKSDDSDQEPLVIKSSKKSMPRWSSKVRIAPGAGVDRTLDDGFSWRKYGQKDILGAKFPRGYYRCTYRKSQGCEATKQVQRSDENQMLLEISYRGIHSCSQAANVGTTMPIQNLEPNQTQEHGNLDMVKESVDNYNHQAHLHHNLHYPLSSTPNLENNNAYMLQMRDQNIEYFGSTSFSSDLGTSINYNFPASGSASHSASNSPSTVPLESPFESYDPNHPYGGFGGFYS

SEQ ID NO: 27438 - protein, 303 aa, Arabidopsis thaliana
  peptide (1)..(303): Ceres Seq. ID no. 13491728
MEKNHSSGEWEKMKNEINELMIEGRDYAHQFGSASSQETREHLAKKILQSYHKSLTIMNYSGELDQVSQGGGSPKSDDSDQEPLVIKSSKKSMPRWSSKVRIAPGAGVDRTLDDGFSWRKYGQKDILGAKFPRGYYRCTYRKSQGCEATKQVQRSDENQMLLEISYRGIHSCSQAANVGTTMPIQNLEPNQTQEHGNLDMVKESVDNYNHQAHLHHNLHYPLSSTPNLENNNAYMLQMRDQNIEYFGSTSFSSDLGTSINYNFPASGSASHSASNSPSTVPLESPFESYDPNHPYGGFGGFYS

SEQ ID NO: 27439 - protein, 291 aa, Arabidopsis thaliana
  peptide (1)..(291): Ceres Seq. ID no. 13491729
MKNEINELMIEGRDYAHQFGSASSQETREHLAKKILQSYHKSLTIMNYSGELDQVSQGGGSPKSDDSDQEPLVIKSSKKSMPRWSSKVRIAPGAGVDRTLDDGFSWRKYGQKDILGAKFPRGYYRCTYRKSQGCEATKQVQRSDENQMLLEISYRGIHSCSQAANVGTTMPIQNLEPNQTQEHGNLDMVKESVDNYNHQAHLHHNLHYPLSSTPNLENNNAYMLQMRDQNIEYFGSTSFSSDLGTSINYNFPASGSASHSASNSPSTVPLESPFESYDPNHPYGGFGGFYS

SEQ ID NO: 27440 - DNA, 1306 bp, Arabidopsis thaliana; identical to SEQ ID NO: 25284
  misc_feature (1)..(1306): Ceres Seq. ID no. 12335581
  misc_feature (1)..(1306): Ortholog of  Ceres SEQ ID NO 14315440 as cited in SEQ ID NO 57161

SEQ ID NO: 27441 - protein, 159 aa, Arabidopsis thaliana; identical to SEQ ID NO: 25285
  peptide (1)..(159): Ceres Seq. ID no. 12335582

SEQ ID NO: 27442 - protein, 136 aa, Arabidopsis thaliana; identical to SEQ ID NO: 25286
  peptide (1)..(136): Ceres Seq. ID no. 12335583

SEQ ID NO: 27443 - protein, 128 aa, Arabidopsis thaliana; identical to SEQ ID NO: 25287
  peptide (1)..(128): Ceres Seq. ID no. 12335584

SEQ ID NO: 27444 - DNA, 749 bp, Arabidopsis thaliana
  misc_feature (1)..(749): Ceres Seq. ID no. 13487365
  misc_feature (1)..(749): Ortholog of  Ceres SEQ ID NO 13654738 as cited in SEQ ID NO 62613
actctcctttctcaattaatataagccaatcaccatcaaaatatcatttgagaactccagaaacctgcttcaatggcgatcgacaagcttccacttcttctctttctctccatactcctctgcctaaatcgccctgttcttagcgacaccgatgaagaggacattcttctcacaggaatcaacagctacagaacaacacagaatctaacaatcttaagcaagaacgaaaacgcagaatgcctagctgacgaaatcgcagaccaattcaagaacaaaccttgtaccaacgacactggctcagccacagtacctggaactgagccacagttcgcaaactaccctcagattctagcaaaatgccacttgaacgtctcagacacgagagacggctcgattatgcctgcatgtgttcctcgtttagaatcaaacctcgtcctcacaaacttcaccaagtcacaatactcaatgagtttgaacgattccaagtttacagggattggtattggtaaagaagatgattggatcgttgtagtcctcactaccaacacaccagaaggaagctattctacagctactcctacaaaacaagagtctaatggcttcacctttggtgttggtctcgttagttatttagtcattttcatgtactcttccttttgtttctttctcttttgagatatcaaatgttttgatgagttatcaaacactctttcctttagactatcaagaataaattttgttaaagattg

SEQ ID NO: 27445 - protein, 200 aa, Arabidopsis thaliana
  peptide (1)..(200): Ceres Seq. ID no. 13487366
MAIDKLPLLLFLSILLCLNRPVLSDTDEEDILLTGINSYRTTQNLTILSKNENAECLADEIADQFKNKPCTNDTGSATVPGTEPQFANYPQILAKCHLNVSDTRDGSIMPACVPRLESNLVLTNFTKSQYSMSLNDSKFTGIGIGKEDDWIVVVLTTNTPEGSYSTATPTKQESNGFTFGVGLVSYLVIFMYSSFCFFLF
